(19) United States
(12) Patent Application Publication
(10) Pub. No.: US 2020/0109395 A1
(43) Pub. Date: Apr. 9, 2020

(54) GENETIC SYSTEMS THAT DEFEND AGAINST FOREIGN DNA AND USES THEREOF

(71) Applicant: YEDA RESEARCH AND DEVELOPMENT CO. LTD., Rehovot (IL)

(72) Inventors: Rotem SOREK, Rehovot (IL); Gal OFiR, Rehovot (IL); Gil AMITAI, Rehovot (IL); Sarah MELAMED, Rehovot (IL); Shany DORON, Rehovot (IL); Azita LEAVITT, Rehovot (IL)

(73) Assignee: YEDA RESEARCH AND DEVELOPMENT CO. LTD., Rehovot (IL)

(21) Appl. No.: 16/614,370

(22) PCT Filed: May 23, 2018
(86) PCT No.: PCT/IL2018/050559

§ 371 Date: Nov. 18, 2019

Related U.S. Application Data
(60) Provisional application No. 62/586,911, filed on Nov. 16, 2017.
(60) Provisional application No. 62/512,219, filed on May 30, 2017.
(60) Provisional application No. 62/512,216, filed on May 30, 2017.

(51) Int. Cl. C12N 15/10; C07K 14/195; C12N 15/74; G16B 20/00; G16B 40/00

(52) U.S. Cl. CPC C12N 15/102; C07K 14/195; C07K 2319/00; G16B 20/00; G16B 40/00; C12N 15/74

(57) ABSTRACT

Disclosed herein are microbial defense systems, which provide cells protection against phage infection and plasmid transformation. Methods of use of these defense systems for protecting cells from phage infection and plasmid transformation are also disclosed, wherein defense systems may be used individually or in combination. In addition, disclosed herein are methods of making cells that express these defense systems.

### SEQUENCE LISTING STATEMENT

[0001] The instant application contains a “lengthy” Sequence Listing which has been submitted via CD-R in lieu of a printed paper copy, and is hereby incorporated by reference in its entirety. Said CD-R, recorded on May 15, 2018, are labeled “CRF”, “COPY 1—SEQUENCE LISTING PART,” “COPY 2—SEQUENCE LISTING PART” and “COPY 3—SEQUENCE LISTING PART,” respectively, and each contains only one identical 350,356,650 bytes file (P-573737-PC_SL.txt).

### FIELD OF DISCLOSURE

[0002] Microbial defense systems providing host cells with anti-phage resistance or resistance against plasmid transformation, or both are disclosed. Methods of identifying these systems, and using these systems for example but not limited, for producing bacterial cells comprising defense systems, for producing food products, and for gene editing, are also disclosed.

### BACKGROUND

[0003] Bacteria and archaea are often being attacked by viruses (phages), and as a result have developed multiple, sophisticated lines of active defense that can collectively be referred to as the prokaryotic “immune system”. Anti-phage defense strategies include restriction-modification (R/M) systems that target specific sequences on the invading phage, CRISPR-Cas that provides acquired immunity through memorization of past phage attacks, infection systems (Abi) that lead the cell to death or metabolic arrest upon infection, and additional systems whose mechanism of action is not yet clear such as BREX and DISARM. Different bacteria encode different sets of defense systems: CRISPR-Cas systems are found in about 40% of all sequenced bacteria, BREX appears in 10% of sequenced bacteria, and DISARM in about 1%. It has been suggested that many new, currently unknown defense systems reside in the genomes of non-model bacteria and archaea and await discovery.

[0004] Anti-phage defense systems have been found to be frequently physically clustered in bacterial and archaeal genomes such that, for example, genes encoding restriction enzymes commonly reside in the vicinity of genes encoding infection systems and other phage resistance systems. The observation that defense systems are clustered in genomic “defense islands” has led to the suggestion that genes of unknown function residing within such defense islands may also participate in anti-phage defense. Indeed, recent studies that anecdotally examined individual genes enriched next to known defense genes yielded the discovery of new systems that protect bacteria against phages.

[0005] Anti-phage defense systems are usually composed of multiple genes that work in concert to achieve defense—for example, cas1, cas2, cas3 and the cascade genes in type I CRISPR-Cas systems, and the R, M and S genes in type I restriction systems. Genes functioning within the same defense system are very frequently encoded on the same operon, and the gene order within the operon is highly conserved among distantly related organisms sharing the same system.

[0006] Some of these phage-resistance systems have been successfully adapted for biotechnological application; for example, the R/M and the CRISPR/Cas systems have been extensively used for genetic engineering purposes in general and gene therapy in particular.

[0007] A broad array of food products, commodity chemicals, and biotechnology products are manufactured industrially by large-scale bacterial fermentation of various substrates. Enormous amounts of bacteria are being cultivated each day in large fermentation vats, thus foreign nucleic acid contamination, for example phage contamination can rapidly bring fermentations to a halt and cause economic setbacks, and is therefore considered a serious threat in these industries. The dairy fermentation industry has openly acknowledged the problem of phages and has been working with academia and starter culture companies to develop defense strategies and systems to curtail the propagation and evolution of phages for decades. There remains a need to provide bacteria that can defend against nucleic acid molecules from foreign sources.

[0008] The use of defense systems, for example anti-phage may provide the necessary defense for bacteria in food, chemical, and biotechnology production. Thus, it would be advantageous to both the producers and the consumers to have bacteria resistant to nucleic acid molecules from foreign sources, for example with anti-phage, anti-conjugative element, and or anti-plasmid activity.

[0009] Disclosed herein are newly identified anti-phage defense systems, anti-conjugative element systems, and an anti-plasmid system that show strong protection against nucleic acid molecules from foreign sources. These systems could provide protection for fermentation bacteria against phages, for protection of bacteria against viruses, and may also provide biotechnological tools for use with prokaryotic and eukaryotic cells.

### SUMMARY

[0010] In one aspect, disclosed herein is a method of protecting bacteria from foreign nucleic acid invasion comprising a step of introducing into the bacteria at least one defense system (a) to (o), said at least one defense system comprising:
[0011] (a) a Defense System IV comprising at least two different polypeptide components selected from
   [0012] a HamA polypeptide comprising a pfam08878 domain or a DUF1837 domain or a combination thereof, or comprising an amino acid sequence having at least 80% identity to a sequence selected from the group referenced in Table 12 rows 2-1782 columns H and I; and
   [0013] a HamB polypeptide comprising COG1204 domain or a pfam00270 domain or a pfam00271 domain or any combination thereof, or comprising an amino acid sequence having at least 80% identity to a sequence selected from the group referenced in Table 12 rows 2-1782 columns L and M; or
[0014] (b) a Defense System Ia comprising at least two different polypeptide components selected from
   [0015] a ZorA polypeptide comprising a pfam01618 domain, or comprising an amino acid sequence having at least 80% identity to a sequence selected from the group referenced in Table 8 rows 2-1830 columns J and K;
   [0016] a ZorB polypeptide comprising a pfam13677 domain or a pfam00691 domain or a combination thereof, or comprising an amino acid sequence having at least 80% identity to a sequence selected from the group referenced in Table 8 rows 2-1830 columns N and O;
   [0017] a ZorC polypeptide comprising a pfam15611 domain, or comprising an amino acid sequence having at least 80% identity to a sequence selected from the group referenced in Table 8 rows 2-1174 columns R and S; and
   [0018] a ZorD polypeptide comprising a pfam00176 domain or a pfam00271 domain or a combination thereof, or comprising an amino acid sequence having at least 80% identity to a sequence selected from the group referenced in Table 8 rows 2-1174 columns V and W;
   [0019] or
[0020] (c) a Defense System Ib comprising a ZorE polypeptide comprising a pfam01844 domain or a COG3183 domain or a combination thereof, or comprising an amino acid sequence having at least 80% identity to a sequence selected from the group referenced in Table 8 rows 1175-1830 columns Z and AA; and at least one other polypeptide component selected from
   [0021] a ZorA polypeptide comprising a pfam01618 domain, or comprising an amino acid sequence having at least 80% identity to a sequence selected from the group referenced in Table 8 rows 2-1830 columns J and K; and
   [0022] a ZorB polypeptide comprising a pfam13677 domain or a pfam00691 domain or a combination thereof, or comprising an amino acid sequence having at least 80% identity to a sequence selected from the group referenced in Table 8 rows 2-1830 columns N and O; or
[0023] (d) a Defense System II comprising at least two different polypeptide components selected from
   [0024] a ThsA polypeptide comprising a pfam13289 domain or a pfam14519 domain or a combination thereof, or comprising an amino acid sequence having at least 80% identity to a sequence selected from the group referenced in Table 9 rows 2-2100 columns I and J; and
   [0025] a ThsB polypeptide comprising a pfam13676 domain or a pfam08937 domain or a pfam08357 domain or any combination thereof, or comprising an amino acid sequence having at least 80% identity to a sequence selected from the group referenced in Table 9 rows 2-2100 columns M and N, Q and R, U and V, Y and Z, and AC and AD; or
[0026] (e) a Defense System IIIa comprising at least two different polypeptide components selected from
   [0027] a DruA polypeptide comprising a DUF4338 domain or a pfam14236 domain or a combination thereof; or comprising an amino acid sequence having at least 80% identity to a sequence selected from the group referenced in Table 10 rows 2-123 columns J and K, or a combination thereof;
   [0028] a DruB polypeptide comprising an amino acid sequence having at least 80% identity to a sequence selected from the group referenced in Table 10 rows 2-123 columns N and O;
   [0029] a DruC polypeptide comprising an amino acid sequence having at least 80% identity to a sequence selected from the group referenced in Table 10 rows 2-123 columns R and S;
   [0030] a DruD polypeptide comprising an amino acid sequence having at least 80% identity to a sequence selected from the group referenced in Table 10 rows 2-123 columns V and W; and
   [0031] a DruE polypeptide comprising a pfam00270 domain or a pfam00271 domain or a pfam09369 domain or a DUF1998 domain or any combination thereof, or comprising an amino acid sequence having at least 80% identity to a sequence selected from the group referenced in Table 10 rows 2-1343 columns Z and AA; or
[0032] (f) a Defense System IIIb comprising at least two different polypeptide components selected from
   [0033] a DruM polypeptide comprising a pfam00145 domain or a COG0270 domain or a combination thereof, or comprising an amino acid sequence having at least 80% identity to a sequence selected from the group referenced in Table 10 rows 124-295 columns AD and AE;
   [0034] a DruF polypeptide comprising an amino acid sequence having at least 80% identity to a sequence selected from the group referenced in Table 10 rows 124-295 columns AH and AI;
   [0035] a DruG polypeptide comprising an amino acid sequence having at least 80% identity to a sequence selected from the group referenced in Table 10 rows 124-295 columns AL and AM; and
   [0036] a DruE polypeptide comprising a pfam00270 domain or a pfam00271 domain or a pfam09369 domain or a DUF1998 domain or any combination thereof, or comprising an amino acid sequence having at least 80% identity to a sequence selected from the group referenced in Table 10 rows 2-1343 column Z and AA; or
[0037] (g) a Defense System IIIc comprising at least two different polypeptide components selected from
   [0038] a DruH polypeptide comprising an amino acid sequence having at least 80% identity to a sequence selected from the group referenced in Table 10 rows 296-1343 columns AP and AQ; and
   [0039] a DruE polypeptide comprising a pfam00270 domain or a pfam00271 domain or a pfam09369 domain or a DUF1998 domain or any combination thereof, or comprising an amino acid sequence having at least 80% identity to a sequence selected from the group referenced in Table 10 rows 2-1343 columns Z and AA; or
[0040] (h) a Defense System V comprising a SduA polypeptide comprising a pfam14082 domain or a pfam01939 domain or a combination thereof, or comprising an amino acid sequence having at least 80% identity to a sequence selected from the group referenced in Table 13 rows 2-1247 columns H and I; or
[0041] (i) a Defense System VI comprising at least two different polypeptide components selected from
   [0042] a GajA polypeptide comprising a pfam13175 domain or a COG3593 domain or a combination thereof, or comprising an amino acid sequence having at least 80% identity to a sequence selected from the group referenced in Table 14 rows 2-4599 columns H and I; and
   [0043] a GajB polypeptide comprising a pfam04257 domain or a pfam00580 domain or a pfam13361 domain or any combination thereof, or comprising an amino acid sequence having at least 80% identity to a sequence selected from the group referenced in Table 14 rows 2-4599 columns L and M; or
[0044] (j) a Defense System VII comprising at least two different polypeptide components selected from
   [0045] a PtuA polypeptide comprising a pfam13304 domain or a pfam02463 domain or a combination thereof, or comprising an amino acid sequence having at least 80% identity to a sequence selected from the group referenced in Table 15 rows 2-12507 columns H and I; and
   [0046] a PtuB polypeptide comprising pfam13395 domain or a pfam 01844 domain or a combination thereof, or comprising an amino acid sequence having at least 80% identity to a sequence selected from the group referenced in Table 15 rows 2-2507 columns L and M; or
[0047] (k) a Defense System VIII comprising at least two different polypeptide components selected from
   [0048] a LmuA polypeptide comprising a pfam14130 domain or a DUF4297 domain or a combination thereof, or comprising an amino acid sequence having at least 80% identity to a sequence selected from the group referenced in Table 16 rows 2-698 columns H and I; and
   [0049] a LmuB polypeptide comprising a pfam02463 domain, or comprising an amino acid sequence having at least 80% identity to a sequence selected from the group referenced in Table 16 rows 2-698 columns L and M; or
[0050] (l) a Defense System IX comprising at least two different polypeptide components selected from
   [0051] a KwaA polypeptide comprising an amino acid sequence having at least 80% identity to a sequence selected from the group referenced in Table 17 rows 2-935 columns H and I; and
   [0052] a KwaB polypeptide comprising a pfam16162 domain or a DUF4868 domain or a combination thereof; or comprising an amino acid sequence having at least 80% identity to a sequence selected from the group referenced in Table 17 rows 2-935 columns L and M; or
[0053] (m) a Defense System Xa comprising at least two different polypeptide components selected from
   [0054] a JetA polypeptide comprising a pfam11855 domain or a DUF3375 domain or a combination thereof, or comprising an amino acid sequence having at least 80% identity to a sequence selected from the group referenced in Table 11 rows 2-2322 columns J and K;
   [0055] a JetB polypeptide comprising a pfam13835 domain or a DUF4194 domain or a combination thereof, or comprising an amino acid sequence having at least 80% identity to a sequence selected from the group referenced in Table 11 rows 2-2322 columns N and O;
   [0056] a JetC polypeptide comprising a pfam13555 domain or a pfam13558 domain or a COG4913 domain or any combination thereof; or comprising an amino acid sequence having at least 80% identity to a sequence selected from the group referenced in Table 11 rows 2-2322 columns R and S; and
   [0057] a JetD polypeptide comprising a pfam11795 domain or a DUF3322 domain or a pfam09983 domain or a DUF2220 domain or a COG4924 domain or any combination thereof, or comprising an amino acid sequence having at least 80% identity to a sequence selected from the group referenced in Table 11 rows 2-2322 columns V and W; or
[0058] (n) a Defense System Xb comprising at least two different polypeptide components selected from
   [0059] a JetAⁱⁱ polypeptide comprising a pfam09660 domain or a DUF2397 domain or a combination thereof, or comprising an amino acid sequence having at least 80% identity to a sequence selected from the group referenced in Table 11 rows 2323-2844 columns J and K;
   [0060] a JetBⁱⁱ polypeptide comprising a pfam09661 domain or a DUF2398 domain or a combination thereof, or comprising an amino acid sequence having at least 80% identity to a sequence selected from the group referenced in Table 11 rows 2323-2844 columns N and O;
   [0061] a JetCⁱⁱ polypeptide comprising a pfam13558 domain, or comprising an amino acid sequence having at least 80% identity to a sequence selected from the group referenced in Table 11 rows 2323-2844 columns R and S; and
   [0062] a JetDⁱⁱ polypeptide comprising a pfam11796 domain or a DUF3323 domain or a pfam09664 domain or a DUF2399 domain or a combination thereof, or comprising an amino acid sequence having at least 80% identity to a sequence selected from the group referenced in Table 11 rows 2323-2844 columns V and W; or
[0063] (o) a Defense System Xc comprising at least two different polypeptide components selected from
   [0064] a JetAⁱⁱⁱ polypeptide comprising an amino acid sequence having at least 80% identity to a sequence selected from the group referenced in Table 11 rows 2845-3174 columns and K;
   [0065] a JetBⁱⁱⁱ polypeptide comprising an amino acid sequence having at least 80% identity to a sequence selected from the group referenced in Table 11 rows 2845-3174 columns N and O;
   [0066] a JetCⁱⁱⁱ polypeptide comprising a COG1196 domain or comprising an amino acid sequence having at least 80% identity to a sequence selected from the group referenced in Table 11 rows 2845-3174 columns R and S; and
   [0067] a JetDⁱⁱⁱ polypeptide comprising a pfam09983 domain or a pfam09664 domain or a DUF2220 or a DUF2399 domain or any combination thereof, or comprising an amino acid sequence having at least 80% identity to a sequence selected from the group referenced in Table 11 rows 2845-3174 columns V and W; or
[0068] (p) any combination of Defense Systems Ia-Xc (a)-(o);
[0069] wherein the introduction of said at least one defense system results in the bacteria being protected from foreign DNA invasion.

[0070] In a related aspect, methods of protecting bacteria from foreign nucleic acid invasion comprises protecting from phage infection, protection from plasmid transformation, or protecting from entry of conjugative elements, or any combination thereof. In another related aspect, a phage comprises a single stranded DNA (ssDNA) phage, a double stranded DNA (dsDNA) phage, a single stranded RNA (ssRNA) phage, a double stranded RNA (dsRNA) phage, a lytic phage, or a lysogenic phage, or a combination thereof. In another related aspect, at least one defense system comprises
[0071] (a) a Defense System IV comprising the HamA polypeptide and the HamB polypeptide; or
[0072] (b) a Defense System Ia comprising the ZorA polypeptide, the ZorB polypeptide, the ZorC polypeptide, and the ZorD polypeptide; or
[0073] (c) a Defense System Ib comprising the ZorA polypeptide, the ZorB polypeptide, and the ZorE polypeptide; or
[0074] (d) a Defense System II comprising the ThsA polypeptide, and the ThsB polypeptide; or
[0075] (e) a Defense System IIIa comprising the DruA polypeptide, the DruB polypeptide, the DruC polypeptide, the DruD polypeptide, and the DruE polypeptide; or
[0076] (f) a Defense System IIIb comprising the DruM polypeptide, the DruF polypeptide, the DruG polypeptide, and the DruE polypeptide; or
[0077] (g) a Defense System IIIc comprising the DruH polypeptide and the DruE polypeptide; or
[0078] (h) a Defense System V comprising the SduA polypeptide; or
[0079] (i) a Defense System VI comprising the GajA polypeptide and the GajB polypeptide; or
[0080] (j) a Defense System VII comprising the PtuA polypeptide and the PtuB polypeptide; or
[0081] (k) a Defense System VIII comprising the LmuA polypeptide and the LmuB polypeptide; or
[0082] (l) a Defense System IX comprising the KwaA polypeptide and the KwaB polypeptide; or
[0083] (m) a Defense System Xa comprising the JetA polypeptide, the JetB polypeptide, the JetC polypeptide, and the JetD polypeptide; or
[0084] (n) a Defense System Xb comprising the JetAⁱⁱ polypeptide, the JetBⁱⁱ polypeptide, the JetCⁱⁱ polypeptide, and the JetDⁱⁱ polypeptide; or
[0085] (o) a Defense System Xc comprising the JetAⁱⁱⁱ polypeptide, the JetBⁱⁱⁱ polypeptide, the JetCⁱⁱⁱ polypeptide, and the JetDⁱⁱⁱ polypeptide; or
[0086] (p) any combination of Defense Systems Ia-Xc (a)-(o).

[0087] In another related aspect, defense systems disclosed herein may be encoded by a nucleic acid sequence, wherein
[0088] (a) said Defense System IV is encoded by
   [0089] a nucleic acid sequence selected from the group referenced in Table 12, rows 2-1782, columns G, P, and Q or the nucleic acid sequence set forth in SEQ ID NO: 4; or
   [0090] a nucleic acid sequence encoding the at least two different polypeptide sequences as disclosed herein; or
   [0091] a nucleic acid sequence encoding the HamA polypeptide and HamB polypeptide as disclosed herein;
[0092] (b) said Defense System Ia is encoded by
   [0093] a nucleic acid sequence selected from the group referenced in Table 8 rows 2-1174 columns G, AD, and AE or the nucleic acid sequence set forth in SEQ ID NO: 14; or
   [0094] a nucleic acid sequence encoding the at least two different polypeptide sequences as disclosed herein; or
   [0095] a nucleic acid sequence encoding the ZorA polypeptide, the ZorB polypeptide, the ZorC polypeptide, and ZorD polypeptide as disclosed herein;
[0096] (c) said Defense System Ib is encoded by
   [0097] a nucleic acid sequence selected from the group referenced in Table 8 rows 1175-1830 columns G, AD, and AE or set forth in SEQ ID NO: 15; or a nucleic acid sequence encoding the at least two different polypeptide sequences as disclosed herein; or
   [0098] a nucleic acid sequence encoding the ZorA polypeptide, the ZorB polypeptide, and ZorE polypeptide as disclosed herein;
[0099] (d) said Defense System II is encoded by
   [0100] a nucleic acid sequence selected from the group referenced in Table 9 rows 2-2100 columns G, AG, and AH or set forth in the nucleic acid sequence set forth in SEQ ID NO: 10 or SEQ ID NO: 11; or
   [0101] a nucleic acid sequence encoding the at least two different polypeptide sequences as disclosed herein; or
   [0102] a nucleic acid sequence encoding the ThsA polypeptide and the ThsB polypeptide as disclosed herein;
[0103] (e) said Defense System IIIa is encoded by
   [0104] a nucleic acid sequence selected from the group referenced in Table 10 rows 2-123 columns G, AT, and AU or set forth in SEQ ID NO: 16; or
   [0105] a nucleic acid sequence encoding the at least two different polypeptide sequences as disclosed herein; or
   [0106] a nucleic acid sequence encoding the DruA polypeptide, the DruB polypeptide, the DruC, the DruD, and the DruE polypeptide as disclosed herein;
[0107] (f) said Defense System IIIb is encoded by
   [0108] a nucleic acid sequence selected from the group referenced in Table 10 rows 124-295 columns G, AT, AU; or
   [0109] a nucleic acid sequence encoding the at least two different polypeptide sequences as disclosed herein; or
   [0110] a nucleic acid sequence encoding the DruM polypeptide, the DruF polypeptide, the DruG polypeptide, and the DruE polypeptide as disclosed herein;
[0111] (g) said Defense System IIIc is encoded by
   [0112] a nucleic acid sequence selected from the group referenced in Table 10 rows 296-1343 columns G, AT, and AU; or
   [0113] a nucleic acid sequence encoding the at least two different polypeptide sequences as disclosed herein; or
   [0114] a nucleic acid sequence encoding the DruH polypeptide and the DruE polypeptide as disclosed herein;
[0115] (h) said Defense System V is encoded by
   [0116] a nucleic acid sequence selected from the group referenced in Table 13, rows 2-1247, columns H and J; or
   [0117] a nucleic acid sequence encoding the SduA polypeptide as disclosed herein;
[0118] (i) said Defense System VI is encoded by
   [0119] a nucleic acid sequence selected from the group referenced in Table 14, rows 2-4599, columns G, P, and Q or the sequences set forth in SEQ ID NO: 5 and SEQ ID NO: 6; or
   [0120] a nucleic acid sequence encoding the at least two different polypeptide sequences as disclosed herein; or
   [0121] a nucleic acid sequence encoding the GajA polypeptide and the GajB polypeptide as disclosed herein;
[0122] (j) said Defense System VII is encoded by
   [0123] a nucleic acid sequence selected from the group referenced in Table 15, rows 2-2507, columns G, P, and Q or the sequences set forth in SEQ ID NO: 12 and SEQ ID NO: 13; or
   [0124] a nucleic acid sequence encoding the at least two different polypeptide sequences as disclosed herein; or
   [0125] a nucleic acid sequence encoding the Ptu polypeptide and the PtuB polypeptide as disclosed herein;
[0126] (k) said Defense System VIII is encoded by
   [0127] a nucleic acid sequence selected from the group referenced in Table 16, rows 2-698, columns G, P, and Q or the sequences set forth in SEQ ID NO: 7 and SEQ ID NO: 8; or
   [0128] a nucleic acid sequence encoding the at least two different polypeptide sequences as disclosed herein; or
   [0129] a nucleic acid sequence encoding the LmuA polypeptide and LmuB polypeptide as disclosed herein;
[0130] (l) said Defense System IX is encoded by
   [0131] a nucleic acid sequence selected from the group referenced in Table 17, rows 2-935, columns G, P, and Q or the sequence set forth in SEQ ID NO: 3; or
   [0132] a nucleic acid sequence encoding the at least two different polypeptide sequences as disclosed herein; or
   [0133] a nucleic acid sequence encoding the KwaA polypeptide and the KwaB polypeptide as disclosed herein;
[0134] (m) said Defense System Xa is encoded by
   [0135] a nucleic acid sequence selected from the group referenced in Table 11, rows 2-2322, columns G, Z, and AA or the sequence set forth in SEQ ID NO: 17; or
   [0136] a nucleic acid sequence encoding the at least two different polypeptide sequences as disclosed herein; or
   [0137] a nucleic acid sequence encoding the JetA polypeptide, the JetB polypeptide, the JetC polypeptide, and the JetD polypeptide as disclosed herein;
[0138] (n) said Defense System Xb is encoded by
   [0139] a nucleic acid sequence having at least 80% homology to a sequence selected from the group referenced in Table 11, rows 2323-2844, columns G, Z, and AA or the sequence set forth in SEQ ID NO: 18; or
   [0140] a nucleic acid sequence encoding the at least two different polypeptide sequences as disclosed herein; or
   [0141] a nucleic acid sequence encoding the JetAⁱⁱ polypeptide, the JetBⁱⁱ polypeptide, the JetCⁱⁱ polypeptide, and the JetDⁱⁱ polypeptide as disclosed herein;
[0142] (o) said Defense System Xc is encoded by
   [0143] a nucleic acid sequence selected from the group referenced in Table 11, rows 2845-3174, columns G, Z, and AA or the sequence set forth in SEQ ID NO: 19; or
   [0144] a nucleic acid sequence encoding the at least two different polypeptide sequences as disclosed herein; or
   [0145] a nucleic acid sequence encoding the JetAⁱⁱⁱ polypeptide, the JetBⁱⁱⁱ polypeptide, the JetCⁱⁱⁱ polypeptide, and the JetDⁱⁱⁱ polypeptide as disclosed herein.

[0146] In another related aspect, methods disclosed herein comprise use of a defense system as disclosed or use of a combination of defense systems wherein
[0147] (a) for said Defense system IV, said HamA polypeptide is encoded by a nucleic acid sequence selected from the group referenced in Table 12, rows 2-1782, columns H and J, or
   [0148] said HamB polypeptide is encoded by a nucleic acid sequence selected from the group referenced in Table 12, rows 2-1782, columns L and N, or a combination thereof;
[0149] (b) for said Defense system Ia, said ZorA polypeptide is encoded by a nucleic acid sequence selected from the group referenced in Table 8 rows 2-1830 columns J and L,
   [0150] said ZorB polypeptide is encoded by a nucleic acid sequence selected from the group referenced in Table 8 rows 2-1830 columns N and P,
   [0151] said ZorC polypeptide is encoded by a nucleic acid sequence selected from the group referenced in Table 8 rows 2-1174 columns R and T, or
   [0152] said ZorD polypeptide is encoded by a nucleic acid sequence selected from the group referenced in Table 8 rows 2-1174 columns V and X, or a combination thereof;
[0153] (c) for said Defense system Ib, said ZorA polypeptide is encoded by a nucleic acid sequence selected from the group referenced in Table 8 rows 2-1830 columns J and L,
   [0154] said ZorB polypeptide is encoded by a nucleic acid sequence selected from the group Table 8 rows 2-1830 columns N and P,
   [0155] said ZorE polypeptide is encoded by a nucleic acid sequence selected from the group referenced in Table 8 rows 1175-1830 columns Z and AB, or
   [0156] a combination thereof;
[0157] (d) for said Defense system II, said ThsA polypeptide is encoded by a nucleic acid sequence selected from the group referenced in Table 9 rows 2-2100 columns I and K,
   [0158] said ThsB polypeptide is encoded by a nucleic acid sequence selected from the group referenced in Table 9 rows 2-2100 columns M and O, Q and S, U and W, Y and AA, and AC and AE, or
   [0159] a combination thereof;
[0160] (e) for said Defense system IIIa, said DruA polypeptide is encoded by a nucleic acid sequence selected from the group referenced in Table 10 rows 2-123 columns J and L, or
   [0161] said DruB polypeptide is encoded by a nucleic acid sequence selected from the group referenced in Table 10 rows 2-123 columns N and P, or
   [0162] said DruC polypeptide is encoded by a nucleic acid sequence selected from the group referenced in Table 10 rows 2-123 columns R and T, or
   [0163] said DruD polypeptide is encoded by a nucleic acid sequence selected from the group referenced in Table 10 rows 2-123 columns V and X, or
   [0164] said DruE polypeptide is encoded by a nucleic acid sequence selected from the group referenced in Table 10 rows 2-1343 columns Z and AB, or
   [0165] a combination thereof;
[0166] (f) for said Defense system IIIb, said DruM polypeptide is encoded by a nucleic acid sequence selected from the group referenced in Table 10 rows 124-295 columns AD and AF, or
   [0167] said DruF polypeptide is encoded by a nucleic acid sequence selected from the group referenced in Table 10 rows 124-295 columns AH and AJ, or
   [0168] said DruG polypeptide is encoded by a nucleic acid sequence selected from the group referenced in Table 10 rows 124-295 columns AL and AN, or
   [0169] said DruE polypeptide is encoded by a nucleic acid sequence selected from the group referenced in Table 10 rows 2-1343 columns Z and AB, or
   [0170] a combination thereof;
[0171] (g) for said Defense system IIIc, said DruH polypeptide is encoded by a nucleic acid sequence selected from the group referenced in Table 10 rows 296-1343 columns AP and AR, or
   [0172] said DruE polypeptide is encoded by a nucleic acid sequence selected from the group referenced in Table 10 rows 2-1343 columns Z and ZB, or a combination thereof;
[0173] (h) for said Defense system V, said SduA polypeptide is encoded by a nucleic acid sequence selected from the group referenced in Table 13; rows 2-1247, columns H and J;
[0174] (i) for said Defense system VI, said GajA polypeptide is encoded by a nucleic acid sequence selected from the group referenced in Table 14, rows 2-4599, columns H and J, or
   [0175] said GajB polypeptide is encoded by a nucleic acid sequence selected from the group referenced in Table 14, rows 2-4599, columns L and N, or a combination thereof;
[0176] (j) for said Defense system VII, said PtuA polypeptide is encoded by a nucleic acid sequence selected from the group referenced in Table 15, rows 2-2507, columns H and J, or
   [0177] said PtuB polypeptide is encoded by a nucleic acid sequence selected from the group referenced in Table 15, rows 2-2507, columns L and N, or a combination thereof;
[0178] (k) for said Defense system VIII, said LmuA polypeptide is encoded by a nucleic acid sequence selected from the group referenced in Table 16, rows 2-698, columns H and J, or
   [0179] said LmuB polypeptide is encoded by a nucleic acid sequence selected from the group referenced in Table 16, rows 2-698, columns L and N, or a combination thereof;
[0180] (l) for said Defense system IX, said KwaA polypeptide is encoded by a nucleic acid sequence selected from the group referenced in Table 17, rows 2-935, columns H and J, or
   [0181] said KwaB polypeptide is encoded by a nucleic acid sequence selected from the group referenced in Table 17, rows 2-935, columns L and N, or a combination thereof;
[0182] (m) for said Defense system Xa, said JetA polypeptide is encoded by a nucleic acid sequence selected from the group referenced in Table 11, rows 2-2322, columns J and L, or
   [0183] said JetB polypeptide is encoded by a nucleic acid sequence selected from the group referenced in Table 11, rows 2-2322, columns N and P, or
   [0184] said JetC polypeptide is encoded by a nucleic acid sequence selected from the group referenced in Table 11, rows 2-2322, columns R and T, or
   [0185] said JetD polypeptide is encoded by a nucleic acid sequence selected from the group referenced in Table 11, rows 2-2322, columns V and X, or
   [0186] a combination thereof;
[0187] (n) for said Defense system Xb, said JetAⁱⁱ polypeptide is encoded by a nucleic acid sequence selected from the group referenced in Table 11, rows 2323-2844, columns J and L, or
   [0188] said JetBⁱⁱ polypeptide is encoded by a nucleic acid sequence selected from the group referenced in Table 11, rows 2323-2844, columns N and P, or
   [0189] said JetCⁱⁱ polypeptide is encoded by a nucleic acid sequence selected from the group referenced in Table 11, rows 2323-2844, columns R and T, or
   [0190] said JetDⁱⁱ polypeptide is encoded by a nucleic acid sequence selected from the group referenced in Table 11, rows 2323-2844, columns V and X, or
   [0191] a combination thereof;
[0192] (o) for said Defense system Xc, said JetAⁱⁱⁱ polypeptide is encoded by a nucleic acid sequence selected from the group referenced in Table 11, rows 2845-3174, columns J and L, or
   [0193] said JetBⁱⁱⁱ polypeptide is encoded by a nucleic acid sequence selected from the group referenced in Table 11, rows 2845-3174, columns N and P, or
   [0194] said JetCⁱⁱⁱ polypeptide is encoded by a nucleic acid sequence selected from the group referenced in Table 11, rows 2845-3174, columns R and T, or
   [0195] said JetDⁱⁱⁱ polypeptide is encoded by a nucleic acid sequence selected from the group referenced in Table 11, rows 2845-3174, columns V and X, or
   [0196] a combination thereof.

[0197] In another aspect, disclosed herein are defense systems encoded by a nucleic acid sequence, comprising at least one defense system (a)-(o), wherein said at least one defense system comprises
[0198] (a) a Defense System IV comprising at least two different polypeptide components selected from
   [0199] a HamA polypeptide comprising a pfam08878 domain or a DUF1837 domain or a combination thereof, or comprising an amino acid sequence having at least 80% identity to a sequence selected from the group referenced in Table 12 rows 2-1782 columns H and I; and
   [0200] a HamB polypeptide comprising COG1204 domain or a pfam00270 domain or a pfam00271 domain or any combination thereof, or comprising an amino acid sequence having at least 80% identity to a sequence selected from the group referenced in Table 12 rows 2-1782 columns L and M; or
[0201] (b) a Defense System Ia comprising at least two different polypeptide components selected from
   [0202] a ZorA polypeptide comprising a pfam01618 domain, or comprising an amino acid sequence having at least 80% identity to a sequence selected from the group referenced in Table 8 rows 2-1830 columns J and K;
   [0203] a ZorB polypeptide comprising a pfam13677 domain or a pfam00691 domain or a combination thereof, or comprising an amino acid sequence having at least 80% identity to a sequence selected from the group referenced in Table 8 rows 2-1830 columns N and O;
   [0204] a ZorC polypeptide comprising a pfam15611 domain, or comprising an amino acid sequence having at least 80% identity to a sequence selected from the group referenced in Table 8 rows 2-1174 columns R and S; and
   [0205] a ZorD polypeptide comprising a pfam00176 domain or a pfam00271 domain or a combination thereof, or comprising an amino acid sequence having at least 80% identity to a sequence selected from the group referenced in Table 8 rows 2-1174 columns V and W;
      [0206] or
[0207] (c) a Defense System Ib comprising a ZorE polypeptide comprising a pfam01844 domain or a COG3183 domain or a combination thereof, or comprising an amino acid sequence having at least 80% identity to a sequence selected from the group referenced in Table 8 rows 1175-1830 columns Z and AA; and at least one other polypeptide component selected from
   [0208] a ZorA polypeptide comprising a pfam01618 domain, or comprising an amino acid sequence having at least 80% identity to a sequence selected from the group referenced in Table 8 rows 2-1830 columns J and K; and
   [0209] a ZorB polypeptide comprising a pfam13677 domain or a pfam00691 domain or a combination thereof, or comprising an amino acid sequence having at least 80% identity to a sequence selected from the group referenced in Table 8 rows 2-1830 columns N and O; or
[0210] (d) a Defense System II comprising at least two different polypeptide components selected from
   [0211] a ThsA polypeptide comprising a pfam13289 domain or a pfam14519 domain or a combination thereof, or comprising an amino acid sequence having at least 80% identity to a sequence selected from the group referenced in Table 9 rows 2-2100 columns I and J; and
   [0212] a ThsB polypeptide comprising a pfam13676 domain or a pfam08937 domain or a pfam08357 domain or any combination thereof, or comprising an amino acid sequence having at least 80% identity to a sequence selected from the group referenced in Table 9 rows 2-2100 columns M and N, Q and R, U and V, Y and Z, and AC and AD; or
[0213] (e) a Defense System IIIa comprising at least two different polypeptide components selected from
   [0214] a DruA polypeptide comprising a DUF4338 domain or a pfam14236 domain or a combination thereof, or comprising an amino acid sequence having at least 80% identity to a sequence selected from the group referenced in Table 10 rows 2-123 columns J and K, or a combination thereof;
   [0215] a DruB polypeptide comprising an amino acid sequence having at least 80% identity to a sequence selected from the group referenced in Table 10 rows 2-123 columns N and O;
   [0216] a DruC polypeptide comprising an amino acid sequence having at least 80% identity to a sequence selected from the group referenced in Table 10 rows 2-123 columns R and S;
   [0217] a DruD polypeptide comprising an amino acid sequence having at least 80% identity to a sequence selected from the group referenced in Table 10 rows 2-123 columns V and W; and
   [0218] a DruE polypeptide comprising a pfam00270 domain or a pfam00271 domain or a pfam09369 domain or a DUF1998 domain or any combination thereof, or comprising an amino acid sequence having at least 80% identity to a sequence selected from the group referenced in Table 10 rows 2-1343 columns Z and AA; or
[0219] (f) a Defense System IIIb comprising at least two different polypeptide components selected from
   [0220] a DruM polypeptide comprising a pfam00145 domain or a COG0270 domain or a combination thereof, or comprising an amino acid sequence having at least 80% identity to a sequence selected from the group referenced in Table 10 rows 124-295 columns AD and AE;
   [0221] a DruF polypeptide comprising an amino acid sequence having at least 80% identity to a sequence selected from the group referenced in Table 10 rows 124-295 columns AH and AI;
   [0222] a DruG polypeptide comprising an amino acid sequence having at least 80% identity to a sequence selected from the group referenced in Table 10 rows 124-295 columns AL and AM; and
   [0223] a DruE polypeptide comprising a pfam00270 domain or a pfam00271 domain or a pfam09369 domain or a DUF1998 domain, or any combination thereof, or comprising an amino acid sequence having at least 80% identity to a sequence selected from the group referenced in Table 10 rows 2-1343 columns Z and AA; or
[0224] (g) a Defense System IIIc comprising at least two different polypeptide components selected from
   [0225] a DruH polypeptide comprising an amino acid sequence having at least 80% identity to a sequence selected from the group referenced in Table 10 rows 296-1343 columns AP and AQ; and
   [0226] a DruE polypeptide comprising a pfam00270 domain or a pfam00271 domain or a pfam09369 domain or a DUF1998 domain or any combination thereof, or comprising an amino acid sequence having at least 80% identity to a sequence selected from the group referenced in Table 10 rows 2-1343 columns Z and AA; or
[0227] (h) a Defense System V comprising a SduA polypeptide comprising a pfam14082 domain or a pfam01939 domain or a combination thereof, or comprising an amino acid sequence having at least 80% identity to a sequence selected from the group referenced in Table 13 rows 2-1247 columns H and I; or
[0228] (i) a Defense System VI comprising at least two different polypeptide components selected from
   [0229] a GajA polypeptide comprising a pfam13175 domain or a COG3593 domain or a combination thereof, or comprising an amino acid sequence having at least 80% identity to a sequence selected from the group referenced in Table 14 rows 2-4599 columns H and I; and
   [0230] a GajB polypeptide comprising a pfam04257 domain or a pfam00580 domain or a pfam13361 domain or any combination thereof, or comprising an amino acid sequence having at least 80% identity to a sequence selected from the group referenced in Table 14 rows 2-4599 columns L and M; or
[0231] (j) a Defense System VII comprising at least two different polypeptide components selected from
   [0232] a PtuA polypeptide comprising a pfam13304 domain or a pfam02463 domain or a combination thereof, or comprising an amino acid sequence having at least 80% identity to a sequence selected from the group referenced in Table 15 rows 2-12507 columns H and I; and
   [0233] a PtuB polypeptide comprising pfam13395 domain or a pfam 01844 domain or a combination thereof, or comprising an amino acid sequence having at least 80% identity to a sequence selected from the group referenced in Table 15 rows 2-2507 columns L and M; or
[0234] (k) a Defense System VIII comprising at least two different polypeptide components selected from
   [0235] a LmuA polypeptide comprising a pfam14130 domain or a DUF4297 domain or a combination thereof, or comprising an amino acid sequence having at least 80% identity to a sequence selected from the group referenced in Table 16 rows 2-698 columns H and I; and
   [0236] a LmuB polypeptide comprising a pfam02463 domain, or comprising an amino acid sequence having at least 80% identity to a sequence selected from the group referenced in Table 16 rows 2-698 columns L and M; or
[0237] (l) a Defense System IX comprising at least two different polypeptide components selected from
   [0238] a KwaA polypeptide comprising an amino acid sequence having at least 80% identity to a sequence selected from the group referenced in Table 17 rows 2-935 columns H and I; and
   [0239] a KwaB polypeptide comprising a pfam16162 domain or a DUF4868 domain or a combination thereof, or comprising an amino acid sequence having at least 80% identity to a sequence selected from the group referenced in Table 17 rows 2-935 columns L and M; or
[0240] (m) a Defense System Xa comprising at least two different polypeptide components selected from
   [0241] a JetA polypeptide comprising a pfam11855 domain or a DUF3375 domain or a combination thereof, or comprising an amino acid sequence having at least 80% identity to a sequence selected from the group referenced in Table 11 rows 2-2322 columns J and K;
   [0242] a JetB polypeptide comprising a pfam13835 domain or a DUF4194 domain or a combination thereof, or comprising an amino acid sequence having at least 80% identity to a sequence selected from the group referenced in Table 11 rows 2-2322 columns N and O;
   [0243] a JetC polypeptide comprising a pfam13555 domain or a pfam13558 domain or a COG4913 domain or any combination thereof, or comprising an amino acid sequence having at least 80% identity to a sequence selected from the group referenced in Table 11 rows 2-2322 columns R and S; and
   [0244] a JetD polypeptide comprising a pfam11795 domain or a DUF3322 domain or a pfam09983 domain or a DUF2220 domain or a COG4924 domain or any combination thereof, or comprising an amino acid sequence having at least 80% identity to a sequence selected from the group referenced in Table 11 rows 2-2322 columns V and W; or
[0245] (n) a Defense System Xb comprising at least two different polypeptide components selected from
   [0246] a JetAⁱⁱ polypeptide comprising a pfam09660 domain or a DUF2397 domain or a combination thereof, or comprising an amino acid sequence having at least 80% identity to a sequence selected from the group referenced in Table 11 rows 2323-2844 columns J and K;
   [0247] a JetBⁱⁱ polypeptide comprising a pfam09661 domain or a DUF2398 domain or a combination thereof, or comprising an amino acid sequence having at least 80% identity to a sequence selected from the group referenced in Table 11 rows 2323-2844 columns N and O;
   [0248] a JetCⁱⁱ polypeptide comprising a pfam13558 domain comprising an amino acid sequence having at least 80% identity to a sequence selected from the group referenced in Table 11 rows 2323-2844 columns R and S; and
   [0249] a JetDⁱⁱ polypeptide comprising a pfam11796 domain or a DUF3323 domain or a pfam09664 domain or a DUF2399 domain or a combination thereof, or comprising an amino acid sequence having at least 80% identity to a sequence selected from the group referenced in Table 11 rows 2323-2844 columns V and W; or
[0250] (o) a Defense System Xc comprising at least two different polypeptide components selected from
   [0251] a JetAⁱⁱⁱ polypeptide comprising an amino acid sequence having at least 80% identity to a sequence selected from the group referenced in Table 11 rows 2845-3174 columns J and K;
   [0252] a JetBⁱⁱⁱ polypeptide comprising an amino acid sequence having at least 80% identity to a sequence selected from the group referenced in Table 11 rows 2845-3174 columns N and O;
   [0253] a JetCⁱⁱⁱ polypeptide comprising a COG1196 domain or comprising an amino acid sequence having at least 80% identity to a sequence selected from the group referenced in Table 11 rows 2845-3174 columns R and S; and
   [0254] a JetDⁱⁱⁱ polypeptide comprising a pfam09983 domain or a pfam09664 domain or a DUF2220 or a DUF2399 domain or any combination thereof, or comprising an amino acid sequence having at least 80% identity to a sequence selected from the group referenced in Table 11 rows 2845-3174 columns V and W; or
[0255] (p) any combination of the Defense Systems Ia-Xc (a)-(o);
[0256] wherein said at least one defense system comprises a non-naturally occurring combination of components.

[0257] In a related aspect, a defense system disclosed wherein
[0258] (a) said Defense System IV comprises the HamA polypeptide and the HamB polypeptide; or
[0259] (b) said Defense System Ia comprises the ZorA polypeptide, the ZorB polypeptide, the ZorC polypeptide, and the ZorD polypeptide; or
[0260] (c) said Defense System Ib comprises the ZorA polypeptide, the ZorB polypeptide, and the ZorE polypeptide; or
[0261] (d) said Defense System II comprises the ThsA polypeptide, and the ThsB polypeptide; or
[0262] (e) said Defense System IIIa comprises the DruA polypeptide, the DruB polypeptide, the DruC polypeptide, the DruD polypeptide, and the DruE polypeptide; or
[0263] (f) said Defense System IIIb comprises the DruM polypeptide, the DruF polypeptide, the DruG polypeptide, and the DruE polypeptide; or
[0264] (g) said Defense System IIIc comprises the DruH polypeptide and the DruE polypeptide; or
[0265] (h) said Defense System V comprises the SduA polypeptide; or
[0266] (i) said Defense System VI comprises the GajA polypeptide and the GajB polypeptide; or
[0267] (j) said Defense System VII comprises the PtuA polypeptide and the PtuB polypeptide; or
[0268] (k) said Defense System VIII comprises the LmuA polypeptide and the LmuB polypeptide; or
[0269] (l) said Defense System IX comprises the KwaA polypeptide and the KwaB polypeptide; or
[0270] (m) said Defense System Xa comprises the JetA polypeptide, the JetB polypeptide, the JetC polypeptide, and the JetD polypeptide; or
[0271] (n) said Defense System Xb comprises the JetAⁱⁱ polypeptide, the JetBⁱⁱ polypeptide, the JetCⁱⁱ polypeptide, and the JetDⁱⁱ polypeptide; or
[0272] (o) said Defense System Xc comprises the JetAⁱⁱⁱ polypeptide, the JetBⁱⁱⁱ polypeptide, the JetCⁱⁱⁱ polypeptide, and the JetDⁱⁱⁱ polypeptide.

[0273] In another related aspect, at least one defense system disclosed herein or a combination thereof, provides a host cell with resistance to foreign nucleic acid invasion. In another related aspect, the resistance to foreign nucleic acid invasion comprises resistance to at least one phage infection, or resistance to plasmid transformation, or resistance to entry of a conjugative element, or any combination thereof.

[0274] In another aspect, disclosed herein is a nucleic acid construct encoding an at least one defense system (a)-(o), said nucleic acid construct comprising
[0275] (a) a nucleic acid construct encoding a Defense System IV comprising at least two different polypeptide components selected from
   [0276] a HamA polypeptide comprising a pfam08878 domain or a DUF1837 domain or a combination thereof, or comprising an amino acid sequence having at least 80% identity to a sequence selected from the group referenced in Table 12 rows 2-1782 columns H and I; and
   [0277] a HamB polypeptide comprising COG1204 domain or a pfam00270 domain or a pfam00271 domain or any combination thereof, or comprising an amino acid sequence having at least 80% identity to a sequence selected from the group referenced in Table 12 rows 2-1782 columns L and M; or
[0278] (b) a nucleic acid construct encoding a Defense System Ia comprising at least two different polypeptide components selected from
   [0279] a ZorA polypeptide comprising a pfam01618 domain, or comprising an amino acid sequence having at least 80% identity to a sequence selected from the group referenced in Table 8 rows 2-1830 columns J and K;
   [0280] a ZorB polypeptide comprising a pfam13677 domain or a pfam00691 domain or a combination thereof, or comprising an amino acid sequence having at least 80% identity to a sequence selected from the group referenced in Table 8 rows 2-1830 columns N and O;
   [0281] a ZorC polypeptide comprising a pfam15611 domain, or comprising an amino acid sequence having at least 80% identity to a sequence selected from the group referenced in Table 8 rows 2-1174 columns R and S; and
   [0282] a ZorD polypeptide comprising a pfam00176 domain or a pfam00271 domain or a combination thereof, or comprising an amino acid sequence having at least 80% identity to a sequence selected from the group referenced in Table 8 rows 2-1174 columns V and W;
   [0283] or
[0284] (c) a nucleic acid construct encoding a Defense System Ib comprising a ZorE polypeptide comprising a pfam01844 domain or a COG3183 domain or a combination thereof, or comprising an amino acid sequence having at least 80% identity to a sequence selected from the group referenced in Table 8 rows 1175-1830 columns Z and AA; and at least one other polypeptide component selected from
   [0285] a ZorA polypeptide comprising a pfam01618 domain, or comprising an amino acid sequence having at least 80% identity to a sequence selected from the group referenced in Table 8 rows 2-1830 columns J and K; and
   [0286] a ZorB polypeptide comprising a pfam13677 domain or a pfam00691 domain or a combination thereof, or comprising an amino acid sequence having at least 80% identity to a sequence selected from the group referenced in Table 8 rows 2-1830 columns N and O; or
[0287] (d) a nucleic acid construct encoding a Defense System II comprising at least two different polypeptide components selected from
   [0288] a ThsA polypeptide comprising a pfam13289 domain or a pfam14519 domain or a combination thereof, or comprising an amino acid sequence having at least 80% identity to a sequence selected from the group referenced in Table 9 rows 2-2100 columns I and J; and
   [0289] a ThsB polypeptide comprising a pfam13676 domain or a pfam08937 domain or a pfam08357 domain or any combination thereof, or comprising an amino acid sequence having at least 80% identity to a sequence selected from the group referenced in Table 9 rows 2-2100 columns M and N, Q and R, U and V, Y and Z, and AC and AD; or
[0290] (e) a nucleic acid construct encoding a Defense System IIIa comprising at least two different polypeptide components selected from
   [0291] a DruA polypeptide comprising a DUF4338 domain or a pfam14236 domain or a combination thereof, or comprising an amino acid sequence having at least 80% identity to a sequence selected from the group referenced in Table 10 rows 2-123 columns J and K, or a combination thereof;
   [0292] a DruB polypeptide comprising an amino acid sequence having at least 80% identity to a sequence selected from the group referenced in Table 10 rows 2-123 columns N and O;
   [0293] a DruC polypeptide comprising an amino acid sequence having at least 80% identity to a sequence selected from the group referenced in Table 10 rows 2-123 columns R and S;
   [0294] a DruD polypeptide comprising an amino acid sequence having at least 80% identity to a sequence selected from the group referenced in Table 10 rows 2-123 columns V and W; and
   [0295] a DruE polypeptide comprising a pfam00270 domain or a pfam00271 domain or a pfam09369 domain or a DUF1998 domain or any combination thereof, or comprising an amino acid sequence having at least 80% identity to a sequence selected from the group referenced in Table 10 rows 2-1343 columns Z and AA; or
[0296] (f) a nucleic acid construct encoding a Defense System IIIb comprising at least two different polypeptide components selected from
   [0297] a DruM polypeptide comprising a pfam00145 domain or a COG0270 domain or a combination thereof, or comprising an amino acid sequence having at least 80% identity to a sequence selected from the group referenced in Table 10 rows 124-295 columns AD and AE;
   [0298] a DruF polypeptide comprising an amino acid sequence having at least 80% identity to a sequence selected from the group referenced in Table 10 rows 124-295 columns AH and AI;
   [0299] a DruG polypeptide comprising an amino acid sequence having at least 80% identity to a sequence selected from the group referenced in Table 10 rows 124-295 columns AL and AM; and
   [0300] a DruE polypeptide comprising a pfam00270 domain or a pfam00271 domain or a pfam09369 domain or a DUF1998 domain or any combination thereof, or comprising an amino acid sequence having at least 80% identity to a sequence selected from the group referenced in Table 10 rows 2-1343 columns Z and AA; or
[0301] (g) a nucleic acid construct encoding a Defense System IIIc comprising at least two different polypeptide components selected from
   [0302] a DruH polypeptide comprising an amino acid sequence having at least 80% identity to a sequence selected from the group referenced in Table 10 rows 296-1343 columns AP and AQ; and
   [0303] a DruE polypeptide comprising a pfam00270 domain or a pfam00271 domain or a pfam09369 domain or a DUF1998 domain or any combination thereof, or comprising an amino acid sequence having at least 80% identity to a sequence selected from the group referenced in Table 10 rows 2-1343 columns Z and AA; or
[0304] (h) a nucleic acid construct encoding a Defense System V comprising a SduA polypeptide comprising a pfam14082 domain or a pfam01939 domain or a combination thereof, or comprising an amino acid sequence having at least 80% identity to a sequence selected from the group referenced in Table 13 rows 2-1247 columns H and I; or
[0305] (i) a nucleic acid construct encoding a Defense System VI comprising at least two different polypeptide components selected from
   [0306] a GajA polypeptide comprising a pfam13175 domain or a COG3593 domain or a combination thereof, or comprising an amino acid sequence having at least 80% identity to a sequence selected from the group referenced in Table 14 rows 2-4599 columns H and I; and
   [0307] a GajB polypeptide comprising a pfam04257 domain or a pfam00580 domain or a pfam13361 domain or any combination thereof, or comprising an amino acid sequence having at least 80% identity to a sequence selected from the group referenced in Table 14 rows 2-4599 columns L and M; or
[0308] (j) a nucleic acid construct encoding a Defense System VII comprising at least two different polypeptide components selected from
   [0309] a PtuA polypeptide comprising a pfam13304 domain or a pfam02463 domain or a combination thereof, or comprising an amino acid sequence having at least 80% identity to a sequence selected from the group referenced in Table 15 rows 2-12507 columns H and I; and
   [0310] a PtuB polypeptide comprising pfam13395 domain or a pfam 01844 domain or a combination thereof, or comprising an amino acid sequence having at least 80% identity to a sequence selected from the group referenced in Table 15 rows 2-2507 columns L and M; or
[0311] (k) a nucleic acid construct encoding a Defense System VIII comprising at least two different polypeptide components selected from
   [0312] a LmuA polypeptide comprising a pfam14130 domain or a DUF4297 domain or a combination thereof, or comprising an amino acid sequence having at least 80% identity to a sequence selected from the group referenced in Table 16 rows 2-698 columns H and I; and
   [0313] a LmuB polypeptide comprising a pfam02463 domain, or comprising an amino acid sequence having at least 80% identity to a sequence selected from the group referenced in Table 16 rows 2-698 columns L and M; or
[0314] (l) a nucleic acid construct encoding a Defense System IX comprising at least two different polypeptide components selected from
   [0315] a KwaA polypeptide comprising an amino acid sequence having at least 80% identity to a sequence selected from the group referenced in Table 17 rows 2-935 columns H and I; and
   [0316] a KwaB polypeptide comprising a pfam16162 domain or a DUF4868 domain or a combination thereof, or comprising an amino acid sequence having at least 80% identity to a sequence selected from the group referenced in Table 17 rows 2-935 columns L and M; or
[0317] (m) a nucleic acid construct encoding a Defense System Xa comprising at least two different polypeptide components selected from
   [0318] a JetA polypeptide comprising a pfam11855 domain or a DUF3375 domain or a combination thereof, or comprising an amino acid sequence having at least 80% identity to a sequence selected from the group referenced in Table 11 rows 2-2322 columns J and K;
   [0319] a JetB polypeptide comprising a pfam13835 domain or a DUF4194 domain or a combination thereof, or comprising an amino acid sequence having at least 80% identity to a sequence selected from the group referenced in Table 11 rows 2-2322 columns N and O;
   [0320] a JetC polypeptide comprising a pfam13555 domain or a pfam13558 domain or a COG4913 domain or any combination thereof, or comprising an amino acid sequence having at least 80% identity to a sequence selected from the group referenced in Table 11 rows 2-2322 columns R and S; and
   [0321] a JetD polypeptide comprising a pfam11795 domain or a DUF3322 domain or a pfam09983 domain or a DUF2220 domain or a COG4924 domain or any combination thereof, or comprising an amino acid sequence having at least 80% identity to a sequence selected from the group referenced in Table 11 rows 2-2322 columns V and W; or
[0322] (n) a nucleic acid construct encoding a Defense System Xb comprising at least two different polypeptide components selected from
   [0323] a JetAⁱⁱ polypeptide comprising a pfam09660 domain or a DUF2397 domain or a combination thereof, or comprising an amino acid sequence having at least 80% identity to a sequence selected from the group referenced in Table 11 rows 2323-2844 columns J and K;
   [0324] a JetBⁱⁱ polypeptide comprising a pfam09661 domain or a DUF2398 domain or a combination thereof, or comprising an amino acid sequence having at least 80% identity to a sequence selected from the group referenced in Table 11 rows 2323-2844 columns N and O;
   [0325] a JetCⁱⁱ polypeptide comprising a pfam13558 domain comprising an amino acid sequence having at least 80% identity to a sequence selected from the group referenced in Table 11 rows 2323-2844 columns R and S; and
   [0326] a JetDⁱⁱ polypeptide comprising a pfam11796 domain or a DUF3323 domain or a pfam09664 domain or a DUF2399 domain or a combination thereof, or comprising an amino acid sequence having at least 80% identity to a sequence selected from the group referenced in Table 11 rows 2323-2844 columns V and W; or
[0327] (o) a nucleic acid construct encoding a Defense System Xc comprising at least two different polypeptide components selected from
   [0328] a JetAⁱⁱⁱ polypeptide comprising an amino acid sequence having at least 80% identity to a sequence selected from the group referenced in Table 11 rows 2845-3174 columns J and K;
   [0329] a JetBⁱⁱⁱ polypeptide comprising an amino acid sequence having at least 80% identity to a sequence selected from the group referenced in Table 11 rows 2845-3174 columns N and O;
   [0330] a JetCⁱⁱⁱ polypeptide comprising a COG1196 domain or comprising an amino acid sequence having at least 80% identity to a sequence selected from the group referenced in Table 11 rows 2845-3174 columns R and S; and
   [0331] a JetDⁱⁱⁱ polypeptide comprising a pfam09983 domain or a pfam09664 domain or a DUF2220 or a DUF2399 domain or any combination thereof, or comprising an amino acid sequence having at least 80% identity to a sequence selected from the group referenced in Table 11 rows 2845-3174 columns V and W; or
[0332] (p) any combination of nucleic acid constructs encoding a Defense Systems Ia-Xc (a)-(o);
[0333] wherein each nucleic acid construct of each Defense System (a)-(o) further comprises a regulatory element operably linked to said construct comprising a cis-acting regulatory element for directing expression of said nucleic acid sequence, or a transmissible element for directing transfer of said nucleic acid sequence from one cell to another, or a recombination element for integrating said nucleic acid sequence into a genome of a cell transfected with said construct, or an element providing episomal maintenance of said construct within a cell transfected with said construct, or any combination thereof.

[0334] In a related aspect, the expressed defense system comprises
[0335] (a) a Defense System IV comprising the HamA polypeptide, and the HamB polypeptide; or
[0336] (b) a Defense System Ia comprising the ZorA polypeptide, the ZorB polypeptide, the ZorC polypeptide, and the ZorD polypeptide; or
[0337] (c) a Defense System Ib comprising the ZorA polypeptide, the ZorB polypeptide, and the ZorE polypeptide; or
[0338] (d) a Defense System II comprising the ThsA polypeptide, and the ThsB polypeptide; or
[0339] (e) a Defense System IIIa comprising the DruA polypeptide, the DruB polypeptide, the DruC polypeptide, the DruD polypeptide, and the DruE polypeptide; or
[0340] (f) a Defense System IIIb comprising the DruM polypeptide, the DruF polypeptide, the DruG polypeptide, and the DruE polypeptide; or
[0341] (g) a Defense System IIIc comprising the DruH polypeptide and the DruE polypeptide; or
[0342] (h) a Defense System V comprising the SduA polypeptide; or
[0343] (i) a Defense System VI comprising the GajA polypeptide and the GajB polypeptide; or
[0344] (j) a Defense System VII comprising the PtuA polypeptide and the PtuB polypeptide; or
[0345] (k) a Defense System VIII comprising the LmuA polypeptide and the LmuB polypeptide; or
[0346] (l) a Defense System IX comprising the KwaA polypeptide and the KwaB polypeptide; or
[0347] (m) a Defense System Xa comprising the JetA polypeptide, the JetB polypeptide, the JetC polypeptide, and the JetD polypeptide; or
[0348] (n) a Defense System Xb comprising the JetAⁱⁱ polypeptide, the JetBⁱⁱ polypeptide, the JetCⁱⁱ polypeptide, and the JetDⁱⁱ polypeptide; or
[0349] (o) a Defense System Xc comprising the JetAⁱⁱⁱ polypeptide, the JetBⁱⁱⁱ polypeptide, the JetCⁱⁱⁱ polypeptide, and the JetDⁱⁱⁱ polypeptide.

[0350] In another related aspect, the nucleic acid construct disclosed herein, wherein

[0351] (a) said Defense System IV is encoded by
[0352] a nucleic acid sequence selected from the group referenced in Table 12, rows 2-1782, columns G, P, and Q or the nucleic acid sequence set forth in SEQ ID NO: 4; or
[0353] a nucleic acid sequence encoding the at least two different polypeptide sequences as disclosed herein; or
[0354] a nucleic acid sequence encoding the HamA polypeptide and HamB polypeptide as disclosed herein;

[0355] (b) said Defense System Ia is encoded by
[0356] a nucleic acid sequence selected from the group referenced in Table 8 rows 2-1174 columns G, AD, and AE or the nucleic acid sequence set forth in SEQ ID NO: 14; or
[0357] a nucleic acid sequence encoding the at least two different polypeptide sequences as disclosed herein; or
[0358] a nucleic acid sequence encoding the ZorA polypeptide, the ZorB polypeptide, the ZorC polypeptide, and ZorD polypeptide as disclosed herein;

[0359] (c) said Defense System Ib is encoded by
[0360] a nucleic acid sequence selected from the group referenced in Table 8 rows 1175-1830 columns G, AD, and AE or set forth in SEQ ID NO: 15; or
[0361] a nucleic acid sequence encoding the at least two different polypeptide sequences as disclosed herein; or
   [0362] a nucleic acid sequence encoding the ZorA polypeptide, the ZorB polypeptide, and ZorE polypeptide as disclosed herein;

[0363] (d) said Defense System II is encoded by
[0364] a nucleic acid sequence selected from the group referenced in Table 9 rows 2-2100 columns G, AG, and AH or set forth in the nucleic acid sequence set forth in SEQ ID NO: 10 or SEQ ID NO: 11; or
[0365] a nucleic acid sequence encoding the at least two different polypeptide sequences as disclosed herein; or
[0366] a nucleic acid sequence encoding the ThsA polypeptide and the ThsB polypeptide as disclosed herein;

[0367] (e) said Defense System IIIa is encoded by
[0368] a nucleic acid sequence selected from the group referenced in Table 10 rows 2-123 columns G, AT, and AU or set forth in SEQ ID NO: 16; or
[0369] a nucleic acid sequence encoding the at least two different polypeptide sequences as disclosed herein; or
[0370] a nucleic acid sequence encoding the DruA polypeptide, the DruB polypeptide, the DruC, the DruD, and the DruE polypeptide as disclosed herein;

[0371] (f) said Defense System IIIb is encoded by
[0372] a nucleic acid sequence selected from the group referenced in Table 10 rows 124-295 columns G, AT, AU; or
[0373] a nucleic acid sequence encoding the at least two different polypeptide sequences as disclosed herein; or
[0374] a nucleic acid sequence encoding the DruM polypeptide, the DruF polypeptide, the DruG polypeptide, and the DruE polypeptide as disclosed herein;

[0375] (g) said Defense System IIIc is encoded by
[0376] a nucleic acid sequence selected from the group referenced in Table 10 rows 296-1343 columns G, AT, and AU; or
[0377] a nucleic acid sequence encoding the at least two different polypeptide sequences as disclosed herein; or
[0378] a nucleic acid sequence encoding the DruH polypeptide and the DruE polypeptide as disclosed herein;

[0379] (h) said Defense System V is encoded by
[0380] a nucleic acid sequence selected from the group referenced in Table 13; rows 2-1247, columns H and J; or
[0381] a nucleic acid sequence encoding the SduA polypeptide disclosed herein;

[0382] (i) said Defense System VI is encoded by
[0383] a nucleic acid sequence selected from the group referenced in Table 14, rows 2-4599, columns G, P, and Q or the sequences set forth in SEQ ID NO: 5 and SEQ ID NO: 6; or
[0384] a nucleic acid sequence encoding the at least two different polypeptide sequences as disclosed herein; or
[0385] a nucleic acid sequence encoding the GajA polypeptide and the GajB polypeptide as disclosed herein;

[0386] (j) said Defense System VII is encoded by
[0387] a nucleic acid sequence selected from the group referenced in Table 15, rows 2-2507, columns G, P, and Q or the sequences set forth in SEQ ID NO: 12 and SEQ ID NO: 13; or
[0388] a nucleic acid sequence encoding the at least two different polypeptide sequences as disclosed herein; or
[0389] a nucleic acid sequence encoding the Ptu polypeptide and the PtuB polypeptide as disclosed herein;

[0390] (k) said Defense System VIII is encoded by
[0391] a nucleic acid sequence selected from the group referenced in Table 16, rows 2-698, columns G, P, and Q or the sequences set forth in SEQ ID NO: 7 and SEQ ID NO: 8; or
[0392] a nucleic acid sequence encoding the at least two different polypeptide sequences as disclosed herein; or
[0393] a nucleic acid sequence encoding the LmuA polypeptide and LmuB polypeptide as disclosed herein;

[0394] (l) said Defense System IX is encoded by
[0395] a nucleic acid sequence selected from the group referenced in Table 17, rows 2-935, columns G, P, and Q or the sequence set forth in SEQ ID NO: 3; or
[0396] a nucleic acid sequence encoding the at least two different polypeptide sequences as disclosed herein; or
[0397] a nucleic acid sequence encoding the KwaA polypeptide and the KwaB polypeptide as disclosed herein;

[0398] (m) said Defense System Xa is encoded by
[0399] a nucleic acid sequence selected from the group referenced in Table 11, rows 2-2322, columns G, Z, and AA or the sequence set forth in SEQ ID NO: 17; or
[0400] a nucleic acid sequence encoding the at least two different polypeptide sequences as disclosed herein; or
[0401] a nucleic acid sequence encoding the JetA polypeptide, the JetB polypeptide, the JetC polypeptide, and the JetD polypeptide as disclosed herein;

[0402] (n) said Defense System Xb is encoded by
[0403] a nucleic acid sequence having at least 80% homology to a sequence selected from the group referenced in Table 11, rows 2323-2844, columns G, Z, and AA or the sequence set forth in SEQ ID NO: 18; or
[0404] a nucleic acid sequence encoding the at least two different polypeptide sequences as disclosed herein; or
[0405] a nucleic acid sequence encoding the JetAⁱⁱ polypeptide, the JetBⁱⁱ polypeptide, the JetCⁱⁱ polypeptide, and the JetDⁱⁱ polypeptide as disclosed herein;

[0406] (o) said Defense System Xc is encoded by
[0407] a nucleic acid sequence selected from the group referenced in Table 11, rows 2845-3174, columns G, Z, and AA or the sequence set forth in SEQ ID NO: 19; or
[0408] a nucleic acid sequence encoding the at least two different polypeptide sequences as disclosed herein; or
[0409] a nucleic acid sequence encoding the JetAⁱⁱⁱ polypeptide, the JetBⁱⁱⁱ polypeptide, the JetCⁱⁱⁱ polypeptide, and the JetDⁱⁱⁱ polypeptide as disclosed herein.

[0410] Further, in another related aspect, a nucleic acid construct disclosed herein comprises a nucleic acid construct wherein
[0411] (a) said HamA polypeptide is encoded by a nucleic acid sequence selected from the group referenced in Table 12, rows 2-1782, columns H and J, or
   [0412] said HamB polypeptide is encoded by a nucleic acid sequence selected from the group referenced in Table 12, rows 2-1782, columns L and N, or
   [0413] a combination thereof;
[0414] (b) said ZorA polypeptide is encoded by a nucleic acid sequence selected from the group referenced in Table 8 rows 2-1830 columns J and L,
   [0415] said ZorB polypeptide is encoded by a nucleic acid sequence selected from the group referenced in Table 8 rows 2-1830 columns N and P,
   [0416] said ZorC polypeptide is encoded by a nucleic acid sequence selected from the group referenced in Table 8 rows 2-1174 columns R and T, or
   [0417] said ZorD polypeptide is encoded by a nucleic acid sequence selected from the group referenced in Table 8 rows 2-1174 columns V and X, or
   [0418] a combination thereof;
[0419] (c) said ZorA polypeptide is encoded by a nucleic acid sequence selected from the group referenced in Table 8 rows 2-1830 columns J and L,
   [0420] said ZorB polypeptide is encoded by a nucleic acid sequence selected from the group Table 8 rows 2-1830 columns N and P,
   [0421] said ZorE polypeptide is encoded by a nucleic acid sequence selected from the group referenced in Table 8 rows 1175-1830 columns Z and AB, or
   [0422] a combination thereof;
[0423] (d) said ThsA polypeptide is encoded by a nucleic acid sequence selected from the group referenced in Table 9 rows 2-2100 columns I and K,
   [0424] said ThsB polypeptide is encoded by a nucleic acid sequence selected from the group referenced in Table 9 rows 2-2100 columns M and O, Q and S, U and W, Y and AA, and AC and AE, or
   [0425] a combination thereof;
[0426] (e) said DruA polypeptide is encoded by a nucleic acid sequence selected from the group referenced in Table 10 rows 2-123 columns J and L, or
   [0427] said DruB polypeptide is encoded by a nucleic acid sequence selected from the group referenced in Table 10 rows 2-123 columns N and P, or
   [0428] said DruC polypeptide is encoded by a nucleic acid sequence selected from the group referenced in Table 10 rows 2-123 columns R and T, or
   [0429] said DruD polypeptide is encoded by a nucleic acid sequence selected from the group referenced in Table 10 rows 2-123 columns V and X, or
   [0430] said DruE polypeptide is encoded by a nucleic acid sequence selected from the group referenced in Table 10 rows 2-1343 columns Z and AB, or
   [0431] a combination thereof;
[0432] (f) said DruM polypeptide is encoded by a nucleic acid sequence selected from the group referenced in Table 10 rows 124-295 columns AD and AF, or
   [0433] said DruF polypeptide is encoded by a nucleic acid sequence selected from the group referenced in Table 10 rows 124-295 columns AH and AJ, or
   [0434] said DruG polypeptide is encoded by a nucleic acid sequence selected from the group referenced in Table 10 rows 124-295 columns AL and AN, or
   [0435] said DruE polypeptide is encoded by a nucleic acid sequence selected from the group referenced in Table 10 rows 2-1343 columns Z and AB, or
   [0436] a combination thereof;
[0437] (g) said DruH polypeptide is encoded by a nucleic acid sequence selected from the group referenced in Table 10 rows 296-1343 columns AP and AR, or
   [0438] said DruE polypeptide is encoded by a nucleic acid sequence selected from the group referenced in Table 10 rows 2-1343 columns Z and AB, or
   [0439] a combination thereof;
[0440] (h) said SduA polypeptide is encoded by a nucleic acid sequence selected from the group referenced in Table 13; rows 2-1247, columns H and J;
[0441] (i) said GajA polypeptide is encoded by a nucleic acid sequence selected from the group referenced in Table 14, rows 2-4599, columns H and J, or
   [0442] said GajB polypeptide is encoded by a nucleic acid sequence selected from the group referenced in Table 14, rows 2-4599, columns L and N, or
   [0443] a combination thereof;
[0444] (j) said PtuA polypeptide is encoded by a nucleic acid sequence selected from the group referenced in Table 15, rows 2-2507, columns H and J, or
   [0445] said PtuB polypeptide is encoded by a nucleic acid sequence selected from the group referenced in Table 15, rows 2-2507, columns L and N, or
   [0446] a combination thereof;
[0447] (k) said LmuA polypeptide is encoded by a nucleic acid sequence selected from the group referenced in Table 16, rows 2-698, columns H and J, or
   [0448] said LmuB polypeptide is encoded by a nucleic acid sequence selected from the group referenced in Table 16, rows 2-698, columns L and N, or
   [0449] a combination thereof;
[0450] (l) said KwaA polypeptide is encoded by a nucleic acid sequence selected from the group referenced in Table 17, rows 2-935, columns H and J, or
   [0451] said KwaB polypeptide is encoded by a nucleic acid sequence selected from the group referenced in Table 17, rows 2-935, columns L and N, or
   [0452] a combination thereof;
[0453] (m) said JetA polypeptide is encoded by a nucleic acid sequence selected from the group referenced in Table 11, rows 2-2322, columns J and L, or
   [0454] said JetB polypeptide is encoded by a nucleic acid sequence selected from the group referenced in Table 11, rows 2-2322, columns N and P, or
   [0455] said JetC polypeptide is encoded by a nucleic acid sequence selected from the group referenced in Table 11, rows 2-2322, columns R and T, or
   [0456] said JetD polypeptide is encoded by a nucleic acid sequence selected from the group referenced in Table 11, rows 2-2322, columns V and X, or
   [0457] a combination thereof;
[0458] (n) said JetAⁱⁱ polypeptide is encoded by a nucleic acid sequence selected from the group referenced in Table 11, rows 2323-2844, columns J and L, or
   [0459] said JetBⁱⁱ polypeptide is encoded by a nucleic acid sequence selected from the group referenced in Table 11, rows 2323-2844, columns N and P, or
   [0460] said JetCⁱⁱ polypeptide is encoded by a nucleic acid sequence selected from the group referenced in Table 11, rows 2323-2844, columns R and T, or
   [0461] said JetDⁱⁱ polypeptide is encoded by a nucleic acid sequence selected from the group referenced in Table 11, rows 2323-2844, columns V and X, or
   [0462] a combination thereof;
[0463] (o) said JetAⁱⁱⁱ polypeptide is encoded by a nucleic acid sequence selected from the group referenced in Table 11, rows 2845-3174, column J and L, or
   [0464] said JetBⁱⁱⁱ polypeptide is encoded by a nucleic acid sequence selected from the group referenced in Table 11, rows 2845-3174, columns N and O, or
   [0465] said JetCⁱⁱⁱ polypeptide is encoded by a nucleic acid sequence selected from the group referenced in Table 11, rows 2845-3174, columns R and T, or
   [0466] said JetDⁱⁱⁱ polypeptide is encoded by a nucleic acid sequence selected from the group referenced in Table 11, rows 2845-3174, columns V and X, or
   [0467] a combination thereof.

[0468] In another related aspect, disclosed herein is a nucleic acid construct wherein expression of said defense system from the nucleic acid construct in a host cells provides the host cell with resistance to foreign nucleic acid invasion. In another related aspect, resistance to foreign nucleic acid invasion comprises resistance to at least one phage infection, or resistance to plasmid transformation, or resistance to entry of a conjugation element, or any combination thereof.

[0469] In another aspect, disclosed herein is a transmissible genetic element or an expression vector comprising a nucleic acid construct as disclosed herein.

[0470] In another aspect, disclosed herein is an isolated cell expressing a nucleic acid construct as disclosed herein. In a related aspect, the cell comprises a gram-positive bacterium or a gram-negative bacterium. In another related aspect, the cell comprises resistance to foreign nucleic acid invasion. In still another related aspect, the resistance to foreign nucleic acid invasion comprises resistance to at least one phage infection, or reduced plasmid transformation efficiency, or resistance to entry of a conjugation element, or a combination thereof.

[0471] In another aspect, disclosed herein is a food, food additive, feed, nutritional supplement, probiotic supplement, personal care product, health care product, and or a veterinary product comprising any defense system or combination of defense systems as disclosed herein, or the nucleic acid construct or combination of constructs as disclosed herein, or the transmissible genetic element as disclosed herein, or the isolated cell as disclosed herein.

[0472] In a related aspect, the defense system or combination of defense systems included in a food, food additive, feed, nutritional supplement, probiotic supplement, personal care product, health care product, and or a veterinary product disclosed herein, comprises a combination of Defense Systems selected from Defense Systems Ia-Xc (a)-(o).

[0473] In another aspect, disclosed herein is a method of preparing a food, a food additive, a feed, a nutritional supplements, a probiotic supplement, a personal care product, a health care product or a veterinary product, the method comprising adding to the food, food additive, feed, nutritional supplement, probiotic supplement, personal care product, health care product, or veterinary product at least one defense system as disclosed herein, or the nucleic acid construct as disclosed herein, or the transmissible genetic element disclosed herein, or the isolated cell disclosed herein.

[0474] In another aspect, disclosed herein is a method for identifying a defense system in a prokaryotic cell, comprising the steps of:
[0475] (a) selecting, in-silico, a family of genes that are preferentially located in close proximity to a known defense-related gene family present in a plurality of prokaryotic genomes; and
[0476] (b) analyzing, in-silico, the DNA upstream and downstream of said gene; and
[0477] (c) identifying, in-silico, a cassette of genes within the upstream and downstream DNA analyzed in step (b) comprising said gene of step (a), wherein said cassette of genes has conserved synteny in said plurality of prokaryotic genomes.

[0478] In a related aspect, in a method of identifying a defense system, the gene of step (a), located in close proximity to a known defense related gene family, is within 10 genes upstream and or 10 genes downstream of the known defense related gene family.

[0479] In another aspect, disclosed herein is a method gene editing, said method comprising contacting a nucleic acid sequence comprising a gene to be edited with at least one polypeptide component of a defense system, wherein said defense system component comprises a component selected from the components of the defense system disclosed herein, wherein said method results in the gene being edited.

### BRIEF DESCRIPTION OF THE DRAWINGS

[0480] The subject matter disclosed herein is particularly pointed out and distinctly claimed in the concluding portion of the specification. The defense systems described, however, both as to organization and method of operation, together with objects, features, and advantages thereof, may best be understood by reference to the following detailed description when read with the accompanying drawings in which:

[0481] FIGS. 1A-1C presents the strategy and initial results for the discovery of new anti-phage defense systems in defense islands. FIG. 1A illustrates the computational analysis employed for each pfam found to be enriched in defense islands. Pfams that are enriched in the vicinity of known defense genes are identified, and their neighboring genes are clustered based on sequence homology to identify conserved cassettes that represent putative defense systems. FIG. 1B presents a bar graph showing the tendency of protein families to occur next to defense genes. The genomic neighborhood for each member gene in each pfam is examined, and the fraction of member genes occurring in the vicinity (10 genes on each side) of one or more known defense genes is recorded. A set of 123 pfams known to participate in anti-phage defense (“positive set”) are represented in pink; the remaining 13,960 pfams analyzed in this study are shown in blue. FIG. 1C presents the neighborhood variability score for analyzed pfams. Scores represent the fraction of pfams members occurring in different defense neighborhoods out of total occurrences of pfam members. (Pink, the 123 positive pfams; blue, a set of 576 pfams that passed the 65% threshold for fraction of members occurring with defense genes in proximity.)

[0482] FIGS. 2A and 2B present the distribution of predicted functions for pfams genomically associated with known defense genes. FIG. 2A presents the pfams retrieved from prediction cycle #1. FIG. 2B presents the pfams retrieved from prediction cycle #2.

[0483] FIGS. 3A-3H show the flowchart and experimentally verified defense systems. (FIG. 3A) Flowchart of the experimental verification strategy. (FIG. 3B) Active defense systems cloned into B. subtilis. (FIG. 3C) Active defense systems cloned into E. coli. For FIGS. 3B and 3C, the fold protection was measured using serial dilution plaque assays, comparing the system-containing strain to a control strain that lacks the system and has an empty vector instead. Data represents average of 3 replicates (FIGS. 3E and 3F). Numbers below phage names represent phage genome size. On the right of FIGS. 3B and 3C, gene organization of the defense systems, with identified domains indicated (DUF, domain of unknown function). Gene sizes are drawn to scale, scale bar represents 400 amino acids. FIG. 3D presents the initial data demonstrating that the ZORYA type I system provides protection against phages as evaluated by serial dilution plaque assay. E. coli MG1655 strain (control) and E. coli MG1655 strain (control) transfected with the ZORYA system I of ZORYA locus of Escherichia coli (E. coli) E24377A and challenged with the indicated phages (phage T4, phage T7, phage lambda vir t [an obligatory lytic mutant of phage lambda], SECphi27, SECphi17, and SECphi18). Columns represent serial 10-fold dilutions of the initial phage stock concentration. The leftmost column represents 10⁻² (100 fold) dilution, the second column from the right represents 10⁻³ (1000 fold dilution), and so on until the leftmost column that represents 10 million fold dilution. FIG. 3E presents the efficiency of plating (EOP) of Bacillus phages on defense systems cloned into B. subtilis BEST7003. Data represent PFU/ml values, average of 3 replicates; error bars are STD. When two representations of the same system are indicated (e.g. Thoeris I and Thoeris II), order of systems is as in FIG. 3B. FIG. 3F presents efficiency of plating (EOP) of coliphages on defense systems cloned into E. coli MG1655. Data represent PFU/ml values, average of 3 replicates; error bars are STD. Order of defense systems in each graph is as in FIG. 3C. FIG. 3G presents efficiency of plating (EOP) of Bacillus phage SpBeta on defense systems mutated in individual genes. Data represent PFU/ml values of SpBeta phage infecting WT and mutated systems. Average of 3 replicates; error bars are STD. Gene deletion results for systems Zorya, Thoeris, Wadjet and Druantia appear in FIGS. 4, 5, 7, and 6, respectively. Gene deletion attempts for the Kiwa system were not successful. FIG. 3H presents distribution of defense systems in sequenced microbial genomes. For each system, phyla in which instances of the system were detected are indicated. Top left pie chart represents the entire set of microbial genomes analyzed, and is shown in order to provide a reference for the phylogenetic distribution of the species whose genomes were sequenced. Data on individual instances of each system are found in Tables 4 and 8-18.

[0484] FIGS. 4A-4J present the identified members of the Type I and Type II ZORYA defense systems and analysis thereof. FIG. 4A shows schematic representative instances of the Type I ZORYA system and their defense island context. In the last four embodiments, genes known to be involved in defense are orange. Mobilome genes are in dark grey. RM—restriction modification; TA—toxin-antitoxin; Abi—abortive infection; Wadjet and DISARM are other defense systems identified herein. FIG. 4B presents the domain organization of the Type I ZORYA system comprising zorA (A), zorB (B), zorC (C) and zorD (D). FIG. 4C presents a schematic of the ZORYA type I defense system locus of Escherichia coli (E. coli) E24377A used for cloning. Numbers represent position on the E. coli E24377A genome. Specifically, nucleotides 298890-307639 of the reverse strand were cloned into the E. coli MG1655 genome (SEQ ID NO: 14). FIG. 4D shows multiple schematic representative instances of the Type II ZORYA system and their defense island context. Genes known to be involved in defense are orange. Mobilome genes are in dark grey. RM—restriction modification; TA—toxin-antitoxin; Druantia is another defense systems identified herein. FIG. 4E presents the domain organization of the Type II ZORYA system comprising zorA (A), zorB (B), and zorE (E). Domain organization of zorA and zorB are as in FIG. 4B. FIG. 4F presents a model of the flagellum base. The position of the MotAB complex is indicated. FIG. 4G presents percent phage infection of Zorya-containing cells in solid cultures. FIG. 4H presents optical density (O.D.) versus time post infection of phage infected Zorya Defense System Ia-containing bacteria in liquid cultures. FIG. 4I presents optical density (O.D.) versus time post infection of phage infected Zorya Defense System Ib-containing bacteria in liquid cultures. FIG. 4J presents the efficiency of plating (EOP) of phage SECphi27 infecting WT Type I ZORA, deletion strains, and strains with point mutations. Data represent PFU/ml, average of 3 replicates with error bars representing STD. ZorA:T147A/S184A and ZorB:D26N are predicted to abolish proton flux; ZorC:E400A/H443A are mutations in two conserved residues in pfam15611 (“EH domain”) whose function is unknown; ZorD:D730A/E731A are mutations in the Walker B motif, predicted to abolish ATP hydrolysis.

[0485] FIGS. 5A-5E present the identified members of the Thoeris system and analysis thereof. FIG. 5A shows schematic representative instances of the Thoeris (SIR2-TIR) system and their defense island context. In each row of the top set of systems identified, the red gene is the thsA gene (Sir2-domain; pfam13289) gene; the immediately downstream gene is the thsB gene (TIR domain; pfam08937 or pfam13676) gene. In the last four systems presented, the Thoeris genes thsA (containing NAD-binding domain) and thsB (TIR domain) are marked dark and light green, respectively. Genes known to be involved in defense are orange. Mobilome genes are in dark grey. RM, restriction-modification; TA, toxin-antitoxin; Abi, abortive infection. FIG. 5B presents schematic representations of two Thoeris systems identified and analyzed in this study, shown to protect against myophages. Locus tag accessions are indicated for the individual genes. FIG. 5C presents the efficiency of plating (EOP) results of phage SBSphiJ infection with WT and mutated versions of the B. amyloliquefaciens Y2 Thoeris (FIG. 5B top set) or B. cereus MSX-D12 Thoeris (FIG. 5B bottom set) cloned into B. subtilis BEST7003. Average of 3 replicates, error bars represent STD. FIG. 5D shows the initial results demonstrating that the Thoeris system (SIR2-TIR system) provides protection against phages as evaluated by plaque assay. Phage used were SBSphiC, SBSphiJ and SPO1. FIG. 5E presents predictions of the active site in ThsB polypeptide. Shown is an alignment of the ThsB gene from Bacillus amyloliquefaciens Y2 to SARM1 and MliB. Numbers in the alignment represent position in the protein sequence. Positions of verified active sites for MliB and SARM1, and the predicted active site of ThsB, are indicated.

[0486] FIGS. 6A-6C present the identified members of the Druantia system and analysis thereof. FIG. 6A presents representative instances of Druantia types I, II and III and their defense island context. The system is characterized by a gene encoding a large (1800aa-2100aa) polypeptide with a DUF1998 domain (druE), preceded by 3, 2, or 1 genes encoding hypothetical proteins with no domain annotation, for Types I, II and III, respectively. In some Type I cases, a gene encoding a polypeptide with a pfam14236 (DUF4338) domain (druA gene; DruA polypeptide) is associated with the system. Type II systems are typically associated with a cytosine methylase gene (DruM). Genes known to be involved in defense are orange. Mobilome genes are in dark grey. RM, restriction-modification; TA, toxin-antitoxin; Zorya, a defense system identified in this study. FIG. 6B presents the Druantia systems that was cloned (Example 6) and experimentally shown to protect against coliphages. Locus tag accessions are indicated for the individual genes. FIG. 6C presents data showing gene deletions render the Druantia defense system inactive. DruA deletion was not tested due to technical reasons. Data represent EOP, average of 3 replicates; error bars are STD.

[0487] FIG. 7A-7C present the identified members of the Wadjet system and analysis thereof. The Wadjet system was shown to provide protection against plasmid transformation in B. subtilis. (FIG. 7A) Representative instances of the Wadjet system and their defense island context. Genes known to be involved in defense are orange. RM, restriction-modification; TA, toxin-antitoxin; Abi, abortive infection. (FIG. 7B) Domain organization of the three types of Wadjet. (FIG. 7C) Wadjet reduces plasmid transformation efficiency in B. subtilis. Wadjet systems were taken from B. cereus Q1 (Type I), Bacillus vireti LMG 21834 (Type II) and Bacillus thuringiensis serovar finitimus YBT-020 (Type III) (Table 4) and cloned into B. subtilis BEST7003. Gene deletions and point mutations are of the B. cereus Q1 Type I Wadjet. Transformation efficiency of plasmid pHCMC05 into Wadjet-containing strains is presented as a percentage of the transformation efficiency to B. subtilis BEST7003 carrying an empty vector instead of the Wadjet system. Average of 3 replicates; error bars represent STD.

### DETAILED DESCRIPTION

[0488] In the following detailed description, numerous specific details are set forth in order to provide a thorough understanding of the defense systems disclosed herein, including cells comprising these systems, methods of producing cells comprising these systems, methods of identifying the defense systems, and products, for example but not limited to food products or probiotic supplements, that may comprise these the defense systems. In some instances, well-known methods, procedures, and components have not been described in detail so as not to obscure the present disclosure.

[0489] The evolutionary pressure imposed by phage predation on bacteria has resulted in the development of both anti-phage bacterial resistance systems and counter-resistance mechanisms developed by phages. Harnessing the anti-phage bacterial mechanisms to improve industrial processes by e.g. curtailing the propagation and evolution of phages in fermentation vats in the manufacturing of food products, commodity chemicals, and biotechnology products is a standing goal in biological research. On the counter arm, properly formulated and applied phages or their defense mechanisms have sufficient potential to cure bacterial infections.

[0490] In some embodiments, disclosed herein are the defense systems, including but not limited to anti-phage defense systems, methods for producing and using such defense systems, and methods of countering such defense systems. In some embodiments, disclosed herein are defense systems that provide a host cell with resistance to foreign nucleic acid invasion. In some embodiments, a defense system described herein, provides the host cell with resistance to a foreign nucleic acid invasion, wherein the foreign nucleic acid invasion comprises resistance to at least one phage infection, or resistance to plasmid transformation, or a combination of resistance to at least one phage infection and resistance to plasmid transformation. In some embodiments, it is the combination of defense systems that provides a host cell with resistance to a foreign nucleic acid invasion.

[0491] Taken together, the disclosure presented herein of anti-phage defense systems or functional portions thereof may in some embodiments be used for conferring phage resistance in microbial cells. Bacteria comprising these anti-phage defense systems can be utilized for example in the dairy industry, where phages cause serious annual losses, as well as in other industries that rely on large-scale bacterial fermentation for biotechnological production. Alternatively, an agent able to antagonize a defense system may in some embodiments can be used as an antibiotic or in conjunction with known antibiotics.

[0492] In addition, embodiments disclosed herein include methods of use of defense systems for gene editing, for example but not limited to, for cloning and cutting a nucleic acid sequence leading to specific deletion of a gene, repair of a gene, or replacement of a gene.

Genetic Systems that Defend Against Foreign Nucleic Acid (DNA and RNA)

[0493] In some embodiments, disclosed herein is a genetic system that defends a host cell against foreign nucleic acid invasion. One skilled in the art would appreciate that defense against a foreign nucleic acid invasion may encompass, defending against entry of a foreign nucleic acid into the host cell, as well as, defending against the actions of a foreign nucleic acid that has entered the host cell. In some embodiments, defense against a foreign nucleic acid invasion comprises defense from phage infection. In some embodiments, defense against a foreign nucleic acid invasion comprises defense from plasmid transformation. In some embodiments, defense against a foreign nucleic acid invasion comprises defense against entry of a conjugative element. In some embodiments, defense against a foreign nucleic acid invasion comprises defense against any combination of phage infection, plasmid transformation, and entry of a conjugative element.

[0494] In some embodiments a foreign nucleic acid comprises a foreign DNA. In some embodiments a foreign nucleic acid comprises a foreign RNA.

[0495] In some embodiments, disclosed herein is a genetic system that defends against foreign DNA. (Tables 4, and 6-17) The skilled artisan would appreciate that as used herein the term “defense system” encompasses genetic systems that defend against foreign nucleic acid elements, including foreign DNA elements and foreign RNA elements.

[0496] In some embodiments, a defense system described herein functions as an anti-phage defense system, wherein the system provides a microbial cell resistance to phage infection. In some embodiments, a defense system described herein functions as an anti-phage defense system, wherein the system provides bacteria resistance to phage infection. In some embodiments, the defense system functions as an anti-plasmid transformation defense system, wherein the system reduces the transformation of a host cell by plasmid vectors. In some embodiments, the defense system functions as an anti-plasmid transformation defense system, wherein the system reduces the transformation of a microbial cell by plasmid vectors. In some embodiments, the defense system functions as an anti-plasmid transformation defense system, wherein the system reduces the transformation of bacteria by plasmid vectors.

[0497] The skilled artisan would appreciate that a defense system may in some embodiments, be introduced into a microbial cell in which such a defense system is not present. In some embodiments, a defense system may be introduced into a bacterium cell in which such a defense system is not present. In some embodiments, a defense system may be introduced into a microbial cell in which such a defense system is not functional. In some embodiments, a defense system may be introduced into a bacterium cell in which such a defense system is not functional. In some embodiments, a defense system may be introduced into a microbial cell in which such a defense system is not expressed. In some embodiments, a defense system may be introduced into a bacterium cell in which such a defense system is not expressed.

[0498] In some embodiments, introduction of a defense system into a microbial cell in which such a defense system is not present, provides the microbial cell resistance to foreign nucleic acid invasion. In some embodiments, integration of a defense system into the genome of a microbial cell in which such the defense system is not present, provides the microbial cell resistance to foreign nucleic acid invasion. In some embodiments, integration of functional components of a defense system into the genome of a microbial cell in which such the defense system is not present, provides the microbial cell resistance to foreign nucleic acid invasion. In some embodiments, integration of at least one functional component of a defense system into the genome of a microbial cell in which such the defense system is not present, provides the microbial cell resistance to foreign nucleic acid invasion.

[0499] In some embodiments, introduction of a defense system into a microbial cell in which such a defense system is not present, provides the microbial cell resistance to phage infection. In some embodiments, integration of a defense system into the genome of a microbial cell in which such the defense system is not present, provides the microbial cell resistance to phage infection. In some embodiments, integration of functional components of a defense system into the genome of a microbial cell in which such the defense system is not present, provides the microbial cell resistance to phage infection. In some embodiments, integration of at least one functional component of a defense system into the genome of a microbial cell in which such the defense system is not present, provides the microbial cell resistance to phage infection.

[0500] In some embodiments, introduction of a defense system into a bacterium cell in which such a defense system is not present, provides the bacterium resistance to foreign nucleic acid invasion. In some embodiments, introduction of a defense system into a bacterium cell in which such a defense system is not present, provides the bacterium resistance to phage infection. In some embodiments, integration of a defense system into the genome of a bacterial cell in which such the defense system is not present, provides the bacterium cell resistance to phage infection. In some embodiments, integration of functional components of a defense system into the genome of a bacterium cell in which such the defense system is not present, provides the bacterium cell resistance to phage infection. In some embodiments, integration of at least one functional component of a defense system into the genome of a bacterium cell in which such the defense system is not present, provides the bacterial cell resistance to phage infection. Resistance to phage infection in bacteria may occur for example, but not limited to, abortive infection of a phage, blocking phage adsorption to the bacterium surface, acquired immunity, preventing phage lysogeny in bacteria, causing degradation of phage genome in bacteria, inhibition of phage replication, and inhibition of phage genome replication. not causing an abortive infection;

[0501] In some embodiments, a defense system disclosed herein is not present in a microbial cell species. In some embodiments, a defense system disclosed herein is not present in a bacterial cell species.

[0502] In some embodiments, a defense system disclosed herein is not functional in a microbial cell species. In some embodiments, a defense system disclosed herein is not functional in a bacterial cell species. Thus, in some embodiments, introduction of a defense system into a microbial cell lacking a functional version of the defense system disclosed herein, provides resistance to foreign nucleic acid invasion. In some embodiments, introduction of a defense system into a microbial cell lacking a functional version of the defense system disclosed herein, provides resistance to phage infection.

[0503] In some embodiments, introduction of a defense system into a microbial cell in which such a defense system is not present, provides the microbial cell resistance to plasmid transformation. In some embodiments, integration of a defense system into the genome of a microbial cell in which such the defense system is not present, provides the microbial cell resistance to plasmid transformation. In some embodiments, integration of functional components of a defense system into the genome of a microbial cell in which such the defense system is not present, provides the microbial cell resistance to plasmid transformation. In some embodiments, integration of at least one functional component of a defense system into the genome of a microbial cell in which such the defense system is not present, provides the microbial cell resistance to plasmid transformation.

[0504] In some embodiments, introduction of a defense system into a bacterium cell in which such a defense system is not present, provides the bacterium resistance to plasmid transformation. In some embodiments, integration of a defense system into the genome of a bacterial cell in which such the defense system is not present, provides the bacterium cell resistance to plasmid transformation. In some embodiments, integration of functional components of a defense system into the genome of a bacterium cell in which such the defense system is not present, provides the bacterium cell resistance to plasmid transformation. In some embodiments, integration of at least one functional component of a defense system into the genome of a bacterium cell in which such the defense system is not present, provides the bacterial cell resistance to plasmid transformation. Resistance to plasmid in bacteria may occur for example, but not limited to, reduced transformation efficiency, inhibition of plasmid establishment, and or inhibition of transformation.

[0505] In some embodiments, introduction of a defense system into a bacterium cell in which such a defense system is not present, provides the bacterium protection from conjugative elements. In some embodiments, integration of a defense system into the genome of a bacterial cell in which such the defense system is not present, provides the bacterium cell protection from conjugative elements. In some embodiments, integration of functional components of a defense system into the genome of a bacterium cell in which such the defense system is not present, provides the bacterium cell resistance to conjugation with another bacterium. In some embodiments, integration of at least one functional component of a defense system into the genome of a bacterium cell in which such the defense system is not present, provides the bacterial cell resistance to conjugation with another bacterium. The skilled artisan would appreciate that the term “conjugative elements” may encompass mobile genetic elements, plasmids, and transposons.

[0506] A skilled artisan would appreciate that a defense system includes but is not limited to a system that defends a cell from foreign nucleic acid. In some embodiments, a defense system includes but is not limited to a system that defends a cell from foreign DNA. In some embodiments, a defense system includes but is not limited to a system that defends a cell from foreign RNA. In some embodiments, a defense system includes but is not limited to an anti-plasmid system. In some embodiments, a defense system includes but is not limited to an anti-transposon system. In some embodiments, a defense system includes but is not limited to an anti-conjugation system. In some embodiments, a defense system includes but is not limited to an anti-phage system.

[0507] In some embodiments, the nucleic acid comprises a linear nucleic acid molecule. In some embodiments, the nucleic acid comprises circular nucleic acid molecule. In some embodiments, the nucleic acid comprises a single stranded nucleic acid molecule. In some embodiments, the nucleic acid comprises a double stranded nucleic acid molecule. The skilled artisan would appreciate that foreign nucleic acid may in some embodiments, encompass any nucleic acid molecule foreign to, for example, but not limited to a microbial cell, a bacterium cell, or an archaeal cell.

[0508] In some embodiments, a foreign nucleic acid comprises a foreign DNA or foreign RNA. In some embodiments, a foreign DNA or foreign RNA comprises a phage. In some embodiments, a foreign DNA or foreign RNA comprises a plasmid. In some embodiments, a foreign DNA or foreign RNA comprises a conjugative element. In some embodiments, a foreign DNA or foreign RNA comprises a mobile genetic element. In some embodiments, a foreign DNA or foreign RNA comprises a mobile genetic element.

[0509] In some embodiments, a defense system protects bacteria from phage infection. In some embodiments, a defense system protects bacteria from plasmid transformation. In some embodiments, a defense system protects bacteria from conjugative elements. In some embodiments, a defense system provides a bacteria resistance to phage infection. In some embodiments, a defense system provides a bacteria resistance to plasmid transformation. In some embodiments, a defense system provides a bacteria resistance to entry of conjugative elements.

[0510] Disclosed herein, is the identification of defense systems. In some embodiments, the components of a defense system are located in a gene cluster in a prokaryotic cell. The terms “gene cluster”, “cassette of genes”, “cassette”, and “components of a system”, may in some embodiments herein be used interchangeably having all the same meanings and qualities.

[0511] In some embodiments, each gene of a “cassette of genes” comprises a nucleic acid sequence encoding a polypeptide component of the defense system. In some embodiments, a “cassette of genes” comprises nucleic acid sequences encoding components of the defense system including open reading frames encoding defense system polypeptide components, regulatory sequences, and non-coding RNAs. A skilled artisan would appreciate that a “cassette of genes” may encompass an operon. In some embodiments, a cassette of genes comprises regulatory sequences. In some embodiments, a cassette of gene comprises non-coding RNAs.

[0512] In some embodiments, disclosed herein is a nucleic acid construct of a Defense System. In some embodiments, a nucleic acid construct of a Defense System comprises at least two nucleic acid constructs each expressing at least one of the polypeptide components of the Defense System. In some embodiments, disclosed herein is a nucleic acid construct of a Defense System comprising at least two nucleic acid constructs each expressing at least one functional polypeptide component of the Defense System.

[0513] In some embodiments, the nucleic acid construct comprises a plurality of constructs each expressing a single component of a Defense System described herein. In some embodiments, the nucleic acid construct comprises a plurality of constructs each expressing a single functional component of a Defense System described herein.

[0514] In some embodiments, a single nucleic acid construct encodes a number of polypeptide components of a Defense System described herein. In some embodiments, a single construct encodes a number of functional polypeptide components of a Defense System described herein.

[0515] A skilled artisan would recognize that the term “anti-phage activity” or “resistant to infection by at least one phage” encompasses an activity providing increased resistance of a host cell to infection by at least one phage in comparison to the host cell of the same species under the same developmental stage (e.g. culture state) which does not express the functional defense system. In some embodiments, a host cell may comprise a microbial cell. In some embodiments, a host comprises a bacterium. Anti-phage activity or resistance of a host cell to infection by at least one phage may be determined by, for example but not limited to, bacterial viability, phage lysogeny, phage genomic replication or phage genomic degradation, or a combination thereof.

[0516] A skilled artisan would appreciate that the term “abortive infection (Abi)” encompasses a controlled cell death of an infected bacterial cell which takes place prior to the production of phage progeny, thus protecting the culture from phage propagation. Methods of analyzing Abi include, but are not limited to cell survival assays using high multiplicity of infection, one step growth assays and determination of phage DNA replication by e.g. DNA sequencing and southern blot analysis as further described hereinbelow.

[0517] A skilled artisan would appreciate that the phrase “not affecting phage adsorption” encompasses a non-statistically significant difference in phage adsorption to bacteria expressing a functional defense system in comparison to bacteria of the same species under the same developmental stage (e.g. culture state) which does not express a functional defense system.

[0518] A skilled artisan would appreciate that the term “adsorption” encompasses the attachment to the host (e.g. bacteria) cell surface via plasma membrane proteins and glycoproteins. Methods of analyzing phage adsorption include, but are not limited to enumerating free phages in bacterial cultures infected with the phages immediately after phage addition and at early time points (e.g. 30 minutes) following phage addition as further described hereinbelow.

[0519] A skilled artisan would appreciate that the term “prevent” or “preventing” encompasses a decrease in activity (e.g. phage genomic replication, phage lysogeny, circularization of phage genome) in bacteria expressing a functional defense system in comparison to bacteria of the same species under the same developmental stage (e.g. culture state) which does not express a functional defense system. According to specific embodiments the decrease is at least 1.5 fold, at least 2 fold, at least 3 fold, at least 5 fold, at least 10 fold, or at least 20 fold as compared to same in the absence of the functional defense system.

[0520] A skilled artisan would appreciate that the term “resistance” to, for example, foreign nucleic acid invasion, encompasses a decrease in activity (e.g. phage genomic replication, phage lysogeny, circularization of phage genome) in bacteria expressing a functional defense system in comparison to bacteria of the same species under the same developmental stage (e.g. culture state) which does not express a functional defense system. According to specific embodiments the decrease provided by such resistance to foreign nucleic acid invasion is at least 1.5 fold, at least 2 fold, at least 3 fold, at least 5 fold, at least 10 fold, or at least 20 fold as compared to same in the absence of the functional defense system.

[0521] A skilled artisan would appreciate that the term “phage genomic replication” encompasses production of new copies of the phage genome which can be dsDNA or ssDNA. Methods of analyzing phage genomic replication are well known in the art, and in the Examples section which follows.

[0522] A skilled artisan would appreciate that the term “lysogeny” encompasses the incorporation of the phage genetic material inside the genome of the host (e.g. bacteria). Methods of analyzing phage lysogeny are well known in the art and include, but not limited to, DNA sequencing and PCR analysis. Typically, when a temperate phage infects a bacterium, its genetic material becomes circular before it incorporates into the bacterial genome. Circularization of phage genome can be analyzed by methods well known in the art including, but not limited to, PCR analysis as described e.g. in the Examples section which follows.

[0523] When referring to “degradation of phage genome” the meaning is the cleavage of the foreign phage genome by the host bacteria. Method of analyzing genomic degradation are well known in the art including, but not limited to, DNA sequencing and PCR analysis.

[0524] A skilled artisan would appreciate that the term “restriction modification system” may encompass a restriction entity having an activity of cleaving a genomic molecule (e.g. DNA)/DNA and a modification entity capable of protecting (e.g., by methylation) the host DNA from the cleavage by the restriction enzyme e.g. by methylating the host DNA. Analyzing restriction modification mode of action include, but is not limited to, evaluation of host specific methylation, presence of degraded foreign DNA and host cell death in the absence of the modification enzyme by methods described herein.

[0525] In some embodiments, a functional defense system leads to an abortive infection in bacteria expressing the defense system. In some embodiments, a functional defense system reduces affect phage adsorption to bacteria expressing the defense system. In some embodiments, a functional defense system prevents phage genomic replication in bacteria expressing the defense system. In some embodiments, a functional defense system prevents phage lysogeny in bacteria expressing the defense system. In some embodiments, a functional defense system prevents circularization of a phage genome in bacteria expressing the defense system. In some embodiments, a functional defense system leads to degradation of a phage genome in bacteria expressing the defense system. In some embodiments, a functional defense system comprises a restriction modification system. In some embodiments, a functional defense system comprises a gene editing system.

[0526] In some embodiments, a functional defense system does not lead to an abortive infection in bacteria expressing the defense system. In some embodiments, a functional defense system does not affect phage adsorption to bacteria expressing the defense system. In some embodiments, a functional defense system does not prevent phage genomic replication in bacteria expressing the defense system. In some embodiments, a functional defense system does not prevent phage lysogeny in bacteria expressing the defense system. In some embodiments, a functional defense system does not prevent circularization of a phage genome in bacteria expressing the defense system. In some embodiments, a functional defense system does not lead to degradation of a phage genome in bacteria expressing the defense system. In some embodiments, a functional defense system does not comprise a restriction modification system.

[0527] A skilled artisan would recognize that the term “anti-plasmid transformation” or “reducing the transformation of a host cell by a plasmid vector” encompasses an activity whereby a host cell, for example but not limited to bacteria, expressing a functional defense system as disclosed herein, has reduced transformation efficiency of an episomal plasmid, in comparison to the host cell of the same species under the same developmental stage (e.g. culture state) which does not express the functional defense system. Anti-plasmid transformation or reduction of transformation efficiency may be determined by, for example but not limited to, measuring plasmid transformation efficiency in the presence or absence of a defense system disclosed herein.

[0528] In some embodiments, a plasmid may undergo integration into the bacterial genome or may be episomal. In some embodiments, the plasmid is episomal. In some embodiments, the plasmid is integrative. In some embodiments, a Defense System disclosed herein, provides plasmid resistance.

[0529] The skilled artisan would appreciate that “plasmid resistance” or “anti-plasmid activity” encompasses an increase resistance of at least two-fold increased bacterial resistance towards plasmid transformation, in comparison to bacteria of the same species under the same developmental stage (culture state) which does not express the Defense System. In some embodiments, plasmid resistance may be manifested as viability of the bacteria. In some embodiments, plasmid resistance comprises decreased efficiency of transformation of the plasmid. According to a specific embodiment, the plasmid resistance is increased by at least two-fold, five-fold, ten-fold, twenty-fold, fifty-fold, one-hundred-fold, or one-thousand-fold.

[0530] Assays for testing plasmid resistance are well known in the art and include, but not limited to, a transformation assay such as described in Itaya and Tsuge [Methods Enzymol (2011) 498:427-47].

[0531] As used herein, the terms “the defense system” may in some embodiments be used interchangeably with the term “defense system” or “defense system” or “system”, having all the same meanings and qualities.

[0532] In some embodiments, different defense systems may be combined. Combination of defense systems, may in certain embodiments, provide multiple types of defense against foreign nucleic acid. For example, but not limited to defense against phage infection of phage from different families, or defense against phage infection and protection against conjugative elements, or defense against phage infection and resistance to plasmid transformation.

[0533] In some embodiments, a nucleic acid construct encodes an at least one defense system, said nucleic acid construct comprising nucleic acid sequences encoding polypeptide components of a defense system. In some embodiments, a nucleic acid construct described herein, encodes at least one defense system described herein. In some embodiments, a nucleic acid construct described herein, encodes at least one functional defense system described herein. In some embodiments, a nucleic acid construct comprises a nucleic acid encoding at least two different polypeptide components of the defense system. In some embodiments, a nucleic acid construct comprises a nucleic acid encoding at least one polypeptide components of the defense system. In some embodiments, a nucleic acid construct comprises a nucleic acid encoding at least three different polypeptide components of the defense system. In some embodiments, a nucleic acid construct comprises a nucleic acid encoding at least four two different polypeptide components of the defense system. In some embodiments, a nucleic acid construct comprises a nucleic acid encoding at least five different polypeptide components of the defense system.

[0534] In some embodiments, a nucleic acid construct encodes one component of the defense system, whereby multiple constructs may be used to assemble the functional defense system. In some embodiments, a nucleic acid construct encodes more than one component of the defense system but less than all of the components required for a functionally active defense system, whereby multiple constructs may be used to assemble the functional defense system. In some embodiments, a nucleic acid construct encodes more than one copy of a single component of the defense system, whereby multiple constructs may be used to assemble the functional defense system.

[0535] The skilled artisan would recognize that the “components” making up a functional defense system may in some embodiments, be also be referred to herein as the members of the “cassette of genes” identified to represent a defense system, wherein each component is encoded by a different gene. In some embodiments, a construct disclosed herein may comprise less than the full complement of polypeptides required for a functional defense system, whereby multiple constructs may be combined for expression of the functional defense system. In some embodiments, components comprise polypeptide molecules of a defense system. In some embodiments, components comprise non-coding RNAs. In some embodiments, components comprise promoters and other control elements.

[0536] In some embodiments, a defense system described herein comprises all of the polypeptide components as described herein. In some embodiments, a defense system comprises one of the polypeptide component as described herein. In some embodiments, a defense system comprises all of the polypeptide component as described herein. In some embodiments, a defense system comprises two of the polypeptide component as described herein. In some embodiments, a defense system comprises three of the polypeptide component as described herein. In some embodiments, a defense system comprises four of the polypeptide component as described herein. In some embodiments, a defense system comprises five of the polypeptide component as described herein. In some embodiments, a defense system comprises more than one copy of a particular polypeptide component of the defense system, as described herein.

[0537] A skilled artisan would appreciate that the term “nucleic acid sequence” and “polynucleotide”, which are interchangeably used herein, may encompass a single or double stranded nucleic acid sequence which is isolated and provided in the form of an RNA sequence, a complementary polynucleotide sequence (cDNA), a genomic polynucleotide sequence, and/or a composite polynucleotide sequences (e.g., a combination of the above).

[0538] In some embodiments, a nucleic acid construct disclosed herein encodes no more than 20, no more than 15, no more the 10 genes expression products. In some embodiments, a gene expression product comprises a component of a Defense System. In some embodiments, a gene expression product comprises a functional component of a Defense System. In some embodiments, a gene expression product comprises a portion of a component that is functional in a Defense System disclosed herein. In some embodiments, a gene expression product or a portion thereof is isolated. In some embodiments, a gene expression product or a portion thereof is comprised in a Defense System disclosed herein.

[0539] A skilled artisan would appreciate that the term “isolated” encompasses an element being at least partially separated from the natural environment, physiological environment e.g., a microorganism e.g., bacteria, e.g., a polypeptide, eg., a nucleic acid sequence.

[0540] A skilled artisan would appreciate that the term “polypeptide” encompasses native peptides (either degradation products, synthetically synthesized peptides or recombinant peptides) and peptidomimetics (typically, synthetically synthesized peptides), as well as peptoids and semipeptoids which are peptide analogs, which may have, for example, modifications rendering the peptides more stable while in a body or more capable of penetrating into cells. Such modifications include, but are not limited to N terminus modification, C terminus modification, peptide bond modification, backbone modifications, and residue modification. Methods for preparing peptidomimetic compounds are well known in the art and are specified, for example, in Quantitative Drug Design, C. A. Ramsden Gd., Chapter 17.2, F. Choplin Pergamon Press (1992), which is incorporated by reference as if fully set forth herein.

[0541] The polypeptides disclosed herein may be synthesized by any techniques known to those skilled in the art of peptide synthesis, for example but not limited to recombinant DNA techniques or solid phase peptide synthesis.

[0542] In some embodiments, a defense system comprises multiple nucleic acid constructs comprising nucleic acid sequences encoding polypeptide components of two or more functional the defense system. In some embodiments, the two or more functional the defense system do not naturally occur together in a cell in nature.

[0543] In some embodiments, each nucleic acid construct encoding a defense system or components of a defense system, further comprises a regulatory element or elements operably linked to the construct. In some embodiments, regulatory elements comprise a cis-acting regulatory element for directing expression of said nucleic acid sequence. In some embodiments, regulatory elements comprise a transmissible element for directing transfer of said nucleic acid sequence from one cell to another. In some embodiments, regulatory elements comprise a recombination element for integrating said nucleic acid sequence into a genome of a cell transfected with said construct. In some embodiments, regulatory elements comprise an element providing episomal maintenance of said construct within a cell transfected with said construct. In some embodiments, regulatory elements comprise a combination of a cis-acting regulatory element for directing expression of said nucleic acid sequence, a regulatory element comprising a transmissible element for directing transfer of said nucleic acid sequence from one cell to another, a regulatory element comprising a recombination element for integrating said nucleic acid sequence into a genome of a cell transfected with said construct, a regulatory element comprising an element providing episomal maintenance of said construct within a cell transfected with said construct, in any combination.

[0544] Defense Systems

[0545] In some embodiments, the defense systems disclosed herein may be a combination of defense systems. In some embodiments, a combination of the defense systems comprises an anti-phage system and an anti-plasmid system. In some embodiments, a combination of the defense systems comprises an anti-phage system and an anti-conjugative element system. In some embodiments, a combination of the defense systems comprises an anti-plasmid system and an anti-conjugative element system. In some embodiments, a combination of the defense systems comprises an anti-phage system, an anti-plasmid system, and an anti-conjugative element system. In some embodiments, a combination of the defense systems comprises an anti-phage system, an anti-plasmid system, or an anti-conjugative element system, or any combination thereof.

[0546] In some embodiments, introducing any of the defense systems disclosed herein, into eukaryotic cells, for example but not limited to bacteria cells, where they are not naturally found (therefore the defense system is non-naturally occurring), provides the host cells protection against phage infection.

[0547] In some embodiments, nucleic acid sequences or nucleic acid constructs may further include nuclear targeting signals (NLS) so that a nucleic acid sequence encoding a non-naturally polypeptide component, may be directed to the nucleus for expression. In some embodiments, nucleic acid sequences or nucleic acid constructs may further include nuclear targeting signals (NLS) so that multiple nucleic acid sequences encoding non-naturally polypeptide components or a defense system described herein, may be directed to the nucleus for expression. In some embodiments, nucleic acid sequences or nucleic acid constructs may further include nuclear targeting signals (NLS) so that combinations of nucleic acids encoding defense systems (polypeptides) described herein, may be directed to the nucleus for expression.

[0548] In some embodiments, introducing any of the defense systems disclosed herein, into eukaryotic cells, for example but not limited to bacteria cells, where they are not naturally found (therefore they are non-naturally occurring), provides the host cells protection against introduction of external DNA. In some embodiments, introducing any of the defense systems disclosed herein, into eukaryotic cells, for example but not limited to bacteria cells, where they are not naturally found, provides the host cells protection against introduction of external plasmid DNA. In some embodiments, introducing any of the defense systems disclosed herein, into eukaryotic cells, for example but not limited to bacteria cells, where they are not naturally found, provides the host cells protection against introduction of external conjugative elements.

[0549] In some embodiments, a combination of the defense systems comprises combining an anti-phage system and another anti-phage system. In some embodiments, a combination of the defense systems comprises combining an anti-phage system and more than one other anti-phage system. In some embodiments, a combination of the defense systems comprises combining an anti-phage system and two other anti-phage systems. In some embodiments, a combination of the defense systems comprises combining an anti-phage system and three other anti-phage systems. In some embodiments, a combination of the defense systems comprises combining an anti-phage system and four other anti-phage systems. In some embodiments, a combination of the defense systems comprises combining an anti-phage system and five other anti-phage systems. In some embodiments, a combination of the defense systems comprises combining an anti-phage system and six other anti-phage systems. In some embodiments, a combination of the defense systems comprises combining an anti-phage system and seven other anti-phage systems. In some embodiments, a combination of the defense systems comprises combining an anti-phage system and eight other anti-phage systems. In some embodiments, a combination of the defense systems comprises combining an anti-phage system and nine other anti-phage systems. In some embodiments, a combination of the defense systems comprises combining an anti-phage system and ten other anti-phage systems. In some embodiments, a combination of the defense systems comprises combining an anti-phage system and more than 10 other anti-phage systems. In some embodiments, a combination of the defense systems comprises combining an anti-phage system with between 2-15 other anti-phage systems. In some embodiments, a combination of the defense systems comprises combining an anti-phage system with between 2-7 other anti-phage systems. In some embodiments, a combination of the defense systems comprises combining an anti-phage system with between 7-15 other anti-phage systems.

[0550] In some embodiments, an at least one defense system comprises any of the defense systems described herein. In some embodiments, an at least one defense system comprises any combination of the defense systems described herein. In some embodiments, wherein a defense system comprises at least two different polypeptide components (See below and Table 18), an at least one defense system comprises at least two different polypeptide components of the defense system.

[0551] Below are non-limiting examples of defense systems, which in some embodiments may be used independently, and in other embodiments may be used in combinations.

[0552] The ZORYA Defense System

[0553] In some embodiments, a defense system disclosed herein comprises a ZORYA anti-phage defense system. In some embodiments, a ZORYA defense system (Defense System Ia or Defense system Ib) provides a host cell with resistance to entry of foreign nucleic acid invasion. In some embodiments, a host cell expressing a functional ZORYA defense system (Defense System Ia; or Defense System Ib) provides the host cell resistance foreign nucleic acid invasion.

[0554] In some embodiments, a ZORYA defense system provides a host cell with resistance to at least one phage. In some embodiments, a ZORYA Type I defense system provides a host cell with resistance to at least one phage. In some embodiments, a ZORYA Type II defense system provides a host cell with resistance to at least one phage. (Table 8)

[0555] In some embodiments, expression of a ZORYA defense system in bacteria protects the bacteria from phage infection. In some embodiments, expression of a ZORYA Type I defense system in bacteria protects the bacteria from phage infection. In some embodiments, expression of a ZORYA Type II defense system in bacteria protects the bacteria from phage infection.

[0556] In some embodiments, a ZORYA defense system (Defense System Ia or Defense system Ib) provides a host cell with resistance to plasmid transformation. In some embodiments, a host cell expressing a functional ZORYA defense system (Defense System Ia or Defense System Ib) provides a host cells with resistance to plasmid transformation.

[0557] In some embodiments, a ZORYA defense system (Defense system Ia or Ib) provides a host cell with resistance to entry of conjugative elements. In some embodiments, a host cell expressing a function ZORYA defense system (Defense System Ia or Ib) provides the host cell resistance from entry of conjugative elements.

[0558] As used herein, the term “a ZORYA anti-phage defense system” may be used interchangeably with the term “a Defense System I”, having all the same meanings and qualities. Further, in some embodiments, the term “a ZORYA Type I defense system” may be used interchangeably with the term “a Defense System Ia”, having all the same meanings and qualities. In some embodiments, the term “a ZORYA anti-phage defense system” may be used interchangeably with the term “a Defense System Ia”, having all the same meanings and qualities. Further, in some embodiments, the term “a ZORYA Type I defense system” may be used interchangeably with the term “a Defense System Ia”, having all the same meanings and qualities. In some embodiments, the term “a ZORYA anti-phage defense system” may be used interchangeably with the term “a Defense System Ib”, having all the same meanings and qualities. Further, in some embodiments, the term “a ZORYA Type I defense system” may be used interchangeably with the term “a Defense System Ib”, having all the same meanings and qualities.

[0559] In some embodiments, a ZORYA defense system provides a host cell with resistance to plasmid transformation. In some embodiments, a ZORYA Type I defense system provides a host cell with resistance to plasmid transformation. In some embodiments, a ZORYA Type II defense system provides a host cell with resistance to plasmid transformation.

[0560] As used herein, the term “ZORYA system” may be used interchangeably in some embodiments with “ZORYA defense system”, “ZORYA the defense system”, “ZORYA defense system”, “ZORYA anti-phage system”, “ZORYA Type I defense system”, “ZORYA Type II defense system”, “Defense System Ia” and “Defense System Ib”.

[0561] In some embodiments, a microbial species does not comprise an endogenous Defense System I. In some embodiments, a microbial species does not comprise an endogenous Defense System Ia. In some embodiments, a microbial species does not comprise an endogenous Defense System Ib. In some embodiments, a microbial species does not express an endogenous Defense System I. In some embodiments, a microbial species does not express an endogenous Defense System Ia. In some embodiments, a microbial species does not express an endogenous Defense System Ib. In some embodiments, a microbial species does not express an endogenous functional Defense System I. In some embodiments, a microbial species does not express an endogenous functional Defense System Ia. In some embodiments, a microbial species does not express an endogenous functional Defense System Ib.

[0562] In some embodiments, a bacterial species does not comprise an endogenous Defense System I. In some embodiments, a bacterial species does not comprise an endogenous Defense System Ia. In some embodiments, a bacterial species does not comprise an endogenous Defense System Ib. In some embodiments, a bacterial species does not express an endogenous Defense System I. In some embodiments, a bacterial species does not express an endogenous Defense System Ia. In some embodiments, a bacterial species does not express an endogenous Defense System Ib. In some embodiments, a bacterial species does not express an endogenous functional Defense System I. In some embodiments, a bacterial species does not express an endogenous functional Defense System Ia. In some embodiments, a bacterial species does not express an endogenous functional Defense System Ib.

[0563] A ZORYA Type I defense system (Defense System Ia) comprises, in some embodiments, a nucleic acid construct comprising a nucleic acid sequence encoding a ZorA polypeptide comprising a pfam01618 domain, a ZorB polypeptide comprising a pfam13677 domain or a pfam00691 domain or a combination thereof, a ZorC polypeptide comprising a pfam15611 domain, and a ZorD polypeptide comprising a pfam00176 domain or a pfam00271 domain or a combination thereof. In some embodiments, a ZORYA Type I defense system comprises a nucleic acid construct comprising a nucleic acid sequence encoding a ZorA polypeptide, a ZorB polypeptide, a ZorC polypeptide, and a ZorD polypeptide. In some embodiments, a ZORYA Type I defense system comprises a nucleic acid construct comprising a nucleic acid sequence comprising a zorA gene, a zorB gene, a zorC gene, and a zorD gene.

[0564] In some embodiments, a ZORYA Type I defense system (Defense System Ia) comprises a ZorA polypeptide comprising a pfam01618 domain, a ZorB polypeptide comprising a pfam13677 domain or a pfam00691 domain or a combination thereof, a ZorC polypeptide comprising a pfam15611 domain, and a ZorD polypeptide comprising a pfam00176 domain or a pfam00271 domain or a combination thereof. In some embodiments, a ZORYA Type I defense system (Defense System Ia) having an anti-phage activity comprises a ZorA polypeptide comprising a pfam01618 domain, a ZorB polypeptide comprising a pfam13677 domain or a pfam00691 domain or a combination thereof, a ZorC polypeptide comprising a pfam15611 domain, and a ZorD polypeptide comprising a pfam00176 domain or a pfam00271 domain or a combination thereof.

[0565] In some embodiments, a ZORYA Type I defense system (Defense System Ia) comprises at least two polypeptide components selected from a ZorA polypeptide comprising a pfam01618 domain, a ZorB polypeptide comprising a pfam13677 domain or a pfam00691 domain or a combination thereof, a ZorC polypeptide comprising a pfam15611 domain, and a ZorD polypeptide comprising a pfam00176 domain or a pfam00271 domain or a combination thereof. In some embodiments, a ZORYA Type I defense system (Defense System Ia) having an anti-phage activity comprises at least two polypeptide components selected from a ZorA polypeptide comprising a pfam01618 domain, a ZorB polypeptide comprising a pfam13677 domain or a pfam00691 domain or a combination thereof, a ZorC polypeptide comprising a pfam15611 domain, and a ZorD polypeptide comprising a pfam00176 domain or a pfam00271 domain or a combination thereof. In some embodiments, a ZORYA Type I defense system (Defense System Ia) comprises at least three polypeptide components selected from a ZorA polypeptide comprising a pfam01618 domain, a ZorB polypeptide comprising a pfam13677 domain or a pfam00691 domain or a combination thereof, a ZorC polypeptide comprising a pfam15611 domain, and a ZorD polypeptide comprising a pfam00176 domain or a pfam00271 domain or a combination thereof. In some embodiments, a ZORYA Type I defense system (Defense System Ia) having an anti-phage activity comprises at least three polypeptide components selected from a ZorA polypeptide comprising a pfam01618 domain, a ZorB polypeptide comprising a pfam13677 domain or a pfam00691 domain or a combination thereof, a ZorC polypeptide comprising a pfam15611 domain, and a ZorD polypeptide comprising a pfam00176 domain or a pfam00271 domain or a combination thereof. In some embodiments, a ZORYA Type I defense system (Defense System Ia) comprises at least four polypeptide components selected from a ZorA polypeptide comprising a pfam01618 domain, a ZorB polypeptide comprising a pfam13677 domain or a pfam00691 domain or a combination thereof, a ZorC polypeptide comprising a pfam15611 domain, and a ZorD polypeptide comprising a pfam00176 domain or a pfam00271 domain or a combination thereof. In some embodiments, a ZORYA Type I defense system (Defense System Ia) having an anti-phage activity comprises at least four polypeptide components selected from a ZorA polypeptide comprising a pfam01618 domain, a ZorB polypeptide comprising a pfam13677 domain or a pfam00691 domain or a combination thereof, a ZorC polypeptide comprising a pfam15611 domain, and a ZorD polypeptide comprising a pfam00176 domain or a pfam00271 domain or a combination thereof.

[0566] In some embodiments, a Defense System Ia comprises a ZorA polypeptide comprising a pfam01618 domain or comprising an amino acid sequence having at least 80% identity to a sequence selected from the group referenced in Table 8 rows 2-1830 columns J and K; or a ZorB polypeptide comprising a pfam13677 domain or a pfam00691 domain or a combination thereof, or comprising an amino acid sequence having at least 80% identity to a sequence selected from the group referenced in Table 8 rows 2-1830 columns N and O; or a ZorC polypeptide comprising a pfam15611 domain or comprising an amino acid sequence having at least 80% identity to a sequence selected from the group referenced in Table 8 rows 2-1174 columns R and S; or a ZorD polypeptide comprising a pfam00176 domain or a pfam00271 domain or a combination thereof, or comprising an amino acid sequence having at least 80% identity to a sequence selected from the group referenced in Table 8 rows 2-1174 columns V and W; or said Defense System Ia comprises any combination of polypeptide components ZorA, ZorB, ZorC, and ZorD.

[0567] A skilled artisan would appreciate that the term “comprising” encompasses inclusion of the recited elements, but not excluding others which may be optional. For example, but not limited to a defense system, a defense system may comprise a single polypeptide component, or may comprise multiple polypeptide components. For example, but not limited to a Defense System Ia, in some embodiments a Defense System Ia comprises at least two different polypeptide components selected from ZorA, ZorB, ZorC, and ZorD. In some embodiments, a Defense System Ia comprises at least three different polypeptide components selected from ZorA, ZorB, ZorC, and ZorD. In some embodiments, a Defense System Ia comprises polypeptide components ZorA, ZorB, ZorC, and ZorD.

[0568] A skilled artisan would appreciate that the phrase “consisting essentially of” may encompass, for example but not limited to, a defense system that includes the recited elements but exclude other elements that may have an essential significant effect on the performance of the method. In some embodiments, a Defense System Ia consists essentially of polypeptide components ZorA, ZorB, ZorC, and ZorD.

[0569] A skilled artisan would appreciate that the term “consisting of” may encompass, for example but not limited to, a defense system that includes the recited elements but not more than traces of other elements. Thus, in some embodiments, a Defense System Ia consists of a ZorA polypeptide, a ZorB polypeptide, a ZorC polypeptide, and a ZorD polypeptide.

[0570] Embodiments defined by each of these transition terms are within the scope of this invention.

[0571] A ZORYA Type II defense system (Defense System Ib) comprises, in some embodiments, a nucleic acid construct comprising a nucleic acid sequence encoding a ZorA polypeptide comprising a pfam01618 domain, a ZorB polypeptide comprising a pfam13677 domain or a pfam00691 domain or a combination thereof, and a ZorE polypeptide comprising a pfam01844 domain. In some embodiments, a ZORYA Type II defense system (Defense System Ib) comprises a nucleic acid construct comprising a nucleic acid sequence encoding a ZorA polypeptide, a ZorB polypeptide, and a ZorE polypeptide. In some embodiments, a ZORYA Type II defense system (Defense System Ib) comprises a nucleic acid construct comprising a nucleic acid sequence comprising a zorA gene, a zorB gene, and a zorE gene.

[0572] In some embodiments, a ZORYA Type II defense system (Defense System Ib) comprises a ZorA polypeptide comprising a pfam01618 domain, a ZorB polypeptide comprising a pfam13677 domain or a pfam00691 domain or a combination thereof, and a ZorE polypeptide comprising a pfam01844 domain. In some embodiments, a ZORYA Type II defense system (Defense System Ib) having an anti-phage activity comprises a ZorA polypeptide comprising a pfam01618 domain, a ZorB polypeptide comprising a pfam13677 domain or a pfam00691 domain or a combination thereof, and a ZorE polypeptide comprising a pfam01844 domain.

[0573] In some embodiments, a Zorya Type II defense system (Defense System Ib) comprises a ZorE polypeptide and ZorA polypeptide. In some embodiments, a Zorya Type II defense system (Defense System Ib) comprises a ZorE polypeptide and ZorB polypeptide. In some embodiments, a Zorya Type II defense system (Defense System Ib) comprises a ZorE polypeptide, ZorA polypeptide, and a ZorB polypeptide. In some embodiments, a Zorya Type II defense system (Defense System Ib) comprises a ZorE polypeptide comprising a pfam01844 domain or a COG3183 domain or a combination thereof. In some embodiments, a Zorya Type II defense system (Defense System Ib) having an anti-phage activity comprises a ZorE polypeptide comprising a pfam01844 domain or a COG3183 domain or a combination thereof.

[0574] In some embodiments, a Defense System Ib comprises a ZorA polypeptide comprising a pfam01618 domain or comprises an amino acid sequence having at least 80% identity to a sequence selected from the group referenced in Table 8 rows 2-1830 columns J and K; or a ZorB polypeptide comprises a pfam13677 domain or a pfam00691 domain or a combination thereof, or comprises an amino acid sequence having at least 80% identity to a sequence selected from the group referenced in Table 8 rows 2-1830 columns N and O; or a ZorE polypeptide comprising a pfam01844 domain or a COG3183 domain or a combination thereof or comprises an amino acid sequence having at least 80% identity to a sequence selected from the group referenced in Table 8 rows 1175-1830 columns Z and AA; or any combination thereof.

[0575] In some embodiments, a ZORYA Type I defense system having an anti-phage activity comprises a nucleic acid construct comprising a nucleic acid sequence encoding a ZorA polypeptide, a ZorB polypeptide, a ZorC polypeptide, and a ZorD polypeptide. In some embodiments, a ZORYA Type I defense system having an anti-phage activity comprises a nucleic acid construct comprising a nucleic acid sequence comprising a zorA gene, a zorB gene, a zorC gene, and a zorD gene. In some embodiments, a ZORYA Type II defense system having an anti-phage activity comprises a nucleic acid construct comprising a nucleic acid sequence encoding a ZorA polypeptide, a ZorB polypeptide, and a ZorE polypeptide. In some embodiments, a ZORYA defense system having an anti-phage activity comprises a nucleic acid construct comprising a nucleic acid sequence comprising a zorA gene, a zorB gene, and a zorE gene.

[0576] In some embodiments, the ZORYA anti-phage defense system comprises a nucleic acid construct comprising nucleic acid sequences encoding a cassette comprising zorA, zorB, zorC, and zorD genes. In some embodiments, a construct comprising the ZORYA defense system encodes one component of the defense system, whereby multiple constructs may be used to assemble the functional defense system. In some embodiments, the components of a ZORYA Type I defense system comprise genes zorA, zorB, zorC, and zorD. In some embodiments, the components of a ZORYA Type I defense system consist of genes zorA, zorB, zorC, and zorD. In some embodiments, the components of a ZORYA Type I defense system comprise nucleic acid sequences encoding a ZorA polypeptide, a ZorB polypeptide, a ZorC polypeptide, and a ZorD polypeptide. In some embodiments, the components of a ZORYA Type I defense system consist of nucleic acid sequences encoding a ZorA polypeptide, a ZorB polypeptide, a ZorC polypeptide, and a ZorD polypeptide.

[0577] In some embodiments, a Zorya Type I (Defense System Ia) gene cassette comprises the nucleic acid sequence:

(SEQ ID NO: 14; Construct 49 Table 4)

| | |
|---|---|
| 1 | tgtaaatcct cggggtagat cgcagcgaaa gagcaaccat gccttatcgc aaattcagtt |
| 61 | ttggaatgca gttcgcaaaa tgatacccgg tacacttacg attacaaatg cgcggtataa |
| 121 | agaagtttgc atttgatcgg tgaataatag gaaactcagt cactgtttcg tctgcaaaat |
| 181 | cagccatttc gccttcatac gtagttcttc ggttgaatag taaggtctat catgctgcat |
| 241 | cgaacggtga ttttgatgga tgttggaagt gagtagctgt acgtaatttt tgattaaaag |
| 301 | taatcaaaat gttgccaatg gttatgctat cgtgtgtttt ttgaatatat aacaggtaaa |
| 361 | actatgtcct ggcttaattc tgtcttattg gcgcttacct cggtgcaacc ttatatggta |
| 421 | ccggcaaccg ttatcggcct cgtcagtttt gcattcctct gttttatttt cttttatttt |
| 481 | tttagagcag ttaaaattat taacggcctg aaaaaatata ctcagtcaat taatggcatc |
| 541 | gaaaataatg agcctggtaa tcagcttcag catctgcaaa gtttgtttgt acagcctgag |
| 601 | ttaaagcacg cctggaatga attcgaagaa tcgttgcact cacaatatga actggaggac |
| 661 | ggggaagaga aaatcgtccg tattagggct actgcaccga gcgccagttt cttctcggag |
| 721 | caacaactgg tcgatattcc gctgaacacc gaatttttca aacacctgcc cggtattctg |
| 781 | accggtgtgg ggattatcgg taccttctac ggtctgatga ttggtctcaa ccacttcgac |
| 841 | cccagcacac cagagcaggt ctccagcagc gtcaataatc tgcttcgcga tgtgctgtac |
| 901 | gccttcctcg gttcagcatt tgcgattacg ttctctatcc ttatcacctg gctggagaaa |
| 961 | ttctgtctgg cgaaatgcta caaatatctg gaaaaattca ccgcagctct cgacgccctc |
| 1021 | tatgacagcg gtgttggcga ggagtacctt gcctcactgg taaaatccag taatgaaagc |
| 1081 | gcgacccagg cacgccatct gaaagagagc ctggttaccg atttacgcga tatgctgctg |
| 1141 | catctggcca acagccagaa agtggaaaac gagcggctag cgaccaccct cagcaccacc |
| 1201 | tatcgcgaaa caggacaaca gtttgccgag caagtcagcg gtgcgattga aaacagcctg |
| 1261 | aaatcaccgc tggataaaat agcgggcgcg gttcagaccg ccagtggcga tcaaagcggc |
| 1321 | atggtacaaa acatgctgca ggatgtgctg accgcgttta tggcgaaact cgacaccacc |
| 1381 | tttggtcagc agtttactaa tctcaacgaa atgatgggac aaaccgttgg cgctattcag |
| 1441 | acaatgcaaa ccggtttcgg cgcgttatta caggacatgc gtcaggtgag cgatgattcc |
| 1501 | cgccagggca gcgcgcagct catcgagcaa ctgttatcag agatgaaatc tggccagcaa |
| 1561 | gctatgcagg ctggcatgaa tgacatgctc accagccttc agacctcggt ggctaaaatt |
| 1621 | ggcgcagaag gtgaaggtgc cggcgagcga atggctcgcc aactagagaa aatgttcgct |
| 1681 | gatagcgagg cgcgagaaaa agcccaggca gaacatatga ccgcctttat tgaagccatt |
| 1741 | cagaattcag tgcagcaggg acaaagcgcc acaatggaaa aaatggcagc ctctgtcgag |
| 1801 | tcgcttggtg aacaactggg tagcctgttt gggcagattg ataagggtca gcaacagatt |
| 1861 | tcagcaaatc agcaagcgaa tcagcagtcc ctgcacgaac agactcagcg ggtaatgagt |
| 1921 | gaggtagacg atcagattaa acaattggtc gaaactgttg ccagccagca tcagggaaca |
| 1981 | actgaaacac ttcgtttact cgcagaacaa actaaccgcc agattcagga tatgcatacc |
| 2041 | ggcgcggaca aaatgcgtct ggcggccgag cgctttgaac atgccggtga tcgggtgtcg |
| 2101 | gaagcaaacc accttaccgc tgacgtgctg aataaagcgc aatcggcagg ttcatcactc |
| 2161 | tcccttgcca ccagcgaact cacctctgtg gtggctgatt atcgtaacaa tcgggaagcg |
| 2221 | gttagcaaat ccattgccat gctggagttg ctcgccgcaa atacgcagtc tgaacaaacc |
| 2281 | acgcgcaccc aattcatcgc cgaccttaag cagcacggtg agcgtctgca gagctataac |
| 2341 | cgggaagcac aggcctttat ggaaaatgtc agtgacgtgc tagggaaagg gtttgaagac |
| 2401 | ttctctgaag gtgtttcacg cagcctggat aaaacgctgg gcaaactgga cgttgaaatg |
| 2461 | gcgaaggctt ctactctgct cgcgggttct gtcgaacaga tcggagaaag cgtcagcgag |
| 2521 | cttgatgatg tcctgtcacg cgttcgtgcc taaggggtga cggctgatgt ttggaaatgc |
| 2581 | atttggcgtt aaaaaacgcc gcagcgatga agcagagaaa cccttctgga tctcctatgc |
| 2641 | cgatttgatg actgccatga tggtgttatt tctggtcgtt atggttgcgt cgctgagttc |
| 2701 | cgttacgcag cgtattcaac gtgcggagca aggtgaaaaa acacgggggc aggatatttc |
| 2761 | cagattgtgt gagcgcctgg aattgcatgc ccgcaacgtg aacaaaacca ttgtggtgga |
| 2821 | ttgccatgat aaccgtatca gttttggtga agccgggcgt ttcgatcaca accaattttt |
| 2881 | cctgaacgct gaggggcaaa aagccttgca ggatgtggtt cctcttgtgc tggaagcgtc |
| 2941 | caacagtgaa gaaggtaaaa aatggtttaa gcagatcgtt attgaagggt ttaccgacac |
| 3001 | cgacggttcg tacttataca acctacatct ctccctgcaa cgttctgagt gggtaatgtg |
| 3061 | tagtctgctc gatagccgca gccctctgca aaaaaatatc tccgcagaac agcagctcca |
| 3121 | aatccgtaaa cttttcctcg cgggtggtgt ctccttcaat aatgccaagg aaagcaagga |
| 3181 | agccagccgc cgcgtcgagt tgcgcatgca gttcttcggg cttaaagata aacgtgataa |
| 3241 | ggccgatgag gtggatttcc cccccgtcgt caataaagaa gtttgccagt tggtaatgcc |
| 3301 | cctatgacgc ctgcactgaa ttctctttct caacgcattg cagcgaggct ctcttccagc |
| 3361 | caacgggatg accattatct gcataatgat ttccacgcgc tggcctcagc tgctctcgac |
| 3421 | atggaaaagc ggtttgataa ggcagaaaaa atccctttac cgccacaaaa aatgcgactg |
| 3481 | gcagctctgc gtcgccttcg ccttgcacaa gaactcacgg agcgagagtg gcggatggtg |
| 3541 | ttttatggtc tcgccgataa tgatccgtca tatcctgacc agccagtact gctggaggat |
| 3601 | gatacgtttt tccctgaagt aaacaatgca atcaaaaagc ggcttgaaac taaaaccctg |
| 3661 | aaacgccgag actgggccgc actctgttca agctattttg cttaccagaa cccatcacct |
| 3721 | gagacaaacc cgcactggtg cgtactgcgt ggtcatatcg ctcagggtta catggtggtg |
| 3781 | aaagcggcta tacgacgaga aaaatcgtgg atgaaaacca ttgagtttta tcacgatatt |
| 3841 | tttaccccgc aggcgggagg cgtgatctcc agacagttac ttgcgggtga gagcaattca |
| 3901 | ctctcgtcat tagaaaaaat cgcgcaaatc cctgatagca gttggttgtg gaaacgtatt |
| 3961 | ttcacggtgc ttttagcgca actggacaca ctcgacgatc cccagtttct ggacaaaatt |
| 4021 | agctggttgt taggtctggc tgcccagtgg gtacgtttcc gtgatgacat catgactgcg |
| 4081 | accttgactc gctattacca ttctatttat cgcgatcagg ctcattcagc tttgaagcag |
| 4141 | gccgcgctgg aatactggga taacccgcaa ctgaaaagcc agcagaataa atggcatcag |
| 4201 | tatgtctctg agccggtggc tgcgatggtc cggggctggc tggcaaaaca agatctgatg |
| 4261 | catttctttg aattgctgcg cggtaatggc gatgttgacc aggcacgatt gcactattgg |
| 4321 | ctacgtttcg ccaatcagat gggatttacc cgtatcgtca tggggactga tgcctggcaa |
| 4381 | gaccgtggta gtgactttgt gaaattccgc gaggagaata agggacgatt gagttactta |
| 4441 | cgaggtggac gtaactttga taacgccatg attatgcaga tcaacgatta tctgttcgtt |
| 4501 | gagttttccg ggacagggaa tgcaatgtat gcctatcgaa taggtcacgc gccatttaac |
| 4561 | cctgaatcac gcacgcttga tatcaacatt catctaaaag ataaggggcg ctgcgtgctc |
| 4621 | cgactgcccc atacaccgcg cgcagaaggg tataacaaag tccggataac cggctggatg |
| 4681 | ttgaaatacg acgacgagct gcgtcagttg ggcattcggt ggatggcaga agaagccatc |
| 4741 | aagtttgtcg ataagaaagc gtcctctccc gcctctatgt ccgacattaa aatcatcaac |
| 4801 | ccgttgcgtg atacggctat acagcatctg gttgaaggta gttcatgtat cgtcagcgat |
| 4861 | aatcgacaaa aaggtggcgt actgtccgta caactcaata ctcctgacga caccatagaa |
| 4921 | agagagttgt tacggctagg ctttgcgccc gtggctaaag aaccgcatcg ttactggatc |
| 4981 | aaataatgct gaaacgtctg ttaagtaaac tgacgggaaa ccgtcagcag atagaacatc |
| 5041 | acctaaaaaa tcagtaccag gttgaggaaa acggacttag ctttccgcta tcgctggttg |
| 5101 | atgattcgca gctttgggca ctggcatcct ggctagaaca actggctgaa gaagactatc |
| 5161 | tgatatcact tacagaccgg tggttgttga gttgggacgc actgtatcgc ctgctggagg |
| 5221 | atgaggaaca tgccagcagc ctgcctctta tcggtgtacc tgacgtactg cctttacgcg |
| 5281 | caagcctgag ttcacgagga gcattaagcg atagcgattt tcgcgtctgg attgctgaat |
| 5341 | gggctacgct tccagcccgc aagccgatcc gtttcagtcg taccggtgcc attttaaccc |
| 5401 | atgaaaatca gcaatacctg ttatcgcgtg aaaactgggc actcttacag gcaacagaac |
| 5461 | aactcagtgc acagaaaaat cagactcctg gtgaaaccac taaccagttg ggatgggccg |
| 5521 | ctatccgcaa atgtgcgaag caagcagccg caaaatttga tgattattta gaaaaaacgc |
| 5581 | atgtcgtcaa accaacttca ttgtcattac gtctgcgtaa agcaacggtt gccgatactg |
| 5641 | ctgttatcga aattgagccc catttcgagg accagcctgc taactggcta ggcagttttg |
| 5701 | acaaaaactc gcaggttcac gatagctacc gcatccctgg agagaatggc gaactcagcc |
| 5761 | atgtcattat ccctcccgaa gtgaaagaag tcctgaattc aatacactcg attccaagcc |
| 5821 | gtcgagtggc cggaagcgaa gcgctttcct ttgttcgcaa tccttatacc ttcctgggtg |
| 5881 | aagatgccgc cagtgttatt gcccctgaag aacatgaaca ggcactgttt gatgccagga |
| 5941 | ttttctttca tcatttcagg ttgataccgc aactgaatgc ggaaaataag atcgcagaag |
| 6001 | ttacgctggt acttgagcct gtttcacctg ttccccagcc agaaatcact tttgggttct |
| 6061 | cagccccccg ggagctggat aaattcatac agcaactcgg tattagcgtc gctgcacaga |
| 6121 | tgcctgccgg ttcatggcaa ggttacgagc tggaattaag tcagttcact gaacagcagt |
| 6181 | ggcacgattg ccaggcactt ctaactcgct ggcagcaaga aatagaagga aaagaattta |
| 6241 | gcgatgtgct ggatattgcg aagtatggcg atcgcgtgat tggcattggt gaatttgaaa |
| 6301 | aaatctcctc tccctggctg accaaagcgc agagtgaaaa ctggcttcca gatgacatcg |
| 6361 | atttctccgc gttttcagtc gaaacactgt ctggctggca acctgaaaac cttcaccatt |
| 6421 | tcgatgaact gcaggagaga attactcagg cagaagctgt aggtgaaacg catatcaccg |
| 6481 | caccatggaa tgacagccaa ttaccgttgg atgctgctaa aaccttcagt aagaactggg |
| 6541 | aaaaacagca aagcactgca aatgaatctc aaggcaacgt tgcagataaa acggcccgag |
| 6601 | ccgtactcaa aattgagcag aatattgaag aaacggccta catcaaacag cgccgcaatt |
| 6661 | cactcctcaa tgcgcgtcat gccgagcctg aaattcctct gagccttaaa gagcatatcc |
| 6721 | gactcaaaga ccatcaacgt gaaggcgtag cctggctcca gcaactcttc cttcgttcac |
| 6781 | ctgaggaaac cgcaggttgc ctgctggcgg atgatatggg gcttgggaaa acgctgcaaa |
| 6841 | ttctgagctt cctggtatgg ttcattgaaa aattcccgca agaaccgcca agtctcattg |
| 6901 | ttgctcctgt ctctctttta gataactggg aacgtgaact ggacaatttc ttctataccg |
| 6961 | caggaatacc ggtattgaaa ttgtatggcg agaccattaa agcggtgaaa tatcccaaac |
| 7021 | aggctatccc tgctcatctg caatctcagg ggatcaaaaa cctgcttaaa cctggctggc |
| 7081 | agggtgaggc gaaaatcatc ctgacaacct acgaaacgct tcgcgaccag gagttttctc |
| 7141 | tggcacgcca gccgtggtcc attatggtgt gcgacgaggc acaaaaaata aaaaacccag |
| 7201 | ctgcgttaat cacacatgcg gccaacgcgg tacaagccag gtttaaagtg gcatgtacag |
| 7261 | gaacacctgt cgaaaacaca cttgtcgacc tgtggagctt atttgatttt gcccagccag |
| 7321 | gattgttagg ggcactaaat gaatttggta aacactatgt tcgccccatc gagaacgaag |
| 7381 | atggccgcga tacggaacgg ttggaaagcc tgcgagcgct gatagaacct cagactttac |
| 7441 | gccgaaccaa agaagaggtt gcgcgtgatt tacctcagaa aattgaagtg gaaagctgca |
| 7501 | agcaattgac gttgtctggc gtgcaaaaac agctctacct ttcgtccgtt gcaaattggc |
| 7561 | aacaacagca agcactgagc gaagggatgc agcaggccgg aaccggtatg ttaggtttgt |
| 7621 | tacaccgact gaaactcatc tgtgcacacc ctgcagtagt taatccagaa ccacgttttc |
| 7681 | gtgataactc acccaagctt aactggctgc tgaaaatact cgcagaacta aaacacacca |
| 7741 | cgaaagataa ggtcattatt tttacggagc ttcgagattt acagcgcgaa cttcaacatg |
| 7801 | cgatccacca aaagtttggt ttccgccctg tcattatcaa tggtgatacc agcactaaaa |
| 7861 | gtcaaagtca aaacagccgc cagcgcctga ttgatgattt tcaggctcag cctgggtttg |
| 7921 | gggtgattat tctctctacg gttgccgtcg gattcggcgt taacgtccag aaagccaatc |
| 7981 | atgttattca tttcactcgc tgctggaacc cagccaaaga agatcaggca acagaccggg |
| 8041 | cgtaccgaat tgggcaaact aaagatgtgt atgtctatta cccgacggtg aaggacactg |
| 8101 | aaatcaccac atttgaagaa acactggatg accttctgca gcgtcgacgt gcattggcca |
| 8161 | gagatatgct ctgcgctact cccgatttga gtggtgcgga ttttgaggcc attttgaagg |
| 8221 | gggcttaacc gatacgagtg gcaataccac cagcagtcga accgattcat ttgaaacgac |
| 8281 | acgtagccgc gatggatctg tatcacctac cgacagcttg ggaaagtccc gaattacaaa |
| 8341 | tgttcagggg aataccataa cctgccggac ttattcgttt ggaacgacgt gttacgactt |
| 8401 | agtccgaggg aaacatgcca ggtaaaaacc gaatatccat cctcagcttt agcaaatacc |
| 8461 | tccccatact cgctacttca tattgagaag atattgtgtt gctcatattg ctttgagcat |
| 8521 | gctcttcagc gtttacatgt ggatcgtact accctgatga tccgatgcgt tgtttactgc |
| 8581 | ttttaacctc tatatacaaa acccccacta aatatttttc tgagactaac ggtaaatcat |
| 8641 | tatctatcat gtagttacga tagaattgca tgtatctggc acaaaataag gtttcattac |
| 8701 | gttctatctt gttaaatata aagggatcat ttcctcccaa agtcacaatc |

[0578] The coding regions for each of the zorA, zorB, zorC, and zorD gene sequences within this embodiment of a Zorya Type I cassette (SEQ ID NO: 14) are as follows: nucleotides 364-2553 encode an embodiment of a ZorA polypeptide; nucleotides 2567-3307 encode an embodiment of a ZorB polypeptide; nucleotides 3304-4986 encode an embodiment of a ZorC polypeptide; and nucleotides 4986-8228 encode an embodiment of a ZorD polypeptide.

[0579] In some embodiments, a Defense System Ia comprising a ZorA polypeptide, a ZorB polypeptide, a ZorC polypeptide, and a ZorD polypeptide, is encoded by the nucleic acid sequence set forth in SEQ ID NO: 14. In some embodiments, a Defense System Ia comprising a ZorA polypeptide, a ZorB polypeptide, a ZorC polypeptide, and a ZorD polypeptide, is encoded by a nucleic acid sequence having at least 80% homology to the sequence set forth in SEQ ID NO: 14. In some embodiments, a Defense System Ia comprising a ZorA polypeptide, a ZorB polypeptide, a ZorC polypeptide, and a ZorD polypeptide, is encoded by a nucleic acid sequence having at least 85% homology, or 90% homology, or 95% homology, or 97% homology, or 98% homology, or 99% homology to the sequence set forth in SEQ ID NO: 14. In some embodiments, a Defense System Ia comprising a ZorA polypeptide, a ZorB polypeptide, a ZorC polypeptide, and a ZorD polypeptide, is encoded by a nucleic acid sequence having at least 80% identity to the sequence set forth in SEQ ID NO: 14. In some embodiments, a Defense System Ia comprising a ZorA polypeptide, a ZorB polypeptide, a ZorC polypeptide, and a ZorD polypeptide, is encoded by a nucleic acid sequence having at least 85% identity, or 90% identity, or 95% identity, or 97% identity, or 98% identity, or 99% identity to the sequence set forth in SEQ ID NO: 14.

[0580] In some embodiments, the ZORYA anti-phage defense system comprises a nucleic acid construct comprising nucleic acid sequences encoding a cassette comprising zorA, zorB, and zorE genes. In some embodiments, a construct comprising the ZORYA defense system encodes one component of the defense system, whereby multiple constructs may be used to assemble the functional defense system. In some embodiments, the components of a ZORYA Type II defense system comprise genes zorA, zorB, and zorE. In some embodiments, the components of a ZORYA Type II defense system consist of genes zorA, zorB, and zorE. In some embodiments, the components of a ZORYA Type II defense system comprise nucleic acid sequences encoding a ZorA polypeptide, a ZorB polypeptide, and a ZorE polypeptide. In some embodiments, the components of a ZORYA Type II defense system consist of nucleic acid sequences encoding a ZorA polypeptide, a ZorB polypeptide, and a ZorE polypeptide.

[0581] In some embodiments, a Zorya Type II (Defense System Ib) gene cassette comprises the nucleic acid sequence:

(SEQ ID NO: 15; construct 51 from Table 4)

| | |
|---|---|
| 1 | acctgccttc ctttgataca attcgtaaca ggttactatc atcataaaaa agctcaaccc |
| 61 | gatgaactcg ctaaaaatga gacaaatcat ttatatctcg aaaaaacttg ttacaatcat |
| 121 | gagcgctaca ccgaacttaa ccatataaat tatgtgtgtt ttgtttattt tttaaacgat |
| 181 | tacaactatc cattatttac acaggtatca aaatgttagc gcagcttttt gagcagttgt |
| 241 | ttcaatcgat agactctaca ctgatcacca atattttcat ctgggctgtt atattcgtat |
| 301 | ttttatcagc gtggtggtgt gacaaaaaaa atatacatag taagtttaga gaatatgctc |
| 361 | caaccttaat gggggcatta ggtattctgg gtactttcat tggtattatt attggtttac |
| 421 | tcaattttaa taccgaaagt attgatacca gcatccccgt attattaggt ggcctaaaaa |
| 481 | cagcattcat tacaagcatt gtaggtatgt tttttgccat tttatttaat ggaatggatg |
| 541 | ctttcttttt tgccaataaa cgaagtgcgt tagctgaaaa taaccctgaa tctgttacac |
| 601 | ctgaacatat ctatcatgaa ttaaaagagc agaaccagac tctgactaaa ttagtctcgg |
| 661 | gtattaacgg tgatagtgaa ggttctctta ttgctcaaat aaaattacta cgtactgaga |
| 721 | ttagcgattc ctcgcaggca caattagcta atcacactca tttcagtaat aagctttggg |
| 781 | aacaacttga acaatttgca gatctaatgg caaaaggtgc tacagaacaa attattgatg |
| 841 | ctttgcgaca agtcattatt gattttaatg aaaatttaac tgaacagttt ggtgaaaact |
| 901 | ttaaagctct tgatgcctct gtaaaaaaac ttgttgagtg gcagggaaat tataaaacgc |
| 961 | aaattgagca gatgtcagaa caatatcaac aaagtgtcga gtccctggtt gaaacaaaaa |
| 1021 | ctgcggttgc agggatttgg gaagaatgta aagaaattcc tctggctatg tctgaactgc |
| 1081 | gtgaagtgct tcaggtgaac caacatcaaa tcagcgaact ctcccgccat ttagaaacct |
| 1141 | ttgtcgccat ccgcgataaa gctacaaccg tattacctga aatacagaac aaaatggctg |
| 1201 | aagtgggtga actgctgaaa tccggagctg caaatgttag tgcatctctt gagcaaacca |
| 1261 | gccagcaaat acttcttaat gcagattcaa tgcgcgttgc cctggatgaa ggtaccgaag |
| 1321 | gattcagaca atcggttacc caaacacaac aagcatttgc ctcgatggcg catgatgtca |
| 1381 | gcaattcctc cgaaacccta accagcacgt taggtgaaac aattactgaa atgaaacaaa |
| 1441 | gtggtgaaga attcctgaaa tcactagagt cgcactcgaa agaattgcat agaaatatgg |
| 1501 | aacaaaatac gacgaatgtg attgatatgt tcagtaagac tggtgaaaag attaaccatc |
| 1561 | aactatccag taatgccgat aatatgtttg attcaatcca gacatcattt gataaggctg |
| 1621 | gtgcagggct gacttctcaa gtcagagaat caattgaaaa atttgctcta tccatcaacg |
| 1681 | agcagttaca tgcttttgag caagcaactg aacgtgaaat gaaccgtgaa atgcaatcat |
| 1741 | taggtaatgc tctgctttca atcagcaaag gttttgtcgg taactatgaa aaacttatta |
| 1801 | aagattacca aatagttatg gggcagttac aagcattaat ttctgctaat aaacatcgag |
| 1861 | ggtaatcgat catggataag attataggga aacaattacc taaaaaagat caagataatg |
| 1921 | aacattgggt atccatgtca gacctaatgg cagggctgat gatggttttt atgttcatat |
| 1981 | ctattgctta tatgcactac gtacgtattg aaaaagaaaa aattaaagaa gttgccgtag |
| 2041 | cctacgagaa tgctcagtta cagatttata atgctctgga tattgagttt gcaaaggatt |
| 2101 | tacaagactg ggatgcagag atcgataaac agactctgga ggttcgattt aaatcaccgg |
| 2161 | atgttttatt tggcttagga agcacagagc taaaaccaaa gtttaaactc attcttgacg |
| 2221 | acttctttcc tcgctaccta aaagttctag ataattatca ggaacatatt actgaagtcc |
| 2281 | gcattgaagg tcacacaagt actgactgga caggaacaac gaatcctgat attgcttatt |
| 2341 | ttaataatat ggcactatcg caaggtcgta cacgtgcagt attacaatac gtttatgaca |
| 2401 | taaaaaatat cgcgacacac caacaatggg ttaaaagtaa atttgccgca gtaggttatt |
| 2461 | catctgcaca tcccattctt gataaaaccg gcaaagagga ccctaatcgc tctcgtcgtg |
| 2521 | tcaccttcaa agttgtaaca aatgccgagt tgcagattag aaagattatt caggagtaag |
| 2581 | agatgaaatt atctatcgac atttcagaac ttattcaatt agggaagaaa atgttaccag |
| 2641 | aaggagtcga tttttttctg gatgaatccc ctattgactt tgatcctata gatattgagt |
| 2701 | tatccacggg taaagaagtt agtatcgaag atcttgaccc tggtagcggg cttatctctt |
| 2761 | atcatggccg ccaggttctt ttatatattc gggaccattc agggcgttat gatgcggcta |
| 2821 | tcgtagatgg cgaaaaagga aaacgttttc atattgcctg gtgcagaact cttgatgaaa |
| 2881 | tgcgccataa aaatcgattt gaaaggtatc atgcaactaa ccgcatagat ggtttattcg |
| 2941 | aaattgatga tggttcaggt cggagccagg atgttgattt acgggtatgt atgaattgcc |
| 3001 | tcgaacgact taattataaa ggaagtattg ataaacaacg aaaaagagag atttttaaat |
| 3061 | cattctcatt aaatgagttt ttttcagatt atagtacctg ttttcgtcat atgcctaagg |
| 3121 | gtatctatga caaaacaaat agtgggtatg tcgaaaactg gaaggaaata tctaaagaaa |
| 3181 | tacgagaaaa ggcaaattat gtttgtaatg attgtggcgt gaatttatca accgccaaaa |
| 3241 | acttgtgcca tgtccatcat aaaaatggca tcaaatatga taatcaccat gaaaaccttc |
| 3301 | ttgttctgtg caaggattgc catcgaaaac agcccctcca cgaaggtata ttcgttaccc |
| 3361 | aagcagagat ggctatcatt caacgtttac gttcccaaca agggttatta aaagcagaat |
| 3421 | cctggaatga aatatatgac ctgactgatc catcagtgca tggtgatatt aatatgatgc |
| 3481 | aacataaagg ctttcaacct cctgttcctg ggttagatct tcaaaactca gaacatgaaa |
| 3541 | ttattgcaac cgtagaagct gcatggccag gccttaaaat tgcagttaac cttactcccg |
| 3601 | ccgaagtcga aggatggaga atatataccg tgggtgagct ggttaaagaa atacaaaccg |
| 3661 | gagcctttac gccagcaaaa ttgtaaattc taaaactccg tgaaagttaa ggctttcacg |
| 3721 | gaagataaat aaagtttccc tgatttgtga ctcaaattac aaaagtagtt tatggcataa |
| 3781 | cttgtctgat ttttatggtg taacaggtat aaaagcatat gctatggttc gcctcatact |
| 3841 | taaaacttcc ctcatatggg tgaaggttaa agcttggtag acagaagaca gtcacaatga |
| 3901 | ataaagcaat aaattga. |

[0582] The coding regions for each of the zorA, zorB, and zorE gene sequences within this embodiment of a Zorya Type II cassette (SEQ ID NO: 15) are as follows: nucleotides 213-1865 encode an embodiment of a ZorA polypeptide; nucleotides 1872-2579 encode an embodiment of a ZorB polypeptide; and nucleotides 2583-3686 encode an embodiment of a ZorE polypeptide.

[0583] In some embodiments, a Defense System Ib comprising a ZorA polypeptide, a ZorB polypeptide, and a ZorE polypeptide, is encoded by the nucleic acid sequence set forth in SEQ ID NO: 15. In some embodiments, a Defense System Ib comprising a ZorA polypeptide, a ZorB polypeptide, and a ZorE polypeptide, is encoded by a nucleic acid sequence having at least 80% homology to the sequence set forth in SEQ ID NO: 15. In some embodiments, a Defense System Ib comprising a ZorA polypeptide, a ZorB polypeptide, and a ZorE polypeptide, is encoded by a nucleic acid sequence having at least 85% homology, or 90% homology, or 95% homology, or 97% homology, or 98% homology, or 99% homology to the sequence set forth in SEQ ID NO: 15. In some embodiments, a Defense System Ib comprising a ZorA polypeptide, a ZorB polypeptide, and a ZorE polypeptide, is encoded by a nucleic acid sequence having at least 80% identity to the sequence set forth in SEQ ID NO: 15. In some embodiments, a Defense System Ib comprising a ZorA polypeptide, a ZorB polypeptide, and a ZorE polypeptide, is encoded by a nucleic acid sequence having at least 85% identity, or 90% identity, or 95% identity, or 97% identity, or 98% identity, or 99% identity to the sequence set forth in SEQ ID NO: 15.

[0584] In some embodiments, a construct comprising the ZORYA defense system encodes more than one component of the defense system but less than all of the components required for a functionally active defense system, whereby multiple constructs may be used to assemble the functional defense system. For example, in some embodiments each of ZorA, ZorB, ZorC, and ZorD may be encoded by nucleic acid sequences comprised in different constructs, wherein expression of the combination of constructs produces a functional ZORYA Type I defense system. In some embodiments each of ZorA, ZorB, and ZorE may be encoded by nucleic acid sequences comprised in different constructs, wherein expression of the combination of constructs produces a functional ZORYA Type II defense system.

[0585] In some embodiments, the components making up a functional ZORYA Type I anti-phage defense system comprise a ZorA polypeptide, a ZorB polypeptide, a ZorC polypeptide, and a ZorD polypeptide, each encoded by a zorA, a zorB, a zorC, and a zorD gene, respectively.

[0586] In some embodiments, the components making up a functional ZORYA Type II anti-phage defense system comprise a ZorA polypeptide, a ZorB polypeptide, and a ZorE polypeptide, each encoded by a zorA, a zorB, and a zorE gene, respectively.

[0587] In some embodiments, a ZORYA defense system having an anti-phage activity comprise a nucleic acid encoding a ZorA polypeptide. In some embodiments, a ZORYA defense system having an anti-phage activity comprise a nucleic acid encoding a ZorA polypeptide and a ZorB polypeptide. In some embodiments, a ZORYA defense system having an anti-phage activity comprise a nucleic acid encoding a ZorA polypeptide and a ZorC polypeptide. In some embodiments, a ZORYA defense system having an anti-phage activity comprise a nucleic acid encoding a ZorA polypeptide and a ZorD polypeptide. In some embodiments, a ZORYA defense system having an anti-phage activity comprise a nucleic acid encoding a ZorA polypeptide and a ZorE polypeptide. In some embodiments, a ZORYA defense system having an anti-phage activity comprise a nucleic acid encoding a ZorA polypeptide, a ZorB polypeptide, and a ZorC polypeptide. In some embodiments, a ZORYA defense system having an anti-phage activity comprise a nucleic acid encoding a ZorA polypeptide, a ZorB polypeptide, and a ZorD polypeptide. In some embodiments, a ZORYA defense system having an anti-phage activity comprise a nucleic acid encoding a ZorA polypeptide, a ZorC polypeptide, and a ZorD polypeptide. In some embodiments, a ZORYA defense system having an anti-phage activity comprise a nucleic acid encoding a ZorB polypeptide. In some embodiments, a ZORYA defense system having an anti-phage activity comprise a nucleic acid encoding a ZorB polypeptide and a ZorC polypeptide. In some embodiments, a ZORYA defense system having an anti-phage activity comprise a nucleic acid encoding a ZorB polypeptide and a ZorD polypeptide. In some embodiments, a ZORYA defense system having an anti-phage activity comprise a nucleic acid encoding a ZorB polypeptide and a ZorE polypeptide. In some embodiments, a ZORYA defense system having an anti-phage activity comprise a nucleic acid encoding a ZorC polypeptide. In some embodiments, a ZORYA defense system having an anti-phage activity comprise a nucleic acid encoding a ZorC polypeptide and a ZorD polypeptide. In some embodiments, a ZORYA defense system having an anti-phage activity comprise a nucleic acid encoding a ZorE polypeptide.

[0588] In some embodiments, a ZORYA defense system having an anti-phage activity comprise a nucleic acid comprising a zorA gene. In some embodiments, a ZORYA defense system having an anti-phage activity comprise a nucleic acid comprising a zorA gene and a zorB gene. In some embodiments, a ZORYA defense system having an anti-phage activity comprise a nucleic acid comprising a zorA gene and a zorC gene. In some embodiments, a ZORYA defense system having an anti-phage activity comprise a nucleic acid comprising a zorA gene and a zorD gene. In some embodiments, a ZORYA defense system having an anti-phage activity comprise a nucleic acid comprising a zorA gene and a zorE gene. In some embodiments, a ZORYA defense system having an anti-phage activity comprise a nucleic acid comprising a zorA gene, a zorB gene, and a zorC gene. In some embodiments, a ZORYA defense system having an anti-phage activity comprise a nucleic acid comprising a zorA gene, a zorB gene, and a zorD gene. In some embodiments, a ZORYA defense system having an anti-phage activity comprise a nucleic acid comprising a zorA gene, a zorC gene, and a zorD gene. In some embodiments, a ZORYA defense system having an anti-phage activity comprise a nucleic acid comprising a zorB gene. In some embodiments, a ZORYA defense system having an anti-phage activity comprise a nucleic acid comprising a zorB gene and a zorC gene. In some embodiments, a ZORYA defense system having an anti-phage activity comprise a nucleic acid comprising a zorB gene and a zorD gene. In some embodiments, a ZORYA defense system having an anti-phage activity comprise a nucleic acid comprising a zorB gene and a zorE gene. In some embodiments, a ZORYA defense system having an anti-phage activity comprise a nucleic acid comprising a zorC gene. In some embodiments, a ZORYA defense system having an anti-phage activity comprise a nucleic acid comprising a zorC gene and a zorD gene. In some embodiments, a ZORYA defense system having an anti-phage activity comprise a nucleic acid comprising a zorE gene.

[0589] In some embodiments, a ZORYA defense system having an anti-phage activity comprises a nucleic acid construct comprising nucleic acids encoding polypeptides in a set order. In one embodiment, the 5′ to 3′ order of polypeptides encoded is ZorA, ZorB, ZorC, and ZorD. In one embodiment, the 5′ to 3′ order of polypeptides encoded is ZorA, ZorB, and ZorE. In some embodiments the 5′ to 3′ order of polypeptides does not affect the anti-phage activity. In some embodiments the 5′ to 3′ order of polypeptides does affect the anti-phage activity.

[0590] In some embodiments, the 5′ to 3′ order of polypeptides is random, for example any order of ZorA, ZorB, ZorC, ZorD, and ZorD. In some embodiments, the 5′ to 3′ order of polypeptides is random, for example any order of ZorA, ZorB, and ZorE.

[0591] In some embodiments, a ZORYA defense system having an anti-phage activity comprises a nucleic acid construct comprising genes in a set order. In some embodiment, the 5′ to 3′ order of genes is zorA, zorB, zorC, and zorD (Defense System Ia). In some embodiment, the 5′ to 3′ order of genes is zorA, zorB, and zorE (Defense System Ib). In some embodiment, the 5′ to 3′ order of genes in a Defense System Ia is not zorA, zorB, zorC, and zorD. In some embodiment, the 5′ to 3′ order of genes in a Defense System Ib is not zorA, zorB, and zorE. In some embodiments the 5′ to 3′ order of genes does not affect the anti-phage activity. In some embodiments the 5′ to 3′ order of genes does affect the anti-phage activity.

[0592] In some embodiments, the 5′ to 3′ order of genes is random, for example any order of zorA, zorB, zorC, zorD, and zorD. In some embodiments, the 5′ to 3′ order of genes is random, for example any order of zorA, zorB, and zorE.

[0593] In some embodiments, the ZORYA Type I system (Defense System Ia) composition and order is as shown in FIG. 3C, FIG. 4A, and FIG. 4B. In some embodiments, the ZORYA Type II system (Defense System Ib) composition and order is as shown in FIG. 3C, FIG. 4D, and FIG. 4E.

[0594] In some embodiments, a ZORYA defense system having an anti-phage activity originates from a microbial genome (Table 8).

[0595] In some embodiments, a functional ZORYA defense system comprises a construct comprising nucleic acid sequences encoding polypeptides, wherein the nucleic acid sequence encoding each polypeptide may originate from a different microbial species. In some embodiments, a Zorya defense system (Defense system Ia; Defense system Ib) comprises a non-naturally occurring combination of polypeptide components. In some embodiments, a Zorya defense system (Defense system Ia; Defense system Ib) comprises a combination of at least two polypeptides that do not naturally occur together. In some embodiments, a Zorya defense system (Defense system Ia; Defense system Ib) comprises a combination of at least three polypeptides that do not naturally occur together. In some embodiments, a Zorya defense system (Defense system Ia) comprises a combination of four polypeptides that do not naturally occur together. In some embodiments, a Zorya defense system (Defense system Ia; Defense system Ib) comprises a non-naturally occurring combination of polypeptide components. In some embodiments, a functional Zorya defense system (Defense system Ia; Defense system Ib) comprises a combination of at least two polypeptides that do not naturally occur together. In some embodiments, a functional Zorya defense system (Defense system Ia; Defense system Ib) comprises a combination of at least three polypeptides that do not naturally occur together. In some embodiments, a functional Zorya defense system (Defense system Ia) comprises a combination of four polypeptides that do not naturally occur together.

[0596] A skilled artisan would appreciate that the term “non-naturally occurring” may encompass in one embodiment, polypeptide that do not naturally occur together in nature. For example, polypeptide components that do not naturally occur together, either because they are from the same defense system found in a different strain of bacteria or because they comprise polypeptide components from different defense systems. In some embodiments, polypeptide components that do not naturally occur together, either because they are from the same defense system found in a different strain of a microorganism, or because they comprise polypeptide components from different defense systems. In some embodiments, the term “non-naturally occurring” may encompass a defense system or a functional defense system that is not found within a particular micro-organism in nature. In some embodiments, the term “non-naturally occurring” may encompass a defense system or a functional defense system that is not found within a particular bacteria in nature. In some embodiments, the term “non-naturally occurring” may encompass a combination of defense systems disclosed herein or a functional defense system disclosed herein that are not found within a particular micro-organism in nature. In some embodiments, the term “non-naturally occurring” may encompass a combination of defense systems disclosed herein or a functional defense systems disclosed herein that are not found within a particular bacteria in nature.

[0597] In some embodiments, introducing a defense system disclosed herein, or any combination of defense systems, into a bacterial strain that naturally lacks the defense system or system may be advantageous for the bacteria. In some embodiments, introducing a defense system disclosed herein, or any combination of defense systems, into a bacterial strain that naturally lacks the defense system or system may be biotechnologically useful in maintaining healthy bacteria used for example but not limited to, the food industry.

[0598] In some embodiments, a functional ZORYA defense system comprises a construct comprising nucleic acid sequences encoding polypeptides, wherein the nucleic acid sequence encoding each polypeptide may originate from a different bacterial species. For example, the source of the nucleic acid sequence encoding a ZorA polypeptide may be one bacterial species from Table 8, the source of the nucleic acid sequence encoding a ZorB polypeptide may be a different bacterial species from Table 8, the source of the nucleic acid sequence encoding a ZorC polypeptide may be yet a different bacterial species from Table 8, and the source of the nucleic acid sequence encoding a ZorD polypeptide may be still a different bacterial species from Table 8. Similarly, the source of the nucleic acid sequence encoding a ZorA polypeptide may be one bacterial species from Table 8, the source of the nucleic acid sequence encoding a ZorB polypeptide may be a different bacterial species from Table 8, and the source of the nucleic acid sequence encoding a ZorE polypeptide may be still a different bacterial species from Table 8.

[0599] In some embodiments, the source of the nucleic acid encoding a ZorA polypeptide, a ZorB polypeptide, a ZorC polypeptide, and a ZorD polypeptide is the same. In some embodiments, the source of the nucleic acid encoding a ZorA polypeptide, a ZorB polypeptide, a ZorC polypeptide, and a ZorD polypeptide is the not the same. In some embodiments, the source of some of the components is the same, while the source of other components is not the same. In some embodiments, the source of the nucleic acid sequence of any of the components of a ZORYA Type I defense system comprises any of the species listed in Table 8.

[0600] In some embodiments, the source of the nucleic acid encoding a ZorA polypeptide, a ZorB polypeptide, and a ZorE polypeptide is the same. In some embodiments, the source of the nucleic acid encoding a ZorA polypeptide, a ZorB polypeptide, and a ZorE polypeptide is the not the same. In some embodiments, the source of some of the components is the same, while the source of other components is not the same. In some embodiments, the source of the nucleic acid sequence of any of the components of a ZORYA Type II defense system comprises any of the species listed in Table 8.

[0601] In some embodiments, a ZORYA defense system having an anti-phage activity comprises a nucleic acid construct comprising non-coding regions between the nucleic acid sequences encoding the polypeptides. In some embodiments, the non-coding regions between the nucleic acid sequences comprises nucleic acid sequence not naturally occurring in the microbial species of origin. In some embodiments, the non-coding regions between the nucleic acid sequences comprises nucleic acid sequence is the naturally occurring in the microbial species of origin.

[0602] In some embodiments, a ZORYA system disclosed herein comprises a multi-gene phage resistance system broadly distributed in microbial genomes, for example but not limited to bacteria. A skilled artisan would appreciate that the ZORYA system is not present in the majority of bacterial species.

[0603] According to some embodiments, the ZORYA system components are located in a gene cluster in a microbial cell genome. According to some embodiments, the ZORYA system components are located in close proximity (e.g. positioned within 20 genes, 10 genes, 5 genes or less one from the other) in a genome of a prokaryotic cell. According to some embodiments the prokaryotic cell expresses an endogenous ZORYA defense system. According to some embodiments, the prokaryotic cell expresses an endogenous functional ZORYA defense system. According to some embodiments, the species of prokaryotic cell is selected from the group consisting of the species listed in Table 8. According to some embodiments, a prokaryotic cell expresses a non-endogenous ZORYA defense system. According to some embodiments, a prokaryotic cell expresses a non-endogenous functional ZORYA defense system. According to some embodiments, the species of prokaryotic cell expressing a non-endogenous functional ZORYA defense system is selected from the group consisting of the species listed in Table 8.

[0604] A skilled artisan would appreciate that the term “endogenous” may encompass the expression of a native gene in its natural location and with its natural expression level in the genome of an organism, for example a prokaryote. In some embodiments, an endogenous anti-nucleic acid defense system is found in bacterial or in archaeal cells. In some embodiments, an endogenous anti-nucleic acid defense system is found in bacterial cells. In some embodiments, an endogenous anti-nucleic acid defense system is found in archaeal cells.

[0605] In some embodiments, a ZORYA Type I defense system (Defense System Ia) components comprise ZorA, ZorB, ZorC and ZorD polypeptides. In some embodiments, a ZORYA Type I defense system components comprise functional portions of ZorA, ZorB, ZorC and ZorD polypeptides. In some embodiments, the ZORYA Type I defense system components are encoded by zorA, zorB, zorC and zorD genes.

[0606] In some embodiments, a ZORYA Type II defense system (Defense System Ib) components comprise ZorA, ZorB, and ZorE polypeptides. In some embodiments, a ZORYA Type II defense system components comprise functional portions of ZorA, ZorB, and ZorE polypeptides. In some embodiments, the ZORYA Type II defense system components are encoded by zorA, zorB, and zorE genes.

[0607] Non-limiting embodiments of endogenous ZORYA systems and the respective location of their components are provided in Table 8 herein.

[0608] In some embodiments, the components of a ZORYA system may be identified by the presence of similar domains present within each component. In some embodiments, domains comprise pfam domains and or clusters of orthologous groups (COG) domains.

[0609] A skilled artisan would appreciate that the term “pfam” may encompass a large collection of protein domains and protein families maintained by the pfam consortium and available at several sponsored world wide web sites, including for example: pfam.sanger.ac.uk/ (Welcome Trust, Sanger Institute); pfam.sbc.su.se/ (Stockholm Bioinformatics Center); pfam(dot)janelia(dot)org/ (Janelia Farm, Howard Hughes Medical Institute); pfam(dot)jouy(dot)inra(dot)fr/ (Institut national de la Recherche Agronomique); and pfam.ccbb.re.kr/. pfam domains and families are identified using multiple sequence alignments and hidden Markov models (HMMs) (see e.g. R. D. Finnet et al. nucleic Acids Research Database (2010) Issue 38: D211-222). By accessing the pfam database, for example, using any of the above-reference websites, protein sequences can be queried against the hidden Markov models (HMMs) using HMMER homology search software (e.g., HMMER3, hmmer(dot)janelia(dot)org/).

[0610] A skilled artisan would appreciate that the term “COG (clusters of orthologous groups)” may encompass a large collection of protein families classified according to their homologous relationships available at e.g. the NCBI COG website (http://www(dot)ncbi(dot)nlm(dot)nih(dot)gov/COG). Each COG consists of a group of proteins found to be orthologous across at least three lineages and likely corresponds to an ancient conserved domain [see e.g. Tatusov et al. Science 1997 Oct. 24; 278(5338):631-7; and Tatusov et al. nucleic Acids Res. 2000 Jan. 1; 28(1): 33-36].

[0611] In some embodiments, a Defense System Ia comprises a membrane associated complex. In some embodiments, a Defense System Ib comprises a membrane associated complex.

[0612] In some embodiments, the term “ZorA” refers to the polynucleotide or expression product e.g., the polypeptide encoded by the zorA gene. In some embodiments, the term “ZorA” refers to a ZorA polypeptide. In some embodiments, the zorA gene encodes a polypeptide comprising a pfam01618 domain. In some embodiments, the zorA gene encodes a polypeptide comprising a COG0840 domain. In some embodiments, the zorA gene encodes a polypeptide comprising a pfam01618 domain and a COG0840 domain. In some embodiments, the ZorA polypeptide comprises a pfam01618 domain. In some embodiments, the ZorA polypeptide comprises a COG0840 domain. In some embodiments, the ZorA polypeptide comprises a pfam01618 domain and a COG0840 domain.

[0613] In some embodiments, the zorA gene encodes a polypeptide member of the MotA/TolQ/EXaB proton channel family. In some embodiments, the zorA gene encodes a polypeptide comprising 3 transmembrane helices.

[0614] In some embodiments, the ZorA polypeptide comprises a member of the MotA/TolQ/EXaB proton channel family. In some embodiments, the ZorA polypeptide comprises a member of a family comprising 3 transmembrane helices.

[0615] In some embodiments, ZorA polypeptide is encoded by a gene positioned within 5-60 genes of a gene encoding a ZorB, ZorC, ZorD, and or a ZorE polypeptide in a genome of a prokaryotic cell. In some embodiments, ZorA polypeptide is encoded by a gene positioned within 5 genes upstream (5′) or downstream (3′) to a gene encoding a ZorB, ZorC, ZorD, and/or a ZorE polypeptide in a genome of a prokaryotic cell. In some embodiments, ZorA polypeptide is encoded by a gene positioned within 5 genes upstream (5′) and downstream (3′) to a gene encoding a ZorB, ZorC, ZorD, and or ZorE polypeptide, or any combination thereof, in a genome of a prokaryotic cell.

[0616] In some embodiments, ZorA and ZorB are encoded by genes positioned sequentially 5′ to 3′ in a genome of a prokaryotic cell. In some embodiments, ZorA and ZorB are encoded by genes positioned contiguously 5′ to 3′ in a genome of a prokaryotic cell. In some embodiments, ZorA, ZorB, and ZorC are encoded by genes positioned sequentially 5′ to 3′ in a genome of a prokaryotic cell. In some embodiments, ZorA, ZorB, and ZorC are encoded by genes positioned contiguously 5′ to 3′ in a genome of a prokaryotic cell. In some embodiments, ZorA, ZorB, and ZorE are encoded by genes positioned sequentially 5′ to 3′ in a genome of a prokaryotic cell. In some embodiments, ZorA, ZorB, and ZorE are encoded by genes positioned contiguously 5′ to 3′ in a genome of a prokaryotic cell. In some embodiments, ZorA, ZorB, ZorC, and ZorD are encoded by genes positioned sequentially 5′ to 3′ in a genome of a prokaryotic cell. In some embodiments, ZorA, ZorB, ZorC, and ZorD are encoded by genes positioned contiguously 5′ to 3′ in a genome of a prokaryotic cell.

[0617] In some embodiments, zorA and zorB genes are positioned sequentially 5′ to 3′ in a genome of a prokaryotic cell. In some embodiments, zorA, and zorB, genes are positioned contiguously 5′ to 3′ in a genome of a prokaryotic cell. In some embodiments, zorA, zorB, and zorC genes are positioned sequentially 5′ to 3′ in a genome of a prokaryotic cell. In some embodiments, zorA, zorB, and zorC genes are positioned contiguously 5′ to 3′ in a genome of a prokaryotic cell. In some embodiments, zorA, zorB, and zorE genes are positioned sequentially 5′ to 3′ in a genome of a prokaryotic cell. In some embodiments, zorA, zorB, and zorE genes are positioned contiguously 5′ to 3′ in a genome of a prokaryotic cell. In some embodiments, zorA, zorB, zorC, and zorD genes are positioned sequentially 5′ to 3′ in a genome of a prokaryotic cell. In some embodiments, zorA, zorB, zorC, and zorD genes are positioned contiguously 5′ to 3′ in a genome of a prokaryotic cell.

[0618] In some embodiments, a ZorA polypeptide is about 550 amino acids long (Median gene size).

[0619] In some embodiments, the ZorA polypeptide comprises the amino acid sequence having at least 80% homology to a sequence selected from the group consisting the polypeptides referenced in Table 8, rows 2-1830 columns J and K. In some embodiments, the ZorA polypeptide comprises the amino acid sequence having at least 80% homology within similar domain regions within a sequence selected from the group consisting of the polypeptides referenced in Table 8, rows 2-1830 columns J and K.

[0620] A skilled artisan would appreciate that the terms “similar domain regions” encompasses but is not limited to pfam domains, COG domains, helices, membrane binding domains, transmembrane domains, structural domains, and enzyme active site domains.

[0621] In some embodiments, the ZorA polypeptide comprises a homolog of a polypeptide having the amino acid sequences set forth in the polypeptides referenced in Table 8, rows 2-1830 columns J and K. In some embodiments, a homolog of a ZorA polypeptide comprises a member of the MotA/TolQ/EXaB proton channel family. In some embodiments, a homolog of ZorA polypeptide comprises 3 transmembrane helices. In some embodiments, the ZorA polypeptide comprises the amino acid sequence having at least 80% identity to a sequence selected from the group consisting of the polypeptides referenced in Table 8, rows 2-1830 columns J and K.

[0622] A skilled artisan would appreciate that homology encompasses similarity of sequence attributed to descent from a common ancestor. Homologous biological components (genes, proteins, structures) are called homologs. The extent to which nucleotide or protein sequences are related. The similarity between two sequences (DNA, RNA, or amino acid) can be expressed as percent sequence identity and/or percent positive substitutions.

[0623] A skilled artisan would appreciate that the term “homolog” encompasses a gene or a polypeptide (a protein) that is related to a second gene or polypeptide (protein), respectively, by descent from a common ancestral DNA or polypeptide (protein) sequence, respectively. Thus, a homolog of a gene, in some embodiments, comprises a similar nucleotide sequence to the gene. In some embodiments, a gene homolog encodes an identical polypeptide as is encoded by the gene. In some embodiments, a gene homolog encodes a polypeptide with the same functional properties as is encoded by the gene. In some embodiments, a gene homolog encodes a polypeptide that comprises a similar amino acid sequence as the polypeptide encoded by the gene. In one embodiment, the polypeptide homolog comprises a similar amino acid sequence as the polypeptide. In some embodiments, the polypeptide homolog comprises the same functional properties as the polypeptide. In some embodiments, the polypeptide homolog comprises similar functional properties as the polypeptide. In some embodiments, the polypeptide homolog comprises a same domain(s) as the polypeptide. In some embodiments, the polypeptide homolog comprises a similar domain(s) as the polypeptide.

[0624] A skilled artisan would appreciate that percent homology or percent identity may be determined, for example but no limited to, using BlastP software of the National Center of Biotechnology Information (NCBI) using default parameters. The homolog may also refer to an ortholog, a deletion, insertion, or substitution variant, including an amino acid substitution. In some embodiments, sequence identity or homology can be determined using any protein or nucleic acid sequence alignment algorithm such as Blast, ClustalW, MUSCLE, and HHpred.

[0625] In some embodiments, gene homology and/or polypeptide homology can be based on shared motifs, for example but not limited to pfam domains, COG domains, DUF domains, transmembrane domains, and nuclease domains. In some embodiments, similarities of shared motifs are combined with the conserved size of the gene or the expression product in the different subtypes and the location of the gene in the gene cluster.

[0626] In some embodiments, the ZorA polypeptide comprises an amino acid sequence having at least 80%, at least 85%, at least 90%, or at least 95% homology to a sequence selected from the group consisting of the polypeptides referenced in Table 8, rows 2-1830 columns J and K. In some embodiments, the ZorA polypeptide comprises the amino acid sequence having at least 80%, at least 85%, at least 95% homology within similar domain regions within a sequence selected from the group consisting of the polypeptides referenced in Table 8, rows 2-1830 columns J and K. In some embodiments, the ZorA polypeptide comprises an amino acid sequence having at least 80%, at least 85%, at least 90%, or at least 95% identity to a sequence selected from the group consisting of the polypeptides referenced in Table 8, rows 2-1830 columns J and K. In some embodiments, the ZorA polypeptide comprises the amino acid sequence having at least 80%, at least 85%, at least 95% identity within similar domain regions within a sequence selected from the group consisting of the polypeptides referenced in Table 8, rows 2-1830 columns J and K. In some embodiments, the ZorA polypeptide comprises an amino acid sequence selected from the group consisting of the polypeptides referenced in Table 8, rows 2-1830 columns J and K.

[0627] In some embodiments, the ZorA polypeptide comprises an amino acid sequence encoded by a nucleic acid sequence having at least 80%, at least 85%, at least 90%, or at least 95% homology to a sequence selected from the group consisting of the polynucleotides referenced in Table 8, rows 2-1830 columns J and L. In some embodiments, the ZorA polypeptide comprises the amino acid sequence encoded by a nucleic acid sequence having at least 80%, at least 85%, at least 95% homology within similar domain regions within a sequence selected from the group consisting of the polynucleotides referenced in Table 8, rows 2-1830 columns J and L. In some embodiments, the ZorA polypeptide comprises an amino acid sequence encoded by a nucleic acid sequence having at least 80%, at least 85%, at least 90%, or at least 95% identity to a sequence selected from the group consisting of the polynucleotides referenced in Table 8, rows 2-1830 columns J and L. In some embodiments, the ZorA polypeptide comprises the amino acid sequence encoded by a nucleic acid sequence having at least 80%, at least 85%, at least 95% identity within similar domain regions within a sequence selected from the group consisting of the polynucleotides referenced in Table 8, rows 2-1830 columns J and L. In some embodiments, the ZorA polypeptide comprises an amino acid sequence encoded from a nucleic acid sequence selected from the group consisting of the polynucleotides referenced in Table 8, rows 2-1830 columns J and L.

[0628] In some embodiments, the nucleic acid sequence of a zorA gene comprises a nucleic acid sequence having at least 80%, at least 85%, at least 90%, or at least 95% homology to a sequence selected from the group consisting of the polynucleotides referenced in Table 8, rows 2-1830 columns J and L. In some embodiments, the nucleic acid sequence of a zorA gene comprises a nucleic acid sequence having at least 80%, at least 85%, at least 90%, or at least 95% identity to a sequence selected from the group consisting of the polynucleotides referenced in Table 8, rows 2-1830 columns J and L. In some embodiments, the nucleic acid sequence of a zorA gene comprises a nucleic acid sequence having at least 80%, at least 85%, at least 90%, or at least 95% homology within the nucleotide sequence encoding similar domain regions as a sequence selected from the group consisting of the polynucleotides referenced in Table 8, rows 2-1830 columns J and L. In some embodiments, the nucleic acid sequence of a zorA gene comprises a nucleic acid sequence having at least 80%, at least 85%, at least 90%, or at least 95% identity within the nucleotide sequence encoding similar domain regions as a sequence selected from the group consisting of the polynucleotides referenced in Table 8, rows 2-1830 columns J and L. In some embodiments, the nucleic acid sequence of a zorA gene comprises a nucleic acid sequence selected from the group consisting of the polynucleotides referenced in Table 8, rows 2-1830 columns J and L.

[0629] As used herein, the term “ZorB” refers to the polynucleotide or expression product e.g., polypeptide encoded by the zorB gene. In some embodiments, the term “ZorB” refers to a ZorB polypeptide. In some embodiments, the product of the zorB gene comprises a pfam13677 domain. In some embodiments, the product of the zorB gene comprises a pfam00691 domain. In some embodiments, the product of the zorB gene comprises a pfam13677 domain and a pfam00691 domain. In some embodiments, the zorB gene encodes a member of MotB proton channel family. In some embodiments, the zorB gene encodes a polypeptide comprising a transmembrane helix.

[0630] In some embodiments, ZorB polypeptide is encoded by a gene positioned within 5-60 genes of a gene encoding a ZorA, ZorC, ZorD, and or a ZorE polypeptide in a genome of a prokaryotic cell. In some embodiments, ZorB polypeptide is encoded by a gene positioned within 5 genes upstream (5′) or downstream (3′) to a gene encoding a ZorA, ZorC, ZorD, and/or a ZorE polypeptide in a genome of a prokaryotic cell.

[0631] In some embodiments, ZorA and ZorB are encoded by genes positioned sequentially 5′ to 3′ in a genome of a prokaryotic cell. In some embodiments ZorA and ZorB are encoded by genes positioned contiguously 5′ to 3′ in a genome of a prokaryotic cell. In some embodiments, ZorB and ZorC are encoded by genes positioned sequentially 5′ to 3′ in a genome of a prokaryotic cell. In some embodiments ZorB and ZorC are encoded by genes positioned contiguously 5′ to 3′ in a genome of a prokaryotic cell. In some embodiments, ZorB and ZorE are encoded by genes positioned sequentially 5′ to 3′ in a genome of a prokaryotic cell. In some embodiments ZorB and ZorE are encoded by genes positioned contiguously 5′ to 3′ in a genome of a prokaryotic cell. In some embodiments, ZorB, ZorC, and ZorD are encoded by genes positioned sequentially 5′ to 3′ in a genome of a prokaryotic cell. In some embodiments, ZorB, ZorC, and ZorD are encoded by genes positioned contiguously 5′ to 3′ in a genome of a prokaryotic cell.

[0632] In some embodiments, ZorB polypeptide is encoded by a gene positioned within 5 genes upstream or downstream to a gene encoding zorA, zorC, and zorD, in a genome of a prokaryotic cell. In some embodiments, ZorB polypeptide is encoded by a gene positioned within 5 genes upstream or downstream to a gene encoding zorA and zorE, in a genome of a prokaryotic cell.

[0633] In some embodiments, a ZorB polypeptide is about 217 amino acids long (median gene size).

[0634] In some embodiments, the ZorB polypeptide comprises an amino acid sequence having at least 80% homology to a sequence selected from the group consisting of the polypeptides referenced in Table 8, rows 2-1830 columns N and O.

[0635] In some embodiments, the ZorB polypeptide comprises the amino acid sequence having at least 80% homology within similar domain regions within a sequence selected from the group consisting of the polypeptides referenced in Table 8, rows 2-1830 columns N and O. In some embodiments, a homology of the ZorB polypeptide comprises a MotB proton channel family member. In some embodiments, the ZorB polypeptide comprises an amino acid sequence having at least 80% identity to a sequence selected from the group consisting of the polypeptides referenced in Table 8, rows 2-1830 columns N and O.

[0636] In some embodiments, the ZorB polypeptide comprises an amino acid sequence having at least 80%, at least 85%, at least 90%, or at least 95% homology to a sequence selected from the group consisting of the polypeptides referenced in Table 8, rows 2-1830 columns N and O. In some embodiments, the ZorB polypeptide comprises the amino acid sequence having at least 80%, at least 85%, at least 95% homology within similar domain regions within a sequence selected from the group consisting of the polypeptides referenced in Table 8, rows 2-1830 columns N and O. In some embodiments, the ZorB polypeptide comprises an amino acid sequence having at least 80%, at least 85%, at least 90%, or at least 95% identity to a sequence selected from the group consisting of the polypeptides referenced in Table 8, rows 2-1830 columns N and O. In some embodiments, the ZorB polypeptide comprises the amino acid sequence having at least 80%, at least 85%, at least 95% identity within similar domain regions within a sequence selected from the group consisting of the polypeptides referenced in Table 8, rows 2-1830 columns N and O. In some embodiments, the ZorB polypeptide comprises an amino acid sequence selected from the group consisting of the polypeptides referenced in Table 8, rows 2-1830 columns N and O.

[0637] In some embodiments, the ZorB polypeptide comprises an amino acid sequence encoded from a nucleic acid sequence having at least 80%, at least 85%, at least 90%, or at least 95% homology to a sequence selected from the group consisting of the polynucleotides referenced in Table 8, rows 2-1830 columns N and P. In some embodiments, the ZorB polypeptide comprises the amino acid sequence encoded by a nucleic acid sequence having at least 80%, at least 85%, at least 95% homology within similar domain regions within a sequence selected from the group consisting of the polynucleotides referenced in Table 8, rows 2-1830 columns N and P. In some embodiments, the ZorB polypeptide comprises an amino acid sequence encoded from a nucleic acid sequence having at least 80%, at least 85%, at least 90%, or at least 95% identity to a sequence selected from the group consisting of the polynucleotides referenced in Table 8, rows 2-1830 columns N and P. In some embodiments, the ZorB polypeptide comprises the amino acid sequence encoded by a nucleic acid sequence having at least 80%, at least 85%, at least 95% identity within similar domain regions within a sequence selected from the group consisting of the polynucleotides referenced in Table 8, rows 2-1830 columns N and P. In some embodiments, the ZorB polypeptide comprises an amino acid sequence encoded from a nucleic acid sequence selected from the group consisting of the polynucleotides referenced in Table 8, rows 2-1830 columns N and P.

[0638] In some embodiments, the nucleic acid sequence of a zorB gene comprises a nucleic acid sequence having at least 80%, at least 85%, at least 90%, or at least 95% homology to a sequence selected from the group consisting of the polynucleotides referenced in Table 8, rows 2-1830 columns N and P. In some embodiments, the nucleic acid sequence of a zorB gene comprises a nucleic acid sequence having at least 80%, at least 85%, at least 90%, or at least 95% identity to a sequence selected from the group consisting of the polynucleotides referenced in Table 8, rows 2-1830 columns N and P. In some embodiments, the nucleic acid sequence of a zorB gene comprises a nucleic acid sequence having at least 80%, at least 85%, at least 90%, or at least 95% homology within the nucleotide sequence encoding similar domain regions as a sequence selected from the group consisting of the polynucleotides referenced in Table 8, rows 2-1830 columns N and P. In some embodiments, the nucleic acid sequence of a zorB gene comprises a nucleic acid sequence having at least 80%, at least 85%, at least 90%, or at least 95% identity within the nucleotide sequence encoding similar domain regions as a sequence selected from the group consisting of the polynucleotides referenced in Table 8, rows 2-1830 columns N and P. In some embodiments, the nucleic acid sequence of a zorB gene comprises a nucleic acid sequence selected from the group consisting of the polynucleotides referenced in Table 8, rows 2-1830 columns N and P.

[0639] As used herein, the term “ZorC” refers to the polynucleotide or expression product e.g., polypeptide encoded by the zorC gene. In some embodiments, the term “ZorC” refers to a ZorC polypeptide. In some embodiments, the product of a zorC gene comprises a pfam15611 domain. In some embodiments, the product of a zorC gene comprises a EH signature domain.

[0640] In some embodiments, ZorC polypeptide is encoded by a gene positioned within 5-60 genes of a gene encoding ZorA, ZorB and/or ZorD in a genome of a prokaryotic cell. In some embodiments, ZorC polypeptide is encoded by a gene positioned within 5 genes upstream (5′) or downstream (3′) to a gene encoding ZorA, ZorB and/or ZorD in a genome of a prokaryotic cell. In some embodiments, ZorC polypeptide is encoded by a gene positioned within 5 genes upstream and downstream to a gene encoding ZorA, ZorB and ZorD in a genome of a prokaryotic cell.

[0641] In some embodiments, ZorC and ZorD are encoded by genes positioned sequentially 5′ to 3′ in a genome of a prokaryotic cell. In some embodiments, ZorC and ZorD are encoded by genes positioned contiguously 5′ to 3′ in a genome of a prokaryotic cell.

[0642] In some embodiments, zorC and zorD genes are positioned sequentially 5′ to 3′ in a genome of a prokaryotic cell. In some embodiments, zorC and zorD genes are positioned contiguously 5′ to 3′ in a genome of a prokaryotic cell.

[0643] In some embodiments, a ZorC polypeptide is about 470 amino acids long (median gene size).

[0644] In some embodiments, the ZorC polypeptide comprises an amino acid sequence having at least 80% homology to a sequence selected from the group consisting of the polypeptides referenced in Table 8, rows 2-1174 columns R and S. In some embodiments, the ZorC polypeptide comprises the amino acid sequence having at least 80% homology within similar domain regions within a sequence selected from the group consisting of the polypeptides referenced in Table 8, rows 2-1174 columns R and S. In some embodiments, the ZorC polypeptide comprises an amino acid sequence having at least 80% identity to a sequence selected from the group consisting of the polypeptides referenced in Table 8, rows 2-1174 columns R and S

[0645] In some embodiments, the ZorC polypeptide comprises an amino acid sequence having at least 80%, at least 85%, at least 90%, or at least 95% homology to a sequence selected from the group consisting of the polypeptides referenced in Table 8, rows 2-1174 columns R and S. In some embodiments, the ZorC polypeptide comprises the amino acid sequence having at least 80%, at least 85%, at least 95% homology within similar domain regions within a sequence selected from the group consisting of the polypeptides referenced in Table 8, rows 2-1174 columns R and S. In some embodiments, a ZorC homolog comprises an EH signature domain. In some embodiments, the ZorC polypeptide comprises an amino acid sequence having at least 80%, at least 85%, at least 90%, or at least 95% identity to a sequence selected from the group consisting of the polypeptides referenced in Table 8, rows 2-1174 columns R and S. In some embodiments, the ZorC polypeptide comprises the amino acid sequence having at least 80%, at least 85%, at least 95% identity within similar domain regions within a sequence selected from the group consisting of the polypeptides referenced in Table 8, rows 2-1174 column N. In some embodiments, the ZorC polypeptide comprises an amino acid sequence selected from the group consisting of SEQ ID NOs: the polypeptides referenced in Table 8, rows 2-1174 columns R and S.

[0646] In some embodiments, the ZorC polypeptide comprises an amino acid sequence encoded from a nucleic acid sequence having at least 80%, at least 85%, at least 90%, at least 95% homology to a sequence selected from the group consisting of the polynucleotides referenced in Table 8, rows 2-1174 columns R and T. In some embodiments, the ZorC polypeptide comprises the amino acid sequence encoded by a nucleic acid sequence having at least 80%, at least 85%, at least 95% homology within similar domain regions within a sequence selected from the group consisting of the polynucleotides referenced in Table 8, rows 2-1174 columns R and T. In some embodiments, the ZorC polypeptide comprises an amino acid sequence encoded from a nucleic acid sequence having at least 80%, at least 85%, at least 90%, at least 95% identity to a sequence selected from the group consisting of the polynucleotides referenced in Table 8, rows 2-1174 columns R and T. In some embodiments, the ZorC polypeptide comprises the amino acid sequence encoded by a nucleic acid sequence having at least 80%, at least 85%, at least 95% identity within similar domain regions within a sequence selected from the group consisting of the polynucleotides referenced in Table 8, rows 2-1174 columns R and T. In some embodiments, the ZorC polypeptide comprises an amino acid sequence encoded from a nucleic acid sequence selected from the group consisting of the polynucleotides referenced in Table 8, rows 2-1174 columns R and T.

[0647] In some embodiments, the zorC gene comprises a nucleic acid sequence having at least 80%, at least 85%, at least 90%, at least 95% homology to a sequence selected from the group consisting of the polynucleotides referenced in Table 8, rows 2-1174 columns R and T. In some embodiments, the zorC gene comprises a nucleic acid sequence having at least 80%, at least 85%, at least 90%, at least 95% identity to a sequence selected from the group consisting of the polynucleotides referenced in Table 8, rows 2-1174 columns R and T. In some embodiments, the nucleic acid sequence of a zorA gene comprises a nucleic acid sequence having at least 80%, at least 85%, at least 90%, or at least 95% homology to a sequence selected from the group consisting of the polynucleotides referenced in Table 8, rows 2-1174 columns R and T. In some embodiments, the nucleic acid sequence of a zorA gene comprises a nucleic acid sequence having at least 80%, at least 85%, at least 90%, or at least 95% identity to a sequence selected from the group consisting of the polynucleotides referenced in Table 8, rows 2-1174 columns R and T. In some embodiments, the nucleic acid sequence of a zorC gene comprises a nucleic acid sequence having at least 80%, at least 85%, at least 90%, or at least 95% homology within the nucleotide sequence encoding similar domain regions as a sequence selected from the group consisting of the polynucleotides referenced in Table 8, rows 2-1174 columns R and T. In some embodiments, the nucleic acid sequence of a zorC gene comprises a nucleic acid sequence having at least 80%, at least 85%, at least 90%, or at least 95% identity within the nucleotide sequence encoding similar domain regions as a sequence selected from the group consisting of the polynucleotides referenced in Table 8, rows 2-1174 columns R and T. In some embodiments, the zorC gene comprises a nucleic acid sequence selected from the group consisting of the polynucleotides referenced in Table 8, rows 2-1174 columns R and T.

[0648] As used herein, the term “ZorD” refers to the polynucleotide or expression product e.g., polypeptide encoded by the zorD gene. In some embodiments, the term “ZorD” refers to a ZorD polypeptide. In some embodiments, the product of the zorD gene comprises a pfam00176 domain. In some embodiments, the product of the zorD gene comprises a pfam00271 domain. In some embodiments, the product of the zorD gene contains a pfam00176 domain and a pfam00271 domain. In some embodiments, the product of the zorD gene comprises, a COG0553 domain. In some embodiments, the product of the zorD gene further contains a pfam04471 domain.

[0649] In some embodiments, a ZorD polypeptide comprises a pfam00176 domain. In some embodiments, a ZorD polypeptide comprises a pfam00271 domain. In some embodiments, a ZorD polypeptide comprises a pfam00176 domain and a pfam00271 domain. In some embodiments, a ZorD polypeptide comprises, a COG0553 domain. In some embodiments, a ZorD polypeptide comprises a pfam04471 domain. In some embodiments, a ZorD polypeptide comprises, a pfam00176 domain, a pfam00271 domain, a COG0553 domain, or a pfam04471 domain or any combination thereof. In some embodiments, a ZorD polypeptide comprises, a pfam00176 domain, a pfam00271 domain, a COG0553 domain, and a pfam04471 domain.

[0650] In some embodiments, a ZorD polypeptide is encoded by a gene positioned within 5-60 genes of a gene encoding ZorA, ZorB and/or ZorC in a genome of a prokaryotic cell. In some embodiments, a ZorD polypeptide is encoded by a gene positioned within 5 genes upstream (5′) or downstream (3′) to a gene encoding ZorA, ZorB and/or ZorC in a genome of a prokaryotic cell. In some embodiments, ZorD polypeptide is encoded by a gene positioned within 5 genes upstream or downstream to a gene encoding ZorA, ZorB and ZorC in a genome of a prokaryotic cell.

[0651] In some embodiments, a ZorD polypeptide is about 1200 amino acids long (median gene size).

[0652] In some embodiments, the ZorD polypeptide comprises an amino acid sequence having at least 80% homology to a sequence selected from the group consisting of the polypeptides referenced in Table 8, rows 2-1174 columns V and W. In some embodiments, the ZorD polypeptide comprises the amino acid sequence having at least 80% homology within similar domain regions within a sequence selected from the group consisting of the polypeptides referenced in Table 8, rows 2-1174 columns V and W. In some embodiments, a ZorD polypeptide homologue comprises a SW12/SNF2 helicase. In some embodiments, a ZorD polypeptide homologue comprises a Mrr-like nuclease domain. In some embodiments, the ZorD polypeptide comprises an amino acid sequence having at least 80% identity to a sequence selected from the group consisting of the polypeptides referenced in Table 8, rows 2-1174 columns V and W. In some embodiments, the ZorD polypeptide comprises the amino acid sequence having at least 80% identity within similar domain regions within a sequence selected from the group consisting of the polypeptides referenced in Table 8, rows 2-1174 columns V and W.

[0653] In some embodiments, the ZorD polypeptide comprises an amino acid sequence having at least 80%, at least 85%, at least 90%, at least 95% homology to a sequence selected from the group consisting of the polypeptides referenced in Table 8, rows 2-1174 columns V and W. In some embodiments, the ZorD polypeptide comprises the amino acid sequence having at least 80%, 85%, 90%, 95% homology within similar domain regions within a sequence selected from the group consisting of the polypeptides referenced in Table 8, rows 2-1174 columns V and W.

[0654] In some embodiments, the ZorD polypeptide comprises an amino acid sequence having at least 80%, at least 85%, at least 90%, at least 95% identity to a sequence selected from the group consisting of the polypeptides referenced in Table 8, rows 2-1174 columns V and W. In some embodiments, the ZorD polypeptide comprises the amino acid sequence having at least 80%, 85%, 90%, 95% identity within similar domain regions within a sequence selected from the group consisting of the polypeptides referenced in Table 8, rows 2-1174 columns V and W. In some embodiments, the ZorD polypeptide comprises an amino acid sequence selected from the group consisting of the polypeptides referenced in Table 8, rows 2-1174 columns V and W.

[0655] In some embodiments, the ZorD polypeptide comprises an amino acid sequence encoded from a nucleic acid sequence having at least 80%, at least 85%, at least 90%, or at least 95% homology to a sequence selected from the group consisting of the polynucleotides referenced in Table 8, rows 2-1174 columns V and X. In some embodiments, the ZorD polypeptide comprises the amino acid sequence encoded by a nucleic acid sequence having at least 80%, 85%, 90%, 95% homology within similar domain regions within a sequence selected from the group consisting of the polynucleotides referenced in Table 8, rows 2-1174 columns V and X. In some embodiments, the ZorD polypeptide comprises an amino acid sequence encoded from a nucleic acid sequence having at least 80%, at least 85%, at least 90%, or at least 95% identity to a sequence selected from the group consisting of the polynucleotides referenced in Table 8, rows 2-1174 columns V and X. In some embodiments, the ZorD polypeptide comprises the amino acid sequence encoded by a nucleic acid sequence having at least 80%, 85%, 90%, 95% identity within similar domain regions within a sequence selected from the group consisting of the polynucleotides referenced in Table 8, rows 2-1174 columns V and X. In some embodiments, the ZorD polypeptide comprises an amino acid sequence encoded from a nucleic acid sequence selected from the group consisting of the polynucleotides referenced in Table 8, rows 2-1174 columns V and X.

[0656] In some embodiments, the zorD gene comprises a nucleic acid sequence having at least 80%, at least 85%, at least 90%, or at least 95% homology to a sequence selected from the group consisting of the polynucleotides referenced in Table 8, rows 2-1174 columns V and X. In some embodiments, the zorD gene comprises a nucleic acid sequence having at least 80%, at least 85%, at least 90%, or at least 95% identity to a sequence selected from the group consisting of the polynucleotides referenced in Table 8, rows 2-1174 columns V and X. In some embodiments, the nucleic acid sequence of a zorD gene comprises a nucleic acid sequence having at least 80%, at least 85%, at least 90%, or at least 95% homology within the nucleotide sequence encoding similar domain regions as a sequence selected from the group consisting of the polynucleotides referenced in Table 8, rows 2-1174 columns V and X. In some embodiments, the nucleic acid sequence of a zorD gene comprises a nucleic acid sequence having at least 80%, at least 85%, at least 90%, or at least 95% identity within the nucleotide sequence encoding similar domain regions as a sequence selected from the group consisting of the polypeptides referenced in Table 8, rows 2-1174 column P. In some embodiments, the nucleic acid sequence of the zorD gene is selected from the group consisting of the polynucleotides referenced in Table 8, rows 2-1174 columns V and X.

[0657] As used herein, the term “ZorE” refers to the polynucleotide or expression product e.g., polypeptide encoded by the zorE gene. In some embodiments, the term “ZorE” refers to a ZorE polypeptide. In some embodiments, the product of the zorE gene comprises a pfam01844 domain. In some embodiments, the product of the zorE gene comprises a COG3183 domain. In some embodiments, the product of the zorE gene contains a pfam01844 domain and a COG3183 domain. In some embodiments, the product of the zorE gene comprises an HNH endonuclease.

[0658] In some embodiments, a ZorE polypeptide comprises a pfam01844 domain. In some embodiments, a ZorE polypeptide comprises a COG3183 domain. In some embodiments, a ZorE polypeptide comprises a pfam01844 domain and a COG31383 domain. In some embodiments, a ZorE polypeptide comprises a HNH endonuclease.

[0659] In some embodiments, a ZorE polypeptide is encoded by a gene positioned within 5-60 genes of a gene encoding ZorA and/or ZorB in a genome of a prokaryotic cell. In some embodiments, a ZorE polypeptide is encoded by a gene positioned within 5 genes upstream (5′) or downstream (3′) to a gene encoding ZorA and/or ZorB in a genome of a prokaryotic cell. In some embodiments, ZorE polypeptide is encoded by a gene positioned within 5 genes upstream and downstream to a gene encoding ZorA and/or ZorB in a genome of a prokaryotic cell.

[0660] In some embodiments, a ZorE polypeptide is about 367 amino acids long (median gene size).

[0661] In some embodiments, the ZorE polypeptide comprises an amino acid sequence having at least 80% homology to a sequence selected from the group consisting of the polypeptides referenced in Table 8, rows 1175-1830 columns Z and AA. In some embodiments, the ZorE polypeptide comprises the amino acid sequence having at least 80% homology within similar domain regions within a sequence selected from the group consisting of the polypeptides referenced in Table 8, rows 1175-1830 columns Z and AA. In some embodiments, a ZorE polypeptide homologue comprises a HNH endonuclease. In some embodiments, the ZorE polypeptide comprises an amino acid sequence having at least 80% identity to a sequence selected from the group consisting of the polypeptides referenced in Table 8, rows 1175-1830 columns Z and AA. In some embodiments, the ZorE polypeptide comprises the amino acid sequence having at least 80% identity within similar domain regions within a sequence selected from the group consisting of the polypeptides referenced in Table 8, rows 1175-1830 columns Z and AA.

[0662] In some embodiments, the ZorE polypeptide comprises an amino acid sequence having at least 80%, at least 85%, at least 90%, or at least 95% homology to a sequence selected from the group consisting of the polypeptides referenced in Table 8, rows 1175-1830 columns Z and AA. In some embodiments, the ZorE polypeptide comprises the amino acid sequence having at least 80%, 85%, 90%, 95% homology within similar domain regions within a sequence selected from the group consisting of the polypeptides referenced in Table 8, rows 1175-1830 columns Z and AA. In some embodiments, the ZorE polypeptide comprises an amino acid sequence having at least 80%, at least 85%, at least 90%, or at least 95% identity to a sequence selected from the group consisting of the polypeptides referenced in Table 8, rows 1175-1830 columns Z and AA. In some embodiments, the ZorE polypeptide comprises the amino acid sequence having at least 80%, 85%, 90%, 95% identity within similar domain regions within a sequence selected from the group consisting of the polypeptides referenced in Table 8, rows 1175-1830 columns Z and AA. In some embodiments, the ZorE polypeptide comprises an amino acid sequence selected from the group consisting of the polypeptides referenced in Table 8, rows 1175-1830 columns Z and AA.

[0663] In some embodiments, the ZorE polypeptide comprises an amino acid sequence encoded from a nucleic acid sequence having at least 80%, at least 85%, at least 90%, or at least 95% homology to a sequence selected from the group consisting of the polynucleotides referenced in Table 8, rows 1175-1830 columns Z and AB. In some embodiments, the ZorE polypeptide comprises the amino acid sequence encoded from a nucleic acid sequence having at least 80%, 85%, 90%, 95% homology within similar domain regions within a sequence selected from the group consisting of the polynucleotides referenced in Table 8, rows 1175-1830 columns Z and AB. In some embodiments, the ZorE polypeptide comprises an amino acid sequence encoded from a nucleic acid sequence having at least 80%, at least 85%, at least 90%, or at least 95% identity to a sequence selected from the group consisting of the polynucleotides referenced in Table 8, rows 1175-1830 columns Z and AB. In some embodiments, the ZorE polypeptide comprises the amino acid sequence encoded from a nucleic acid sequence having at least 80%, 85%, 90%, 95% identity within similar domain regions within a sequence selected from the group consisting of the polynucleotides referenced in Table 8, rows 1175-1830 columns Z and AB. In some embodiments, the ZorE polypeptide comprises an amino acid sequence encoded from a nucleic acid sequence selected from the group consisting of the polynucleotides referenced in Table 8, rows 1175-1830 columns Z and AB.

[0664] In some embodiments, the zorE gene comprises a nucleic acid sequence having at least 80%, at least 85%, at least 90%, or at least 95% homology to a sequence selected from the group consisting of the polynucleotides referenced in Table 8, rows 1175-1830 columns Z and AB. In some embodiments, the zorE gene comprises a nucleic acid sequence having at least 80%, at least 85%, at least 90%, or at least 95% identity to a sequence selected from the group consisting of the polynucleotides referenced in Table 8, rows 1175-1830 columns Z and AB. In some embodiments, the nucleic acid sequence of a zorE gene comprises a nucleic acid sequence having at least 80%, at least 85%, at least 90%, or at least 95% homology within the nucleotide sequence encoding similar domain regions as a sequence selected from the group consisting of the polynucleotides referenced in Table 8, rows 1175-1830 columns Z and AB. In some embodiments, the nucleic acid sequence of a zorE gene comprises a nucleic acid sequence having at least 80%, at least 85%, at least 90%, or at least 95% identity within the nucleotide sequence encoding similar domain regions as a sequence selected from the group consisting of the polynucleotides referenced in Table 8, rows 1175-1830 columns Z and AB. In some embodiments, the nucleic acid sequence of the zorE gene is selected from the group consisting of the polynucleotides referenced in Table 8, rows 1175-1830 columns Z and AB.

[0665] A skilled artisan would appreciate that a “functional portion of a Defense System I component” or “functional fragment of Defense System I component” or “functional portion of a ZORYA defense system component” or “functional fragment of ZORYA defense system component” refers to a functional portion of a ZORYA polynucleotide or polypeptide, as disclosed herein, which expression is sufficient to elicit an anti-phage activity alone or in combination with the at least one of the other ZORYA polynucleotides or polypeptides disclosed herein or functional portions thereof.

[0666] As used herein, the terms “ZorA”, “ZorB”, “ZorC”, “ZorD”, “ZorE”, “zorA”, “zorB”, “zorC”, “zorD”, and “zorE”, also refer to functional ZorA, ZorB, ZorC, ZorD, ZorE, zorA, zorB, zorC, zorD, and zorE, homologs, which exhibit the desired activity (i.e., conferring phage resistance). Such homologs can be, for example, at least 80%, at least 81%, at least 82%, at least 83%, at least 84%, at least 85%, at least 86%, at least 87%, at least 88%, at least 89%, at least 90%, at least 91%, at least 92%, at least 93%, at least 94%, at least 95%, at least 96%, at least 97%, at least 98%, at least 99% or 100% identical or homologous to the polypeptides referenced in Table 8, rows 2-1830 columns J and K; rows 2-1830 columns N and O; rows 2-1174 columns R and S; rows 2-1174 columns V and W; and rows 1175-1830 columns Z and AA, respectively, or 80%, at least 81%, at least 82%, at least 83%, at least 84%, at least 85%, at least 86%, at least 87%, at least 88%, at least 89%, at least 90%, at least 91%, at least 92%, at least 93%, at least 94%, at least 95%, at least 96%, at least 97%, at least 98%, at least 99% or 100% identical to the polynucleotide referenced in Table 8, rows 2-1830 columns J and L; rows 2-1830 columns N and P; rows 2-1174 columns R and T; rows 2-1174 columns V and X; and rows 1175-1830 column Z and AB, respectively. In some embodiments, such homologs comprise at least 80%, at least 81%, at least 82%, at least 83%, at least 84%, at least 85%, at least 86%, at least 87%, at least 88%, at least 89%, at least 90%, at least 91%, at least 92%, at least 93%, at least 94%, at least 95%, at least 96%, at least 97%, at least 98%, at least 99% or 100% homology within similar domain regions of the polypeptide referenced in Table 8, rows 2-1830 columns J and K; rows 2-1830 columns N and O; rows 2-1174 columns R and S; rows 2-1174 column V and W; and rows 1175-1830 column Z and AA, respectively, or 80%, at least 81%, at least 82%, at least 83%, at least 84%, at least 85%, at least 86%, at least 87%, at least 88%, at least 89%, at least 90%, at least 91%, at least 92%, at least 93%, at least 94%, at least 95%, at least 96%, at least 97%, at least 98%, at least 99% or 100% identity within nucleotide sequences encoding similar domain regions to the polynucleotide referenced in Table 8, rows 2-1830 columns J and L; rows 2-1830 columns N and P; rows 2-1174 columns R and S; rows 2-1174 columns V and X; and rows 1175-1830 columns Z and AB, respectively.

[0667] Table 8 presents embodiments of components of Defense System Ia and Defense System Ib that may be found in a diverse array of bacteria and archaea genomes (referenced in Table 18). Table 8 presents embodiments of nucleic acid sequences encoding gene cassettes of Defense System Ia and Defense System Ib (referenced in Table 18).

[0668] The Thoeris Defense System

[0669] In some embodiments, a defense system disclosed herein comprises a Thoeris anti-phage defense system. (Table 9)

[0670] In some embodiments, a Thoeris defense system provides a host cell with resistance to entry of foreign nucleic acid invasion. In some embodiments, a host cell expressing a functional Thoeris defense system (Defense System II) provides the host cell resistance foreign nucleic acid invasion.

[0671] In some embodiments, a Thoeris defense system provides a host cell with resistance to at least one phage. In some embodiments, expression of a Thoeris defense system in bacteria protects the bacteria from phage infection. In some embodiments, expression of a Thoeris defense system in bacteria protects the bacteria from plasmid transformation. In some embodiments, expression of a Thoeris defense system in bacteria protects the bacteria from phage infection and from plasmid transformation.

[0672] In some embodiments, a Thoeris defense system provides a host cell with resistance to phage infection. In some embodiments, a Thoeris defense system provides a host cell with resistance to plasmid transformation.

[0673] In some embodiments, expression of a Thoeris defense system in bacteria protects the bacteria from phage infection.

[0674] As used herein, the term “a Thoeris anti-phage defense system” may be used interchangeably with the term “a Defense System II”, having all the same meanings and qualities. A skilled artisan would appreciate that the term “Thoeris system” may be used interchangeably in some embodiments with “Thoeris defense system”, “Thoeris the defense system”, “Thoeris anti-phage system”, and “Defense System II”, having all the same meanings and qualities.

[0675] In some embodiments, a Thoeris defense system (Defense System II) provides a host cell with resistance to plasmid transformation. In some embodiments, a host cell expressing a functional Thoeris defense system (Defense System II) provides a host cells with resistance to plasmid transformation.

[0676] In some embodiments, a Thoeris defense system (Defense system II) provides a host cell with resistance to entry of conjugative elements. In some embodiments, a host cell expressing a function Thoeris defense system (Defense System II) provides the host cell resistance from entry of conjugative elements.

[0677] In some embodiments, a microbial species does not comprise an endogenous Defense System II. In some embodiments, a microbial species does not express an endogenous Defense System II. In some embodiments, a microbial species does not express an endogenous functional Defense System II.

[0678] In some embodiments, a bacterial species does not comprise an endogenous Defense System II. In some embodiments, a bacterial species does not express an endogenous Defense System II. In some embodiments, a bacterial species does not express an endogenous functional Defense System II.

[0679] A Thoeris defense system comprises, in some embodiments, a nucleic acid construct comprising a nucleic acid sequence encoding a ThsA polypeptide comprising a pfam13289 domain, and a ThsB polypeptide comprising a pfam13676 domain or a pfam08937 domain or a pfam08357 domain or a pfam13289, or a pfam14519 or a pfam08357 domain or any combination thereof. In some embodiments, a Thoeris defense system comprises a nucleic acid construct comprising a nucleic acid sequence comprising a thsA gene and a thsB gene. In some embodiments, a Thoeris defense system comprises a nucleic acid construct comprising a nucleic acid sequence comprising a thsA gene and multiple copies of a thsB gene. In some embodiments, a Thoeris defense system comprises 2 copies of a thsB gene. In some embodiments, a Thoeris defense system comprises 3 copies of a thsB gene. In some embodiments, a Thoeris defense system comprises 4 copies of a thsB gene. In some embodiments, a Thoeris defense system comprises 5 copies of a thsB gene. In some embodiments, a Thoeris defense system comprises 6 copies of a thsB gene. In some embodiments, a Thoeris defense system comprises 7 copies of a thsB gene. In some embodiments, a Thoeris defense system comprises 8 copies of a thsB gene. In some embodiments, a Thoeris defense system comprises 9 copies of a thsB gene. In some embodiments, a Thoeris defense system comprises 9 copies of a thsB gene. In some embodiments, a Thoeris defense system comprises 1-10 copies of a thsB gene.

[0680] In some embodiments, each copy of a thsB gene comprises the same nucleotide sequence. In some embodiments, each copy of a thsB gene comprises a different nucleotide sequence. In some embodiments, each copy of a thsB gene encodes a ThsB polypeptide having the same amino acid sequence. In some embodiments, each copy of a thsB gene encodes a ThsB polypeptide having a different amino acid sequence. In some embodiments, the source of the different nucleotide sequences comprises different donor species. In some embodiments, the source of the difference amino acid sequences comprises different donor species

[0681] A Thoeris defense system (Defense System II) comprises, in some embodiments, a nucleic acid construct comprising a nucleic acid sequence encoding a ThsA polypeptide comprising a pfam13289 or a pfam14519 domain or a combination thereof, and a ThsB polypeptide comprising a pfam08937 domain or a pfam13676 domain or a pfam08357 domain or any combination thereof. In some embodiments, a Thoeris defense system comprises a nucleic acid construct comprising a nucleic acid sequence encoding a ThsA polypeptide and a ThsB polypeptide. In some embodiments, a Thoeris defense system comprises a nucleic acid construct comprising a nucleic acid sequence encoding a ThsA polypeptide and 1-10 ThsB polypeptides.

[0682] In some embodiments, a Thoeris defense system (Defense System II) comprises a ThsA polypeptide comprising a pfam13289 or a pfam14519 domain or a combination thereof, and a ThsB polypeptide comprising a pfam13676 domain or a pfam08937 domain or a pfam08357 domain or a pfam13289 or a pfam14519 or a pfam08357 domain or any combination thereof. In some embodiments, a Thoeris defense system (Defense System II) comprises a ThsA polypeptide comprising a pfam13289 or a pfam14519 domain or a combination thereof, and 1-10 ThsB polypeptides comprising a pfam13676 domain or a pfam08937 domain or a pfam08357 domain or a pfam13289 or a pfam14519 or a pfam08357 domain or a combination thereof. In some embodiments, a Thoeris defense system (Defense System II) having an anti-phage activity comprises a ThsA polypeptide comprising a pfam13289 or a pfam14519 domain or a combination thereof, and a ThsB polypeptide comprising a pfam13676 domain or a pfam08937 domain or a pfam08357 domain or a pfam13289 or a pfam14519 or a pfam08357 domain or any combination thereof. In some embodiments, a Thoeris defense system (Defense System II) having an anti-phage activity comprises a ThsA polypeptide comprising a pfam13289 or a pfam14519 domain or a combination thereof, and 1-10 ThsB polypeptides comprising a pfam13676 domain or a pfam08937 domain or a pfam08357 domain or a pfam13289, or a pfam14519 or a pfam08357 domain or any combination thereof. In some embodiments, a Thoeris defense system (Defense System II) having an anti-phage activity comprises a ThsA polypeptide comprising a pfam13289 or a pfam14519 domain or a combination thereof, and 1-5 ThsB polypeptides comprising a pfam13676 domain or a pfam08937 domain or a pfam08357 domain or a pfam13289 or a pfam14519 or a pfam08357 domain or any combination thereof. In some embodiments, a Thoeris defense system (Defense System II) having an anti-phage activity comprises a ThsA polypeptide comprising a pfam13289 or a pfam14519 domain or a combination thereof, and 1, 2, 3, 4, 5, 6, 7, 8, 9, or 10 ThsB polypeptides comprising a pfam13676 domain or a pfam08937 domain or a pfam08357 domain or a pfam13289 or a pfam14519 or a pfam08357 domain or any combination thereof.

[0683] In some embodiments, a Thoeris defense system (Defense System II) comprises at least two different polypeptide components selected from a ThsA polypeptide comprising a pfam13289 or a pfam14519 domain or a combination thereof, and a ThsB polypeptide comprising a pfam13676 domain or a pfam08937 domain or a pfam08357 domain or a pfam13289 or a pfam14519 or a pfam08357 domain or any combination thereof. In some embodiments, a Thoeris defense system (Defense System II) comprises at least two different polypeptide components selected from a ThsA polypeptide comprising a pfam13289 or a pfam14519 domain or a combination thereof, and 1-10 ThsB polypeptides comprising a pfam13676 domain or a pfam08937 domain or a pfam08357 domain or a pfam13289 or a pfam14519 or a pfam08357 domain or a combination thereof. In some embodiments, a Thoeris defense system (Defense System II) having an anti-phage activity comprises at least two different polypeptide components selected from a ThsA polypeptide comprising a pfam13289 or a pfam14519 domain or a combination thereof, and a ThsB polypeptide comprising a pfam13676 domain or a pfam08937 domain or a pfam08357 domain or a pfam13289 or a pfam14519 or a pfam08357 domain or any combination thereof. In some embodiments, a Thoeris defense system (Defense System II) having an anti-phage activity comprises at least two different polypeptide components selected from a ThsA polypeptide comprising a pfam13289 or a pfam14519 domain or a combination thereof, and 1-10 ThsB polypeptides comprising a pfam13676 domain or a pfam08937 domain or a pfam08357 domain or a pfam13289, or a pfam14519 or a pfam08357 domain or any combination thereof. In some embodiments, a Thoeris defense system (Defense System II) having an anti-phage activity comprises at least two different polypeptide components selected from a ThsA polypeptide comprising a pfam13289 or a pfam14519 domain or a combination thereof, and 1-5 ThsB polypeptides comprising a pfam13676 domain or a pfam08937 domain or a pfam08357 domain or a pfam13289 or a pfam14519 or a pfam08357 domain or any combination thereof. In some embodiments, a Thoeris defense system (Defense System II) having an anti-phage activity comprises at least two different polypeptide components selected from a ThsA polypeptide comprising a pfam13289 or a pfam14519 domain or a combination thereof, and 1, 2, 3, 4, 5, 6, 7, 8, 9, or 10 ThsB polypeptides comprising a pfam13676 domain or a pfam08937 domain or a pfam08357 domain or a pfam13289 or a pfam14519 or a pfam08357 domain or any combination thereof.

[0684] In some embodiments, a Defense System II comprises a ThsA polypeptide comprising a pfam13289 domain or a pfam14519 domain or a combination thereof, or comprises an amino acid sequence having at least 80% identity to a sequence selected from the group referenced in Table 9 rows 2-2100 columns I and J; or a ThsB polypeptide comprising a pfam13676 domain or a pfam08937 domain or a pfam08357 domain or a combination thereof, or comprises an amino acid sequence having at least 80% identity to a sequence selected from the group referenced in Table 9 rows 2-2100 columns M and N, Q and R, U and V, Y and Z, and AC and AD, or a combination thereof; or a combination thereof.

[0685] In some embodiments, the amino acid sequences of more than one copy of a Thsb polypeptide present in a Defense System II are identical. In some embodiments, the amino acid sequences of more than one copy of a Thsb polypeptide present in a Defense System II are homologous. In some embodiments, the amino acid sequences of more than one copy of a Thsb polypeptide present in a Defense System II are not identical. In some embodiments, the amino acid sequences of more than one copy of a Thsb polypeptide present in a Defense System II comprise the same functional activity.

[0686] In some embodiments, a Thoeris defense system having an anti-phage activity comprises a nucleic acid construct comprising a nucleic acid sequence encoding a ThsA polypeptide and a ThsB polypeptide. In some embodiments, the Thoeris system having an anti-phage activity comprises a nucleic acid construct comprising a nucleic acid sequence encoding a ThsA polypeptide and encoding 1-10 copies of a ThsB polypeptide. In some embodiments, a Thoeris defense system having an anti-phage activity comprises a nucleic acid construct comprising a nucleic acid sequence comprising a thsA gene and a thsB gene. In some embodiments, a Thoeris defense system having an anti-phage activity comprises a nucleic acid construct comprising a nucleic acid sequence comprising a thsA gene and 1-10 copies of a thsB gene.

[0687] In some embodiments, the Thoeris anti-phage defense system comprises a nucleic acid construct comprising nucleic acid sequences encoding a cassette comprising thsA and thsB genes. In some embodiments, the Thoeris anti-phage defense system comprises a nucleic acid construct comprising nucleic acid sequences encoding a cassette comprising thsA and 1-10 copies of a thsB genes. In some embodiments, the Thoeris anti-phage defense system comprises a nucleic acid construct comprising nucleic acid sequences encoding a cassette comprising thsA and 1, 2, 3, 4, 5, 6, 7, 8, 9, or 10 copies of a thsB genes.

[0688] In some embodiments, a Thoeris (Defense System II) gene cassette comprises the nucleic acid sequence:

(SEQ ID NO: 10; construct 31 Table 4)

| | |
|---|---|
| 1 | atgtttttag aaatttataa ttaatttact aatatattgc gataattaga accatttgaa |
| 61 | ttacagaagt gccaccaacg aggaagcaat caattaaata gtaagtttaa taattttatt |
| 121 | aagaaattga tttgttatac gaaattttat tatatgataa aatatttatg taataaatgt |
| 181 | aaatttgtat attaggtaag gggaatgaaa atgaatccaa tagttgaact atttattaaa |
| 241 | gattttacaa aagaagttat ggaagagaat gctgcaattt ttgcaggagc gggtttatca |
| 301 | atgtctgttg ggtatgttag ttgggcgaag ttattggagc ctattgctca agaaattgga |
| 361 | ttagatgtaa ataaagaaaa tgatttagta agcttggcgc aatattattg taatgagaat |
| 421 | cagggtaata gaggtagaat taatcaaatt atcctagatg aattttctcg aaaagtagat |
| 481 | ttaactgaaa atcacaaaat tttagctcga ttaccaattc atacttattg gacgacaaat |
| 541 | tatgataggt taattgaaaa ggcattagaa gaagaaaata agattgctga tgtaaagtat |
| 601 | acggtaaaac aattagctac tacaaaggta aaaagagatg cagttgtata taaaatgcat |
| 661 | ggagacgtgg aacatccctc tgaggcagtt ttgattaaag atgattatga aaagtattct |
| 721 | ataaaaatgg atccgtatat taaggcgttg agtggggatc tagtttctaa gacattttta |
| 781 | tttgttggat ttagttttac tgatcccaat ctagattata tattaagtcg agtaaggagt |
| 841 | gcttatgaaa gggatcaaag aagacactat tgtttaataa aaaaagaaga gcgaagacca |
| 901 | gatgaattag aggcggattt tgagtataga gtaagaaaac aggaattatt tattagtgat |
| 961 | ttatcacgtt ttaatataaa gactattgta cttaataatt acaatgagat taccgagata |
| 1021 | ttacaacgaa ttgaaaataa tataaaaact aaaacagtat ttttatctgg tagtgcggtt |
| 1081 | gaatataatc attgggagac agaacatgct gaacaattca ttcatcagtt aagtaaagaa |
| 1141 | ttaattagaa aggattttaa tatagtatct ggttttggac ttggtgtagg gagttttgtt |
| 1201 | atcaatggag ttctagaaga attgtatatg aaccagggaa ctatagatga tgatagactt |
| 1261 | attctaagac cgtttccaca ggggaaaaag ggcgaagagc aatgggataa atatagacga |
| 1321 | gatatgatta caagaactgg ggtaagcatc tttttatatg gaaataaaat agacaaggga |
| 1381 | caggttgtta aggctaaggg tgtccaatct gaatttaata tttcttttga acaaaataat |
| 1441 | tacgttgttc cggtaggtgc aactggttat attgcaaaag atttatggaa taaagtaaat |
| 1501 | gaggaatttg aaacgtatta cccaggtgct gatgcaagga tgaaaaaatt gttcggagaa |
| 1561 | ttgaataatg aagcattatc aatagaggaa ctgattaaca ctataataga gtttgtagaa |
| 1621 | atcctatcca actaatcatt actgattatt aatcagagag gaactgttaa attatggcga |
| 1681 | aaagagtttt ttttagtttc cattatcaag atgtaattga ttttagagta aatgttgtaa |
| 1741 | gaaatcattg ggtaacaaaa ttaaatcaaa gtgctgcggg ggtctttgat gcatctcttt |
| 1801 | gggaagatgc aaaaaaaaca agtgatatag cacttaaaag attaataaat ggcgggctaa |
| 1861 | acaatacctc agttacatgt gttttaattg gatctcagac ttttaataga agatgggtga |
| 1921 | gatatgaaat tatgaaaagt atagaaaaag gaaataagat aataggaatt catattaatg |
| 1981 | cttttaaaga taaatatgga aatattaaaa gtaaagggcc taatcctttc gattatttag |
| 2041 | ggtatcaata tagttcagac ggcaaacagt tacatttgta tgagtggaca gggggaaaat |
| 2101 | gggaggaata taaggatttg gcaccatata gggtgaatca aattgctcca gaatcactta |
| 2161 | gaggaaaatt ctatagtttg tcatcggttt atcgtgtgta tgattgggtt gctgatgatg |
| 2221 | gatataacaa attttcctct tgggtgaact aattaagttt tggataaaat tataaataga |
| 2281 | attgctattg ggattagata caaaatgatt aaataagaaa agtacctata aaagtaggtg |
| 2341 | cttttttctt tgttatatag aaattacaca ttaatttata tttaggttat tttaaaaaga |
| 2401 | aaaagtgatg aatgatggta ttcttacaat taatagttac ttataactat atgtacatga |
| 2461 | aaaacatcta tatatgc. |

[0689] The coding regions for each of the thsA and thsB gene sequences within this embodiment of a Thoeris cassette (SEQ ID NO: 10) are as follows: nucleotides 205-1635 encode a ThsA polypeptide; and nucleotides 1674-2252 encode a ThsB polypeptide.

[0690] In some embodiments, a Defense System II comprising a ThsA polypeptide and a ThsB polypeptide is encoded by the nucleic acid sequence set forth in SEQ ID NO: 10. In some embodiments, a Defense System II comprising a ThsA polypeptide and a ThsB polypeptide, is encoded by a nucleic acid sequence having at least 80% homology to the sequence set forth in SEQ ID NO: 10. In some embodiments, a Defense System II comprising a ThsA polypeptide and a ThsB polypeptide, is encoded by a nucleic acid sequence having at least 85% homology, or 90% homology, or 95% homology, or 97% homology, or 98% homology, or 99% homology to the sequence set forth in SEQ ID NO: 10. In some embodiments, a Defense System II comprising a ThsA polypeptide and a ThsB polypeptide, is encoded by a nucleic acid sequence having at least 80% identity to the sequence set forth in SEQ ID NO: 10. In some embodiments, a Defense System II comprising a ThsA polypeptide and a ThsB polypeptide, is encoded by a nucleic acid sequence having at least 85% identity, or 90% identity, or 95% identity, or 97% identity, or 98% identity, or 99% identity to the sequence set forth in SEQ ID NO: 10.

[0691] In some embodiments, a Thoeris (Defense System II) gene cassette comprises the nucleic acid sequence:

(SEQ ID NO: 11; construct 32 Table 4)

| | |
|---|---|
| 1 | gttaagcttt aggcggacat cagcaacgat gtccgctttt atcatcttaa cagcaataca |
| 61 | aggaggttta cgtggcggat gaaactctga aacagtatat gggcctgtac aaatgttgtt |
| 121 | agcaatctca agaaagccca ggagtagata tgattcactg aacagatgtt caatttaaat |
| 181 | ctaataatga agagggccta gtcaaaggcg ctcttcatta ttagataaga cataatcatt |
| 241 | acacaagatt tatgtcatgg ttctatattc atattttcat tgtaataaat tgaaaatatg |
| 301 | aatataatag gtagtgatcg caatactaac attggaggtt ttatgtggaa gtttaaagaa |
| 361 | ttaataagag ataagacatt tagaaggtgg gctctgagta taattctgac tattccaact |
| 421 | agtgtgagta cattcatttc atttctagac ttggatgctc gttgtagatt aattatttta |
| 481 | cttatattag tagggttgtc gctagtcata ataattgttc aattcattag actacttttt |
| 541 | atgaataata tcactcttaa tctcaatggt tccgaagttg aaattaaaaa aggtgatatt |
| 601 | tttgaagtgc caagaaataa ttataaagtc attgcattta atgagtattt tgacactcaa |
| 661 | gtagatgacg taataatcgc ccgcgaaaca ttaaatggtc aatatataaa gcgttattat |
| 721 | tcacatcaag atatcactga gttggatcag aaaattaaag atgacgtaaa acttaaaatt |
| 781 | gaagaaaaaa atgttgaaag accttttgga ggaaaaacaa cacgttacag cttgggatca |
| 841 | gtctttaaag atatggattt ttttctagtt gctttttcga agtttgatag ggaaaatcgt |
| 901 | gcccaattaa aactaaatga atatgcaagc tgcatgctta atgtatggaa tgaaatcaat |
| 961 | acattacatg caagcaaaga agtgtttatc cccttattag gttctggaat aacaagacat |
| 1021 | gtggattctg atgttggagt caatgaacta ttacatataa tgttgtggac atttcagatc |
| 1081 | agtaaagtaa agtttagaga accagccaaa gttacaattc ttttgtacaa aaatgatcac |
| 1141 | aagaagatca atttttataa gttaaaggag tttgagaaga atgggttata ggaatggaaa |
| 1201 | ttatgctgct ttctatgtca gtgaaccgtt tagtgaaagt agtttagggg ctaatgcaac |
| 1261 | caaggatttt gtgtcgtata acatgttaag agcatggaaa ggaaaagata ataactaccc |
| 1321 | atttaatgac tcccacgata aaacatacaa tgtacgggac ggtagtgatt gggagaaaac |
| 1381 | attaaagcca agattaagaa aaagattaga tcaatcaaaa aatataatct tttttttaag |
| 1441 | taagcatact gaaaacagca aagctttgcg agaagaaatt gattacggta ttaatgtgaa |
| 1501 | ggggctacca gttatcgttg tataccctga actttccgaa aagagtgaca tcatcgactg |
| 1561 | cactacaaag gttttcagat cagaagtggt gaatttatgg agtcgagtcc ctgtttttaa |
| 1621 | agactctatg ctaaaggtac caactattca tattccttat aaaaaagacc aaattaaaaa |
| 1681 | agctttagag aacaaagatt ttatgattaa ttcaaagatt tctgcaggtt cggtttattt |
| 1741 | ttatccatgt taatctatta tgggtgaata taatttaaag agaaagaata gattttcagt |
| 1801 | ttcgtcctca tggtagctca ttaattcaaa aacctctatg accaatttaa tttattgagg |
| 1861 | aggtagaggt tttggtatta aaatgatgaa gatagattat tggatatgaa tttcatttta |
| 1921 | tctagtttac ataatatata ttctaggaag ttaaatcttt aatgaaaatt ctgtctcgtt |
| 1981 | atcttaagtg tacttagttg gtgagacaga attaaaaaaa taggatgtat tacgatttgt |
| 2041 | atttatttct. |

[0692] The coding regions for each of the thsA and thsB gene sequences within this embodiment of a Thoeris cassette (SEQ ID NO: 11) are as follows: nucleotides 298-1191 encode a ThsA polypeptide; and nucleotides 1181-1753 encode a ThsB polypeptide.

[0693] In some embodiments, a Defense System II comprising a ThsA polypeptide and a ThsB polypeptide is encoded by the nucleic acid sequence set forth in SEQ ID NO: 11. In some embodiments, a Defense System II comprising a ThsA polypeptide and a ThsB polypeptide, is encoded by a nucleic acid sequence having at least 80% homology to the sequence set forth in SEQ ID NO: 11. In some embodiments, a Defense System II comprising a ThsA polypeptide and a ThsB polypeptide, is encoded by a nucleic acid sequence having at least 85% homology, or 90% homology, or 95% homology, or 97% homology, or 98% homology, or 99% homology to the sequence set forth in SEQ ID NO: 11. In some embodiments, a Defense System II comprising a ThsA polypeptide and a ThsB polypeptide, is encoded by a nucleic acid sequence having at least 80% identity to the sequence set forth in SEQ ID NO: 11. In some embodiments, a Defense System II comprising a ThsA polypeptide and a ThsB polypeptide, is encoded by a nucleic acid sequence having at least 85% identity, or 90% identity, or 95% identity, or 97% identity, or 98% identity, or 99% identity to the sequence set forth in SEQ ID NO: 11.

[0694] In some embodiments, a construct comprising the Thoeris defense system encodes one component of the defense system, whereby multiple constructs may be used to assemble the functional defense system. In some embodiments, the components of a Thoeris defense system comprise genes thsA and thsB. In some embodiments, multiple thsB genes are present in the gene cassette of the defense system locus. In some embodiments, the components of a Thoeris defense system consist of genes thsA and thsB, wherein the copy number of the thsB gene is between 1 and 10. In some embodiments, the components of a Thoeris defense system comprise nucleic acid sequences encoding a ThsA polypeptide and a ThsB polypeptide. In some embodiments, the components of a Thoeris defense system consist of nucleic acid sequences encoding a ThsA polypeptide and a ThsB polypeptide. In some embodiments, the components of a Thoeris defense system consist of nucleic acid sequences encoding a ThsA polypeptide and 1-10 copies of a ThsB polypeptide. In some embodiments, the components of a Thoeris defense system consist of nucleic acid sequences encoding a ThsA polypeptide and 1, 2, 3, 4, 5, 6, 7, 8, 9, or 10 copies of a ThsB polypeptide.

[0695] In some embodiments, a construct comprising the Thoeris defense system encodes one component of the defense system, whereby a second construct may be used to assemble the functional defense system. In some embodiments, a construct comprising the Thoeris defense system encodes one component of the defense system, whereby additional constructs may be used to assemble the functional defense system. For example, in some embodiments each of ThsA and ThsB may be encoded by nucleic acid sequences comprised in different constructs, wherein expression of the combination of constructs produces a functional Thoeris defense system.

[0696] In some embodiments, the components making up a functional Thoeris anti-phage defense system comprise a ThsA polypeptide and a ThsB polypeptide, each encoded by a thsA and a thsB gene, respectively.

[0697] In some embodiments, a Thoeris defense system having an anti-phage activity comprise a nucleic acid encoding a ThsA polypeptide. In some embodiments, a Thoeris defense system having an anti-phage activity comprise a nucleic acid encoding a ThsA polypeptide and a ThsB polypeptide.

[0698] In some embodiments, a Thoeris defense system having an anti-phage activity comprise a nucleic acid comprising a thsA gene. In some embodiments, a Thoeris defense system having an anti-phage activity comprise a nucleic acid comprising a thsA gene and a thsB gene. In some embodiments, a Thoeris defense system having an anti-phage activity comprise a nucleic acid comprising a thsA gene and 1-10 thsB genes.

[0699] In some embodiments, a Thoeris defense system having an anti-phage activity comprises a nucleic acid construct comprising nucleic acids encoding polypeptides in a set order. In one embodiment, the 5′ to 3′ order of polypeptides encoded is ThsA and ThsB. In some embodiments the 5′ to 3′ order of polypeptides does not affect the anti-phage activity. In some embodiments the 5′ to 3′ order of polypeptides does affect the anti-phage activity.

[0700] In some embodiments, the 5′ to 3′ order of polypeptides is random, for example any order of ThsA and ThsB. In some embodiments, the 5′ to 3′ order of polypeptides is random, for example any order of ThsA and 1-10 copies of ThsB, wherein ThsB may be encoded both 5′ and 3′ of the gene encoding the ThsA.

[0701] In some embodiments, a Thoeris defense system having an anti-phage activity comprises a nucleic acid construct comprising genes in a set order. In some embodiment, the 5′ to 3′ order of genes is thsA and thsB. In some embodiment, the 5′ to 3′ order of genes in a Thoeris defense system is not thsA and thsB. In some embodiments the 5′ to 3′ order of genes does not affect the anti-phage activity. In some embodiments the 5′ to 3′ order of genes does affect the anti-phage activity.

[0702] In some embodiments, the 5′ to 3′ order of genes is random, for example any order of thsA and thsB. In some embodiments, the 5′ to 3′ order of polypeptides is random, for example any order of thsA and 1-10 copies of thsB, wherein thsB may be both 5′ and 3′ of thsA.

[0703] In some embodiments, the Thoeris system (a Defense System II) composition and order is as shown in FIG. 3B or FIG. 5A.

[0704] In some embodiments, a Thoeris defense system having an anti-phage activity originates from a microbial genome (Table 9). A skilled artisan would appreciate that the Thoeris system is not present in the majority of bacteria and or archaea species.

[0705] In some embodiments, a functional Thoeris defense system comprises a construct comprising nucleic acid sequences encoding polypeptides, wherein the nucleic acid sequence encoding each polypeptide may originate from a different microbial species. For example, the source of the nucleic acid sequence encoding a ThsA polypeptide may be one microbial species, while the source of the nucleic acid sequence encoding a ThsB polypeptide may be a different microbial species. In some embodiments, a functional Thoeris defense system (Defense system II) comprises a non-naturally occurring combination of polypeptide components. In some embodiments, a functional Thoeris defense system (Defense system II) comprises a combination of at least two polypeptides that do not naturally occur together. In some embodiments, a functional Thoeris defense system (Defense system II) comprises a combination of at least three polypeptides that do not naturally occur together.

[0706] In some embodiments, a functional Thoeris defense system comprises a construct comprising nucleic acid sequences encoding polypeptides, wherein the nucleic acid sequence encoding each polypeptide may originate from a different bacterial species. For example, the source of the nucleic acid sequence encoding a ThsA polypeptide may be one bacterial species, while the source of the nucleic acid sequence encoding a ThsB polypeptide may be a different bacterial species.

[0707] In some embodiments, the source of the nucleic acid encoding a ThsA polypeptide and a ThsB polypeptide is the same. In some embodiments, the source of the nucleic acid encoding a ThsA polypeptide and a ThsB polypeptide is the not the same. A skilled artisan would appreciate that the term “ThsB polypeptide” may in some embodiments, be used interchangeably with “ThsBⁱ polypeptide”, “ThsBⁱⁱ polypeptide”, “ThsBⁱⁱⁱ polypeptide”, “ThsB^{iv} polypeptide”, and “ThsB^{v} polypeptide”, wherein the supra numbers I, ii, iii, iv, and v, indicate additional copies of a ThsB polypeptide comprised in embodiments of a Defense System II. Similarly, skilled artisan would appreciate that the term “thsB gene” may in some embodiments, be used interchangeably with “thsBⁱ gene”, “thsBⁱⁱ gene”, “thsBⁱⁱⁱ gene”, “thsB^{iv} gene”, and “thsB^{v} gene”, wherein the supra numbers i, ii, iii, iv, and v, indicate additional copies of a thsB gene encoding ThsB polypeptides comprised in embodiments of a Defense System II.

[0708] In some embodiments, the source of the nucleic acid sequence of any of the components of a Thoeris defense system comprises any of the species listed in Table 9.

[0709] In some embodiments, a Thoeris defense system having an anti-phage activity comprises a nucleic acid construct comprising non-coding regions between the nucleic acid sequences encoding the polypeptides. In some embodiments, the non-coding regions between the nucleic acid sequences comprises nucleic acid sequence not naturally occurring in the microbial species of origin. In some embodiments, the non-coding regions between the nucleic acid sequences comprises nucleic acid sequence is the naturally occurring in the microbial species of origin.

[0710] In some embodiments, a Thoeris system disclosed herein comprises a multi-gene phage resistance system broadly distributed in microbial genomes, for example but not limited to Proteobacteria, Firmicutes, Bacteriodetes, and Actinobacteria.

[0711] According to some embodiments, the Thoeris system components are located in a gene cluster (a cassette of genes) in a microbial cell genome. According to some embodiments, the Thoeris system components are located in close proximity (e.g. positioned within 20 genes, 10 genes, 5 genes or less one from the other) in a genome of a prokaryotic cell. According to some embodiments the prokaryotic cell expresses an endogenous Thoeris defense system. According to some embodiments, the prokaryotic cell expresses an endogenous functional Thoeris defense system. According to some embodiments, the species of prokaryotic cell is selected from the group consisting of the species listed in Table 9. According to some embodiments a prokaryotic cell expresses a non-endogenous Thoeris defense system. According to some embodiments, a prokaryotic cell expresses a non-endogenous functional Thoeris defense system. According to some embodiments, the species of prokaryotic cell expressing a non-endogenous functional Thoeris defense system is selected from the group consisting of the species listed in Table 9.

[0712] In some embodiments, Thoeris defense system components comprise ThsA and ThsB polypeptides. In some embodiments, a Thoeris defense system components comprise functional portions of ThsA and ThsB polypeptides. In some embodiments, the Thoeris defense system components are encoded by thsA and thsB genes.

[0713] Non-limiting embodiments of endogenous Thoeris systems and the respective location of their components are provided in Table 9 herein.

[0714] In some embodiments, the components of a Thoeris system may be identified by the presence of similar domains present within each component. In some embodiments, domains comprise pfam domains and or clusters of orthologous groups (COG) domains.

[0715] In some embodiments, a Defense System II comprises a membrane associated complex.

[0716] In some embodiments, the term “ThsA” refers to the polynucleotide or expression product e.g., the polypeptide encoded by the thsA gene. In some embodiments, the term “ThsA” refers to a ThsA polypeptide. In some embodiments, the thsA gene encodes a polypeptide comprising a pfam13289 domain. In some embodiments, the thsA gene encodes a polypeptide comprising a pfam14519 domain. In some embodiments, the thsA gene encodes a polypeptide comprising a pfam13289 domain and a pfam14519 domain. In some embodiments, the ThsA polypeptide comprises a pfam13289 domain. In some embodiments, the ThsA polypeptide comprises a pfam14519 domain. In some embodiments, the ThsA polypeptide comprises a pfam13289 domain and a pfam14519 domain.

[0717] In some embodiments, the thsA gene encodes a polypeptide comprising a Sir2/Macro domain (NAD binding). In some embodiments, the thsA gene encodes a polypeptide comprising N-terminal transmembrane helices. In some embodiments, the thsA gene encodes a polypeptide comprising a Sir1/Macro domain (NAD binding) and N-terminal transmembrane helices.

[0718] In some embodiments, the ThsA polypeptide comprises a Sir2/Macro domain (NAD binding). In some embodiments, the ThsA polypeptide comprises N-terminal transmembrane helices. In some embodiments, the ThsA polypeptide comprises a Sir1/Macro domain (NAD binding) and N-terminal transmembrane helices.

[0719] In some embodiments, ThsA polypeptide is encoded by a gene positioned within 5-60 genes of a gene encoding a ThsB polypeptide in a genome of a prokaryotic cell. In some embodiments, ThsA polypeptide is encoded by a gene positioned within 5 genes upstream (5′) or downstream (3′) to a gene encoding a ThsB polypeptide in a genome of a prokaryotic cell. In some embodiments, ThsA polypeptide is encoded by a gene positioned within 5 genes upstream (5′) and downstream (3′) to a gene encoding a ThsB polypeptide in a genome of a prokaryotic cell.

[0720] In some embodiments, ThsA and ThsB are encoded by genes positioned sequentially 5′ to 3′ in a genome of a prokaryotic cell. In some embodiments, ThsA and ThsB are encoded by genes positioned contiguously 5′ to 3′ in a genome of a prokaryotic cell. In some embodiments, nucleic acid encoding additional copies of ThsB is positions 3′ of the nucleic acid sequence first encoding a ThsB polypeptide.

[0721] In some embodiments, thsA and thsB genes are positioned sequentially 5′ to 3′ in a genome of a prokaryotic cell. In some embodiments, thsA and thsB, genes are positioned contiguously 5′ to 3′ in a genome of a prokaryotic cell. In some embodiments, additional thsB genes are positions 3′ of the first thsB gene, e.g., the order of a gene cassette with 2 copies of a thsB gene would be thsA, thsB, thsB.

[0722] In some embodiments, a ThsA polypeptide is about 477 amino acids long (median gene size).

[0723] In some embodiments, the ThsA polypeptide comprises the amino acid sequence having at least 80% homology to a sequence selected from the group consisting of the polypeptides referenced in Table 9, rows 2-2100 columns I and J. In some embodiments, the ThsA polypeptide comprises the amino acid sequence having at least 80% homology within similar domain regions within a sequence selected from the group consisting of the polypeptides referenced in Table 9, rows 2-2100 columns I and J. In some embodiments, the ThsA polypeptide comprises a homolog of a polypeptide having the amino acid sequences set forth in the polypeptides referenced in Table 9, rows 2-2100 columns I and J. In some embodiments, a homolog of a ThsA polypeptide comprises a Sir2/Macro domain (NAD binding). In some embodiments, a homolog of ThsA polypeptide comprises N-terminal transmembrane helices. In some embodiments, a homolog of a ThsA polypeptide comprises a Sir1/Macro domain (NAD binding) and N-terminal transmembrane helices.

[0724] In some embodiments, the ThsA polypeptide comprises the amino acid sequence having at least 80% identity to a sequence selected from the group consisting of the polypeptides referenced in Table 9, rows 2-2100 columns I and J. In some embodiments, the ThsA polypeptide comprises the amino acid sequence having at least 80% identity within similar domain regions within a sequence selected from the group consisting of the polypeptides referenced in Table 9, rows 2-2100 columns I and J. In some embodiments, the ThsA polypeptide comprises an amino acid sequence having at least 80%, at least 85%, at least 90%, or at least 95% homology to a sequence selected from the group consisting of the polypeptides referenced in Table 9, rows 2-2100 columns I and J. In some embodiments, the ThsA polypeptide comprises the amino acid sequence having at least 80%, 85%, 90%, 95% homology within similar domain regions within a sequence selected from the group consisting of the polypeptides referenced in Table 9, rows 2-2100 columns I and J. In some embodiments, the ThsA polypeptide comprises an amino acid sequence having at least 80%, at least 85%, at least 90%, or at least 95% identity to a sequence selected from the group consisting of the polypeptides referenced in Table 9, rows 2-2100 columns I and J. In some embodiments, the ThsA polypeptide comprises the amino acid sequence having at least 80%, 85%, 90%, 95% identity within similar domain regions within a sequence selected from the group consisting of the polypeptides referenced in Table 9, rows 2-2100 columns I and J. In some embodiments, the ThsA polypeptide comprises an amino acid sequence selected from the group consisting of the polypeptides referenced in Table 9, rows 2-2100 columns I and J.

[0725] In some embodiments, the ThsA polypeptide comprises an amino acid sequence encoded by a nucleic acid sequence having at least 80%, at least 85%, at least 90%, or at least 95% homology to a sequence selected from the group consisting of the polynucleotides referenced in Table 9, rows 2-2100 columns I and K. In some embodiments, the ThsA polypeptide comprises the amino acid sequence encoded from a nucleic acid sequence having at least 80%, 85%, 90%, 95% homology within similar domain regions within a sequence selected from the group consisting of the polynucleotides referenced in Table 9, rows 2-2100 columns I and K. In some embodiments, the ThsA polypeptide comprises an amino acid sequence encoded by a nucleic acid sequence having at least 80%, at least 85%, at least 90%, or at least 95% identity to a sequence selected from the group consisting of the polynucleotides referenced in Table 9, rows 2-2100 columns I and K. In some embodiments, the ThsA polypeptide comprises the amino acid sequence encoded from a nucleic acid sequence having at least 80%, 85%, 90%, 95% identity within similar domain regions within a sequence selected from the group consisting of the polynucleotides referenced in Table 9, rows 2-2100 columns I and K. In some embodiments, the ThsA polypeptide comprises an amino acid sequence encoded from a nucleic acid sequence selected from the group consisting of the polynucleotides referenced in Table 9, rows 2-2100 columns I and K.

[0726] In some embodiments, the nucleic acid sequence of a thsA gene comprises a nucleic acid sequence having at least 80%, at least 85%, at least 90%, or at least 95% homology to a sequence selected from the group consisting of the polynucleotides referenced in Table 9, rows 2-2100 columns I and K. In some embodiments, the nucleic acid sequence of a thsA gene comprises a nucleic acid sequence having at least 80%, at least 85%, at least 90%, or at least 95% identity to a sequence selected from the group consisting of the polynucleotides referenced in Table 9, rows 2-2100 columns I and K. In some embodiments, the nucleic acid sequence of a thsA gene comprises a nucleic acid sequence having at least 80%, at least 85%, at least 90%, or at least 95% homology within the nucleotide sequences encoding similar domain sequences with a sequence selected from the group consisting of the polynucleotides referenced in Table 9, rows 2-2100 columns I and K. In some embodiments, the nucleic acid sequence of a thsA gene comprises a nucleic acid sequence having at least 80%, at least 85%, at least 90%, or at least 95% identity within nucleotide sequences encoding similar domain regions with a sequence selected from the group consisting of the polynucleotides referenced in Table 9, rows 2-2100 columns I and K. In some embodiments, the nucleic acid sequence of a thsA gene comprises a nucleic acid sequence selected from the group consisting of the polynucleotides referenced in Table 9, rows 2-2100 columns I and K.

[0727] As used herein, the term “ThsB” refers to the polynucleotide or expression product e.g., polypeptide encoded by the thsB gene. In some embodiments, the term “ThsB” refers to a ThsB polypeptide. In some embodiments, the product of the thsB gene comprises a pfam08937 domain or a pfam08357 domain. In some embodiments, the thsB gene encodes a Toll/interleukin-1 receptor (TIR) domain.

[0728] In some embodiments, ThsB polypeptide is encoded by a gene positioned within 5-60 genes of a gene encoding a ThsA polypeptide in a genome of a prokaryotic cell. In some embodiments, ThsB polypeptide is encoded by a gene positioned within 5 genes upstream (5′) or downstream (3′) to a gene encoding a ThsA polypeptide in a genome of a prokaryotic cell. In some embodiments, ThsB polypeptide is encoded by a gene positioned within 5 genes upstream (5′) and downstream (3′) to a gene encoding a ThsA polypeptide in a genome of a prokaryotic cell.

[0729] In some embodiments, ThsA and ThsB are encoded by genes positioned sequentially 5′ to 3′ in a genome of a prokaryotic cell. In some embodiments ThsA and ThsB are encoded by genes positioned contiguously 5′ to 3′ in a genome of a prokaryotic cell. In some embodiments, additional ThsB polypeptides are encoded by genes positioned 3′ of the first gene encoding ThsB. In some embodiments ThsA and ThsB (1-10 copies) are encoded by genes positioned contiguously 5′ to 3′ in a genome of a prokaryotic cell.

[0730] In some embodiments, a ThsB polypeptide is about 195 amino acids long (median gene size).

[0731] In some embodiments, the ThsB polypeptide comprises an amino acid sequence having at least 80% homology to a sequence selected from the group consisting of the polypeptides referenced in Table 9, rows 2-2100 columns M and N, Q and R, U and V, Y and Z, and AC and AD. In some embodiments, the ThsB polypeptide comprises the amino acid sequence having at least 80%, 85%, 90%, 95% homology within similar domain regions within a sequence selected from the group consisting of the polypeptides referenced in Table 9, rows 2-2100 columns M and N, Q and R, U and V, Y and Z, and AC and AD. In some embodiments, a homologue of the ThsB polypeptide comprises a TIR domain. In some embodiments, the ThsB polypeptide comprises an amino acid sequence having at least 80% identity to a sequence selected from the group consisting of the polypeptides referenced in Table 9, rows 2-2100 columns M and N, Q and R, U and V, Y and Z, and AC and AD.

[0732] In some embodiments, the ThsB polypeptide comprises an amino acid sequence having at least 80%, at least 85%, at least 90%, or at least 95% homology to a sequence selected from the group consisting of the polypeptides referenced in Table 9, rows 2-2100 columns M and N, Q and R, U and V, Y and Z, and AC and AD. In some embodiments, the ThsB polypeptide comprises the amino acid sequence having at least 80%, 85%, 90%, 95% homology within similar domain regions within a sequence selected from the group consisting of the polypeptides referenced in Table 9, rows 2-2100 columns M and N, Q and R, U and V, Y and Z, and AC and AD. In some embodiments, the ThsB polypeptide comprises an amino acid sequence having at least 80%, at least 85%, at least 90%, or at least 95% identity to a sequence selected from the group consisting of the polypeptides referenced in Table 9, rows 2-2100 columns M and N, Q and R, U and V, Y and Z, and AC and AD. In some embodiments, the ThsB polypeptide comprises the amino acid sequence having at least 80%, 85%, 90%, 95% identity within similar domain regions within a sequence selected from the group consisting of the polypeptides referenced in Table 9, rows 2-2100 columns M and N, Q and R, U and V, Y and Z, and AC and AD. In some embodiments, the ThsB polypeptide comprises an amino acid sequence selected from the group consisting of the polypeptides referenced in Table 9, rows 2-2100 columns M and N, Q and R, U and V, Y and Z, and AC and AD.

[0733] In some embodiments, the ThsB polypeptide comprises an amino acid sequence encoded from a nucleic acid sequence having at least 80%, at least 85%, at least 90%, or at least 95% homology to a sequence selected from the group consisting of the polynucleotides referenced in Table 9, rows 2-2100 columns M and O, Q and S, U and W, Y and AA, and AC and AE. In some embodiments, the ThsB polypeptide comprises the amino acid sequence encoded by a nucleic acid sequence having at least 80%, 85%, 90%, 95% homology within similar domain regions within a sequence selected from the group consisting of the polynucleotides referenced in Table 9, rows 2-2100 columns M and O, Q and S, U and W, Y and AA, and AC and AE. In some embodiments, the ThsB polypeptide comprises an amino acid sequence encoded from a nucleic acid sequence having at least 80%, at least 85%, at least 90%, or at least 95% identity to a sequence selected from the group consisting of the polynucleotides referenced in Table 9, rows 2-2100 columns M and O, Q and S, U and W, Y and AA, and AC and AE. In some embodiments, the ThsB polypeptide comprises the amino acid sequence encoded by a nucleic acid sequence having at least 80%, 85%, 90%, 95% identity within similar domain regions within a sequence selected from the group consisting of the polynucleotides referenced in Table 9, rows 2-2100 columns M and O, Q and S, U and W, Y and AA, and AC and AE. In some embodiments, the ThsB polypeptide comprises an amino acid sequence encoded from a nucleic acid sequence selected from the group consisting of the polynucleotides referenced in Table 9, rows 2-2100 columns M and O, Q and S, U and W, Y and AA, and AC and AE.

[0734] In some embodiments, the nucleic acid sequence of a thsB gene comprises a nucleic acid sequence having at least 80%, at least 85%, at least 90%, or at least 95% homology to a sequence selected from the group consisting of the polynucleotides referenced in Table 9, rows 2-2100 columns M and O, Q and S, U and W, Y and AA, and AC and AE. In some embodiments, the nucleic acid sequence of a thsB gene comprises a nucleic acid sequence having at least 80%, at least 85%, at least 90%, or at least 95% identity to a sequence selected from the group consisting of the polynucleotides referenced in Table 9, rows 2-2100 columns M and O, Q and S, U and W, Y and AA, and AC and AE. In some embodiments, the nucleic acid sequence of a thsB gene comprises a nucleic acid sequence having at least 80%, at least 85%, at least 90%, or at least 95% homology within the nucleotide sequences encoding similar domain sequences with a sequence selected from the group consisting of the polynucleotides referenced in Table 9, rows 2-2100 columns M and O, Q and S, U and W, Y and AA, and AC and AE. In some embodiments, the nucleic acid sequence of a thsB gene comprises a nucleic acid sequence having at least 80%, at least 85%, at least 90%, or at least 95% identity within nucleotide sequences encoding similar domain regions with a sequence selected from the group consisting of the polynucleotides referenced in Table 9, rows 2-2100 columns M and O, Q and S, U and W, Y and AA, and AC and AE. In some embodiments, the thsB gene homolog encodes a polypeptide comprising a helicase activity. In some embodiments, the thsB gene homolog encodes a polypeptide comprising a DEAx box helicase activity. In some embodiments, the nucleic acid sequence of a thsB gene comprises a nucleic acid sequence selected from the group consisting of the polynucleotides referenced in Table 9, rows 2-2100 columns M and O, Q and S, U and W, Y and AA, and AC and AE.

[0735] A skilled artisan would appreciate that a “functional portion of a Defense System II component” or “functional fragment of Defense System II component” or “functional portion of a Thoeris defense system component” or “functional fragment of Thoeris defense system component” refers to a functional portion of a Thoeris polynucleotide or polypeptide, as disclosed herein, which expression is sufficient to elicit an anti-phage activity alone or in combination with the at least one of the other Thoeris polynucleotides or polypeptides disclosed herein or functional portions thereof.

[0736] The terms “ThsA”, “ThsB”, “thsA”, and “thsB”, also refer to functional ThsA, ThsB, thsA, and thsB, homologs, which exhibit the desired activity (i.e., conferring phage resistance). Such homologs can be, for example, at least 80%, at least 81%, at least 82%, at least 83%, at least 84%, at least 85%, at least 86%, at least 87%, at least 88%, at least 89%, at least 90%, at least 91%, at least 92%, at least 93%, at least 94%, at least 95%, at least 96%, at least 97%, at least 98%, at least 99% or 100% identical or homologous to the polypeptide sequences referenced in Table 9, rows 2-2100 columns I and J, M and N, Q and R, U and V, Y and Z, and SAC and AD, respectively, or 80%, at least 81%, at least 82%, at least 83%, at least 84%, at least 85%, at least 86%, at least 87%, at least 88%, at least 89%, at least 90%, at least 91%, at least 92%, at least 93%, at least 94%, at least 95%, at least 96%, at least 97%, at least 98%, at least 99% or 100% identical to the polynucleotide sequences referenced in Table 9, rows 2-2100 columns I and K, M and O, Q and S, U and W, Y and AA, and SAC and AE, respectively. In some embodiments, such homologs comprise at least 80%, at least 81%, at least 82%, at least 83%, at least 84%, at least 85%, at least 86%, at least 87%, at least 88%, at least 89%, at least 90%, at least 91%, at least 92%, at least 93%, at least 94%, at least 95%, at least 96%, at least 97%, at least 98%, at least 99% or 100% homology within similar domain regions of the polypeptide sequences referenced in Table 9, rows 2-2100 columns I and J, M and N, Q and R, U and V, Y and Z, and AC and AD, respectively, or 80%, at least 81%, at least 82%, at least 83%, at least 84%, at least 85%, at least 86%, at least 87%, at least 88%, at least 89%, at least 90%, at least 91%, at least 92%, at least 93%, at least 94%, at least 95%, at least 96%, at least 97%, at least 98%, at least 99% or 100% identity within nucleotide sequences encoding similar domain regions to the polynucleotide sequences referenced in Table 9, rows 2-2100 columns I and K, M and O, Q and S, U and W, Y and AA, and AC and AE, respectively.

[0737] Table 9 presents embodiments of components of Defense System II that may be found in a diverse array of bacteria and archaea genomes (referenced in Table 18). Table 9 presents embodiments of nucleic acid sequences encoding gene cassettes of Defense System II (referenced in Table 18).

[0738] The Druantia Defense System

[0739] In some embodiments, a defense system disclosed herein comprises an Druantia anti-phage defense system. (Table 10) In some embodiments, a Druantia defense system provides a host cell with resistance to entry of foreign nucleic acid invasion. In some embodiments, a host cell expressing a functional Druantia defense system (Defense System IIIa; Defense System IIIb; or Defense System IIIc) provides the host cell resistance foreign nucleic acid invasion.

[0740] In some embodiments, a Druantia defense system provides a host cell with resistance to at least one phage.

[0741] In some embodiments, a Druantia defense system provides a host cell with resistance to phage infection. In some embodiments, expression of a Druantia defense system in bacteria protects the bacteria from phage infection.

[0742] As used herein, the term “a Druantia anti-phage defense system” may be used interchangeably with the term “a Defense System III”, having all the same meanings and qualities. A skilled artisan would appreciate that the term “Druantia system” may be used interchangeably in some embodiments with “Druantia defense system”, “Druantia the defense system”, “Druantia anti-phage system”, and “Defense System III”, having all the same meanings and qualities. Disclosed herein, the Druantia defense system (Defense System III) comprises a Type I Druantia defense system (Defense System IIIa), a Type II Druantia defense system (Defense System IIIb), and a Type III Druantia defense system (Defense system IIIc), as described below.

[0743] In some embodiments, expression of a Druantia Type I defense system (Defense System IIIa) in bacteria protects the bacteria from phage infection. In some embodiments, expression of a Druantia Type II defense system (Defense System IIIb) in bacteria protects the bacteria from phage infection. In some embodiments, expression of a Druantia Type III defense system (Defense System IIIc) in bacteria protects the bacteria from phage infection.

[0744] In some embodiments, expression of a Druantia defense system in bacteria protects the bacteria from phage infection.

[0745] In some embodiments, a Druantia defense system (Defense System IIIa or Defense system IIIb or Defense System IIIc) provides a host cell with resistance to plasmid transformation. In some embodiments, a host cell expressing a functional Druantia defense system (Defense System IIIa or Defense System IIIb or Defense System IIIc) provides a host cells with resistance to plasmid transformation.

[0746] In some embodiments, a Druantia defense system (Defense system IIIa or IIIb or IIIc) provides a host cell with resistance to entry of conjugative elements. In some embodiments, a host cell expressing a function Druantia defense system (Defense System IIIa or IIIb or IIIc) provides the host cell resistance from entry of conjugative elements.

[0747] In some embodiments, a microbial species does not comprise an endogenous Defense System III. In some embodiments, a microbial species does not express an endogenous Defense System III. In some embodiments, a microbial species does not express an endogenous functional Defense System III.

[0748] In some embodiments, a bacterial species does not comprise an endogenous Defense System III. In some embodiments, a bacterial species does not express an endogenous Defense System III. In some embodiments, a bacterial species does not express an endogenous functional Defense System III.

[0749] In some embodiments, a microbial species does not comprise an endogenous Defense System IIIa. In some embodiments, a microbial species does not express an endogenous Defense System IIIa. In some embodiments, a microbial species does not express an endogenous functional Defense System IIIa.

[0750] In some embodiments, a bacterial species does not comprise an endogenous Defense System IIIA. In some embodiments, a bacterial species does not express an endogenous Defense System IIIa. In some embodiments, a bacterial species does not express an endogenous functional Defense System IIIa.

[0751] In some embodiments, a microbial species does not comprise an endogenous Defense System IIIb. In some embodiments, a microbial species does not express an endogenous Defense System IIIb. In some embodiments, a microbial species does not express an endogenous functional Defense System IIIb.

[0752] In some embodiments, a bacterial species does not comprise an endogenous Defense System IIIb. In some embodiments, a bacterial species does not express an endogenous Defense System IIIb. In some embodiments, a bacterial species does not express an endogenous functional Defense System IIIb.

[0753] In some embodiments, a microbial species does not comprise an endogenous Defense System IIIc. In some embodiments, a microbial species does not express an endogenous Defense System IIIc. In some embodiments, a microbial species does not express an endogenous functional Defense System IIIc.

[0754] In some embodiments, a bacterial species does not comprise an endogenous Defense System IIIc. In some embodiments, a bacterial species does not express an endogenous Defense System IIIc. In some embodiments, a bacterial species does not express an endogenous functional Defense System IIIc.

[0755] In some embodiments, a Druantia Type I defense system (Defense System IIIa) having an anti-phage activity comprises a nucleic acid construct comprising a nucleic acid sequence encoding a DruA polypeptide comprising a DUF4338 domain or a pfam14236 domain or a combination thereof, a DruB polypeptide, a DruC polypeptide, a DruD polypeptide, and a DruE polypeptide comprising a pfam00270 domain or a pfam00271 domain or a pfam09369 domain or a DUF1998 domain or any combination thereof. In some embodiments, a Druantia Type I defense system (Defense System IIIa) having an anti-phage activity comprises a nucleic acid construct comprising a nucleic acid sequence encoding a DruA polypeptide comprising a DUF4338 domain or a pfam14236 domain or a combination thereof, a DruB polypeptide wherein said DruB polypeptide is encoded by a gene positioned within 5 genes of a gene encoding said DruA polypeptide and said DruE polypeptide, a DruC polypeptide wherein said DruC polypeptide is encoded by a gene positioned within 5 genes of a gene encoding said DruA polypeptide and said DruE polypeptide, a DruD polypeptide wherein said DruD polypeptide is encoded by a gene positioned within 5 genes of a gene encoding said DruA polypeptide and said DruE polypeptide, and a DruE polypeptide comprising a pfam00270 domain or a pfam00271 domain or a pfam09369 domain or a DUF1998 domain or any combination thereof.

[0756] In some embodiments, a Druantia Type I defense system (Defense System IIIa) having an anti-phage activity comprises a DruA polypeptide comprising a DUF4338 domain or a pfam14236 domain or a combination thereof, a DruB polypeptide, a DruC polypeptide, a DruD polypeptide, and a DruE polypeptide comprising a pfam00270 domain or a pfam00271 domain or a pfam09369 domain or a DUF1998 domain or any combination thereof. In some embodiments, a Druantia Type I defense system (Defense System IIIa) having an anti-phage activity comprises a DruA polypeptide comprising a DUF4338 domain or a pfam14236 domain or a combination thereof, a DruB polypeptide wherein said DruB polypeptide is encoded by a gene positioned within 5 genes of a gene encoding said DruA polypeptide and said DruE polypeptide, a DruC polypeptide wherein said DruC polypeptide is encoded by a gene positioned within 5 genes of a gene encoding said DruA polypeptide and said DruE polypeptide, a DruD polypeptide wherein said DruD polypeptide is encoded by a gene positioned within 5 genes of a gene encoding said DruA polypeptide and said DruE polypeptide, and a DruE polypeptide comprising a pfam00270 domain or a pfam00271 domain or a pfam09369 domain or a DUF1998 domain or any combination thereof.

[0757] In some embodiments, a Defense System IIIa comprises a DruA polypeptide comprising a DUF4338 domain or a pfam14236 domain or any combination thereof, or comprising an amino acid sequence having at least 80% identity to a sequence selected from the group referenced in Table 10 rows 2-123 columns J and K; or a DruB polypeptide comprising an amino acid sequence having at least 80% identity to a sequence selected from the group referenced in Table 10 rows 2-123 columns N and O; or a DruC polypeptide comprising an amino acid sequence having at least 80% identity to a sequence selected from the group referenced in Table 10 rows 2-123 columns R and S; or a DruD polypeptide comprising an amino acid sequence having at least 80% identity to a sequence selected from the group referenced in Table 10 rows 2-123 columns V and W; and a DruE polypeptide comprising a pfam00270 domain or a pfam00271 domain or a pfam09369 domain or a DUF1998 domain or any combination thereof, or comprising an amino acid sequence having at least 80% identity to a sequence selected from the group referenced in Table 10 rows 2-1343 columns Z and AA; or any combination thereof.

[0758] In some embodiments, a Defense System IIIa comprises at least two polypeptide components selected from a DruA polypeptide comprising a DUF4338 domain or a pfam14236 domain or any combination thereof, or comprising an amino acid sequence having at least 80% identity to a sequence selected from the group referenced in Table 10 rows 2-123 columns J and K; or a DruB polypeptide comprising an amino acid sequence having at least 80% identity to a sequence selected from the group referenced in Table 10 rows 2-123 columns N and O; or a DruC polypeptide comprising an amino acid sequence having at least 80% identity to a sequence selected from the group referenced in Table 10 rows 2-123 columns R and S; or a DruD polypeptide comprising an amino acid sequence having at least 80% identity to a sequence selected from the group referenced in Table 10 rows 2-123 columns V and W; and a DruE polypeptide comprising a pfam00270 domain or a pfam00271 domain or a pfam09369 domain or a DUF1998 domain or any combination thereof, or comprising an amino acid sequence having at least 80% identity to a sequence selected from the group referenced in Table 10 rows 2-1343 columns Z and AA. In some embodiments, a Defense System IIIa comprises at least three polypeptide components selected from a DruA polypeptide comprising a DUF4338 domain or a pfam14236 domain or any combination thereof, or comprising an amino acid sequence having at least 80% identity to a sequence selected from the group referenced in Table 10 rows 2-123 columns J and K; or a DruB polypeptide comprising an amino acid sequence having at least 80% identity to a sequence selected from the group referenced in Table 10 rows 2-123 columns N and O; or a DruC polypeptide comprising an amino acid sequence having at least 80% identity to a sequence selected from the group referenced in Table 10 rows 2-123 columns R and S; or a DruD polypeptide comprising an amino acid sequence having at least 80% identity to a sequence selected from the group referenced in Table 10 rows 2-123 columns V and W; and a DruE polypeptide comprising a pfam00270 domain or a pfam00271 domain or a pfam09369 domain or a DUF1998 domain or any combination thereof, or comprising an amino acid sequence having at least 80% identity to a sequence selected from the group referenced in Table 10 rows 2-1343 column Z and AA. In some embodiments, a Defense System IIIa comprises at least four polypeptide components selected from a DruA polypeptide comprising a DUF4338 domain or a pfam14236 domain or any combination thereof, or comprising an amino acid sequence having at least 80% identity to a sequence selected from the group referenced in Table 10 rows 2-123 columns J and K; or a DruB polypeptide comprising an amino acid sequence having at least 80% identity to a sequence selected from the group referenced in Table 10 rows 2-123 columns N and O; or a DruC polypeptide comprising an amino acid sequence having at least 80% identity to a sequence selected from the group referenced in Table 10 rows 2-123 columns R and S; or a DruD polypeptide comprising an amino acid sequence having at least 80% identity to a sequence selected from the group referenced in Table 10 rows 2-123 columns V and W; and a DruE polypeptide comprising a pfam00270 domain or a pfam00271 domain or a pfam09369 domain or a DUF1998 domain or any combination thereof, or comprising an amino acid sequence having at least 80% identity to a sequence selected from the group referenced in Table 10 rows 2-1343 columns Z and AA. In some embodiments, a Defense System IIIa comprises five polypeptide components selected from a DruA polypeptide comprising a DUF4338 domain or a pfam14236 domain or any combination thereof, or comprising an amino acid sequence having at least 80% identity to a sequence selected from the group referenced in Table 10 rows 2-123 columns J and K; or a DruB polypeptide comprising an amino acid sequence having at least 80% identity to a sequence selected from the group referenced in Table 10 rows 2-123 columns N and O; or a DruC polypeptide comprising an amino acid sequence having at least 80% identity to a sequence selected from the group referenced in Table 10 rows 2-123 columns R and S; or a DruD polypeptide comprising an amino acid sequence having at least 80% identity to a sequence selected from the group referenced in Table 10 rows 2-123 columns V and W; and a DruE polypeptide comprising a pfam00270 domain or a pfam00271 domain or a pfam09369 domain or a DUF1998 domain or any combination thereof, or comprising an amino acid sequence having at least 80% identity to a sequence selected from the group referenced in Table 10 rows 2-1343 columns Z and AA.

[0759] In some embodiments, a functional Defense System IIIa comprises at least two polypeptide components selected from a DruA polypeptide comprising a DUF4338 domain or a pfam14236 domain or any combination thereof, or comprising an amino acid sequence having at least 80% identity to a sequence selected from the group referenced in Table 10 rows 2-123 columns J and K; or a DruB polypeptide comprising an amino acid sequence having at least 80% identity to a sequence selected from the group referenced in Table 10 rows 2-123 columns N and O; or a DruC polypeptide comprising an amino acid sequence having at least 80% identity to a sequence selected from the group referenced in Table 10 rows 2-123 columns r and S; or a DruD polypeptide comprising an amino acid sequence having at least 80% identity to a sequence selected from the group referenced in Table 10 rows 2-123 columns V and W; and a DruE polypeptide comprising a pfam00270 domain or a pfam00271 domain or a pfam09369 domain or a DUF1998 domain or any combination thereof, or comprising an amino acid sequence having at least 80% identity to a sequence selected from the group referenced in Table 10 rows 2-1343 columns Z and AA. In some embodiments, a functional Defense System IIIa comprises at least three polypeptide components selected from a DruA polypeptide comprising a DUF4338 domain or a pfam14236 domain or any combination thereof, or comprising an amino acid sequence having at least 80% identity to a sequence selected from the group referenced in Table 10 rows 2-123 columns J and K; or a DruB polypeptide comprising an amino acid sequence having at least 80% identity to a sequence selected from the group referenced in Table 10 rows 2-123 columns N and O; or a DruC polypeptide comprising an amino acid sequence having at least 80% identity to a sequence selected from the group referenced in Table 10 rows 2-123 columns R and S; or a DruD polypeptide comprising an amino acid sequence having at least 80% identity to a sequence selected from the group referenced in Table 10 rows 2-123 columns V and W; and a DruE polypeptide comprising a pfam00270 domain or a pfam00271 domain or a pfam09369 domain or a DUF1998 domain or any combination thereof, or comprising an amino acid sequence having at least 80% identity to a sequence selected from the group referenced in Table 10 rows 2-1343 columns Z and AA. In some embodiments, a functional Defense System IIIa comprises at least four polypeptide components selected from a DruA polypeptide comprising a DUF4338 domain or a pfam14236 domain or any combination thereof, or comprising an amino acid sequence having at least 80% identity to a sequence selected from the group referenced in Table 10 rows 2-123 columns J and K; or a DruB polypeptide comprising an amino acid sequence having at least 80% identity to a sequence selected from the group referenced in Table 10 rows 2-123 columns N and O; or a DruC polypeptide comprising an amino acid sequence having at least 80% identity to a sequence selected from the group referenced in Table 10 rows 2-123 columns R and S; or a DruD polypeptide comprising an amino acid sequence having at least 80% identity to a sequence selected from the group referenced in Table 10 rows 2-123 columns V and W; and a DruE polypeptide comprising a pfam00270 domain or a pfam00271 domain or a pfam09369 domain or a DUF1998 domain or any combination thereof, or comprising an amino acid sequence having at least 80% identity to a sequence selected from the group referenced in Table 10 rows 2-1343 columns Z and AA. In some embodiments, a functional Defense System IIIa comprises five polypeptide components selected from a DruA polypeptide comprising a DUF4338 domain or a pfam14236 domain or any combination thereof, or comprising an amino acid sequence having at least 80% identity to a sequence selected from the group referenced in Table 10 rows 2-123 columns J and K; or a DruB polypeptide comprising an amino acid sequence having at least 80% identity to a sequence selected from the group referenced in Table 10 rows 2-123 columns N and O; or a DruC polypeptide comprising an amino acid sequence having at least 80% identity to a sequence selected from the group referenced in Table 10 rows 2-123 columns R and S; or a DruD polypeptide comprising an amino acid sequence having at least 80% identity to a sequence selected from the group referenced in Table 10 rows 2-123 columns V and W; and a DruE polypeptide comprising a pfam00270 domain or a pfam00271 domain or a pfam09369 domain or a DUF1998 domain or any combination thereof, or comprising an amino acid sequence having at least 80% identity to a sequence selected from the group referenced in Table 10 rows 2-1343 columns Z and AA.

[0760] In some embodiments, a Druantia Type I defense system (Defense System IIIa) having an anti-phage activity comprises a nucleic acid construct comprising a nucleic acid sequence comprising a druA gene, a druB gene, a druC gene, a druD gene, and a druE gene.

[0761] In some embodiments, the Druantia Type I anti-phage defense system comprises a nucleic acid construct comprising nucleic acid sequences encoding a gene cassette comprising druA, druB, druC, druD, and druE genes. In some embodiments, a Druantia Type I (Defense System IIIa) gene cassette comprises the nucleic acid sequence:

(SEQ ID NO: 16; construct 56 of Table 4)

| | |
|---|---|
| 1 | tagtaaggca ttatagtgaa acgatgtcta tgaatcacac atctaatgtc cggtgaacgt |
| 61 | ttggttgata gggtagtaaa actagtaatc atcctataat tagctatatt cgtggttatt |
| 121 | agattgaaaa cagataacat taacaaaatc tataaatcta tttgaatgat ttttttcatc |
| 181 | aatgctgttg taacctcctg ctatcaaaag tttttcacaa aatctataag ctcccagaat |
| 241 | tgcttgtata aatgctatca ttggcgctgt cccgatcgag ggagcaagga ggggactctc |
| 301 | ttgtgccatg cgattaatca cttgggctct aagtgaaatt tagtgggact aaatactaat |
| 361 | tggaacgtga gataaaaatg cacaaagatc cctctataat agttaatatc aaccttcgag |
| 421 | aagccaaact gaaaaagaag gtacgtgagc atttacaatc cttgggtttt acaagatctg |
| 481 | attctggagc gctccaggcc ccgggaaata ccaaagatgt aatacgggct cttcatagtt |
| 541 | ctcaacgagc tgagcggata tttgcaaacc aaaagttcat aacgctaaga gcggcaaagc |
| 601 | ttattaaatt tttcgcatcc ggcaatgagg tcattccgga taaaatttca ccggtacttg |
| 661 | aacgtgtaaa gtcaggaacc tggcaaggag atctctttag gttagcagca ttaacttggt |
| 721 | ccgtacctgt ttcaagcgga tttggaaggc gtctccggta tcttgtatgg gatgaaagca |
| 781 | acggaaaatt gatagggctg atcgcaattg gtgaccctgt gttcaacctt gcagtccgag |
| 841 | ataatttgat tgggtgggat actcatgcca gaagttcccg gcttgttaat ttgatggatg |
| 901 | catacgtcct cggtgctctt cccccttata atgccctgct gggaggaaaa ttaattgcat |
| 961 | gtctgcttcg tagccgcgat ctttatgatg actttgcaaa ggtctatggt gataccgttg |
| 1021 | gagtaatatc tcaaaaaaag aaacaagcac gtcttttggc tattacaaca acatcgtcta |
| 1081 | tggggcgctc atcggtatat aaccgtttaa agctggatgg aattcaatat ttaaaatcga |
| 1141 | ttggatatac aggcggttgg gggcattttc atatacctga tagcttgttc attgaattac |
| 1201 | gtgattactt acgtgatatg gatcacgctt atgcagatca ttatatgttt ggtaatgggc |
| 1261 | ctaactggcg tttacgtaca actaaggcag ctttaaatgt actaggattt agagataatt |
| 1321 | tgatgaagca tggaattcaa cgtgaagttt ttatcagtca gctagcagaa aatgcaacta |
| 1381 | gtattctgca aacaggcaaa ggtgaaccag atctaacctc tttgctttct gctaaagaga |
| 1441 | tagctgagtg tgcgatggca cgatggatgg ttccacgatc aattcgcaat ccagaatatc |
| 1501 | ggctttggaa agcaagagat ctatttgatt ttattagtaa tgactcgcta aaatttcccc |
| 1561 | cgtctgacga gatagcgaaa acagttgtct aatcttaact gaagggggag taagtgaatt |
| 1621 | acgctattga taagttcacc gggacactga tattagcagc tcgagcaacg aaatatgctc |
| 1681 | aatatgtttg cccagtttgt aaaaaaggtg ttaacctccg taaagggaag gttatacccc |
| 1741 | catattttgc tcatttgccc ggacatggta cgtcagactg tgaaaatttt gttcccggaa |
| 1801 | attccatcat tatcgaaact attaaaacta tttcaaagcg atatatggat ttgcgcttat |
| 1861 | tgattcctgt cggaagtaat agtcgagagt ggtcattaga attagtgttg ccaacctgta |
| 1921 | atttatgtag agcaaagata acgttagatg taggaggcag aagccaaacg cttgatatga |
| 1981 | ggagtatggt aaagagtcgc cagattggtg ctgaattatc agtaaaatct taccgtattg |
| 2041 | tttcatatag tggtgaaccc gatccaaaat ttgtaacaga agttgaaaga gaatgccccg |
| 2101 | gtttaccttc tgagggagca gcagttttca ctgctttagg gcgtggggca tcgaagggat |
| 2161 | ttccacgagc acaagagtta agatgtactg aaacatttgc ctttctttgg cgacaccctg |
| 2221 | ttgctccaga ttttcctgat gaattagaaa taaaaagttt agctagtaaa cagggatgga |
| 2281 | atttagctct tgttacaatt cctgaagtcc cttctgtgga gagtatttca tggctaaaat |
| 2341 | cttttacata ccttcctgtt gttcctgcca gaacatctat tacagcaatt tggccgttcc |
| 2401 | taaatcaaaa aacaagtatt aatcatgtcg aatgtgttca ttctgacaca atattgttgt |
| 2461 | cagcaaatat ggcaccaaca tcatcagaaa atgttggacc aactatgtac gcacaaggtt |
| 2521 | cctctttatt actttcagcg gttggtgttg aaaaatcacc tgctttcttc attcttaatc |
| 2581 | ctggagaaaa tgactttgtg ggcgtttctg gctcaattga gcaggacgta aacttatttt |
| 2641 | tttctttcta taaaaaaaac gtttctgtac ccagaaaata tccctcaata gatttggttt |
| 2701 | ttactaagag gaataaagaa aagaccatcg tttccttaca tcaaagaaga tgcattgaag |
| 2761 | ttatgatgga agcacgaatg tttggccata aattagaata catgtctatg ccttctggtg |
| 2821 | ttgaaggagt ggcaagaatt caaagacaaa ctgaaagtag tgttattaag ttagtttcta |
| 2881 | atgatgacat tgcagctcat gataagagca tgcggttact atctcctgtt gcgttatctc |
| 2941 | aattatctga ttgcttagca aacttaacat gtcatgtaga aatagatttt ttaggtcttg |
| 3001 | gtaaaatatt tttacctagt tcttctatgt tatcattaga tgacggggaa tttattgaat |
| 3061 | tatctcctaa tcttcgctca cggatattaa gttttatact tcaaatgggg cacaccctcc |
| 3121 | atggttttag tttaaataat gattttttat tagttgagaa attagtggat ttgcagccgg |
| 3181 | aaccacactt attaccgcat tatagggcat tggtaaaaga agttaagacc aatggatttg |
| 3241 | aatgtaaccg ctttagataa ggtgccttcg aatgagttac caatatagcc aagaggcaaa |
| 3301 | ggaacggatc tctaagttgg gacaatccga aattgttaac tttatcaatg agatttctcc |
| 3361 | aactttacga cgtaaagctt ttggttgttt accaaaagta ccgggattca gggcaggaca |
| 3421 | tcccactgaa attaaagaaa aacagaaaag attgattggg tatatgttcc agtcacatcc |
| 3481 | ttcctctgag gagagaaaag catggaaaag tttttctctt ttttggcagt tttgggctga |
| 3541 | agagaaaatt gacaaatcat ttagtatgat tgataattta ggattaaaag aaaactctgg |
| 3601 | ctctattttt attagagagc ttgctaaaaa ctttcctaaa gttgctagag agaatatcga |
| 3661 | gcgcctgttt atctttagtg ggtttgctga tgatccagac gttataaatg catttaacct |
| 3721 | ttttcctcct gcagttgttc ttgcccgcga tatcgtggtt gatactcttc caattcgttt |
| 3781 | agatgagctt gaagcacgta ttagtttaat tgccgataat gtggagaaaa aaaataacca |
| 3841 | tattaaagag cttgagttaa aaatagatgc tttttccgaa cggttcgata attactttaa |
| 3901 | taatgaaaag agcaatttaa aaataattaa cgaactacaa tccttaataa actcagagac |
| 3961 | taaacaatct gatattgcta ataaatctat tgacgagctt tatcatttta atgaaaaaaa |
| 4021 | caaacagcta atattatctc ttcaagagaa attagatttt aatgctctgg ctatgaatga |
| 4081 | catttctgag catgaaaaat tgataaaaag tatggctaat gaaatttcag agttaaaaaa |
| 4141 | tgcattaact atcttgtgtg ataataaaag aaagaataac gagttagatt atatcaatga |
| 4201 | attaaaaaaa ctcactgaac gaatagatac acttgaaata aacacatctc aagctagcaa |
| 4261 | agtgagtgtc accaatagat ttacaaaatt ccatgaaata gcgcactatg aaaattatga |
| 4321 | atatctttca tcctccgaag acatatctaa tagaatttct ttaaatttac aggctgttgg |
| 4381 | gttaacaaaa aattcagcag aaacattggc tagattgaca ttagctacct tcgtttctgg |
| 4441 | acaaatcatt caattcagtg gctctttggc agatattatc gcggatgcaa ttgccattgc |
| 4501 | tattggtgca ccacgttatc acatatggag agttccagtt ggtattattt ctgacatgga |
| 4561 | ttcttttgat tttatagaga ctatagctga atcatctcgc tgtctccttt tgaaaggggc |
| 4621 | caatctttca gcatttgaga tttatggagc ggcaattaga gatatagttg ttcaacggca |
| 4681 | aatacatcca acaaattatg accatctggc attgatagct acttggaaac aaggccctgc |
| 4741 | tacattccct gatggaggaa tgttggccga gttgggacca gttattgata ctgatacatt |
| 4801 | aaaaatgcgt ggtttatctg ctattttacc ccaattgaaa ccaggttgtc ttgccaagga |
| 4861 | taaatggaca aatattgatg gactacagct tgatagtgtt gatgattatg tagatgaatt |
| 4921 | aagagcatta ctggacgaag ctggatttga tgggggaact ttgtggaaga gaatggttca |
| 4981 | tattttctat acttcactca taagagtccc taatggaaat tatatttatg atctttattc |
| 5041 | tgtcttgtct ttttatactc ttacatgggc aaaaattaaa ggtggccccg tccaaaagat |
| 5101 | agaagatatt gccaatcgtg aattaaaaaa ttatagtgca aaaatatctt cttgaggagg |
| 5161 | tggttaatgg agtggagagc agtatcacga gacaaagcac tggatatgtt atcaactgca |
| 5221 | ttaaattgtc gatttgatga tgaagggttg agaatttcag cagtttcaga atgcttaagg |
| 5281 | agcgtattat atcaatattc tatatctgaa acagaagaag ctaggcaaac tgtaacctcg |
| 5341 | cttcgactca ctagtgcagt aaggcgaaaa ttggtacctt tatggccaga cattgctgat |
| 5401 | attgataatg ctatacatcc gggcattatg tctatattga acagcttggc tgaattgggt |
| 5461 | gacatgatta agttagaagg tggtaattgg ctcacagctc ccccacatgc agtacgaatt |
| 5521 | gacaataaga tggctgtttt ttttggtgga gagccttcct gtacattttc aacgggcgtg |
| 5581 | gtagctaaat ctgctggaag agttcgcttg gttgaagaaa aagtgtgtac tggaagtgtt |
| 5641 | gaaatctggg atgcaaatga gtggattggt gccccagcag aaggcaatga agaatggtca |
| 5701 | tccagactac tatctggaac tatttccggc tttatcgatg cgcctagcaa tatgagtgaa |
| 5761 | acgactgcat atgtgcgggg aaaatggctc catttgtcag aactttcttt taataaaaag |
| 5821 | caaatctact tatgcagaat gtccgttgat aatcactttt cctattattt aggagaaatt |
| 5881 | gaagctggac gcttatgtag aatgaattcg ttagaatcgt ctgatgatgt cagaagatta |
| 5941 | cgtttttttc tcgatacaaa agataattgt ccgctaaaga tccgtatcaa aatatctaat |
| 6001 | gggctagcaa gattaagatt aaccagaaga ttaccaagac gagaaacgaa ggtactcctg |
| 6061 | ctaggctgga gagaatcagg ttttgaaaat gaacattcag gaataacaca ccatgtattc |
| 6121 | cccgaggaaa tattacccat agtgcgtagc gcttttgaag ggcttggtat tatttggatt |
| 6181 | aacgaattca cgcgacggaa tgaaatatga ttaataaaaa taaagtaact gaacgttcag |
| 6241 | gtatacatga taccgtgaaa agccttagtg agaatctgag aaaatacatt gaggcacaat |
| 6301 | atcatatccg ggatgaaggg ttaattgctg agcgacgagc gcttttacag caaaatgaaa |
| 6361 | ctattgctca agctccttat atagaagcaa ccccaattta tgaacctggt gcgccataca |
| 6421 | gtgaattacc tattcccgaa gcagcaagta atgtgctaac tcaactatca gaacttggaa |
| 6481 | ttggcctcta tcaacgcccc tataaacacc aatcacaggc acttgagtca tttcttggcg |
| 6541 | aagacgcttc tgatctggtc attgcaacag gtacaggctc cggtaagact gaaagctttc |
| 6601 | taatgccaat tattggtaaa ttggcgattg aatcttccga gagacctaaa tctgcatccc |
| 6661 | ttccaggttg tagagcaatt ttattatatc caatgaatgc attagttaac gatcaacttg |
| 6721 | ctcgtatcag acgtcttttt ggtgattctg aagcctctaa aatactgaga tctggaagat |
| 6781 | gtgcccctgt acgctttggc gcttatacgg gaagaacgcc ttaccctggt cgtcgtagct |
| 6841 | ctagacgaga cgagcttttt atcaaacccc ttttcgatga gttttacaat aaactcgcaa |
| 6901 | ataacgcccc tgtacgtgcg gaactgaacc gcattggtcg ctggccaagt aaagatcttg |
| 6961 | atgcttttta tgggcaaagc gcatctcagg ctaaaaccta cgtctcaggc aaaaaaacgg |
| 7021 | gtaagcaatt tgttttgaac aattgggggg agaggctaat tacccagcct gaggatcgtg |
| 7081 | agctaatgac ccggcatgaa atgcagaatc gctgtccaga attactgata acgaactact |
| 7141 | ccatgcttga gtatatgctg atgcgaccta tcgagcgtaa tatttttgag cagactaagg |
| 7201 | aatggctcaa agctgatgag atgaatgagc ttatcttagt gcttgatgaa gcgcatatgt |
| 7261 | atagaggagc agggggagca gaggtagccc ttttaatacg tcgcctctgt gctcggttgg |
| 7321 | atattccccg ggaacgtatg cgctgcatcc ttaccagtgc tagtctaggg tccattgagg |
| 7381 | atggagaacg ttttgcccaa gacttaactg gcttatcacc aacctcttcg aggaaatttc |
| 7441 | gaattattga gggtacaagg gaatcgcgtc ctgagtcaca aattgttacc agtaaagaag |
| 7501 | ctaatgcact ggctgaattc gacctaaatt catttcagtg cgtagctgag gatcttgaat |
| 7561 | ctgcatatgc agcaatagag tctcttgccg aacgaatggg ctggcaaaag ccgatgataa |
| 7621 | aagatcatag tacactacgt aattggttat ttgataattt gactggtttt ggtcctattg |
| 7681 | aaacgcttat tgaaatagtt tcaggtaaag cggttaagct aaatatcttg agtgaaaacc |
| 7741 | tttttccaga ctctccacag caaattgcag agcgagcgac agatgcatta ctcgcattgg |
| 7801 | gttgctatgc tcagagggca tccgatggca gagtgcttat tccaactcgc atgcatcttt |
| 7861 | tttatcgggg attaccaggt ctttatgcct gtatagatcc cgattgtaat caacgtttgg |
| 7921 | gtaaccatag tgggccaact atacttggcc gcctttatac gaaaccactg gatcaatgta |
| 7981 | aatgcgcttc aaaagggcga gtctacgaat tatttaccca ccgtgactgc ggtgcggctt |
| 8041 | ttattcgtgg atacgttagt tccgaaatgg actttgtatg gcaccagccg aacggaccat |
| 8101 | tatcagaaga tgaggatatc gatcttgttc ccatagatat attggtcgag gaaacacctc |
| 8161 | atgtacatag tgattaccag gacagatggc tacatatagc aacaggacgc ctttctaaac |
| 8221 | agtgtcaaga tgaggattct ggttatcgta aagtctttat acctgaccga gttaagtctg |
| 8281 | gatctgaaat tacatttgat gaatgccctg tttgtatgcg taagacaaga agtgctcaga |
| 8341 | atgaaccgtc taaaattatg gatcatgtta caaaagggga agcacctttt acaacgttag |
| 8401 | tacgtacaca gatatctcac cagccagcga gtcgtcctat tgatggtaaa catcccaatg |
| 8461 | ggggaaaaaa agtacttatt ttttctgatg gccgacaaaa agcagctcgg cttgcacgtg |
| 8521 | atattcctag agatattgag cttgatttgt ttcggcaatc cattgctctc gcctgttcta |
| 8581 | aactgaaaga tatcaatcgg gaacccaaac caacatcagt actttacctt gctttcctat |
| 8641 | cagtcctttc tgaacatgac ttgcttattt ttgatgggga agattcacga aaagttgtaa |
| 8701 | tggcccgtga tgaattttat cgtgattata atagcgatct ggctcaagct tttgatgata |
| 8761 | acttcagtcc ccaagagtca ccgtcacgat ataaaatagc gttgcttaaa cttttatgta |
| 8821 | gcaattacta ttctctttcc ggaacaacag ttggttttgt tgaaccatcg cagcttaaat |
| 8881 | caaaaaaaat gtgggaagat gtgcagtcca agaagctaaa tattgagagc aaggatgttc |
| 8941 | atgctttagc tgttgcttgg attgatacct tactcactga atttgctttt gatgaatcta |
| 9001 | ttgattcgac actacgaatc aaagccgctg gattctacaa acccacttgg ggtagtcaag |
| 9061 | gacggtttgg aaaagctctt aggaaaaccc tgatacagca tcctgctatg ggggagcttt |
| 9121 | atgtggaagt tttggaggag atttttcgta ctcatctgac attaggaaaa gatggtgtct |
| 9181 | actttcttgc tccaaatgca ctacgtctga aaatagatct cttgcatgtc tggaaacaat |
| 9241 | gtaatgactg cacggcacta atgccatttg ctttagaaca ttctacttgc cttgcttgtg |
| 9301 | gtagtaacag tgtcaaaaca gtcgagccgt cggaaagcag ctatattaat gcacgaaaag |
| 9361 | gattctggcg ttcgccggta gaagaagttt tggtttcaaa ttcgcggctt ctaaacctta |
| 9421 | gcgttgaaga gcatactgct caactctcac atagagatag ggccagcgtt catgccacta |
| 9481 | cagaactcta cgaactgaga ttccaagatg ttcttattaa tgataacgac aagcccattg |
| 9541 | atgtacttag ttgtacgacg acgatggaag tgggggttga tattggatct ctggttgctg |
| 9601 | ttgctttaag aaacgtccct ccgcaacgag aaaattatca gcaacgtgct gggcgagcag |
| 9661 | gccgccgtgg cgcatctgtt tcaacggtgg ttacatattc tcaaaatggc cctcatgata |
| 9721 | gttattattt ccttaatcct gaacgcattg ttgcaggttc tcctcgtaca cctgaagtga |
| 9781 | aagtaaataa tcccaaaata gccagaagac acgttcattc ttttttagtt cagacctttt |
| 9841 | ttcacgagtt aatggaacaa ggaatttata atcccacaga gaaaactgcc atacttgaga |
| 9901 | aagcacttgg tactacacga gatttttttc atggagcaaa agatactggc ctaaatctcg |
| 9961 | atagctttaa taattgggtt aaaaaccgta ttctatctac taatggtgat ttgagaacaa |
| 10021 | gtgttgcagc atggcttcct cctgttcttg aaactggagg gctttctgcc agtgactggt |
| 10081 | ttgctaaggt agcagaggaa tttttaaata cactccatgg gctggctgaa attgttccac |
| 10141 | aaattgccgc tcttgttgat gaggaaaatg aagatgatga gcagacttct ggtggaatga |
| 10201 | aatttgcaca agaagaatta cttgagttcc tgttttacca tggtttatta ccaagttatg |
| 10261 | catttcctac aagcctctgt agtttcttgg tagaaaaaat tgtaaagaat attagaggtt |
| 10321 | cttttgaggt gcgaacagta caacagcctc agcaatcaat ttctcaggct ctgagtgaat |
| 10381 | atgccccggg acgtttgatt gttattgata ggaaaaccta tcgctctggt ggtgtttttt |
| 10441 | ctaatgcatt gaaaggcgaa ctaaaccggg caagaaagct tttcaataat cccaaaaagt |
| 10501 | ttattcattg cgataagtgc tcttttgtcc gcgatcctca taataatcag aatagcgaaa |
| 10561 | atacttgtcc gatctgtggt ggcattctaa aagtagaaat aatgattcag cccgaagtct |
| 10621 | ttggacctga aaatgccaag gaacttaatg aggacgacag agagcaagaa atcacctatg |
| 10681 | taactgcggc acaatatcca caacctgttg atcctgaaga ttttaagttc aataatggag |
| 10741 | gtgctcatat tgtttttact cacgcaatag atcagaaact ggtgacggtg aaccgaggga |
| 10801 | aaaatgaggg ggggtccagt ggtttttcag tatgttgcga atgtggtgcg gcctccgttt |
| 10861 | atgattccta ctcaccggca aagggggcac atgaaagacc gtataaatat atagcaacta |
| 10921 | aggaaacgcc tcgcttatgc tctggcgagt ataaacgcgt ttttctcgga catgatttcc |
| 10981 | gtactgattt gcttttatta cgaataaccg ttgggtctcc gcttgtaact gatacttcaa |
| 11041 | atgctatcgt tttacggatg tatgaagatg cattatatac aatagcggaa gcactaaggc |
| 11101 | ttgcagctag tcgccataaa caactggatc ttgatcctgc tgagtttggc tctggtttca |
| 11161 | gaattttacc cactatagag gaagatactc aggcattgga tctcttcctt tatgatactt |
| 11221 | tatctggcgg tgcgggttat gcggaagtag cagcagcgaa tctagatgac attcttactg |
| 11281 | caacactcgc attgttagaa ggttgtgagt gcgatacctc ctgtacagat tgtctcaatc |
| 11341 | atttccacaa ccagcatata caaagccgtc tcgataggaa actaggtgca tctttacttc |
| 11401 | gttatgctct atacggaatg gttcctcgtt gtgcttcacc tgatattcag gtagaaaaat |
| 11461 | tgtctcaatt gagggcaagt ctggaattgg atggttttca atgcctaatt aagggaactc |
| 11521 | aggaggcacc tatgattgtg agtttgaatg accgttctgt tgcagtggga agttaccctg |
| 11581 | gtcttattga tcgacccgac tttcaacacg acgtatataa gtcaaagaat actaatgctc |
| 11641 | atatagcctt taatgaatat cttcttcgtt caaatctgcc acaagcgcat caaaatatta |
| 11701 | gaaaattgtt gcgctgatag cagtattgag tgccctaaag tcctataggg cactcaaggt |
| 11761 | tattctcttt taatatttgt taatagcatg tattttaagg ctttcagtcc ttgagctggc |
| 11821 | ttttacacaa cgagaaagag gtaattataa taccagccgg atatggcgag aaatggtggc |
| 11881 | ccgggggtgt aagtatcccg cataatcgtg ccattcatat ttagagatca tccggcataa |
| 11941 | tcaatctgct aacgaaggag atcgcta. |

[0762] The coding regions for each of the druA, drub, druC, drub, and druE gene sequences within this embodiment of a Druantia Type I cassette (SEQ ID NO: 16) are as follows: nucleotides 378-1592 encode an embodiment of a DruA polypeptide; nucleotides 16614-3260 encode an embodiment of a DruB polypeptide; nucleotides 3272-5155 encode an embodiment of a DruC polypeptide, nucleotides 5167-6210 encode an embodiment of a DruD polypeptide; and nucleotides 6207-11717 encode an embodiment of a DruE polypeptide.

[0763] In some embodiments, a Defense System IIIa comprising a DruA polypeptide, a DruB polypeptide, a DruC polypeptide, a DruD polypeptide and a DruE polypeptide is encoded by the nucleic acid sequence set forth in SEQ ID NO: 16. In some embodiments, a Defense System IIIa comprising a DruA polypeptide, a DruB polypeptide, a DruC polypeptide, a DruD polypeptide and a DruE polypeptide, is encoded by a nucleic acid sequence having at least 80% homology to the sequence set forth in SEQ ID NO: 16. In some embodiments, a Defense System IIIa comprising a DruA polypeptide, a DruB polypeptide, a DruC polypeptide, a DruD polypeptide and a DruE polypeptide, is encoded by a nucleic acid sequence having at least 85% homology, or 90% homology, or 95% homology, or 97% homology, or 98% homology, or 99% homology to the sequence set forth in SEQ ID NO: 16. In some embodiments, a Defense System IIIa comprising a DruA polypeptide, a DruB polypeptide, a DruC polypeptide, a DruD polypeptide and a DruE polypeptide, is encoded by a nucleic acid sequence having at least 80% identity to the sequence set forth in SEQ ID NO: 16. In some embodiments, a Defense System IIIa comprising a DruA polypeptide, a DruB polypeptide, a DruC polypeptide, a DruD polypeptide and a DruE polypeptide, is encoded by a nucleic acid sequence having at least 85% identity, or 90% identity, or 95% identity, or 97% identity, or 98% identity, or 99% identity to the sequence set forth in SEQ ID NO: 16.

[0764] In some embodiments, the Type I Druantia anti-phage defense system comprises a nucleic acid construct comprising nucleic acid sequences encoding a gene cassette comprising druB, druC, druD, and druE genes. In some embodiments, the Type I Druantia anti-phage defense system comprises a nucleic acid construct comprising nucleic acid sequences encoding a gene cassette comprising druB, druC, druD, druE, and druA genes.

[0765] In some embodiments, a construct comprising the Type I Druantia anti-phage defense system encodes one component of the defense system, whereby multiple constructs may be used to assemble the functional defense system. In some embodiments, the components of a Druantia defense system comprise polypeptides DruA, DruB, DruC, DruD, and DruE. In some embodiments, the components of a Druantia Type I defense system comprise polypeptides DruB, DruC, DruD, and DruE.

[0766] In some embodiments, a construct comprising the Druantia Type I anti-phage defense system encodes one component of the defense system, whereby multiple constructs may be used to assemble the functional defense system. In some embodiments, the components of a Druantia defense system comprise genes druA, druB, druC, druD, and druE. In some embodiments, the components of a Druantia Type I defense system comprise genes druB, druC, druD, and druE.

[0767] In some embodiments, the components of a Druantia Type I defense system consists of genes druA, druB, druC, druD, and druE. In some embodiments, the components of a Druantia Type I defense system consist of genes druB, druC, druD, and druE.

[0768] In some embodiments, the components of a Druantia Type I defense system comprise nucleic acid sequences encoding a DruA polypeptide, a DruB polypeptide, a DruC polypeptide, a DruD polypeptide, and a DruE polypeptide. In some embodiments, the components of a Druantia Type I defense system comprise nucleic acid sequences encoding a DruB polypeptide, a DruC polypeptide, a DruD polypeptide, and a DruE polypeptide. In some embodiments, the components of a Druantia Type I defense system comprise nucleic acid sequences encoding a DruB polypeptide, a DruC polypeptide, a DruD polypeptide, a DruE polypeptide, and a DruA polypeptide.

[0769] In some embodiments, the components of a Druantia Type I defense system consist of nucleic acid sequences encoding a DruA polypeptide, a DruB polypeptide, a DruC polypeptide, a DruD polypeptide, and a DruE polypeptide. In some embodiments, the components of a Druantia Type I defense system consist of nucleic acid sequences encoding a DruB polypeptide, a DruC polypeptide, a DruD polypeptide, and a DruE polypeptide. In some embodiments, the components of a Druantia Type I defense system consist of nucleic acid sequences encoding a DruB polypeptide, a DruC polypeptide, a DruD polypeptide, a DruE polypeptide, and a DruA polypeptide.

[0770] In some embodiments, a construct comprising the Druantia Type I defense system encodes one component of the defense system, whereby a second, third, fourth, or fifth construct may be used to assemble the functional defense system. In some embodiments, a construct comprising the Druantia defense system encodes one component of the defense system, whereby additional constructs may be used to assemble the functional defense system. For example, in some embodiments each of DruA, DruB, DruC, DruD, and DruE may be encoded by nucleic acid sequences comprised in different constructs, wherein expression of the combination of constructs produces a functional Druantia defense system. In some embodiments each of DruB, DruC, DruD, and DruE may be encoded by nucleic acid sequences comprised in different constructs, wherein expression of the combination of constructs produces a functional Druantia defense system.

[0771] In some embodiments, the components making up a functional Druantia Type I anti-phage defense system comprise a DruA polypeptide, a DruB polypeptide, a DruC polypeptide, a DruD polypeptide, and a DruE polypeptide, each encoded by a druA, druB, druC, druD, or druE gene, respectively. In some embodiments, the components making up a functional Druantia Type I anti-phage defense system comprise a DruB polypeptide, a DruC polypeptide, a DruD polypeptide, and a DruE polypeptide, each encoded by a druB, druC, druD, or druE gene, respectively.

[0772] In some embodiments, a Druantia Type I defense system having an anti-phage activity comprises a nucleic acid encoding a DruA polypeptide. In some embodiments, a Druantia Type I defense system having an anti-phage activity comprises a nucleic acid encoding a DruB polypeptide. In some embodiments, a Druantia Type I defense system having an anti-phage activity comprises a nucleic acid encoding a DruC polypeptide. In some embodiments, a Druantia Type I defense system having an anti-phage activity comprises a nucleic acid encoding a DruD polypeptide. In some embodiments, a Druantia Type I defense system having an anti-phage activity comprises a nucleic acid encoding a DruE polypeptide.

[0773] In some embodiments, a Druantia Type I defense system having an anti-phage activity comprises a nucleic acid encoding a DruB polypeptide and a DruE polypeptide. In some embodiments, a Druantia defense system having an anti-phage activity comprises a nucleic acid encoding a DruC polypeptide and a DruE polypeptide. In some embodiments, a Druantia Type I defense system having an anti-phage activity comprises a nucleic acid encoding a DruB polypeptide, a DruC polypeptide, and a DruE polypeptide.

[0774] In some embodiments, a Druantia Type I defense system having an anti-phage activity comprise a nucleic acid comprising a druA gene. In some embodiments, a Druantia Type I defense system having an anti-phage activity comprise a nucleic acid comprising a druB gene. In some embodiments, a Druantia Type I defense system having an anti-phage activity comprise a nucleic acid comprising a druC gene. In some embodiments, a Druantia Type I defense system having an anti-phage activity comprise a nucleic acid comprising a druD gene. In some embodiments, a Druantia Type I defense system having an anti-phage activity comprise a nucleic acid comprising a druE gene.

[0775] In some embodiments, a Druantia Type I defense system having an anti-phage activity comprises a nucleic acid construct comprising nucleic acids encoding polypeptides in a set order. In one embodiment, the 5′ to 3′ order of polypeptides encoded is DruA, DruB, DruC, DruD, and DruE. In one embodiment, the 5′ to 3′ order of polypeptides encoded is DruB, DruC, DruD, and DruE. In one embodiment, the 5′ to 3′ order of polypeptides encoded is DruB, DruC, DruD, DruE, and DruA.

[0776] In some embodiments, the 5′ to 3′ order of polypeptides is random, for example any order of DruA, DruB, DruC, DruD, and DruE. In some embodiments, the 5′ to 3′ order of polypeptides is random, for example any order of DruB, DruC, DruD, and DruE.

[0777] In some embodiments the 5′ to 3′ order of polypeptides does not affect the anti-phage activity. In some embodiments the 5′ to 3′ order of polypeptides does affect the anti-phage activity.

[0778] In some embodiments, a Druantia Type I defense system having an anti-phage activity comprises a nucleic acid construct comprising genes in a set order. In some embodiment, the 5′ to 3′ order of genes is druA, druB, druC, druD, and druE. In some embodiment, the 5′ to 3′ order of genes is druB, druC, druD, and druE. In some embodiment, the 5′ to 3′ order of genes is druB, druC, druD, druE, and druA.

[0779] In some embodiments, the 5′ to 3′ order of genes is random, for example any order of druA, druB, druC, druD, and druE. In some embodiments, the 5′ to 3′ order of genes is random, for example any order of druB, druC, druD, and druE.

[0780] In some embodiments the 5′ to 3′ order of genes does not affect the anti-phage activity. In some embodiments the 5′ to 3′ order of genes does affect the anti-phage activity.

[0781] In some embodiments, a Druantia Type II defense system (Defense System IIIb) having an anti-phage activity comprises a nucleic acid construct comprising a nucleic acid sequence encoding a DruM polypeptide comprising a COG0270 domain or a pfam00145 domain or a combination thereof, a DruF polypeptide, a DruG polypeptide, and a DruE polypeptide comprising a pfam00270 domain or a pfam00271 domain or a pfam09369 domain or a DUF1998 domain or any combination thereof. In some embodiments, a Druantia Type II defense system (Defense System IIIb) having an anti-phage activity comprises a nucleic acid construct comprising a nucleic acid sequence encoding a DruM polypeptide comprising a COG0270 domain or a pfam00145 domain or a combination thereof, a DruF polypeptide wherein said DruF polypeptide is encoded by a gene positioned within 5 genes of a gene encoding said DruM polypeptide and said DruE polypeptide, a DruG polypeptide wherein said DruG polypeptide is encoded by a gene positioned within 5 genes of a gene encoding said DruM polypeptide and said DruE polypeptide, and a DruE polypeptide comprising a pfam00270 domain or a pfam00271 domain or a pfam09369 domain or a DUF1998 domain or any combination thereof.

[0782] In some embodiments, a Druantia Type II defense system (Defense System IIIb) having an anti-phage activity comprises a DruM polypeptide comprising a COG0270 domain or a pfam00145 domain or a combination thereof, a DruF polypeptide, a DruG polypeptide, and a DruE polypeptide comprising a pfam00270 domain or a pfam00271 domain or a pfam09369 domain or a DUF1998 domain or any combination thereof. In some embodiments, a Druantia Type II defense system (Defense System IIIb) having an anti-phage activity comprises a DruM polypeptide comprising a COG0270 domain or a pfam00145 domain or a combination thereof, a DruF polypeptide wherein said DruF polypeptide is encoded by a gene positioned within 5 genes of a gene encoding said DruM polypeptide and said DruE polypeptide, a DruG polypeptide wherein said DruG polypeptide is encoded by a gene positioned within 5 genes of a gene encoding said DruM polypeptide and said DruE polypeptide, and a DruE polypeptide comprising a pfam00270 domain or a pfam00271 domain or a pfam09369 domain or a DUF1998 domain or any combination thereof.

[0783] In some embodiments, a Defense System IIIb comprises a DruM polypeptide comprising a pfam00145 domain or a COG0270 domain or a combination thereof, or comprising an amino acid sequence having at least 80% identity to a sequence selected from the group referenced in Table 10 rows 124-295 columns AD and AE; or a DruF polypeptide comprising an amino acid sequence having at least 80% identity to a sequence selected from the group referenced in Table 10 rows 124-295 columns AH and AI; or a DruG polypeptide comprising an amino acid sequence having at least 80% identity to a sequence selected from the group referenced in Table 10 rows 124-295 columns AL and AM; or a DruE polypeptide comprising a pfam00270 domain or a pfam00271 domain or a pfam09369 domain or a DUF1998 domain or a combination thereof, or comprising an amino acid sequence having at least 80% identity to a sequence selected from the group referenced in Table 10 rows 2-1343 columns Z and AA; or any combination thereof.

[0784] In some embodiments a Defense System IIIb comprises at least two different polypeptide components selected from a DruM polypeptide comprising a pfam00145 domain or a COG0270 domain or a combination thereof, or comprising an amino acid sequence having at least 80% identity to a sequence selected from the group referenced in Table 10 rows 124-295 columns AD and AE; or a DruF polypeptide comprising an amino acid sequence having at least 80% identity to a sequence selected from the group referenced in Table 10 rows 124-295 columns AH and AI; or a DruG polypeptide comprising an amino acid sequence having at least 80% identity to a sequence selected from the group referenced in Table 10 rows 124-295 columns AL and AM; or a DruE polypeptide comprising a pfam00270 domain or a pfam00271 domain or a pfam09369 domain or a DUF1998 domain or a combination thereof, or comprising an amino acid sequence having at least 80% identity to a sequence selected from the group referenced in Table 10 rows 2-1343 columns Z and AA; or any combination thereof. In some embodiments a Defense System IIIb comprises at least three different polypeptide components selected from a DruM polypeptide comprising a pfam00145 domain or a COG0270 domain or a combination thereof, or comprising an amino acid sequence having at least 80% identity to a sequence selected from the group referenced in Table 10 rows 124-295 columns AD and AE; or a DruF polypeptide comprising an amino acid sequence having at least 80% identity to a sequence selected from the group referenced in Table 10 rows 124-295 columns AH and AI; or a DruG polypeptide comprising an amino acid sequence having at least 80% identity to a sequence selected from the group referenced in Table 10 rows 124-295 columns AL and AM; or a DruE polypeptide comprising a pfam00270 domain or a pfam00271 domain or a pfam09369 domain or a DUF1998 domain or a combination thereof, or comprising an amino acid sequence having at least 80% identity to a sequence selected from the group referenced in Table 10 rows 2-1343 columns Z and AA; or any combination thereof. In some embodiments a Defense System IIIb comprises four different polypeptide components selected from a DruM polypeptide comprising a pfam00145 domain or a COG0270 domain or a combination thereof, or comprising an amino acid sequence having at least 80% identity to a sequence selected from the group referenced in Table 10 rows 124-295 columns AD and AE; or a DruF polypeptide comprising an amino acid sequence having at least 80% identity to a sequence selected from the group referenced in Table 10 rows 124-295 columns AH and AI; or a DruG polypeptide comprising an amino acid sequence having at least 80% identity to a sequence selected from the group referenced in Table 10 rows 124-295 columns AL and AM; or a DruE polypeptide comprising a pfam00270 domain or a pfam00271 domain or a pfam09369 domain or a DUF1998 domain or a combination thereof, or comprising an amino acid sequence having at least 80% identity to a sequence selected from the group referenced in Table 10 rows 2-1343 columns Z and AA; or any combination thereof.

[0785] In some embodiments, a functional Defense System IIIb comprises at least two different polypeptide components selected from a DruM polypeptide comprising a pfam00145 domain or a COG0270 domain or a combination thereof, or comprising an amino acid sequence having at least 80% identity to a sequence selected from the group referenced in Table 10 rows 124-295 columns AD and AE; or a DruF polypeptide comprising an amino acid sequence having at least 80% identity to a sequence selected from the group referenced in Table 10 rows 124-295 columns AH and AI; or a DruG polypeptide comprising an amino acid sequence having at least 80% identity to a sequence selected from the group referenced in Table 10 rows 124-295 columns AL and AM; or a DruE polypeptide comprising a pfam00270 domain or a pfam00271 domain or a pfam09369 domain or a DUF1998 domain or a combination thereof, or comprising an amino acid sequence having at least 80% identity to a sequence selected from the group referenced in Table 10 rows 2-1343 columns Z and AA; or any combination thereof. In some embodiments, a functional Defense System IIIb comprises at least three different polypeptide components selected from a DruM polypeptide comprising a pfam00145 domain or a COG0270 domain or a combination thereof, or comprising an amino acid sequence having at least 80% identity to a sequence selected from the group referenced in Table 10 rows 124-295 columns AD and AE; or a DruF polypeptide comprising an amino acid sequence having at least 80% identity to a sequence selected from the group referenced in Table 10 rows 124-295 columns AH and AI; or a DruG polypeptide comprising an amino acid sequence having at least 80% identity to a sequence selected from the group referenced in Table 10 rows 124-295 columns AL and AM; or a DruE polypeptide comprising a pfam00270 domain or a pfam00271 domain or a pfam09369 domain or a DUF1998 domain or a combination thereof, or comprising an amino acid sequence having at least 80% identity to a sequence selected from the group referenced in Table 10 rows 2-1343 columns Z and AA; or any combination thereof. In some embodiments, a functional Defense System IIIb comprises four different polypeptide components selected from a DruM polypeptide comprising a pfam00145 domain or a COG0270 domain or a combination thereof, or comprising an amino acid sequence having at least 80% identity to a sequence selected from the group referenced in Table 10 rows 124-295 columns AD and AE; or a DruF polypeptide comprising an amino acid sequence having at least 80% identity to a sequence selected from the group referenced in Table 10 rows 124-295 columns AH and AI; or a DruG polypeptide comprising an amino acid sequence having at least 80% identity to a sequence selected from the group referenced in Table 10 rows 124-295 columns AL and AM; or a DruE polypeptide comprising a pfam00270 domain or a pfam00271 domain or a pfam09369 domain or a DUF1998 domain or a combination thereof, or comprising an amino acid sequence having at least 80% identity to a sequence selected from the group referenced in Table 10 rows 2-1343 columns Z and AA; or any combination thereof.

[0786] In some embodiments, a Druantia Type II defense system (Defense System IIIb) having an anti-phage activity comprises a nucleic acid construct comprising a nucleic acid sequence comprising a druM gene, a druF gene, a druG gene, and a druE gene.

[0787] In some embodiments, the Druantia Type II anti-phage defense system comprises a nucleic acid construct comprising nucleic acid sequences encoding a gene cassette comprising druM, druF, druG, and druE genes. In some embodiments, the Type II Druantia anti-phage defense system comprises a nucleic acid construct comprising nucleic acid sequences encoding a gene cassette comprising druM, druF, druG, and druE genes.

[0788] In some embodiments, a construct comprising the Type II Druantia anti-phage defense system encodes one component of the defense system, whereby multiple constructs may be used to assemble the functional defense system. In some embodiments, the components of a Druantia defense system comprise polypeptides DruM, DruF, DruG, and DruE.

[0789] In some embodiments, a construct comprising the Druantia Type II anti-phage defense system encodes one component of the defense system, whereby multiple constructs may be used to assemble the functional defense system. In some embodiments, the components of a Druantia defense system comprise genes druM, druF, druG, and druE.

[0790] In some embodiments, the components of a Druantia Type II defense system consists of genes druM, druF, druG, and druE.

[0791] In some embodiments, the components of a Druantia Type II defense system comprise nucleic acid sequences encoding a DruM polypeptide, a DruF polypeptide, a DruG polypeptide, and a DruE polypeptide.

[0792] In some embodiments, the components of a Druantia Type II defense system consist of nucleic acid sequences encoding a DruM polypeptide, a DruF polypeptide, a DruG polypeptide, and a DruE polypeptide.

[0793] In some embodiments, a construct comprising the Druantia Type II defense system encodes one component of the defense system, whereby a second, third, or fourth, construct may be used to assemble the functional defense system. In some embodiments, a construct comprising the Druantia defense system encodes one component of the defense system, whereby additional constructs may be used to assemble the functional defense system. For example, in some embodiments each of DruM, DruF, DruG, and DruE may be encoded by nucleic acid sequences comprised in different constructs, wherein expression of the combination of constructs produces a functional Druantia Type II defense system.

[0794] In some embodiments, the components making up a functional Druantia Type II anti-phage defense system comprise a DruM polypeptide, a DruF polypeptide, a DruG polypeptide, and a DruE polypeptide, each encoded by a druM, druF, druG, or druE gene, respectively.

[0795] In some embodiments, a Druantia Type II defense system having an anti-phage activity comprises a nucleic acid encoding a DruM polypeptide. In some embodiments, a Druantia Type II defense system having an anti-phage activity comprises a nucleic acid encoding a DruF polypeptide. In some embodiments, a Druantia Type II defense system having an anti-phage activity comprises a nucleic acid encoding a DruG polypeptide. In some embodiments, a Druantia Type II defense system having an anti-phage activity comprises a nucleic acid encoding a DruE polypeptide.

[0796] In some embodiments, a Druantia Type II defense system having an anti-phage activity comprises a nucleic acid encoding a DruM polypeptide and a DruE polypeptide. In some embodiments, a Druantia defense system having an anti-phage activity comprises a nucleic acid encoding a DruF polypeptide and a DruE polypeptide. In some embodiments, a Druantia Type II defense system having an anti-phage activity comprises a nucleic acid encoding a DruG polypeptide and a DruE polypeptide. In some embodiments, a Druantia defense system having an anti-phage activity comprises a nucleic acid encoding a DruM polypeptide, a DruF polypeptide, and a DruE polypeptide. In some embodiments, a Druantia Type II defense system having an anti-phage activity comprises a nucleic acid encoding a DruM polypeptide, a DruG polypeptide, and a DruE polypeptide. In some embodiments, a Druantia Type II defense system having an anti-phage activity comprises a nucleic acid encoding a DruM polypeptide, a DruF polypeptide, and a DruG polypeptide. In some embodiments, a Druantia Type II defense system having an anti-phage activity comprises a nucleic acid encoding a DruF polypeptide, a DruG polypeptide, and a DruE polypeptide. In some embodiments, a Druantia Type II defense system having an anti-phage activity comprises a nucleic acid encoding a DruF polypeptide and a DruG polypeptide.

[0797] In some embodiments, a Druantia Type II defense system having an anti-phage activity comprise a nucleic acid comprising a druM gene. In some embodiments, a Druantia Type II defense system having an anti-phage activity comprise a nucleic acid comprising a druF gene. In some embodiments, a Druantia Type II defense system having an anti-phage activity comprise a nucleic acid comprising a druG gene. In some embodiments, a Druantia Type II defense system having an anti-phage activity comprise a nucleic acid comprising a druE gene.

[0798] In some embodiments, a Druantia Type II defense system having an anti-phage activity comprises a nucleic acid construct comprising nucleic acids encoding polypeptides in a set order. In one embodiment, the 5′ to 3′ order of polypeptides encoded is DruM, DruF, DruG, and DruE.

[0799] In some embodiments, the 5′ to 3′ order of polypeptides is random, for example any order of DruM, DruF, DruG, and DruE.

[0800] In some embodiments the 5′ to 3′ order of polypeptides does not affect the anti-phage activity. In some embodiments the 5′ to 3′ order of polypeptides does affect the anti-phage activity.

[0801] In some embodiments, a Druantia Type II defense system having an anti-phage activity comprises a nucleic acid construct comprising genes in a set order. Non-limiting examples of the 5′ to 3′ order or genes comprises druM, druF, druG, and druE; druF, druG, druE, and drum; druG, druE, druM, and druF; and druE, druM, druG, and druF.

[0802] In some embodiments, the 5′ to 3′ order of genes is random, for example any order of druM, druF, druG, and druE.

[0803] In some embodiments the 5′ to 3′ order of genes does not affect the anti-phage activity. In some embodiments the 5′ to 3′ order of genes does affect the anti-phage activity.

[0804] In some embodiments, a Druantia Type III defense system (Defense System IIIc) having an anti-phage activity comprises a nucleic acid construct comprising a nucleic acid sequence encoding a DruH polypeptide and a DruE polypeptide comprising a pfam00270 domain or a pfam00271 domain or a pfam09369 domain or a DUF1998 domain or any combination thereof. In some embodiments, a Druantia Type III defense system (Defense System IIIc) having an anti-phage activity comprises a nucleic acid construct comprising a nucleic acid sequence encoding a DruH polypeptide and said DruE polypeptide, wherein said DruH polypeptide is encoded by a gene positioned within 5 genes of a gene encoding said DruE polypeptide.

[0805] In some embodiments, a Druantia Type III defense system (Defense System IIIc) having an anti-phage activity comprises a DruH polypeptide and a DruE polypeptide comprising a pfam00270 domain or a pfam00271 domain or a pfam09369 domain or a DUF1998 domain or any combination thereof. In some embodiments, a Druantia Type III defense system (Defense System IIIc) having an anti-phage activity comprises a DruH polypeptide and a DruE polypeptide comprising a pfam00270 domain or a pfam00271 domain or a pfam09369 domain or a DUF1998 domain or any combination thereof, wherein said DruH polypeptide is encoded by a gene positioned within 5 genes of a gene encoding said DruE polypeptide.

[0806] In some embodiments, a Defense System IIIc comprises a DruH polypeptide comprising an amino acid sequence having at least 80% identity to a sequence selected from the group referenced in Table 10 rows 296-1343 columns AP and AQ; or a DruE polypeptide comprising a pfam00270 domain or a pfam00271 domain or a pfam09369 domain or a DUF1998 domain or comprising an amino acid sequence having at least 80% identity to a sequence selected from the group referenced in Table 10 rows 2-1343 columns Z nd AA or a combination thereof; or any combination thereof.

[0807] In some embodiments, a Druantia Type IIII defense system (Defense System IIIc) having an anti-phage activity comprises a nucleic acid construct comprising a nucleic acid sequence comprising a druH gene and a druE gene.

[0808] In some embodiments, the Druantia Type IIII anti-phage defense system comprises a nucleic acid construct comprising nucleic acid sequences encoding a gene cassette comprising druH and druE genes.

[0809] In some embodiments, a construct comprising the Type III Druantia anti-phage defense system encodes one component of the defense system, whereby multiple constructs may be used to assemble the functional defense system. In some embodiments, the components of a Druantia defense system comprise polypeptides DruH and DruE.

[0810] In some embodiments, a construct comprising the Druantia Type III anti-phage defense system encodes one component of the defense system, whereby multiple constructs may be used to assemble the functional defense system. In some embodiments, the components of a Druantia defense system comprise genes druH and druE.

[0811] In some embodiments, the components of a Druantia Type III defense system consists of genes druH and druE.

[0812] In some embodiments, the components of a Druantia Type III defense system comprise nucleic acid sequences encoding a DruH polypeptide and a DruE polypeptide.

[0813] In some embodiments, the components of a Druantia Type III defense system consist of nucleic acid sequences encoding a DruH polypeptide and a DruE polypeptide.

[0814] In some embodiments, a construct comprising the Druantia Type III defense system encodes one component of the defense system, whereby a second construct may be used to assemble the functional defense system. In some embodiments, a construct comprising the Druantia Type III defense system encodes one component of the defense system, whereby an additional construct may be used to assemble the functional defense system. For example, in some embodiments each of DruH and DruE may be encoded by nucleic acid sequences comprised in different constructs, wherein expression of the combination of constructs produces a functional Druantia defense system.

[0815] In some embodiments, the components making up a functional Druantia Type III anti-phage defense system (Defense System IIIc) comprise a DruH polypeptide and a DruE polypeptide, each encoded by a druH and druE gene, respectively. In some embodiments, a Defense System IIIc comprises at least two different polypeptide components selected from DruH and DruE, as described herein. In some embodiments, a functional Defense System IIIc comprises at least two different polypeptide components selected from DruH and DruE, as described herein. In some embodiments, a functional Defense System IIIc having anti-phage activity comprises at least two different polypeptide components selected from DruH and DruE, as described herein.

[0816] In some embodiments, a Druantia Type III defense system having an anti-phage activity comprises a nucleic acid encoding a DruH polypeptide. In some embodiments, a Druantia Type III defense system having an anti-phage activity comprises a nucleic acid encoding a DruE polypeptide.

[0817] In some embodiments, a Druantia Type III defense system having an anti-phage activity comprises a nucleic acid encoding a DruH polypeptide and a DruE polypeptide.

[0818] In some embodiments, a Druantia Type III defense system having an anti-phage activity comprise a nucleic acid comprising a druH gene. In some embodiments, a Druantia Type III defense system having an anti-phage activity comprise a nucleic acid comprising a druE gene.

[0819] In some embodiments, a Druantia Type III defense system having an anti-phage activity comprises a nucleic acid construct comprising nucleic acids encoding polypeptides in a set order. In one embodiment, the 5′ to 3′ order of polypeptides encoded is DruH and DruE. In one embodiment, the 5′ to 3′ order of polypeptides encoded is DruE and DruH.

[0820] In some embodiments, the 5′ to 3′ order of polypeptides is random, for example any order of DruH and DruE.

[0821] In some embodiments the 5′ to 3′ order of polypeptides does not affect the anti-phage activity. In some embodiments the 5′ to 3′ order of polypeptides does affect the anti-phage activity.

[0822] In some embodiments, a Druantia Type III defense system having an anti-phage activity comprises a nucleic acid construct comprising genes in a set order. In some embodiment, the 5′ to 3′ order of genes is druH and druE.

[0823] In some embodiments, the 5′ to 3′ order of genes is random, for example any order of druH and druE.

[0824] In some embodiments the 5′ to 3′ order of genes does not affect the anti-phage activity. In some embodiments the 5′ to 3′ order of genes does affect the anti-phage activity.

[0825] In some embodiments, the Druantia system (Defense Systems IIIa, IIIb, and IIIc) composition and order is as shown in FIG. 3C, FIG. 6A, or FIG. 6B.

[0826] In some embodiments, a Druantia defense system having an anti-phage activity originates from a microbial genome, for example a bacterial or an archaeal genome (Table 10). A skilled artisan would appreciate that the Druantia system is not present in the majority of bacteria and or archaea species.

[0827] In some embodiments, a functional Druantia defense system (Defense System IIIa, Defense System IIIb, and/or Defense System IIIc) comprises a construct comprising nucleic acid sequences encoding polypeptides, wherein the nucleic acid sequence encoding each polypeptide may originate from a different microbial species. In some embodiments, a functional Druantia defense system (Defense System IIIa, Defense System IIIb, and/or Defense System IIIc) comprises a non-naturally occurring combination of polypeptide components. In some embodiments, a functional Druantia defense system (Defense System IIIa, Defense System IIIb, and/or Defense System IIIc) comprises a combination of at least two polypeptides that do not naturally occur together. In some embodiments, a functional Druantia defense system (Defense System IIIa, Defense System IIIb, and/or Defense System IIIc) comprises a combination of at least three polypeptides that do not naturally occur together. In some embodiments, a functional Druantia defense system (Defense System IIIa, Defense System IIIb, and/or Defense System IIIc) comprises a combination of at least four polypeptides that do not naturally occur together. In some embodiments, a functional Druantia defense system (Defense System IIIa, Defense System IIIb, and/or Defense System IIIc) comprises a combination of at least five polypeptides that do not naturally occur together.

[0828] For example, the source of the nucleic acid sequence encoding a DruA polypeptide may be one microbial species, the source of the nucleic acid sequence encoding a DruB polypeptide may be a different microbial species, the source of the nucleic acid sequence encoding a DruC polypeptide may be a different microbial species, the source of the nucleic acid sequence encoding a DruD polypeptide may be a different microbial species, and the source of the nucleic acid sequence encoding a DruE polypeptide may be yet a different microbial species. In some embodiments, the source of the nucleic acid sequence encoding some of the components of the Druantia system Type I (Defense System IIIa; DruA, DruB, DruC, DruD, and DruE) are the same, while the source of others is different. In some embodiments, the source of the nucleic acid sequence encoding the components of the Druantia Type I system (DruA, DruB, DruC, DruD, and DruE) is the same.

[0829] In other embodiments, the source of the nucleic acid sequence encoding a DruM polypeptide may be one microbial species, the source of the nucleic acid sequence encoding a DruF polypeptide may be a different microbial species, the source of the nucleic acid sequence encoding a DruG polypeptide may be a different microbial species, and the source of the nucleic acid sequence encoding a DruE polypeptide may be a different microbial species. In some embodiments, the source of the nucleic acid sequence encoding some of the components of the Druantia Type II system (Defense System IIIb; DruM, DruF, DruG, and DruE) are the same, while the source of others is different. In some embodiments, the source of the nucleic acid sequence encoding the components of the Druantia Type II system (DruM, DruF, DruG, and DruE) is the same.

[0830] In other embodiments, the source of the nucleic acid sequence encoding a DruH polypeptide may be one microbial species, and the source of the nucleic acid sequence encoding a DruE polypeptide may be a different microbial species. In some embodiments, the source of the nucleic acid sequence encoding the components of the Druantia Type III system (Defense System IIIc; DruH and DruE) is the same.

[0831] In some embodiments, a functional Druantia Type I defense system comprises a construct comprising nucleic acid sequences encoding polypeptides, wherein the nucleic acid sequence encoding each polypeptide may originate from a different bacterial species. For example, the source of the nucleic acid sequence encoding a DruA polypeptide may be one bacterial species, the source of the nucleic acid sequence encoding a DruB polypeptide may be a different bacterial species, the source of the nucleic acid sequence encoding a DruC polypeptide may be a different bacterial species, the source of the nucleic acid sequence encoding a DruD polypeptide may be a different bacterial species, and the source of the nucleic acid sequence encoding a DruE polypeptide may be yet a different bacterial species. In some embodiments, the source of the nucleic acid sequence encoding some of the components of the Druantia Type I system (DruA, DruB, DruC, DruD, and DruE) are the same, while the source of others is different. In some embodiments, the source of the nucleic acid sequence encoding the components of the Druantia Type I system (DruA, DruB, DruC, DruD, and DruE) is the same.

[0832] In other embodiments, the source of the nucleic acid sequence encoding a DruM polypeptide may be one bacterial species, the source of the nucleic acid sequence encoding a DruF polypeptide may be a different bacterial species, the source of the nucleic acid sequence encoding a DruG polypeptide may be a different bacterial species, and the source of the nucleic acid sequence encoding a DruE polypeptide may be a different bacterial species. In some embodiments, the source of the nucleic acid sequence encoding some of the components of a functional Druantia Type II system (DruM, DruF, DruG, and DruE) are the same, while the source of others is different. In some embodiments, the source of the nucleic acid sequence encoding the components of a functional Druantia Type II system (DruM, DruF, DruG, and DruE) is the same.

[0833] In other embodiments, in a functional Type III Druantia system, the source of the nucleic acid sequence encoding a DruH polypeptide may be one bacterial species, and the source of the nucleic acid sequence encoding a DruE polypeptide may be a different bacterial species. In some embodiments, the source of the nucleic acid sequence encoding the components of a functional Druantia Type III system (DruH and DruE) is the same.

[0834] In some embodiments, the source of the nucleic acid sequence of any of the components of a Druantia defense system (Defense Systems IIIa [Druantia defense system I], IIIb [Druantia defense system II], and IIIc [Druantia defense system III]) comprises any of the species listed in Table 10.

[0835] In some embodiments, a Druantia Type I defense system having an anti-phage activity comprises a nucleic acid construct comprising non-coding regions between the nucleic acid sequences encoding the polypeptides. In some embodiments, the non-coding regions between the nucleic acid sequences comprises nucleic acid sequence not naturally occurring in the microbial species of origin. In some embodiments, the non-coding regions between the nucleic acid sequences comprises nucleic acid sequence is the naturally occurring in the microbial species of origin.

[0836] In some embodiments, a Druantia Type II defense system having an anti-phage activity comprises a nucleic acid construct comprising non-coding regions between the nucleic acid sequences encoding the polypeptides. In some embodiments, the non-coding regions between the nucleic acid sequences comprises nucleic acid sequence not naturally occurring in the microbial species of origin. In some embodiments, the non-coding regions between the nucleic acid sequences comprises nucleic acid sequence is the naturally occurring in the microbial species of origin.

[0837] In some embodiments, a Druantia Type III defense system having an anti-phage activity comprises a nucleic acid construct comprising non-coding regions between the nucleic acid sequences encoding the polypeptides. In some embodiments, the non-coding regions between the nucleic acid sequences comprises nucleic acid sequence not naturally occurring in the microbial species of origin. In some embodiments, the non-coding regions between the nucleic acid sequences comprises nucleic acid sequence is the naturally occurring in the microbial species of origin.

[0838] In some embodiments, a Druantia Type I system disclosed herein comprises a multi-gene phage resistance system broadly distributed in microbial genomes, for example but not limited to bacteria and archaea. Yet, the majority of bacterial species do not express a Druantia Type I defense system.

[0839] In some embodiments, a Druantia Type II system disclosed herein comprises a multi-gene phage resistance system broadly distributed in microbial genomes, for example but not limited to bacteria and archaea. Yet, the majority of bacterial species do not express a Druantia Type II defense system.

[0840] In some embodiments, a Druantia Type III system disclosed herein comprises a multi-gene phage resistance system broadly distributed in microbial genomes, for example but not limited to bacteria and archaea. Yet, the majority of bacterial species do not express a Druantia Type III defense system.

[0841] According to some embodiments, the Druantia systems' (Type I) components are located in a gene cluster (a cassette of genes) in a microbial cell genome. According to some embodiments, the Druantia system components are located in close proximity (e.g. positioned within 20 genes, 10 genes, 5 genes or less one from the other) in a genome of a prokaryotic cell. According to some embodiments the prokaryotic cell expresses an endogenous Druantia Type I defense system. According to some embodiments, the prokaryotic cell expresses an endogenous functional Druantia Type I defense system. According to some embodiments, the species of prokaryotic cell is selected from the group consisting of the species listed in Table 10.

[0842] According to some embodiments a prokaryotic cell expresses a non-endogenous Druantia Type I defense system. According to some embodiments, a prokaryotic cell expresses a non-endogenous functional Druantia Type I defense system. According to some embodiments, the species of prokaryotic cell expressing a non-endogenous functional Druantia Type I defense system is selected from the group consisting of the species listed in Table 10.

[0843] According to some embodiments, the Druantia systems' (Type II) components are located in a gene cluster (a cassette of genes) in a microbial cell genome. According to some embodiments, the Druantia system components are located in close proximity (e.g. positioned within 20 genes, 10 genes, 5 genes or less one from the other) in a genome of a prokaryotic cell. According to some embodiments the prokaryotic cell expresses an endogenous Druantia Type II defense system. According to some embodiments, the prokaryotic cell expresses an endogenous functional Druantia Type II defense system. According to some embodiments, the species of prokaryotic cell is selected from the group consisting of the species listed in Table 10.

[0844] According to some embodiments a prokaryotic cell expresses a non-endogenous Druantia Type II defense system. According to some embodiments, a prokaryotic cell expresses a non-endogenous functional Druantia Type II defense system. According to some embodiments, the species of prokaryotic cell expressing a non-endogenous functional Druantia Type II defense system is selected from the group consisting of the species listed in Table 10.

[0845] According to some embodiments, the Druantia systems' (Type III) components are located in a gene cluster (a cassette of genes) in a microbial cell genome. According to some embodiments, the Druantia system components are located in close proximity (e.g. positioned within 20 genes, 10 genes, 5 genes or less one from the other) in a genome of a prokaryotic cell. According to some embodiments the prokaryotic cell expresses an endogenous Druantia Type IIII defense system. According to some embodiments, the prokaryotic cell expresses an endogenous functional Druantia Type IIII defense system. According to some embodiments, the species of prokaryotic cell is selected from the group consisting of the species listed in Table 10.

[0846] According to some embodiments a prokaryotic cell expresses a non-endogenous Druantia Type III defense system. According to some embodiments, a prokaryotic cell expresses a non-endogenous functional Druantia Type III defense system. According to some embodiments, the species of prokaryotic cell expressing a non-endogenous functional Druantia Type III defense system is selected from the group consisting of the species listed in Table 10.

[0847] In some embodiments, Druantia Type I defense system components comprise DruA, DruB, DruC, DruD, and DruE polypeptides. In some embodiments, a Druantia Type I defense system's components comprise functional portions of DruA, DruB, DruC, DruD, and DruE polypeptides.

[0848] In some embodiments, Druantia Type II defense system's components comprise DruM, DruF, DruG, and DruE polypeptides. In some embodiments, a Druantia Type II defense system's components comprise functional portions of DruM, DruF, DruG, and DruE polypeptides.

[0849] In some embodiments, Druantia Type III defense system components comprise DruH and DruE polypeptides. In some embodiments, a Druantia Type III defense system components comprise functional portions of DruH and DruE polypeptides.

[0850] In some embodiments, the Druantia Type I defense system components are encoded by druA, druB, druC, druD, and druE genes. In some embodiments, the Druantia Type I defense system components are encoded by a portion of druA, druB, druC, druD, and druE genes, where the portions of the gene encode functional portions of the respective polypeptides.

[0851] In some embodiments, the Druantia Type II defense system components are encoded by druM, druF, druG, and druE genes. In some embodiments, the Druantia Type II defense system components are encoded by a portion of druM, druF, druG, and druE genes, where the portions of the gene encode functional portions of the respective polypeptides.

[0852] In some embodiments, the Druantia Type III defense system components are encoded by druH and druE genes. In some embodiments, the Druantia Type III defense system components are encoded by a portion of druH and druE genes, where the portions of the gene encode functional portions of the respective polypeptides.

[0853] Non-limiting embodiments of endogenous Druantia systems (Defense Systems IIIa, IIIb, and IIIc) and the respective location of their components are provided in Table 10 herein.

[0854] In some embodiments, the components of a Druantia system may be identified by the presence of similar domains present within each component. In some embodiments, domains comprise pfam domains and or clusters of orthologous groups (COG) domains.

[0855] In some embodiments, the term “DruA” refers to the polynucleotide or expression product e.g., the polypeptide encoded by the druA gene. In some embodiments, the term “DruA” refers to a DruA polypeptide. In some embodiments, the druA gene encodes a polypeptide comprising a pfam14236 domain. In some embodiments, the druA gene encodes a polypeptide comprising a DUF4338 domain. In some embodiments, the druA gene encodes a polypeptide comprising a pfam14236 domain and a DUF4338 domain. In some embodiments, the DruA polypeptide comprises a pfam14236 domain. In some embodiments, the DruA polypeptide comprises a DUF4338 domain. In some embodiments, the DruA polypeptide comprises a pfam14236 domain and a DUF4338 domain.

[0856] In some embodiments, DruA polypeptide is encoded by a gene positioned within 5-60 genes of a gene encoding a DruB, DruC, DruD, or DruE polypeptide, or any combination thereof, in a genome of a prokaryotic cell. In some embodiments, DruA polypeptide is encoded by a gene positioned within 5 genes upstream (5′) or downstream (3′) to a gene encoding a DruB, DruC, DruD, or DruE polypeptide, or any combination thereof, in a genome of a prokaryotic cell. In some embodiments, DruA polypeptide is encoded by a gene positioned within 5 genes upstream (5′) and downstream (3′) to a gene encoding a DruB, DruC, DruD, or DruE, or any combination thereof, polypeptide in a genome of a prokaryotic cell.

[0857] In some embodiments, DruA and DruB are encoded by genes positioned sequentially 5′ to 3′ in a genome of a prokaryotic cell. In some embodiments, DruA and DruB are encoded by genes positioned contiguously 5′ to 3′ in a genome of a prokaryotic cell. In some embodiments, DruA, DruB, and DruC are encoded by genes positioned sequentially 5′ to 3′ in a genome of a prokaryotic cell. In some embodiments, DruA, DruB, and DruC are encoded by genes positioned contiguously 5′ to 3′ in a genome of a prokaryotic cell. In some embodiments, DruA, DruB, DruC, and DruD are encoded by genes positioned sequentially 5′ to 3′ in a genome of a prokaryotic cell. In some embodiments, DruA, DruB, DruC, and DruD are encoded by genes positioned contiguously 5′ to 3′ in a genome of a prokaryotic cell. In some embodiments, DruA, DruB, DruC, DruD, and DruE are encoded by genes positioned sequentially 5′ to 3′ in a genome of a prokaryotic cell. In some embodiments, DruA, DruB, DruC, DruD, and DruE are encoded by genes positioned contiguously 5′ to 3′ in a genome of a prokaryotic cell.

[0858] In some embodiments, druA and druB genes are positioned sequentially 5′ to 3′ in a genome of a prokaryotic cell. In some embodiments, druA and druB genes are positioned contiguously 5′ to 3′ in a genome of a prokaryotic cell. In some embodiments, druA, druB, and druC genes are positioned sequentially 5′ to 3′ in a genome of a prokaryotic cell. In some embodiments, druA, druB, and druC genes are positioned contiguously 5′ to 3′ in a genome of a prokaryotic cell. In some embodiments, druA, druB, druC, and druD genes are positioned sequentially 5′ to 3′ in a genome of a prokaryotic cell. In some embodiments, druA, druB, druC, and druD genes are positioned contiguously 5′ to 3′ in a genome of a prokaryotic cell. In some embodiments, druA, druB, druC, druD, and druE genes are positioned sequentially 5′ to 3′ in a genome of a prokaryotic cell. In some embodiments, druA, druB, druC, druD, and druE genes are positioned contiguously 5′ to 3′ in a genome of a prokaryotic cell.

[0859] In some embodiments, a DruA polypeptide is about 404 amino acids long (median gene size).

[0860] In some embodiments, the DruA polypeptide comprises the amino acid sequence having at least 80% homology to a sequence selected from the group consisting of the polypeptides referenced in Table 10, rows 2-123, columns J and K. In some embodiments, the DruA polypeptide comprises the amino acid sequence having at least 80% homology within similar domain regions within a sequence selected from the group consisting of the polypeptides referenced in Table 10, rows 2-123, columns J and K. In some embodiments, the DruA polypeptide comprises a homolog of a polypeptide having the amino acid sequences set forth in the polypeptides referenced in Table 10, rows 2-123, columns J and K.

[0861] In some embodiments, the DruA polypeptide comprises the amino acid sequence having at least 80% identity to a sequence selected from the group consisting of the polypeptides referenced in Table 10, rows 2-123, columns J and K. In some embodiments, the DruA polypeptide comprises the amino acid sequence having at least 80% identity within similar domain regions within a sequence selected from the group consisting of the polypeptides referenced in Table 10, rows 2-123, columns J and K.

[0862] In some embodiments, the DruA polypeptide comprises an amino acid sequence having at least 80%, at least 85%, at least 90%, or at least 95% homology to a sequence selected from the group consisting of the polypeptides referenced in Table 10, rows 2-123, columns J and K. In some embodiments, the DruA polypeptide comprises the amino acid sequence having at least 80%, 85%, 90%, 95% homology within similar domain regions within a sequence selected from the group consisting of the polypeptides referenced in Table 10, rows 2-123, columns J and K. In some embodiments, the DruA polypeptide comprises an amino acid sequence having at least 80%, at least 85%, at least 90%, or at least 95% identity to a sequence selected from the group consisting of the polypeptides referenced in Table 10, rows 2-123, columns J and K. In some embodiments, the DruA polypeptide comprises the amino acid sequence having at least 80%, 85%, 90%, 95% identity within similar domain regions within a sequence selected from the group consisting of the polypeptides referenced in Table 10, rows 2-123, columns J and K. In some embodiments, the DruA polypeptide comprises an amino acid sequence selected from the group consisting of the polypeptides referenced in Table 10, rows 2-123, columns J and K.

[0863] In some embodiments, the DruA polypeptide comprises an amino acid sequence encoded by a nucleic acid sequence having at least 80%, at least 85%, at least 90%, or at least 95% homology to a sequence selected from the group consisting of the polynucleotides referenced in Table 10, rows 2-123, columns J and L. In some embodiments, the DruA polypeptide comprises the amino acid sequence encoded by a nucleic acid sequence having at least 80%, 85%, 90%, 95% homology within similar domain regions within a sequence selected from the group consisting of the polynucleotides referenced in Table 10, rows 2-123, columns J and L. In some embodiments, the DruA polypeptide comprises an amino acid sequence encoded by a nucleic acid sequence having at least 80%, at least 85%, at least 90%, or at least 95% identity to a sequence selected from the group consisting of the polynucleotides referenced in Table 10, rows 2-123, columns J and L. In some embodiments, the DruA polypeptide comprises the amino acid sequence encoded by a nucleic acid sequence having at least 80%, 85%, 90%, 95% homology within similar domain regions within a sequence selected from the group consisting of the polynucleotides referenced in Table 10, rows 2-123, columns J and L. In some embodiments, the DruA polypeptide comprises an amino acid sequence encoded from a nucleic acid sequence selected from the group consisting of the polynucleotides referenced in Table 10, rows 2-123, columns J and L.

[0864] In some embodiments, the nucleic acid sequence of a druA gene comprises a nucleic acid sequence having at least 80%, at least 85%, at least 90%, or at least 95% homology to a sequence selected from the group consisting of the polynucleotides referenced in Table 10, rows 2-123, columns J and L. In some embodiments, the druA gene comprises a nucleic acid sequence having at least 80%, 85%, 90%, 95% homology within encoded similar domain regions in comparison with nucleotide sequence encoding these domain within a sequence selected from the group consisting of the polynucleotides referenced in Table 10, rows 2-123, columns J and L. In some embodiments, the nucleic acid sequence of a druA gene comprises a nucleic acid sequence having at least 80%, at least 85%, at least 90%, or at least 95% identity to a sequence selected from the group consisting of the polynucleotides referenced in Table 10, rows 2-123, columns J and L. In some embodiments, the druA gene comprises a nucleic acid sequence having at least 80%, 85%, 90%, 95% identity within encoded similar domain regions in comparison with nucleotide sequence encoding these domain within a sequence selected from the group consisting of the polynucleotides referenced in Table 10, rows 2-123, columns J and L. In some embodiments, the nucleic acid sequence of a druA gene comprises a nucleic acid sequence selected from the group consisting of the polynucleotides referenced in Table 10, rows 2-123, columns J and L.

[0865] As used herein, the term “DruB” refers to the polynucleotide or expression product e.g., polypeptide encoded by the druB gene. In some embodiments, the term “DruB” refers to a DruB polypeptide.

[0866] In some embodiments, DruB polypeptide is encoded by a gene positioned within 5-60 genes of a gene encoding a DruC, a DruD, or a DruE polypeptide, or any combination thereof in a genome of a prokaryotic cell. In some embodiments, a DruB-DruC fusion polypeptide is encoded by a gene positioned within 5-60 genes of a gene encoding a DruD or a DruE polypeptide or a combination thereof. In some embodiments, DruB polypeptide is encoded by a gene positioned within 5 genes upstream (5′) or downstream (3′) to a gene encoding a DruC, a DruD, or a DruE polypeptide or any combination thereof in a genome of a prokaryotic cell. In some embodiments, DruB-DruC fusion polypeptide is encoded by a gene positioned within 5 genes upstream (5′) or downstream (3′) to a gene encoding a DruD or a DruE polypeptide or a combination thereof in a genome of a prokaryotic cell. In some embodiments, DruB polypeptide is encoded by a gene positioned within 5 genes upstream (5′) and downstream (3′) to a gene encoding a DruC, a DruD, or a DruE polypeptide or a combination thereof in a genome of a prokaryotic cell.

[0867] In some embodiments, DruB and DruC are encoded by genes positioned sequentially 5′ to 3′ in a genome of a prokaryotic cell. In some embodiments DruB and DruC are encoded by genes positioned contiguously 5′ to 3′ in a genome of a prokaryotic cell. In some embodiments, DruB, DruC, and DruD are encoded by genes positioned sequentially 5′ to 3′ in a genome of a prokaryotic cell. In some embodiments DruB, DruC, and DruD are encoded by genes positioned contiguously 5′ to 3′ in a genome of a prokaryotic cell. In some embodiments, DruB, DruC, DruD, and DruE are encoded by genes positioned sequentially 5′ to 3′ in a genome of a prokaryotic cell. In some embodiments DruB, DruC, DruD, and DruE are encoded by genes positioned contiguously 5′ to 3′ in a genome of a prokaryotic cell. In some embodiments, DruB, DruC, and DruD are encoded by genes positioned sequentially 5′ to 3′ in a genome of a prokaryotic cell. In some embodiments DruB, DruC, and DruD are encoded by genes positioned contiguously 5′ to 3′ in a genome of a prokaryotic cell. In some embodiments, DruB, DruC, DruD, DruE, and DruA are encoded by genes positioned sequentially 5′ to 3′ in a genome of a prokaryotic cell. In some embodiments DruB, DruC, DruD, DruE, and DruA are encoded by genes positioned contiguously 5′ to 3′ in a genome of a prokaryotic cell.

[0868] In some embodiments, druB and druC genes are positioned sequentially 5′ to 3′ in a genome of a prokaryotic cell. In some embodiments, druB and druC genes are positioned contiguously 5′ to 3′ in a genome of a prokaryotic cell. In some embodiments, druB, druC, and druD genes are positioned sequentially 5′ to 3′ in a genome of a prokaryotic cell. In some embodiments, druB, druC, and druD genes are positioned contiguously 5′ to 3′ in a genome of a prokaryotic cell. In some embodiments, druB, druC, druD, and druE genes are positioned sequentially 5′ to 3′ in a genome of a prokaryotic cell. In some embodiments, druB, druC, druD, and druE genes are positioned contiguously 5′ to 3′ in a genome of a prokaryotic cell. In some embodiments, druB, druC, druD, druE, and druA genes are positioned sequentially 5′ to 3′ in a genome of a prokaryotic cell. In some embodiments, druB, druC, druD, druE, and druA genes are positioned contiguously 5′ to 3′ in a genome of a prokaryotic cell.

[0869] In some embodiments, a DruB polypeptide is about 531 amino acids long (median gene size).

[0870] In some embodiments, the DruB polypeptide comprises the amino acid sequence having at least 80% homology to a sequence selected from the group consisting of the polypeptides referenced in Table 10, rows 2-123, columns N and O. In some embodiments, the DruB polypeptide comprises the amino acid sequence having at least 80% homology within similar domain regions within a sequence selected from the group consisting of the polypeptides referenced in Table 10, rows 2-123, columns N and O. In some embodiments, the DruB polypeptide comprises a homolog of a polypeptide having the amino acid sequences set forth in the polypeptides referenced in Table 10, rows 2-123, columns N and O.

[0871] In some embodiments, the DruB polypeptide comprises the amino acid sequence having at least 80% identity to a sequence selected from the group consisting of the polypeptides referenced in Table 10, rows 2-123, columns N and O. In some embodiments, the DruB polypeptide comprises the amino acid sequence having at least 80% identity within similar domain regions within a sequence selected from the group consisting of the polypeptides referenced in Table 10, rows 2-123, columns N and O.

[0872] In some embodiments, the DruB polypeptide comprises an amino acid sequence having at least 80%, at least 85%, at least 90%, or at least 95% homology to a sequence selected from the group consisting of the polypeptides referenced in Table 10, rows 2-123, columns N and O. In some embodiments, the DruB polypeptide comprises the amino acid sequence having at least 80%, 85%, 90%, 95% homology within similar domain regions within a sequence selected from the group consisting of the polypeptides referenced in Table 10, rows 2-123, columns N and O. In some embodiments, the DruB polypeptide comprises an amino acid sequence having at least 80%, at least 85%, at least 90%, or at least 95% identity to a sequence selected from the group consisting of the polypeptides referenced in Table 10, rows 2-123, columns N and O. In some embodiments, the DruB polypeptide comprises the amino acid sequence having at least 80%, 85%, 90%, 95% identity within similar domain regions within a sequence selected from the group consisting of the polypeptides referenced in Table 10, rows 2-123, columns N and O. In some embodiments, the DruB polypeptide comprises an amino acid sequence selected from the group consisting of the polypeptides referenced in Table 10, rows 2-123, columns N and O.

[0873] In some embodiments, the DruB polypeptide comprises an amino acid sequence encoded by a nucleic acid sequence having at least 80%, at least 85%, at least 90%, or at least 95% homology to a sequence selected from the group consisting of the polynucleotides referenced in Table 10, rows 2-123, columns N and P. In some embodiments, the DruB polypeptide comprises the amino acid sequence encoded by a nucleic acid sequence having at least 80%, 85%, 90%, 95% homology within similar domain regions within a sequence selected from the group consisting of the polynucleotides referenced in Table 10, rows 2-123, columns N and P. In some embodiments, the DruB polypeptide comprises an amino acid sequence encoded by a nucleic acid sequence having at least 80%, at least 85%, at least 90%, or at least 95% identity to a sequence selected from the group consisting of the polynucleotides referenced in Table 10, rows 2-123, columns N and P. In some embodiments, the DruB polypeptide comprises the amino acid sequence encoded by a nucleic acid sequence having at least 80%, 85%, 90%, 95% homology within similar domain regions within a sequence selected from the group consisting of the polynucleotides referenced in Table 10, rows 2-123, columns N and P. In some embodiments, the DruB polypeptide comprises an amino acid sequence encoded from a nucleic acid sequence selected from the group consisting of the polynucleotides referenced in Table 10, rows 2-123, columns N and P.

[0874] In some embodiments, the nucleic acid sequence of a druB gene comprises a nucleic acid sequence having at least 80%, at least 85%, at least 90%, or at least 95% homology to a sequence selected from the group consisting of the polynucleotides referenced in Table 10, rows 2-123, columns N and P. In some embodiments, the druB gene comprises a nucleic acid sequence having at least 80%, 85%, 90%, 95% homology within encoded similar domain regions in comparison with nucleotide sequence encoding these domain within a sequence selected from the group consisting of the polynucleotides referenced in Table 10, rows 2-123, columns N and P. In some embodiments, the nucleic acid sequence of a druB gene comprises a nucleic acid sequence having at least 80%, at least 85%, at least 90%, or at least 95% identity to a sequence selected from the group consisting of the polynucleotides referenced in Table 10, rows 2-123, columns N and P. In some embodiments, the druB gene comprises a nucleic acid sequence having at least 80%, 85%, 90%, 95% identity within encoded similar domain regions in comparison with nucleotide sequence encoding these domain within a sequence selected from the group consisting of the polynucleotides referenced in Table 10, rows 2-123, column L. In some embodiments, the nucleic acid sequence of a druB gene comprises a nucleic acid sequence selected from the group consisting of the polynucleotides referenced in Table 10, rows 2-123, columns N and P.

[0875] In some embodiments, the term “DruC” refers to the polynucleotide or expression product e.g., the polypeptide encoded by the druC gene. In some embodiments, the term “DruC” refers to a DruC polypeptide.

[0876] In some embodiments, DruC polypeptide is encoded by a gene positioned within 5-60 genes of a gene encoding a DruD or DruE polypeptide, or any combination thereof, in a genome of a prokaryotic cell. In some embodiments, DruC polypeptide is encoded by a gene positioned within 5 genes upstream (5′) or downstream (3′) to a gene encoding a DruD or DruE polypeptide, or any combination thereof, in a genome of a prokaryotic cell. In some embodiments, a DruC polypeptide is encoded by a gene positioned within 5 genes upstream (5′) and downstream (3′) to a gene encoding a DruD or DruE polypeptide in a genome of a prokaryotic cell.

[0877] In some embodiments, DruC and DruD are encoded by genes positioned sequentially 5′ to 3′ in a genome of a prokaryotic cell. In some embodiments, DruC and DruD are encoded by genes positioned contiguously 5′ to 3′ in a genome of a prokaryotic cell. In some embodiments, DruC, DruD, and DruE are encoded by genes positioned sequentially 5′ to 3′ in a genome of a prokaryotic cell. In some embodiments, DruC, DruD, and DruE are encoded by genes positioned contiguously 5′ to 3′ in a genome of a prokaryotic cell. In some embodiments, DruC, DruD, DruE, and DruA are encoded by genes positioned sequentially 5′ to 3′ in a genome of a prokaryotic cell. In some embodiments, DruC, DruD, DruE, and DruA are encoded by genes positioned contiguously 5′ to 3′ in a genome of a prokaryotic cell.

[0878] In some embodiments, DruC and DruE polypeptides are encoded by genes positioned sequentially 5′ to 3′ in a genome of a prokaryotic cell. In some embodiments, DruC and DruE polypeptides are encoded by genes positioned contiguously 5′ to 3′ in a genome of a prokaryotic cell.

[0879] In some embodiments, druC and druD genes are positioned sequentially 5′ to 3′ in a genome of a prokaryotic cell. In some embodiments, druC and druD genes are positioned contiguously 5′ to 3′ in a genome of a prokaryotic cell. In some embodiments, druC, druD, and druE genes are positioned sequentially 5′ to 3′ in a genome of a prokaryotic cell. In some embodiments, druC, druD, and druE genes are positioned contiguously 5′ to 3′ in a genome of a prokaryotic cell. In some embodiments, druC, druD, druE, and druA genes are positioned sequentially 5′ to 3′ in a genome of a prokaryotic cell. In some embodiments, druC, druD, druE, and druA genes are positioned contiguously 5′ to 3′ in a genome of a prokaryotic cell.

[0880] In some embodiments, druC and druE genes are positioned sequentially 5′ to 3′ in a genome of a prokaryotic cell. In some embodiments, druC and druE genes are positioned contiguously 5′ to 3′ in a genome of a prokaryotic cell. In some embodiments, druC, druE, and druA genes are positioned sequentially 5′ to 3′ in a genome of a prokaryotic cell. In some embodiments, druC, druE, and druA genes are positioned contiguously 5′ to 3′ in a genome of a prokaryotic cell. In some embodiments, druC and druA genes are positioned sequentially 5′ to 3′ in a genome of a prokaryotic cell. In some embodiments, druC and druA genes are positioned contiguously 5′ to 3′ in a genome of a prokaryotic cell.

[0881] In some embodiments, a DruC polypeptide is about 627 amino acids long (median gene size).

[0882] In some embodiments, the DruC polypeptide comprises the amino acid sequence having at least 80% homology to a sequence selected from the group consisting of the polypeptides referenced in Table 10, rows 2-123, columns R and S. In some embodiments, the DruC polypeptide comprises the amino acid sequence having at least 80% homology within similar domain regions within a sequence selected from the group consisting of the polypeptides referenced in Table 10, rows 2-123, columns R and S. In some embodiments, the DruC polypeptide comprises a homolog of a polypeptide having the amino acid sequences set forth in the polypeptides referenced in Table 10, rows 2-123, columns R and S.

[0883] In some embodiments, the DruC polypeptide comprises the amino acid sequence having at least 80% identity to a sequence selected from the group consisting of the polypeptides referenced in Table 10, rows 2-123, columns R and S. In some embodiments, the DruC polypeptide comprises the amino acid sequence having at least 80% identity within similar domain regions within a sequence selected from the group consisting of the polypeptides referenced in Table 10, rows 2-123, columns R and S.

[0884] In some embodiments, the DruC polypeptide comprises an amino acid sequence having at least 80%, at least 85%, at least 90%, or at least 95% homology to a sequence selected from the group consisting of the polypeptides referenced in Table 10, rows 2-123, columns R and S. In some embodiments, the DruC polypeptide comprises the amino acid sequence having at least 80%, 85%, 90%, 95% homology within similar domain regions within a sequence selected from the group consisting of the polypeptides referenced in Table 10, rows 2-123, columns R and S. In some embodiments, the DruC polypeptide comprises an amino acid sequence having at least 80%, at least 85%, at least 90%, or at least 95% identity to a sequence selected from the group consisting of the polypeptides referenced in Table 10, rows 2-123, columns R and S. In some embodiments, the DruC polypeptide comprises the amino acid sequence having at least 80%, 85%, 90%, 95% identity within similar domain regions within a sequence selected from the group consisting of the polypeptides referenced in Table 10, rows 2-123, columns R and S. In some embodiments, the DruC polypeptide comprises an amino acid sequence selected from the group consisting of the polypeptides referenced in Table 10, rows 2-123, columns R and S.

[0885] In some embodiments, the DruC polypeptide comprises an amino acid sequence encoded by a nucleic acid sequence having at least 80%, at least 85%, at least 90%, or at least 95% homology to a sequence selected from the group consisting of the polynucleotides referenced in Table 10, rows 2-123, columns R and T. In some embodiments, the DruC polypeptide comprises the amino acid sequence encoded by a nucleic acid sequence having at least 80%, 85%, 90%, 95% homology within similar domain regions within a sequence selected from the group consisting of the polynucleotides referenced in Table 10, rows 2-123, columns R and T. In some embodiments, the DruC polypeptide comprises an amino acid sequence encoded by a nucleic acid sequence having at least 80%, at least 85%, at least 90%, or at least 95% identity to a sequence selected from the group consisting of the polynucleotides referenced in Table 10, rows 2-123, columns R and T. In some embodiments, the DruC polypeptide comprises the amino acid sequence encoded by a nucleic acid sequence having at least 80%, 85%, 90%, 95% homology within similar domain regions within a sequence selected from the group consisting of the polynucleotides referenced in Table 10, rows 2-123, columns R and T. In some embodiments, the DruC polypeptide comprises an amino acid sequence encoded from a nucleic acid sequence selected from the group consisting of the polynucleotides referenced in Table 10, rows 2-123, columns R and T.

[0886] In some embodiments, the nucleic acid sequence of a druC gene comprises a nucleic acid sequence having at least 80%, at least 85%, at least 90%, or at least 95% homology to a sequence selected from the group consisting of the polynucleotides referenced in Table 10, rows 2-123, columns R and T. In some embodiments, the druC gene comprises a nucleic acid sequence having at least 80%, 85%, 90%, 95% homology within encoded similar domain regions in comparison with nucleotide sequence encoding these domain within a sequence selected from the group consisting of the polynucleotides referenced in Table 10, rows 2-123, columns R and T. In some embodiments, the nucleic acid sequence of a druC gene comprises a nucleic acid sequence having at least 80%, at least 85%, at least 90%, or at least 95% identity to a sequence selected from the group consisting of the polynucleotides referenced in Table 10, rows 2-123, columns R and T. In some embodiments, the druC gene comprises a nucleic acid sequence having at least 80%, 85%, 90%, 95% identity within encoded similar domain regions in comparison with nucleotide sequence encoding these domain within a sequence selected from the group consisting of the polynucleotides referenced in Table 10, rows 2-123, columns R and T. In some embodiments, the nucleic acid sequence of a druC gene comprises a nucleic acid sequence selected from the group consisting of the polynucleotides referenced in Table 10, rows 2-123, columns R and T.

[0887] In some embodiments, the term “DruD” refers to the polynucleotide or expression product e.g., the polypeptide encoded by the druD gene. In some embodiments, the term “DruD” refers to a DruD polypeptide.

[0888] In some embodiments, DruD polypeptide is encoded by a gene positioned within 5-60 genes of a gene encoding a DruE or DruA polypeptide, or any combination thereof, in a genome of a prokaryotic cell. In some embodiments, DruD polypeptide is encoded by a gene positioned within 5 genes upstream (5′) or downstream (3′) to a gene encoding a DruE or DruA polypeptide, or any combination thereof, in a genome of a prokaryotic cell.

[0889] In some embodiments, DruD and DruE are encoded by genes positioned sequentially 5′ to 3′ in a genome of a prokaryotic cell. In some embodiments, DruD and DruE are encoded by genes positioned contiguously 5′ to 3′ in a genome of a prokaryotic cell. In some embodiments, DruD, DruE, and DruA are encoded by genes positioned sequentially 5′ to 3′ in a genome of a prokaryotic cell. In some embodiments, DruD, DruE, and DruA are encoded by genes positioned contiguously 5′ to 3′ in a genome of a prokaryotic cell.

[0890] In some embodiments, druD and druE genes are positioned sequentially 5′ to 3′ in a genome of a prokaryotic cell. In some embodiments, druD and druE genes are positioned contiguously 5′ to 3′ in a genome of a prokaryotic cell. In some embodiments, druD, druE, and druA genes are positioned sequentially 5′ to 3′ in a genome of a prokaryotic cell. In some embodiments, druD, druE, and druA genes are positioned contiguously 5′ to 3′ in a genome of a prokaryotic cell.

[0891] In some embodiments, druD and druA genes are positioned sequentially 5′ to 3′ in a genome of a prokaryotic cell. In some embodiments, druD and druA genes are positioned contiguously 5′ to 3′ in a genome of a prokaryotic cell.

[0892] In some embodiments, a DruD polypeptide is about 347 amino acids long (median gene size).

[0893] In some embodiments, the DruD polypeptide comprises the amino acid sequence having at least 80% homology to a sequence selected from the group consisting of the polypeptides referenced in Table 10, rows 2-123, columns V and W. In some embodiments, the DruD polypeptide comprises the amino acid sequence having at least 80% homology within similar domain regions within a sequence selected from the group consisting of the polypeptides referenced in Table 10, rows 2-123, columns V and W. In some embodiments, the DruD polypeptide comprises a homolog of a polypeptide having the amino acid sequences set forth in the polypeptides referenced in Table 10, rows 2-123, columns V and W.

[0894] In some embodiments, the DruD polypeptide comprises the amino acid sequence having at least 80% identity to a sequence selected from the group consisting of the polypeptides referenced in Table 10, rows 2-123, columns V and W. In some embodiments, the DruD polypeptide comprises the amino acid sequence having at least 80% identity within similar domain regions within a sequence selected from the group consisting of the polypeptides referenced in Table 10, rows 2-123, columns V and W.

[0895] In some embodiments, the DruD polypeptide comprises an amino acid sequence having at least 80%, at least 85%, at least 90%, or at least 95% homology to a sequence selected from the group consisting of the polypeptides referenced in Table 10, rows 2-123, columns V and W. In some embodiments, the DruD polypeptide comprises the amino acid sequence having at least 80%, 85%, 90%, 95% homology within similar domain regions within a sequence selected from the group consisting of the polypeptides referenced in Table 10, rows 2-123, columns V and W. In some embodiments, the DruD polypeptide comprises an amino acid sequence having at least 80%, at least 85%, at least 90%, or at least 95% identity to a sequence selected from the group consisting of the polypeptides referenced in Table 10, rows 2-123, columns V and W. In some embodiments, the DruD polypeptide comprises the amino acid sequence having at least 80%, 85%, 90%, 95% identity within similar domain regions within a sequence selected from the group consisting of the polypeptides referenced in Table 10, rows 2-123, columns V and W. In some embodiments, the DruD polypeptide comprises an amino acid sequence selected from the group consisting of the polypeptides referenced in Table 10, rows 2-123, columns V and W.

[0896] In some embodiments, the DruD polypeptide comprises an amino acid sequence encoded by a nucleic acid sequence having at least 80%, at least 85%, at least 90%, or at least 95% homology to a sequence selected from the group consisting of the polynucleotides referenced in Table 10, rows 2-123, columns V and X. In some embodiments, the DruD polypeptide comprises the amino acid sequence encoded by a nucleic acid sequence having at least 80%, 85%, 90%, 95% homology within similar domain regions within a sequence selected from the group consisting of the polynucleotides referenced in Table 10, rows 2-123, columns V and X. In some embodiments, the DruD polypeptide comprises an amino acid sequence encoded by a nucleic acid sequence having at least 80%, at least 85%, at least 90%, or at least 95% identity to a sequence selected from the group consisting of the polynucleotides referenced in Table 10, rows 2-123, columns V and X. In some embodiments, the DruD polypeptide comprises the amino acid sequence encoded by a nucleic acid sequence having at least 80%, 85%, 90%, 95% homology within similar domain regions within a sequence selected from the group consisting of the polynucleotides referenced in Table 10, rows 2-123, columns V and X. In some embodiments, the DruD polypeptide comprises an amino acid sequence encoded from a nucleic acid sequence selected from the group consisting of the polynucleotides referenced in Table 10, rows 2-123, columns V and X.

[0897] In some embodiments, the nucleic acid sequence of a druD gene comprises a nucleic acid sequence having at least 80%, at least 85%, at least 90%, or at least 95% homology to a sequence selected from the group consisting of the polynucleotides referenced in Table 10, rows 2-123, column P. In some embodiments, the druD gene comprises a nucleic acid sequence having at least 80%, 85%, 90%, 95% homology within encoded similar domain regions in comparison with nucleotide sequence encoding these domain within a sequence selected from the group consisting of the polynucleotides referenced in Table 10, rows 2-123, columns V and X. In some embodiments, the nucleic acid sequence of a druD gene comprises a nucleic acid sequence having at least 80%, at least 85%, at least 90%, or at least 95% identity to a sequence selected from the group consisting of the polynucleotides referenced in Table 10, rows 2-123, columns V and X. In some embodiments, the druD gene comprises a nucleic acid sequence having at least 80%, 85%, 90%, 95% identity within encoded similar domain regions in comparison with nucleotide sequence encoding these domain within a sequence selected from the group consisting of the polynucleotides referenced in Table 10, rows 2-123, columns V and X. In some embodiments, the nucleic acid sequence of a druD gene comprises a nucleic acid sequence selected from the group consisting of the polynucleotides referenced in Table 10, rows 2-123, columns V and X.

[0898] In some embodiments, the term “DruE” refers to the polynucleotide or expression product e.g., the polypeptide encoded by the druE gene. In some embodiments, the term “DruE” refers to a DruE polypeptide. In some embodiments, the druE gene encodes a polypeptide comprising a pfam00270 domain. In some embodiments, the druE gene encodes a polypeptide comprising a pfam00271 domain. In some embodiments, the druE gene encodes a polypeptide comprising a pfam09369 domain. In some embodiments, the druE gene encodes a polypeptide comprising a DUF1998 domain. In some embodiments, the druE gene encodes a polypeptide comprising a pfam00270 domain, a pfam00271 domain, a pfam09369 domain, or a DUF4338 domain, or any combination thereof. In some embodiments, the druE gene encodes a polypeptide comprising a pfam00270 domain, a pfam00271 domain, a pfam09369 domain, and a DUF4338 domain. In some embodiments, a druE gene encodes a polypeptide comprising a helicase activity. In some embodiments, a druE gene encodes a polypeptide comprising a DEAx box helicase activity.

[0899] In some embodiments, the DruE polypeptide comprises a pfam00270 domain. In some embodiments, the DruE polypeptide comprises a pfam00271 domain. In some embodiments, the DruE polypeptide comprises a pfam09369 domain. In some embodiments, the DruE polypeptide comprises a DUF1998 domain. In some embodiments, the DruE polypeptide comprises a pfam00270 domain, a pfam00271 domain, a pfam09369 domain, or a DUF4338 domain, or any combination thereof. In some embodiments, the DruE polypeptide comprises a pfam00270 domain, a pfam00271 domain, a pfam09369 domain, and a DUF4338 domain. In some embodiments, a DruE polypeptide comprises a helicase activity. In some embodiments, a DruE polypeptide comprises a DEAx box helicase activity.

[0900] In some embodiments, DruE polypeptide is encoded by a gene positioned within 5-60 genes of a gene encoding a DruA polypeptide in a genome of a prokaryotic cell. In some embodiments, DruE polypeptide is encoded by a gene positioned within 5 genes upstream (5′) or downstream (3′) to a gene encoding a DruA polypeptide in a genome of a prokaryotic cell. In some embodiments, DruE polypeptide is encoded by a gene positioned within 5 genes upstream (5′) and downstream (3′) to a gene encoding a DruA polypeptide in a genome of a prokaryotic cell.

[0901] In some embodiments, DruE and DruA are encoded by genes positioned sequentially 5′ to 3′ in a genome of a prokaryotic cell. In some embodiments, DruE and DruA are encoded by genes positioned contiguously 5′ to 3′ in a genome of a prokaryotic cell.

[0902] In some embodiments, druE and druA genes are positioned sequentially 5′ to 3′ in a genome of a prokaryotic cell. In some embodiments, druE and druA genes are positioned contiguously 5′ to 3′ in a genome of a prokaryotic cell.

[0903] In some embodiments, a DruE polypeptide is about 2104 amino acids long (median gene size).

[0904] In some embodiments, the DruE polypeptide comprises the amino acid sequence having at least 80% homology to a sequence selected from the group consisting of the polypeptides referenced in Table 10, rows 2-1343, columns Z and AA. In some embodiments, the DruE polypeptide comprises the amino acid sequence having at least 80% homology within similar domain regions within a sequence selected from the group consisting of the polypeptides referenced in Table 10, rows 2-1343, columns Z and AA. In some embodiments, the DruE polypeptide comprises a homolog of a polypeptide having the amino acid sequences set forth in the polypeptides referenced in Table 10, rows 2-1343, columns Z and AA.

[0905] In some embodiments, a DruE polypeptide homolog comprises a helicase domain. In some embodiments, a DruE polypeptide comprises a helicase activity.

[0906] In some embodiments, the DruE polypeptide comprises the amino acid sequence having at least 80% identity to a sequence selected from the group consisting of the polypeptides referenced in Table 10, rows 2-1343, columns Z and AA. In some embodiments, the DruE polypeptide comprises the amino acid sequence having at least 80% identity within similar domain regions within a sequence selected from the group consisting of the polypeptides referenced in Table 10, rows 2-1343, columns Z and AA.

[0907] In some embodiments, the DruE polypeptide comprises an amino acid sequence having at least 80%, at least 85%, at least 90%, or at least 95% homology to a sequence selected from the group consisting of the polypeptides referenced in Table 10, rows 2-1343, columns Z and AA. In some embodiments, the DruE polypeptide comprises the amino acid sequence having at least 80%, 85%, 90%, 95% homology within similar domain regions within a sequence selected from the group consisting of the polypeptides referenced in Table 10, rows 2-1343, columns Z and AA. In some embodiments, the DruE polypeptide comprises an amino acid sequence having at least 80%, at least 85%, at least 90%, or at least 95% identity to a sequence selected from the group consisting of the polypeptides referenced in Table 10, rows 2-1343, columns Z and AA. In some embodiments, the DruE polypeptide comprises the amino acid sequence having at least 80%, 85%, 90%, 95% identity within similar domain regions within a sequence selected from the group consisting of the polypeptides referenced in Table 10, rows 2-1343, columns Z and AA. In some embodiments, the DruE polypeptide comprises an amino acid sequence selected from the group consisting of the polypeptides referenced in Table 10, rows 2-1343, columns Z and AA.

[0908] In some embodiments, the DruE polypeptide comprises an amino acid sequence encoded by a nucleic acid sequence having at least 80%, at least 85%, at least 90%, or at least 95% homology to a sequence selected from the group consisting of the polynucleotides referenced in Table 10, rows 2-1343, columns Z and AB. In some embodiments, the DruE polypeptide comprises the amino acid sequence encoded by a nucleic acid sequence having at least 80%, 85%, 90%, 95% homology within similar domain regions within a sequence selected from the group consisting of the polynucleotides referenced in Table 10, rows 2-1343, columns Z and AB. In some embodiments, the DruE polypeptide comprises an amino acid sequence encoded by a nucleic acid sequence having at least 80%, at least 85%, at least 90%, or at least 95% identity to a sequence selected from the group consisting of the polynucleotides referenced in Table 10, rows 2-1343, columns Z and AB. In some embodiments, the DruE polypeptide comprises the amino acid sequence encoded by a nucleic acid sequence having at least 80%, 85%, 90%, 95% homology within similar domain regions within a sequence selected from the group consisting of the polynucleotides referenced in Table 10, rows 2-1343, columns Z and AB. In some embodiments, the DruE polypeptide comprises an amino acid sequence encoded from a nucleic acid sequence selected from the group consisting of the polynucleotides referenced in Table 10, rows 2-1343, columns Z and AB.

[0909] In some embodiments, the nucleic acid sequence of a druE gene comprises a nucleic acid sequence having at least 80%, at least 85%, at least 90%, or at least 95% homology to a sequence selected from the group consisting of the polynucleotides referenced in Table 10, rows 2-1343, columns Z and AB. In some embodiments, the druE gene comprises a nucleic acid sequence having at least 80%, 85%, 90%, 95% homology within encoded similar domain regions in comparison with nucleotide sequence encoding these domain within a sequence selected from the group consisting of the polynucleotides referenced in Table 10, rows 2-1343, columns Z and AB. In some embodiments, the nucleic acid sequence of a druE gene comprises a nucleic acid sequence having at least 80%, at least 85%, at least 90%, or at least 95% identity to a sequence selected from the group consisting of the polynucleotides referenced in Table 10, rows 2-1343, columns Z and AB. In some embodiments, the druE gene comprises a nucleic acid sequence having at least 80%, 85%, 90%, 95% identity within encoded similar domain regions in comparison with nucleotide sequence encoding these domain within a sequence selected from the group consisting of the polynucleotides referenced in Table 10, rows 2-1343, columns Z and AB. In some embodiments, the nucleic acid sequence of a druE gene comprises a nucleic acid sequence selected from the group consisting of the polynucleotides referenced in Table 10, rows 2-1343, columns Z and AB.

[0910] In some embodiments, the term “DruM” refers to the polynucleotide or expression product e.g., the polypeptide encoded by the druM gene. In some embodiments, the term “DruM” refers to a DruM polypeptide. In some embodiments, the druM gene encodes a polypeptide.

[0911] In some embodiments, DruM polypeptide is encoded by a gene positioned within 5-60 genes of a gene encoding a DruF polypeptide, a DruG polypeptide, and/or a DruE polypeptide in a genome of a prokaryotic cell. In some embodiments, DruM polypeptide is encoded by a gene positioned within 5 genes upstream (5′) or downstream (3′) to a gene encoding a DruF polypeptide, a DruG polypeptide, and/or a DruE polypeptide in a genome of a prokaryotic cell. In some embodiments, DruM polypeptide is encoded by a gene positioned within 5 genes upstream (5′) and downstream (3′) to a gene encoding a DruF polypeptide, a DruG polypeptide, and/or a DruE polypeptide in a genome of a prokaryotic cell.

[0912] In some embodiments, DruM. DruF, DruG, and DruE are encoded by genes positioned sequentially 5′ to 3′ in a genome of a prokaryotic cell. In some embodiments, DruM, DruF, DruG, and DruE are encoded by genes positioned contiguously 5′ to 3′ in a genome of a prokaryotic cell.

[0913] In some embodiments, druM, druF, druG, and druE genes are positioned sequentially 5′ to 3′ in a genome of a prokaryotic cell. In some embodiments, druM, druF, druG, and druE genes are positioned contiguously 5′ to 3′ in a genome of a prokaryotic cell.

[0914] In some embodiments, a DruM polypeptide is about 386 amino acids long (median gene size).

[0915] In some embodiments, the DruM polypeptide comprises the amino acid sequence having at least 80% homology to a sequence selected from the group consisting of the polypeptides referenced in Table 10, rows 124-295, columns AD and AE. In some embodiments, the DruM polypeptide comprises the amino acid sequence having at least 80% homology within similar domain regions within a sequence selected from the group consisting of the polypeptides referenced in Table 10, rows 124-295, columns AD and AE. In some embodiments, the DruM polypeptide comprises a homolog of a polypeptide having the amino acid sequences set forth in the polypeptides referenced in Table 10, rows 124-295, columns AD and AE.

[0916] In some embodiments, a DruM polypeptide homolog comprises a cytosine methylase activity. In some embodiments, a DruM polypeptide homolog comprises a cytosine methylase.

[0917] In some embodiments, the DruM polypeptide comprises the amino acid sequence having at least 80% identity to a sequence selected from the group consisting of the polypeptides referenced in Table 10, rows 124-295, columns AD and AE. In some embodiments, the DruM polypeptide comprises the amino acid sequence having at least 80% identity within similar domain regions within a sequence selected from the group consisting of the polypeptides referenced in Table 10, rows 124-295, columns AD and AE.

[0918] In some embodiments, the DruM polypeptide comprises an amino acid sequence having at least 80%, at least 85%, at least 90%, or at least 95% homology to a sequence selected from the group consisting of the polypeptides referenced in Table 10, rows 124-295, columns AD and AE. In some embodiments, the DruM polypeptide comprises the amino acid sequence having at least 80%, 85%, 90%, 95% homology within similar domain regions within a sequence selected from the group consisting of the polypeptides referenced in Table 10, rows 124-295, columns AD and AE. In some embodiments, the DruM polypeptide comprises an amino acid sequence having at least 80%, at least 85%, at least 90%, or at least 95% identity to a sequence selected from the group consisting of the polypeptides referenced in Table 10, rows 124-295, columns AD and AE. In some embodiments, the DruM polypeptide comprises the amino acid sequence having at least 80%, 85%, 90%, 95% identity within similar domain regions within a sequence selected from the group consisting of the polypeptides referenced in Table 10, rows 124-295, columns AD and AE. In some embodiments, the DruM polypeptide comprises an amino acid sequence selected from the group consisting of the polypeptides referenced in Table 10, rows 124-295, columns AD and AE.

[0919] In some embodiments, the DruM polypeptide comprises an amino acid sequence encoded by a nucleic acid sequence having at least 80%, at least 85%, at least 90%, or at least 95% homology to a sequence selected from the group consisting of the polynucleotides referenced in Table 10, rows 124-295, columns AD and AF. In some embodiments, the DruM polypeptide comprises the amino acid sequence encoded by a nucleic acid sequence having at least 80%, 85%, 90%, 95% homology within similar domain regions within a sequence selected from the group consisting of the polynucleotides referenced in Table 10, rows 124-295, columns AD and AF. In some embodiments, the DruM polypeptide comprises an amino acid sequence encoded by a nucleic acid sequence having at least 80%, at least 85%, at least 90%, or at least 95% identity to a sequence selected from the group consisting of the polynucleotides referenced in Table 10, rows 124-295, columns AD and AF. In some embodiments, the DruM polypeptide comprises the amino acid sequence encoded by a nucleic acid sequence having at least 80%, 85%, 90%, 95% homology within similar domain regions within a sequence selected from the group consisting of the polynucleotides referenced in Table 10, rows 124-295, columns AD and AF. In some embodiments, the DruM polypeptide comprises an amino acid sequence encoded from a nucleic acid sequence selected from the group consisting of the polynucleotides referenced in Table 10, rows 124-295, columns AD and AF.

[0920] In some embodiments, the nucleic acid sequence of a druM gene comprises a nucleic acid sequence having at least 80%, at least 85%, at least 90%, or at least 95% homology to a sequence selected from the group consisting of the polynucleotides referenced in Table 10, rows 124-295, columns AD and AF. In some embodiments, the druM gene comprises a nucleic acid sequence having at least 80%, 85%, 90%, 95% homology within encoded similar domain regions in comparison with nucleotide sequence encoding these domain within a sequence selected from the group consisting of the polynucleotides referenced in Table 10, rows 124-295, columns AD and AF. In some embodiments, a druM gene homolog encodes a cytosine methylase. In some embodiments, the nucleic acid sequence of a druM gene comprises a nucleic acid sequence having at least 80%, at least 85%, at least 90%, or at least 95% identity to a sequence selected from the group consisting of the polynucleotides referenced in Table 10, rows 124-295, columns AD and AF. In some embodiments, the druM gene comprises a nucleic acid sequence having at least 80%, 85%, 90%, 95% identity within encoded similar domain regions in comparison with nucleotide sequence encoding these domain within a sequence selected from the group consisting of the polynucleotides referenced in Table 10, rows 124-295, columns AD and AF. In some embodiments, the nucleic acid sequence of a druM gene comprises a nucleic acid sequence selected from the group consisting of the polynucleotides referenced in Table 10, rows 124-295, columns AD and AF.

[0921] In some embodiments, the term “DruF” refers to the polynucleotide or expression product e.g., the polypeptide encoded by the druF gene. In some embodiments, the term “DruF” refers to a DruF polypeptide. In some embodiments, the druF gene encodes a polypeptide.

[0922] In some embodiments, DruF polypeptide is encoded by a gene positioned within 5-60 genes of a gene encoding a DruM polypeptide, a DruG polypeptide, and or a DruE polypeptide in a genome of a prokaryotic cell. In some embodiments, DruF polypeptide is encoded by a gene positioned within 5 genes upstream (5′) or downstream (3′) to a gene encoding a DruM polypeptide, a DruG polypeptide, and or a DruE polypeptide in a genome of a prokaryotic cell. In some embodiments, DruF polypeptide is encoded by a gene positioned within 5 genes upstream (5′) and downstream (3′) to a gene encoding DruM polypeptide, a DruG polypeptide, and or a DruE polypeptide in a genome of a prokaryotic cell.

[0923] In some embodiments, DruF, DruG, and DruE are encoded by genes positioned sequentially 5′ to 3′ in a genome of a prokaryotic cell. In some embodiments, DruF, DruG, and DruE are encoded by genes positioned contiguously 5′ to 3′ in a genome of a prokaryotic cell.

[0924] In some embodiments, druF, druG, and druE genes are positioned sequentially 5′ to 3′ in a genome of a prokaryotic cell. In some embodiments, druF, druG, and druE genes are positioned contiguously 5′ to 3′ in a genome of a prokaryotic cell.

[0925] In some embodiments, a DruF polypeptide is about 852 amino acids long (median gene size).

[0926] In some embodiments, the DruF polypeptide comprises the amino acid sequence having at least 80% homology to a sequence selected from the group consisting of the polypeptides referenced in Table 10, rows 124-295, columns AH and AI. In some embodiments, the DruF polypeptide comprises the amino acid sequence having at least 80% homology within similar domain regions within a sequence selected from the group consisting of the polypeptides referenced in Table 10, rows 124-295, columns AH and AI. In some embodiments, the DruF polypeptide comprises a homolog of a polypeptide having the amino acid sequences set forth in the polypeptides referenced in Table 10, rows 124-295, columns AH and AI.

[0927] In some embodiments, the DruF polypeptide comprises the amino acid sequence having at least 80% identity to a sequence selected from the group consisting of the polypeptides referenced in Table 10, rows 124-295, columns AH and AI. In some embodiments, the DruF polypeptide comprises the amino acid sequence having at least 80% identity within similar domain regions within a sequence selected from the group consisting of the polypeptides referenced in Table 10, rows 124-295, columns AH and AI.

[0928] In some embodiments, the DruF polypeptide comprises an amino acid sequence having at least 80%, at least 85%, at least 90%, or at least 95% homology to a sequence selected from the group consisting of the polypeptides referenced in Table 10, rows 124-295, columns AH and AI. In some embodiments, the DruF polypeptide comprises the amino acid sequence having at least 80%, 85%, 90%, 95% homology within similar domain regions within a sequence selected from the group consisting of the polypeptides referenced in Table 10, rows 124-295, columns AH and AI. In some embodiments, the DruF polypeptide comprises an amino acid sequence having at least 80%, at least 85%, at least 90%, or at least 95% identity to a sequence selected from the group consisting of the polypeptides referenced in Table 10, rows 124-295, columns AH and AI. In some embodiments, the DruF polypeptide comprises the amino acid sequence having at least 80%, 85%, 90%, 95% identity within similar domain regions within a sequence selected from the group consisting of the polypeptides referenced in Table 10, rows 124-295, columns AH and AI. In some embodiments, the DruF polypeptide comprises an amino acid sequence selected from the group consisting of the polypeptides referenced in Table 10, rows 124-295, columns AH and AI.

[0929] In some embodiments, the DruF polypeptide comprises an amino acid sequence encoded by a nucleic acid sequence having at least 80%, at least 85%, at least 90%, or at least 95% homology to a sequence selected from the group consisting of the polynucleotides referenced in Table 10, rows 124-295, columns AH and AJ. In some embodiments, the DruF polypeptide comprises the amino acid sequence encoded by a nucleic acid sequence having at least 80%, 85%, 90%, 95% homology within similar domain regions within a sequence selected from the group consisting of the polynucleotides referenced in Table 10, rows 124-295, columns AH and AJ. In some embodiments, the DruF polypeptide comprises an amino acid sequence encoded by a nucleic acid sequence having at least 80%, at least 85%, at least 90%, or at least 95% identity to a sequence selected from the group consisting of the polynucleotides referenced in Table 10, rows 124-295, columns AH and AJ. In some embodiments, the DruF polypeptide comprises the amino acid sequence encoded by a nucleic acid sequence having at least 80%, 85%, 90%, 95% homology within similar domain regions within a sequence selected from the group consisting of the polynucleotides referenced in Table 10, rows 124-295, columns AH and AJ. In some embodiments, the DruF polypeptide comprises an amino acid sequence encoded from a nucleic acid sequence selected from the group consisting of the polynucleotides referenced in Table 10, rows 124-295, columns AH and AJ.

[0930] In some embodiments, the nucleic acid sequence of a druF gene comprises a nucleic acid sequence having at least 80%, at least 85%, at least 90%, or at least 95% homology to a sequence selected from the group consisting of the polynucleotides referenced in Table 10, rows 124-295, columns AH and AJ. In some embodiments, the druF gene comprises a nucleic acid sequence having at least 80%, 85%, 90%, 95% homology within encoded similar domain regions in comparison with nucleotide sequence encoding these domain within a sequence selected from the group consisting of the polynucleotides referenced in Table 10, rows 124-295, columns AH and AJ. In some embodiments, the nucleic acid sequence of a druF gene comprises a nucleic acid sequence having at least 80%, at least 85%, at least 90%, or at least 95% identity to a sequence selected from the group consisting of the polynucleotides referenced in Table 10, rows 124-295, columns AH and AJ. In some embodiments, the druF gene comprises a nucleic acid sequence having at least 80%, 85%, 90%, 95% identity within encoded similar domain regions in comparison with nucleotide sequence encoding these domain within a sequence selected from the group consisting of the polynucleotides referenced in Table 10, rows 124-295, columns AH and AJ. In some embodiments, the nucleic acid sequence of a druF gene comprises a nucleic acid sequence selected from the group consisting of the polynucleotides referenced in Table 10, rows 124-295, columns AH and AJ.

[0931] In some embodiments, the term “DruG” refers to the polynucleotide or expression product e.g., the polypeptide encoded by the druG gene. In some embodiments, the term “DruG” refers to a DruG polypeptide. In some embodiments, the druG gene encodes a polypeptide.

[0932] In some embodiments, DruG polypeptide is encoded by a gene positioned within 5-60 genes of a gene encoding a DruM polypeptide, a DruF polypeptide, and or a DruE polypeptide in a genome of a prokaryotic cell. In some embodiments, DruG polypeptide is encoded by a gene positioned within 5 genes upstream (5′) or downstream (3′) to a gene encoding a DruM polypeptide, a DruF polypeptide, and or a DruE polypeptide in a genome of a prokaryotic cell. In some embodiments, DruG polypeptide is encoded by a gene positioned within 5 genes upstream (5′) and downstream (3′) to a gene encoding DruM polypeptide, a DruF polypeptide, and or a DruE polypeptide in a genome of a prokaryotic cell.

[0933] In some embodiments, DruG and DruE are encoded by genes positioned sequentially 5′ to 3′ in a genome of a prokaryotic cell. In some embodiments, DruG and DruE are encoded by genes positioned contiguously 5′ to 3′ in a genome of a prokaryotic cell.

[0934] In some embodiments, druG and druE genes are positioned sequentially 5′ to 3′ in a genome of a prokaryotic cell. In some embodiments, druG, and druE genes are positioned contiguously 5′ to 3′ in a genome of a prokaryotic cell.

[0935] In some embodiments, a DruG polypeptide is about 711 amino acids long (median gene size).

[0936] In some embodiments, the DruG polypeptide comprises the amino acid sequence having at least 80% homology to a sequence selected from the group consisting of the polypeptides referenced in Table 10, rows 124-295, columns AL and AM. In some embodiments, the DruG polypeptide comprises the amino acid sequence having at least 80% homology within similar domain regions within a sequence selected from the group consisting of the polypeptides referenced in Table 10, rows 124-295, columns AL and AM. In some embodiments, the DruG polypeptide comprises a homolog of a polypeptide having the amino acid sequences set forth in the polypeptides referenced in Table 10, rows 124-295, columns AL and AM.

[0937] In some embodiments, the DruG polypeptide comprises the amino acid sequence having at least 80% identity to a sequence selected from the group consisting of the polypeptides referenced in Table 10, rows 124-295, columns AL and AM. In some embodiments, the DruG polypeptide comprises the amino acid sequence having at least 80% identity within similar domain regions within a sequence selected from the group consisting of the polypeptides referenced in Table 10, rows 124-295, columns AL and AM.

[0938] In some embodiments, the DruG polypeptide comprises an amino acid sequence having at least 80%, at least 85%, at least 90%, or at least 95% homology to a sequence selected from the group consisting of the polypeptides referenced in Table 10, rows 124-295, columns AL and AM. In some embodiments, the DruG polypeptide comprises the amino acid sequence having at least 80%, 85%, 90%, 95% homology within similar domain regions within a sequence selected from the group consisting of the polypeptides referenced in Table 10, rows 124-295, columns AL and AM. In some embodiments, the DruG polypeptide comprises an amino acid sequence having at least 80%, at least 85%, at least 90%, or at least 95% identity to a sequence selected from the group consisting of the polypeptides referenced in Table 10, rows 124-295, columns AL and AM. In some embodiments, the DruG polypeptide comprises the amino acid sequence having at least 80%, 85%, 90%, 95% identity within similar domain regions within a sequence selected from the group consisting of the polypeptides referenced in Table 10, rows 124-295, columns AL and AM. In some embodiments, the DruG polypeptide comprises an amino acid sequence selected from the group consisting of the polypeptides referenced in Table 10, rows 124-295, columns AL and AM.

[0939] In some embodiments, the DruG polypeptide comprises an amino acid sequence encoded by a nucleic acid sequence having at least 80%, at least 85%, at least 90%, or at least 95% homology to a sequence selected from the group consisting of the polynucleotides referenced in Table 10, rows 124-295, columns AL and AN. In some embodiments, the DruG polypeptide comprises the amino acid sequence encoded by a nucleic acid sequence having at least 80%, 85%, 90%, 95% homology within similar domain regions within a sequence selected from the group consisting of the polynucleotides referenced in Table 10, rows 124-295, columns AL and AN. In some embodiments, the DruG polypeptide comprises an amino acid sequence encoded by a nucleic acid sequence having at least 80%, at least 85%, at least 90%, or at least 95% identity to a sequence selected from the group consisting of the polynucleotides referenced in Table 10, rows 124-295, columns AL and AN. In some embodiments, the DruG polypeptide comprises the amino acid sequence encoded by a nucleic acid sequence having at least 80%, 85%, 90%, 95% homology within similar domain regions within a sequence selected from the group consisting of the polynucleotides referenced in Table 10, rows 124-295, columns AL and AN. In some embodiments, the DruG polypeptide comprises an amino acid sequence encoded from a nucleic acid sequence selected from the group consisting of the polynucleotides referenced in Table 10, rows 124-295, columns AL and AN.

[0940] In some embodiments, the nucleic acid sequence of a druG gene comprises a nucleic acid sequence having at least 80%, at least 85%, at least 90%, or at least 95% homology to a sequence selected from the group consisting of the polynucleotides referenced in Table 10, rows 124-295, columns AL and AN. In some embodiments, the druG gene comprises a nucleic acid sequence having at least 80%, 85%, 90%, 95% homology within encoded similar domain regions in comparison with nucleotide sequence encoding these domain within a sequence selected from the group consisting of the polynucleotides referenced in Table 10, rows 124-295, columns AL and AN. In some embodiments, the nucleic acid sequence of a druG gene comprises a nucleic acid sequence having at least 80%, at least 85%, at least 90%, or at least 95% identity to a sequence selected from the group consisting of the polynucleotides referenced in Table 10, rows 124-295, columns AL and AN. In some embodiments, the druG gene comprises a nucleic acid sequence having at least 80%, 85%, 90%, 95% identity within encoded similar domain regions in comparison with nucleotide sequence encoding these domain within a sequence selected from the group consisting of the polynucleotides referenced in Table 10, rows 124-295, columns AL and AN. In some embodiments, the nucleic acid sequence of a druG gene comprises a nucleic acid sequence selected from the group consisting of the polynucleotides referenced in Table 10, rows 124-295, columns AL and AN.

[0941] In some embodiments, the term “DruH” refers to the polynucleotide or expression product e.g., the polypeptide encoded by the druH gene. In some embodiments, the term “DruH” refers to a DruH polypeptide. In some embodiments, the druH gene encodes a polypeptide.

[0942] In some embodiments, DruH polypeptide is encoded by a gene positioned within 5-60 genes of a gene encoding a DruE polypeptide in a genome of a prokaryotic cell. In some embodiments, DruH polypeptide is encoded by a gene positioned within 5 genes upstream (5′) or downstream (3′) to a gene encoding a DruE polypeptide in a genome of a prokaryotic cell. In some embodiments, DruH polypeptide is encoded by a gene positioned within 5 genes upstream (5′) and downstream (3′) to a gene encoding a DruE polypeptide in a genome of a prokaryotic cell.

[0943] In some embodiments, DruH and DruE are encoded by genes positioned sequentially 5′ to 3′ in a genome of a prokaryotic cell. In some embodiments, DruH and DruE are encoded by genes positioned contiguously 5′ to 3′ in a genome of a prokaryotic cell.

[0944] In some embodiments, druH and druE genes are positioned sequentially 5′ to 3′ in a genome of a prokaryotic cell. In some embodiments, druH, and druE genes are positioned contiguously 5′ to 3′ in a genome of a prokaryotic cell.

[0945] In some embodiments, a DruH polypeptide is about 1079 amino acids long (median gene size).

[0946] In some embodiments, the DruH polypeptide comprises the amino acid sequence having at least 80% homology to a sequence selected from the group consisting of the polypeptides referenced in Table 10, rows 296-1343, columns AP and AQ. In some embodiments, the DruH polypeptide comprises the amino acid sequence having at least 80% homology within similar domain regions within a sequence selected from the group consisting of the polypeptides referenced in Table 10, rows 296-1343, columns AP and AQ. In some embodiments, the DruH polypeptide comprises a homolog of a polypeptide having the amino acid sequences set forth in the polypeptides referenced in Table 10, rows 296-1343, columns AP and AQ.

[0947] In some embodiments, the DruH polypeptide comprises the amino acid sequence having at least 80% identity to a sequence selected from the group consisting of the polypeptides referenced in Table 10, rows 296-1343, columns AP and AQ. In some embodiments, the DruH polypeptide comprises the amino acid sequence having at least 80% identity within similar domain regions within a sequence selected from the group consisting of the polypeptides referenced in Table 10, rows 296-1343, columns AP and AQ.

[0948] In some embodiments, the DruH polypeptide comprises an amino acid sequence having at least 80%, at least 85%, at least 90%, or at least 95% homology to a sequence selected from the group consisting of the polypeptides referenced in Table 10, rows 296-1343, columns AP and AQ. In some embodiments, the DruH polypeptide comprises the amino acid sequence having at least 80%, 85%, 90%, 95% homology within similar domain regions within a sequence selected from the group consisting of the polypeptides referenced in Table 10, rows 296-1343, columns AP and AQ. In some embodiments, the DruH polypeptide comprises an amino acid sequence having at least 80%, at least 85%, at least 90%, or at least 95% identity to a sequence selected from the group consisting of the polypeptides referenced in Table 10, rows 296-1343, columns AP and AQ. In some embodiments, the DruH polypeptide comprises the amino acid sequence having at least 80%, 85%, 90%, 95% identity within similar domain regions within a sequence selected from the group consisting of the polypeptides referenced in Table 10, rows 296-1343, columns AP and AQ. In some embodiments, the DruH polypeptide comprises an amino acid sequence selected from the group consisting of the polypeptides referenced in Table 10, rows 296-1343, columns AP and AQ.

[0949] In some embodiments, the DruH polypeptide comprises an amino acid sequence encoded by a nucleic acid sequence having at least 80%, at least 85%, at least 90%, or at least 95% homology to a sequence selected from the group consisting of the polynucleotides referenced in Table 10, rows 296-1343, columns AP and AR. In some embodiments, the DruH polypeptide comprises the amino acid sequence encoded by a nucleic acid sequence having at least 80%, 85%, 90%, 95% homology within similar domain regions within a sequence selected from the group consisting of the polynucleotides referenced in Table 10, rows 296-1343, columns AP and AR. In some embodiments, the DruH polypeptide comprises an amino acid sequence encoded by a nucleic acid sequence having at least 80%, at least 85%, at least 90%, or at least 95% identity to a sequence selected from the group consisting of the polynucleotides referenced in Table 10, rows 296-1343, columns AP and AR. In some embodiments, the DruH polypeptide comprises the amino acid sequence encoded by a nucleic acid sequence having at least 80%, 85%, 90%, 95% homology within similar domain regions within a sequence selected from the group consisting of the polynucleotides referenced in Table 10, rows 296-1343, columns AP and AR. In some embodiments, the DruH polypeptide comprises an amino acid sequence encoded from a nucleic acid sequence selected from the group consisting of the polynucleotides referenced in Table 10, rows 296-1343, columns AP and AR.

[0950] In some embodiments, the nucleic acid sequence of a druH gene comprises a nucleic acid sequence having at least 80%, at least 85%, at least 90%, or at least 95% homology to a sequence selected from the group consisting of the polynucleotides referenced in Table 10, rows 296-1343, columns AP and AR. In some embodiments, the druH gene comprises a nucleic acid sequence having at least 80%, 85%, 90%, 95% homology within encoded similar domain regions in comparison with nucleotide sequence encoding these domain within a sequence selected from the group consisting of the polynucleotides referenced in Table 10, rows 296-1343, columns AP and AR. In some embodiments, the nucleic acid sequence of a druH gene comprises a nucleic acid sequence having at least 80%, at least 85%, at least 90%, or at least 95% identity to a sequence selected from the group consisting of the polynucleotides referenced in Table 10, rows 296-1343, columns AP and AR. In some embodiments, the druH gene comprises a nucleic acid sequence having at least 80%, 85%, 90%, 95% identity within encoded similar domain regions in comparison with nucleotide sequence encoding these domain within a sequence selected from the group consisting of the polynucleotides referenced in Table 10, rows 296-1343, columns AP and AR. In some embodiments, the nucleic acid sequence of a druH gene comprises a nucleic acid sequence selected from the group consisting of the polynucleotides referenced in Table 10, rows 296-1343, columns AP and AR.

[0951] A skilled artisan would appreciate that the terms a “functional portion of a Defense System IIIa component” or “functional fragment of Defense System IIIa component” or “functional portion of a Druantia Type I defense system component” or “functional fragment of Druantia Type I defense system component” refers to a functional portion of a Druantia polynucleotide or polypeptide, as disclosed herein, which expression is sufficient to elicit an anti-phage activity alone or in combination with the at least one of the other Druantia polynucleotides or polypeptides disclosed herein or functional portions thereof.

[0952] A skilled artisan would appreciate that the terms a “functional portion of a Defense System IIIb component” or “functional fragment of Defense System IIIb component” or “functional portion of a Druantia Type II defense system component” or “functional fragment of Druantia Type II defense system component” refers to a functional portion of a Druantia polynucleotide or polypeptide, as disclosed herein, which expression is sufficient to elicit an anti-phage activity alone or in combination with the at least one of the other Druantia polynucleotides or polypeptides disclosed herein or functional portions thereof.

[0953] A skilled artisan would appreciate that the terms a “functional portion of a Defense System IIIc component” or “functional fragment of Defense System IIIc component” or “functional portion of a Druantia Type III defense system component” or “functional fragment of Druantia Type III defense system component” refers to a functional portion of a Druantia polynucleotide or polypeptide, as disclosed herein, which expression is sufficient to elicit an anti-phage activity alone or in combination with the at least one of the other Druantia polynucleotides or polypeptides disclosed herein or functional portions thereof.

[0954] The terms “DruA”, “DruB”, “DruC”, “DruD”, “DruE”, “DruF”, “DruG”, “DruH”, “DruM”, “druA”, “druB”, “druC”, “druD”, “druE”, “druF”, “druG”, “druH”, and “druM”, also refer to functional DruA, DruB, DruC, DruD, DruE, DruF, DruG, DruH, DruM, druA, druB, druG, druD, druE, druF, druG, druH, and druM, homologs, which exhibit the desired activity (i.e., conferring phage resistance). Such homologs can be, for example, at least 80%, at least 81%, at least 82%, at least 83%, at least 84%, at least 85%, at least 86%, at least 87%, at least 88%, at least 89%, at least 90%, at least 91%, at least 92%, at least 93%, at least 94%, at least 95%, at least 96%, at least 97%, at least 98%, at least 99% or 100% identical or homologous to the polypeptide referenced in Table 10 rows 2-123, columns J and K; rows 2-123, columns N and O; rows 2-123, columns R and S; rows 2-123, columns V and W; rows 2-1343, columns Z and AA; rows 124-295, columns AD and AE; rows 124-295, columns AH and AI; rows 124-295, columns AL and AM, and rows 296-1343, columns AP and AQ, respectively, or 80%, at least 81%, at least 82%, at least 83%, at least 84%, at least 85%, at least 86%, at least 87%, at least 88%, at least 89%, at least 90%, at least 91%, at least 92%, at least 93%, at least 94%, at least 95%, at least 96%, at least 97%, at least 98%, at least 99% or 100% homologous or identical to the polynucleotide sequences referenced in Table 10 rows 2-123, columns J and L; rows 2-123, columns N and P; rows 2-123, columns R and T; rows 2-123, columns V and X; rows 2-1343, columns Z and AB; rows 124-295, columns AD and AF; rows 124-295, columns AH and AJ; rows 124-295, columns AL and AN, and rows 296-1343, columns AP and AR, respectively. In some embodiments, such homologs comprise at least 80%, at least 81%, at least 82%, at least 83%, at least 84%, at least 85%, at least 86%, at least 87%, at least 88%, at least 89%, at least 90%, at least 91%, at least 92%, at least 93%, at least 94%, at least 95%, at least 96%, at least 97%, at least 98%, at least 99% or 100% homology within similar domain regions of the polypeptide sequences referenced in Table 10 rows 2-123, columns J and K; rows 2-123, columns N and O; rows 2-123, columns R and S; rows 2-123, columns V and W; rows 2-1343, columns Z and AA; rows 124-295, columns ad and AE; rows 124-295, columns AH and AI; rows 124-295, columns AL and AN, and rows 296-1343, columns AP and AQ, respectively, or 80%, at least 81%, at least 82%, at least 83%, at least 84%, at least 85%, at least 86%, at least 87%, at least 88%, at least 89%, at least 90%, at least 91%, at least 92%, at least 93%, at least 94%, at least 95%, at least 96%, at least 97%, at least 98%, at least 99% or 100% identity within nucleotide sequences encoding similar domain regions to the polynucleotide sequences referenced in Table 10 rows 2-123, columns J and L; rows 2-123, columns N and P; rows 2-123, columns R and T; rows 2-123, columns V and X; rows 2-1343, columns Z and AB; rows 124-295, columns AD and AF; rows 124-295, columns AH and AJ; rows 124-295, columns AL and AN, and rows 296-1343, column AP and AR, respectively.

[0955] Table 10 presents embodiments of components of Defense System III (IIIa; IIIb; and IIIc) that may be found in a diverse array of bacteria and archaea genomes (referenced in Table 18). Table 10 presents embodiments of nucleic acid sequences encoding gene cassettes of Defense System III (IIIa; IIIb; and IIIc; referenced in Table 18).

[0956] The Hachiman Defense System

[0957] In some embodiments, a defense system disclosed herein comprises a Hachiman anti-phage defense system. (Table 12) In some embodiments, a Hachiman defense system provides a host cell with resistance to at least one phage.

[0958] In some embodiments, a Hachiman defense system provides a host cell with resistance to entry of foreign nucleic acid invasion. In some embodiments, a host cell expressing a functional Hachiman defense system (Defense System IV) provides the host cell resistance foreign nucleic acid invasion.

[0959] In some embodiments, a bacterial cell expressing a Hachiman defense system (Defense System IV) protects the bacteria from phage infection. In some embodiments, a bacterial cell expressing a functional Hachiman defense system (Defense System IV) protects the bacteria from phage infection.

[0960] In some embodiments, a Hachiman defense system provides a host cell with resistance to plasmid transformation. In some embodiments, a host cell expressing a functional Hachiman defense system (Defense System IV) provides a host cells with resistance to plasmid transformation.

[0961] In some embodiments, a Hachiman defense system provides a host cell with resistance to entry of conjugative elements. In some embodiments, a host cell expressing a function Hachiman defense system (Defense System IV) provides the host cell resistance from entry of conjugative elements.

[0962] As used herein, the term “a Hachiman anti-phage defense system” may be used interchangeably with the term “a Defense System IV”, having all the same meanings and qualities. A skilled artisan would appreciate that the term “Hachiman system” may be used interchangeably in some embodiments with “Hachiman defense system”, “Hachiman the defense system”, “Hachiman anti-phage system”, and “Defense System IV”, having all the same meanings and qualities.

[0963] In some embodiments, a microbial species does not comprise an endogenous Defense System IV. In some embodiments, a microbial species does not express an endogenous Defense System IV. In some embodiments, a microbial species does not express a functional Defense System IV.

[0964] In some embodiments, a bacterial species does not comprise an endogenous Defense System IV. In some embodiments, a bacterial species does not express an endogenous Defense System IV. In some embodiments, a bacterial species does not endogenously express a functional Defense System IV.

[0965] A Hachiman defense system comprises, in some embodiments, a nucleic acid construct comprising a nucleic acid sequence encoding a HamA polypeptide comprising a pfam08878 domain or a DUF1837 domain or a combination thereof, and a HamB polypeptide comprising COG1204 domain or a pfam00270 domain or a pfam00271 domain or any combination thereof. In some embodiments, a Hachiman defense system comprises a nucleic acid construct comprising a nucleic acid sequence comprising a hamA gene and a hamB gene.

[0966] A Hachiman defense system comprises, in some embodiments, a nucleic acid construct comprising a nucleic acid sequence encoding a HamA polypeptide comprising a pfam08878 or a DUF1837 domain or a combination thereof, and a HamB polypeptide comprising a COG1204 domain or a pfam00270 domain or a pfam00271 domain, or any combination thereof. In some embodiments, a Hachiman defense system comprises a nucleic acid construct comprising a nucleic acid sequence encoding a HamA polypeptide and a HamB polypeptide.

[0967] In some embodiments, a Hachiman defense system comprises, a HamA polypeptide comprising a pfam08878 or a DUF1837 domain or a combination thereof, and a HamB polypeptide comprising a COG1204 domain or a pfam00270 domain or a pfam00271 domain or any combination thereof. In some embodiments, a Hachiman defense system comprises a HamA polypeptide and a HamB polypeptide.

[0968] In some embodiments, a Defense System IV comprising a HamA polypeptide comprising a pfam08878 domain or a DUF1837 domain or any combination thereof, or comprising an amino acid sequence having at least 80% identity to a sequence selected from the group referenced in Table 12 rows 2-1782 columns H and I; or a HamB polypeptide comprising COG1204 domain or a pfam00270 domain or a pfam00271 domain or any combination thereof, or comprising an amino acid sequence having at least 80% identity to a sequence selected from the group referenced in Table 12 rows 2-1782 columns L and M; any combination thereof.

[0969] In some embodiments, a Defense System IV comprises at least two different polypeptide components selected from a HamA polypeptide comprising a pfam08878 domain or a DUF1837 domain or any combination thereof, or comprising an amino acid sequence having at least 80% identity to a sequence selected from the group referenced in Table 12 rows 2-1782 columns H and I; and a HamB polypeptide comprising COG1204 domain or a pfam00270 domain or a pfam00271 domain or any combination thereof, or comprising an amino acid sequence having at least 80% identity to a sequence selected from the group referenced in Table 12 rows 2-1782 columns L and M.

[0970] In some embodiments, a Hachiman defense system having an anti-phage activity comprises a nucleic acid construct comprising a nucleic acid sequence encoding a HamA polypeptide and a HamB polypeptide. In some embodiments, a Hachiman defense system having an anti-phage activity comprises a nucleic acid construct comprising a nucleic acid sequence comprising a hamA gene and a hamB gene.

[0971] In some embodiments, the Hachiman anti-phage defense system comprises a nucleic acid construct comprising nucleic acid sequences encoding a cassette comprising hamA and hamB genes.

[0972] In some embodiments, a construct comprising the Hachiman defense system encodes one component of the defense system, whereby multiple constructs, for example but not limited to, two constructs may be used to assemble the functional defense system. In some embodiments, the components of a Hachiman defense system comprise genes hamA and hamB. In some embodiments, the components of a Hachiman defense system consist of genes hamA and hamB. In some embodiments, the components of a Hachiman defense system comprise nucleic acid sequences encoding a HamA polypeptide and a HamB polypeptide. In some embodiments, the components of a Hachiman defense system consist of nucleic acid sequences encoding a HamA polypeptide and a HamB polypeptide.

[0973] In some embodiments, a construct comprising the Hachiman defense system encodes one component of the defense system, whereby a second construct may be used to assemble the functional defense system. In some embodiments, a construct comprising the Hachiman defense system encodes one component of the defense system, whereby additional constructs may be used to assemble the functional defense system. For example, in some embodiments each of HamA and HamB may be encoded by nucleic acid sequences comprised in different constructs, wherein expression of the combination of constructs produces a functional Hachiman defense system.

[0974] In some embodiments, the components making up a functional Hachiman anti-phage defense system comprise a HamA polypeptide and a HamB polypeptide, each encoded by a hamA and a hamB gene, respectively.

[0975] In some embodiments, a Hachiman defense system having an anti-phage activity comprises a nucleic acid encoding a HamA polypeptide. In some embodiments, a Hachiman defense system having an anti-phage activity comprises a nucleic acid encoding a HamA polypeptide and a HamB polypeptide. In some embodiments, a Hachiman defense system having an anti-phage activity comprises a nucleic acid encoding a HamB polypeptide.

[0976] In some embodiments, a Hachiman defense system having an anti-phage activity comprises a nucleic acid comprising a hamA gene. In some embodiments, a Hachiman defense system having an anti-phage activity comprises a nucleic acid comprising a hamA gene and a hamB gene. In some embodiments, a Hachiman defense system having an anti-phage activity comprises a nucleic acid comprising hamB gene.

[0977] In some embodiments, a Hachiman defense system having an anti-phage activity comprises a nucleic acid construct comprising nucleic acids encoding polypeptides in a set order. In one embodiment, the 5′ to 3′ order of polypeptides encoded is HamA and HamB. In some embodiments the 5′ to 3′ order of polypeptides does not affect the anti-phage activity. In some embodiments the 5′ to 3′ order of polypeptides does affect the anti-phage activity.

[0978] In some embodiments, the 5′ to 3′ order of polypeptides is random, for example any order of nucleic acid sequences encoding HamA and HamB.

[0979] In some embodiments, a Hachiman defense system having an anti-phage activity comprises a nucleic acid construct comprising genes in a set order. In some embodiment, the 5′ to 3′ order of genes is hamA and hamB. In some embodiment, the 5′ to 3′ order of genes in a Hachiman defense system is not hamA and hamB. In some embodiments the 5′ to 3′ order of genes does not affect the anti-phage activity. In some embodiments the 5′ to 3′ order of genes does affect the anti-phage activity.

[0980] In some embodiments, the 5′ to 3′ order of genes is random, for example any order of hamA and hamB.

[0981] In some embodiments, the Hachiman system (Defense System IV) composition and order is as shown in FIG. 3B.

[0982] In some embodiments, a Hachiman defense system having an anti-phage activity originates from a microbial genome, for example a bacterial and or an archaeal genome (Table 12). A skilled artisan would appreciate that the Hachiman system is not present in the majority of bacteria and or archaea species.

[0983] In some embodiments, introducing a combination of polypeptide components within a defense system disclosed herein, for example taking HamA from one bacterium and HamB from another bacterium and combining them into HamA-HamB functional defense system that defends against foreign elements that are not naturally occurring is advantageous to the host cell comprising the non-naturally occurring polypeptide components. In some embodiments, introducing a combination of polypeptide components within any defense system disclosed herein, and combining them to form a functional defense system that defends against foreign elements that are not naturally occurring, is advantageous to the host cell comprising the combination of non-naturally occurring polypeptide components.

[0984] In some embodiments, a functional Hachiman defense system comprises a construct comprising nucleic acid sequences encoding polypeptides, wherein the nucleic acid sequence encoding each polypeptide may originate from a different microbial species. For example, the source of the nucleic acid sequence encoding a HamA polypeptide may be one microbial species, while the source of the nucleic acid sequence encoding a HamB polypeptide may be a different microbial species. In some embodiments, a functional Hachiman defense system comprises a non-naturally occurring combination of polypeptide components. In some embodiments, a functional Hachiman defense system comprises a combination of at least two polypeptides that do not naturally occur together.

[0985] In some embodiments, a functional Hachiman defense system comprises a construct comprising nucleic acid sequences encoding polypeptides, wherein the nucleic acid sequence encoding each polypeptide may originate from a different bacterial species. For example, the source of the nucleic acid sequence encoding a HamA polypeptide may be one bacterial species, while the source of the nucleic acid sequence encoding a HamB polypeptide may be a different bacterial species.

[0986] In some embodiments, the source of the nucleic acid encoding a HamA polypeptide and a HamB polypeptide is the same. In some embodiments, the source of the nucleic acid encoding a HamA polypeptide and a HamB polypeptide is the not the same. In some embodiments, the source of the nucleic acid sequence of any of the components of a Hachiman defense system comprises any of the species listed in Table 12.

[0987] In some embodiments, a Hachiman defense system having an anti-phage activity comprises a nucleic acid construct comprising non-coding regions between the nucleic acid sequences encoding the polypeptides. In some embodiments, the non-coding regions between the nucleic acid sequences comprises nucleic acid sequence not naturally occurring in the microbial species of origin. In some embodiments, the non-coding regions between the nucleic acid sequences comprises nucleic acid sequence is the naturally occurring in the microbial species of origin.

[0988] In some embodiments, a Hachiman system disclosed herein comprises a multi-gene phage resistance system broadly distributed in microbial genomes, for example but not limited to bacteria and archaea. According to some embodiments, the Hachiman system components are located in a gene cluster (a cassette of genes) in a microbial cell genome. According to some embodiments, the Hachiman system components are located in close proximity (e.g. positioned within 20 genes, 10 genes, 5 genes or less one from the other) in a genome of a prokaryotic cell. According to some embodiments the prokaryotic cell expresses an endogenous Hachiman defense system. According to some embodiments, the prokaryotic cell expresses an endogenous functional Hachiman defense system. According to some embodiments, the species of prokaryotic cell is selected from the group consisting of the species listed in Table 12. According to some embodiments a prokaryotic cell expresses a non-endogenous Hachiman defense system. According to some embodiments, a prokaryotic cell expresses a non-endogenous functional Hachiman defense system. According to some embodiments, the species of prokaryotic cell expressing a non-endogenous functional Hachiman defense system is selected from the group consisting of the species listed in Table 12.

[0989] In some embodiments, a Hachiman (Defense System IV) gene cassette comprises the nucleic acid sequence:

(SEQ ID NO: 4; construct 3 Table 4)

| | |
|---|---|
| 1 | taaaagctgc ttcaggtaaa tatcctgaag cagcttttgt ggttaaaaga gaaagtaggt |
| 61 | aatagtcatt tgtagtgtat taaagaagat ggaggtgaat aaaacgatgt aatttaagcc |
| 121 | ataagttggc cgctttggcc aatgttttct ttattttata tatggtaaaa ttataattag |
| 181 | tttagatagt acatttgctt agtaaagatg tactttaaaa aaaaataaat ttatttttgt |
| 241 | ggctcttaac gaaatgaata tgctattttg atgtatctta ggtagaaatc taaaaatatt |
| 301 | aagaagttgt taaacagcgt taagctagga ggaaatatat gactatacaa gatgatatgg |
| 361 | ttggaaaaca tcctatcgag aatgattttt ggaaatggtt gcagcatgaa gatacagaat |
| 421 | cctcggattt aaaacggcat cgttacttag aagtggattc tagtaatcgt gatgaagcta |
| 481 | ttaaatctgt tgcagcttgg ctaattaagt atcatttgtc ggaaggtaaa aagagagtga |
| 541 | taagaaaaaa acaagaaata cttgaaaaac atgattttgc tgaatatgca caatcgcttc |
| 601 | atgtttttcc taaaagtgat aaaacacaga aaggaaattt aggagaaata tttttatcgg |
| 661 | aatatttgag tcagacatca ggagttcaaa tcctagtgta taaattacac tacaacccca |
| 721 | acatagatca atcgatgaaa ggggatgacg ttttacttgt taacccagat aaagttttat |
| 781 | taggagaaag taaatttcgt tctactccaa ataaacgtgc tgttgaagag gcttctgaac |
| 841 | ttatgaaaga taagttaact ttgcctatgt ctcttggttt tattgcagat agattatttg |
| 901 | aacaaggaaa agatgaatta ggtgaagtga ttttcgatct tcaatttaag atgagtagta |
| 961 | tagaaataga tattaaaaat atagggtttt tattatctac taaaaaggtt cgtagtatcg |
| 1021 | tagaaaataa cctttcttct ccaaattctg attttatttt tatttcatta ggaatggatg |
| 1081 | acccagcagc ttttttgaaa agtgtatttg actatgcaga aagtaatctt ctggagggat |
| 1141 | cttatgaaac ttgaaacagc atataattat tttgaaaagc ttgaaaaaga tgaacgtctt |
| 1201 | caaaactata tttcacaggc taattcaaga tatatccttt acatagcaaa tgaaccattg |
| 1261 | gaaaatttcc cacattacac tgtaaatcta gatgaaaaat gtacacatat agcatttagt |
| 1321 | tatctcaatt gtggatggcg ctttttttta gagaaaatca gtgatgaagc tacaaaatgt |
| 1381 | atggaaaagg cttctgaaat attggagtat ttgtatgcct atagtgattg cgaaaagtta |
| 1441 | tataaagagt attaccgttt agtatgctca ttagcgtatt atatatctgc acagtattct |
| 1501 | aaatctttta ttatcttggg gaaatataat tctgattcat atatagggaa aataacaaaa |
| 1561 | ttatttttaa ctagaaactt tatagaatta gaaaggcaac tggaaattaa gtacttgaag |
| 1621 | aacgatgaag aaacttcaag tgagaataag gataacataa tatatgaaaa aattttatct |
| 1681 | aatgcatttt tacatataat taattttatt cgcacaggga agatggaatc tttggaaagt |
| 1741 | tctaaagata tggttcgaga tttaattact ttggctgata taaataatga accacatatg |
| 1801 | tggtggtact ttagactact atatttggtt tttgaagaat atgaagatgg gtctttgtgg |
| 1861 | aaagtggttc caccgctttt agataatgat gatatatcag ctaaatatat ttatgctaat |
| 1921 | ttatacaaaa agaagccaat aactgaattt tttaagtcgc aaagggaatg tttggacgga |
| 1981 | gagttattaa agaacgatgg tttcgtaatt ggaatgccta ctagttcagg aaaaacaaag |
| 2041 | gttgctgaag taacaatatt aaaaacttta actaaatctc caggtgcact ttgtatttat |
| 2101 | attgcacctt atcgatcttt ggctaatgaa gtggaattta gcctatctag tatgtttgag |
| 2161 | attatgggtt atcaggtttc gcagttatat gggggatctc aaacgtctcc gctggatcgg |
| 2221 | caattgacta agcaagctaa tgtcataatt gttactccgg aaaaagctaa atcgatgttg |
| 2281 | agatctaata aagacttaaa ggatagaatt caacttgtaa tcattgatga aggtcattta |
| 2341 | gtcgggtttc agccaagata tattacagga gaattgctta ttgaagaact aaagattgtt |
| 2401 | ttgaaaaaaa ataatggtca acttgtacta ctatctgctg ttcttcctaa tatttctgat |
| 2461 | ttttctttgt ggattggtga ggatgataaa gctaaaagaa tgtctgtctg gagaccatca |
| 2521 | agtcaaagat ttggagaatt atctttagca agaaatactg tgaatataaa ttgggaggga |
| 2581 | gaaacaccat catataataa gaactttata acaccaaaat tagtaaaacc agaacggatt |
| 2641 | acaaaaacag gaaggaaata tgcagctaaa tattttccag cagataaaaa agaaggtgtt |
| 2701 | gctgcaaccg caacaaaaat gctagatgtg ggatccgttt tgatttatgt aggaagatcg |
| 2761 | aatatggtat tgtctcaagc taggattgtt tcgaaactct ttgaggaaaa gggaatagaa |
| 2821 | catgagtgga ggaataaaaa cgattggttg tttgtggaat tagcttgtat agaagaatat |
| 2881 | ggggaagatt cagaaatatt atctttatta aaacaaggta tagtacccca tagttctaaa |
| 2941 | ttaccaacag aagtacgtca gagcatagag aaattaatgg ctaatgataa tcctaagata |
| 3001 | ataattgcga catccacact tggacaaggg gttaatattg gtgtttcgac agttattgta |
| 3061 | tctaatgttc gtttagatga gagtaatact gtaaaagtaa atgatttttg gaatattgct |
| 3121 | ggtagagcgg ggagggcatt tacagataca gagggtaaaa ttctatacgc aattgataga |
| 3181 | aataaaagcc agtggtctat ttataatcaa attcaaatga aagaaatgta tttcaaatat |
| 3241 | agaaatattg aaaaagctac aagtggtctc tatcttcttc ttcgttatct atttatatta |
| 3301 | tcggaagaat tcgagataga atacagctta tttttagaac ttctagcaga aaatagagaa |
| 3361 | tccattgatg aacagaaagc tgtggagttt ttttctgagg cagatcagtt ccttgagtta |
| 3421 | ttagatgata ctctaatttc catggatatt atgaatgagg caaacgtttt ggaaaattcc |
| 3481 | tcttcttgga tagacgatgt ctttcgttct tcgctagctt ttattcaagc aaaacaagat |
| 3541 | caatcatttt ctgaagaaaa aatgattgaa atcttaaaag caagaaattc aggtgtaata |
| 3601 | aagttggctg gagaagaaac aaaatggcat tcaatagcat catcaagtgt accattgaga |
| 3661 | gcaagtcttg taattgaaca taggatagat gagctactaa agtatgtacg aaaatacatt |
| 3721 | gactcagata agagttttga agagttatta tctcttgtga tggaacttga tatatttatt |
| 3781 | gatagtctac cgatatctaa aatagaagga atagaaatag gtgctaattt ttctgaaatt |
| 3841 | cgtgagggat ggtttagtgg tactagcata cacatattgg aaaaaaggca cgaaaatgta |
| 3901 | agaagtatct gtaatgaata ttattctttt cattttcctt ggattgtaaa tgcgatagct |
| 3961 | caaaagatca aattaattga ttgccaagag gaatcaaagg tgttggagca aatttcttta |
| 4021 | tttgctgaaa tagggttaaa caataataaa agtgtaaaaa tctatttggc aggtataaag |
| 4081 | tcaagaaatt gtgccactga attatctgag aaaataggca tggataatga tttggtgacg |
| 4141 | cctgttaagg agctacttct agagtttttc aatttatgtg tagtgaaaaa agaggattgt |
| 4201 | tcagaaattt gtttcaattg gttaaagctt ttaaatgatg aaaaagaagc taaagagtat |
| 4261 | gtaaaggtaa aaagacggtc tttccaattt aatattcctt ttgatttaca tgacaatctt |
| 4321 | ttatatataa agaaagtaca gagtgaaata tggctgtgct catttgatta taaaattaaa |
| 4381 | attcctgtat taaaagagaa ggcgttattt aatgagtgct cggatatacc tgatattttc |
| 4441 | ttgagaaagg aaaaaggaga tgtctggatt ttagattctc ataatcctta tattattttt |
| 4501 | tattaattta tttgaattta atattttgga taaggcagat tgttcaacta tttggaggaa |
| 4561 | ataaaaaaac ggattattaa gggtgaacta aatttaatca aactttttac aaatctgcat |
| 4621 | ctttctcatt ttcaccttta aaaatgccaa ggaactcaat gaaatttggt atgcagatac |
| 4681 | cttcaagagc caccaatcct aaagtgaaat ctccatagtt tttacgatat tcttcataaa |
| 4741 | ttaatctggc tatatcttca ccaaaagaaa acatttcttt tgttatttcg gaaagataag |
| 4801 | gtagaagtgg tatatactca tctggtttac ctttttcatt tgaaggtact tttactgcat |
| 4861 | acccttgatc aagtgtcata atgttaattt gatgaccact atgtacaata gaatcgcgta |
| 4921 | tttctctatt cttatgaaag ctttctataa tagataatag ttttttttct aaggattcag |
| 4981 | gtaatttatc cttggttgtt cctttttcaa cggaagtaat taaactattt aaggaatcaa |
| 5041 | aactgagttg tccaacaaat ttaggagcta ctgttaatcg taggattttt gccatgaaat |
| 5101 | cataaattga acgaatatcc at. |

[0990] The coding regions for each of the hamA and hamB gene sequences within this embodiment of a Hachiman cassette (SEQ ID NO: 4) are as follows: nucleotides 339-1154 encode an embodiment of a HamA polypeptide, and nucleotides 1114-4506 encode an embodiment of a HamB polypeptide.

[0991] In some embodiments, a Defense System IV comprising a HamA polypeptide and a HamB polypeptide is encoded by the nucleic acid sequence set forth in SEQ ID NO: 4. In some embodiments, a Defense System IV comprising a HamA polypeptide and a HamB polypeptide, is encoded by a nucleic acid sequence having at least 80% homology to the sequence set forth in SEQ ID NO: 4. In some embodiments, a Defense System IV comprising a HamA polypeptide and a HamB polypeptide, is encoded by a nucleic acid sequence having at least 85% homology, or 90% homology, or 95% homology, or 97% homology, or 98% homology, or 99% homology to the sequence set forth in SEQ ID NO: 4. In some embodiments, a Defense System IV comprising a HamA polypeptide and a HamB polypeptide, is encoded by a nucleic acid sequence having at least 80% identity to the sequence set forth in SEQ ID NO: 4. In some embodiments, a Defense System IV comprising a HamA polypeptide and a HamB polypeptide, is encoded by a nucleic acid sequence having at least 85% identity, or 90% identity, or 95% identity, or 97% identity, or 98% identity, or 99% identity to the sequence set forth in SEQ ID NO: 4.

[0992] In some embodiments, Hachiman defense system components comprise HamA and HamB polypeptides. In some embodiments, Hachiman defense system components comprise functional portions of HamA and HamB polypeptides. In some embodiments, the Hachiman defense system components are encoded by hamA and hamB genes.

[0993] Non-limiting embodiments of endogenous Hachiman systems and the respective location of their components are provided in Table 12 herein.

[0994] In some embodiments, the components of a Hachiman system may be identified by the presence of similar domains present within each component. In some embodiments, domains comprise pfam domains and or clusters of orthologous groups (COG) domains.

[0995] In some embodiments, the term “HamA” refers to the polynucleotide or expression product e.g., the polypeptide encoded by the hamA gene. In some embodiments, the term “HamA” refers to a HamA polypeptide. In some embodiments, the hamA gene encodes a polypeptide comprising a pfam08878 domain. In some embodiments, the hamA gene encodes a polypeptide comprising a DUF1837 domain. In some embodiments, the hamA gene encodes a polypeptide comprising a pfam08878 domain and a DUF1837 domain. In some embodiments, the HamA polypeptide comprises a pfam08878 domain. In some embodiments, the HamA polypeptide comprises a DUF1837 domain. In some embodiments, the HamA polypeptide comprises a pfam08878 domain and a DUF1837 domain.

[0996] In some embodiments, HamA polypeptide is encoded by a gene positioned within 5-60 genes of a gene encoding a HamB polypeptide in a genome of a prokaryotic cell. In some embodiments, HamA polypeptide is encoded by a gene positioned within 5 genes upstream (5′) or downstream (3′) to a gene encoding a HamB polypeptide in a genome of a prokaryotic cell. In some embodiments, HamA polypeptide is encoded by a gene positioned within 5 genes upstream (5′) and downstream (3′) to a gene encoding a HamB polypeptide in a genome of a prokaryotic cell.

[0997] In some embodiments, HamA and HamB are encoded by genes positioned sequentially 5′ to 3′ in a genome of a prokaryotic cell. In some embodiments, HamA and HamB are encoded by genes positioned contiguously 5′ to 3′ in a genome of a prokaryotic cell.

[0998] In some embodiments, hamA and hamB genes are positioned sequentially 5′ to 3′ in a genome of a prokaryotic cell. In some embodiments, hamA and hamB, genes are positioned contiguously 5′ to 3′ in a genome of a prokaryotic cell.

[0999] In some embodiments, a HamA polypeptide is about 269 amino acids long (median gene size).

[1000] In some embodiments, the HamA polypeptide comprises the amino acid sequence having at least 80% homology to a sequence selected from the group consisting of the polypeptides referenced in Table 12, rows 2-1782, columns H and I. In some embodiments, the HamA polypeptide comprises the amino acid sequence having at least 80% homology within similar domain regions within a sequence selected from the group consisting of the polypeptides referenced in Table 12, rows 2-1782, columns H and I. In some embodiments, the HamA polypeptide comprises a homolog of a polypeptide having the amino acid sequences set forth in the polypeptides referenced in Table 12, rows 2-1782, columns H and I.

[1001] In some embodiments, the HamA polypeptide comprises the amino acid sequence having at least 80% identity to a sequence selected from the group consisting of the polypeptides referenced in Table 12, rows 2-1782, columns H and I. In some embodiments, the HamA polypeptide comprises the amino acid sequence having at least 80% identity within similar domain regions within a sequence selected from the group consisting of the polypeptides referenced in Table 12, rows 2-1782, columns H and I.

[1002] In some embodiments, the HamA polypeptide comprises an amino acid sequence having at least 80%, at least 85%, at least 90%, or at least 95% homology to a sequence selected from the group consisting of the polypeptides referenced in Table 12, rows 2-1782, columns H and I. In some embodiments, the HamA polypeptide comprises the amino acid sequence having at least 80%, 85%, 90%, 95% homology within similar domain regions within a sequence selected from the group consisting of the polypeptides referenced in Table 12, rows 2-1782, columns H and I. In some embodiments, the HamA polypeptide comprises an amino acid sequence having at least 80%, at least 85%, at least 90%, or at least 95% identity to a sequence selected from the group consisting of the polypeptides referenced in Table 12, rows 2-1782, columns H and I. In some embodiments, the HamA polypeptide comprises the amino acid sequence having at least 80%, 85%, 90%, 95% identity within similar domain regions within a sequence selected from the group consisting of the polypeptides referenced in Table 12, rows 2-1782, columns H and I. In some embodiments, the HamA polypeptide comprises an amino acid sequence selected from the group consisting of the polypeptides referenced in Table 12, rows 2-1782, columns H and I.

[1003] In some embodiments, the HamA polypeptide comprises an amino acid sequence encoded by a nucleic acid sequence having at least 80%, at least 85%, at least 90%, or at least 95% homology to a sequence selected from the group consisting of the polynucleotides referenced in Table 12, rows 2-1782, columns H and J. In some embodiments, the HamA polypeptide comprises the amino acid sequence encoded by a nucleic acid sequence having at least 80%, 85%, 90%, 95% homology within similar domain regions within a sequence selected from the group consisting of the polynucleotides referenced in Table 12, rows 2-1782, columns H and J. In some embodiments, the HamA polypeptide comprises an amino acid sequence encoded by a nucleic acid sequence having at least 80%, at least 85%, at least 90%, or at least 95% identity to a sequence selected from the group consisting of the polynucleotides referenced in Table 12, rows 2-1782, columns H and J. In some embodiments, the HamA polypeptide comprises the amino acid sequence encoded by a nucleic acid sequence having at least 80%, 85%, 90%, 95% homology within similar domain regions within a sequence selected from the group consisting of the polynucleotides referenced in Table 12, rows 2-1782, columns H and J. In some embodiments, the HamA polypeptide comprises an amino acid sequence encoded from a nucleic acid sequence selected from the group consisting of the polynucleotides referenced in Table 12, rows 2-1782, columns H and J.

[1004] In some embodiments, the nucleic acid sequence of a hamA gene comprises a nucleic acid sequence having at least 80%, at least 85%, at least 90%, or at least 95% homology to a sequence selected from the group consisting of the polynucleotides referenced in Table 12, rows 2-1782, columns H and J. In some embodiments, the hamA gene comprises a nucleic acid sequence having at least 80%, 85%, 90%, 95% homology within encoded similar domain regions in comparison with nucleotide sequence encoding these domain within a sequence selected from the group consisting of the polynucleotides referenced in Table 12, rows 2-1782, columns H and J. In some embodiments, the nucleic acid sequence of a hamA gene comprises a nucleic acid sequence having at least 80%, at least 85%, at least 90%, or at least 95% identity to a sequence selected from the group consisting of the polynucleotides referenced in Table 12, rows 2-1782, columns H and J. In some embodiments, the hamA gene comprises a nucleic acid sequence having at least 80%, 85%, 90%, 95% identity within encoded similar domain regions in comparison with nucleotide sequence encoding these domain within a sequence selected from the group consisting of the polynucleotides referenced in Table 12, rows 2-1782, columns H and J. In some embodiments, the nucleic acid sequence of a hamA gene comprises a nucleic acid sequence selected from the group consisting of the polynucleotides referenced in Table 12, rows 2-1782, columns H and J.

[1005] As used herein, the term “HamB” refers to the polynucleotide or expression product e.g., polypeptide encoded by the hamB gene. In some embodiments, the term “HamB” refers to a HamB polypeptide. In some embodiments, the product of the hamB gene comprises a COG1204 domain. In some embodiments, the hamB gene encodes a pfam00270 domain. In some embodiments, the hamB gene encodes a pfam00271 domain. In some embodiments, the hamB gene encodes a helicase.

[1006] In some embodiments, HamB polypeptide is encoded by a gene positioned within 5-60 genes of a gene encoding a HamA polypeptide in a genome of a prokaryotic cell. In some embodiments, HamB polypeptide is encoded by a gene positioned within 5 genes upstream (5′) or downstream (3′) to a gene encoding a HamA polypeptide in a genome of a prokaryotic cell. In some embodiments, HamB polypeptide is encoded by a gene positioned within 5 genes upstream (5′) and downstream (3′) to a gene encoding a HamA polypeptide in a genome of a prokaryotic cell.

[1007] In some embodiments, HamA and HamB are encoded by genes positioned sequentially 5′ to 3′ in a genome of a prokaryotic cell. In some embodiments HamA and HamB are encoded by genes positioned contiguously 5′ to 3′ in a genome of a prokaryotic cell.

[1008] In some embodiments, a HamB polypeptide is about 867 amino acids long (median gene size).

[1009] In some embodiments, the HamB polypeptide comprises the amino acid sequence having at least 80% homology to a sequence selected from the group consisting of the polypeptides referenced in Table 12, rows 2-1782, columns L and M. In some embodiments, the HamB polypeptide comprises the amino acid sequence having at least 80% homology within similar domain regions within a sequence selected from the group consisting of the polypeptides referenced in Table 12, rows 2-1782, columns L and M. In some embodiments, the HamB polypeptide comprises a homolog of a polypeptide having the amino acid sequences set forth in the polypeptides referenced in Table 12, rows 2-1782, columns L and M.

[1010] In some embodiments, a HamB polypeptide homolog comprises a helicase domain.

[1011] In some embodiments, a HamB polypeptide homolog comprises a helicase activity.

[1012] In some embodiments, the HamB polypeptide comprises the amino acid sequence having at least 80% identity to a sequence selected from the group consisting of the polypeptides referenced in Table 12, rows 2-1782, columns L and M. In some embodiments, the HamB polypeptide comprises the amino acid sequence having at least 80% identity within similar domain regions within a sequence selected from the group consisting of the polypeptides referenced in Table 12, rows 2-1782, columns L and M.

[1013] In some embodiments, the HamB polypeptide comprises an amino acid sequence having at least 80%, at least 85%, at least 90%, or at least 95% homology to a sequence selected from the group consisting of the polypeptides referenced in Table 12, rows 2-1782, columns L and M. In some embodiments, the HamB polypeptide comprises the amino acid sequence having at least 80%, 85%, 90%, 95% homology within similar domain regions within a sequence selected from the group consisting of the polypeptides referenced in Table 12, rows 2-1782, columns L and M. In some embodiments, the HamB polypeptide comprises an amino acid sequence having at least 80%, at least 85%, at least 90%, or at least 95% identity to a sequence selected from the group consisting of the polypeptides referenced in Table 12, rows 2-1782, columns L and M. In some embodiments, the HamB polypeptide comprises the amino acid sequence having at least 80%, 85%, 90%, 95% identity within similar domain regions within a sequence selected from the group consisting of the polypeptides referenced in Table 12, rows 2-1782, columns L and M. In some embodiments, the HamB polypeptide comprises an amino acid sequence selected from the group consisting of the polypeptides referenced in Table 12, rows 2-1782, columns L and M.

[1014] In some embodiments, the HamB polypeptide comprises an amino acid sequence encoded by a nucleic acid sequence having at least 80%, at least 85%, at least 90%, or at least 95% homology to a sequence selected from the group consisting of the polynucleotides referenced in Table 12, rows 2-1782, columns L and N. In some embodiments, the HamB polypeptide comprises the amino acid sequence encoded by a nucleic acid sequence having at least 80%, 85%, 90%, 95% homology within similar domain regions within a sequence selected from the group consisting of the polynucleotides referenced in Table 12, rows 2-1782, columns L and N. In some embodiments, the HamB polypeptide comprises an amino acid sequence encoded by a nucleic acid sequence having at least 80%, at least 85%, at least 90%, or at least 95% identity to a sequence selected from the group consisting of the polynucleotides referenced in Table 12, rows 2-1782, columns L and N. In some embodiments, the HamB polypeptide comprises the amino acid sequence encoded by a nucleic acid sequence having at least 80%, 85%, 90%, 95% homology within similar domain regions within a sequence selected from the group consisting of the polynucleotides referenced in Table 12, rows 2-1782, columns L and N. In some embodiments, the HamB polypeptide comprises an amino acid sequence encoded from a nucleic acid sequence selected from the group consisting of the polynucleotides referenced in Table 12, rows 2-1782, columns L and N.

[1015] In some embodiments, the nucleic acid sequence of a hamB gene comprises a nucleic acid sequence having at least 80%, at least 85%, at least 90%, or at least 95% homology to a sequence selected from the group consisting of the polynucleotides referenced in Table 12, rows 2-1782, columns L and N. In some embodiments, the hamB gene comprises a nucleic acid sequence having at least 80%, 85%, 90%, 95% homology within encoded similar domain regions in comparison with nucleotide sequence encoding these domain within a sequence selected from the group consisting of the polynucleotides referenced in Table 12, rows 2-1782, columns L and N. In some embodiments, the nucleic acid sequence of a hamB gene comprises a nucleic acid sequence having at least 80%, at least 85%, at least 90%, or at least 95% identity to a sequence selected from the group consisting of the polynucleotides referenced in Table 12, rows 2-1782, columns L and N. In some embodiments, the hamB gene comprises a nucleic acid sequence having at least 80%, 85%, 90%, 95% identity within encoded similar domain regions in comparison with nucleotide sequence encoding these domain within a sequence selected from the group consisting of the polynucleotides referenced in Table 12, rows 2-1782, columns L and N. In some embodiments, the nucleic acid sequence of a hamB gene comprises a nucleic acid sequence selected from the group consisting of the polynucleotides referenced in Table 12, rows 2-1782, columns L and N.

[1016] A skilled artisan would appreciate that the terms a “functional portion of a Defense System IV component” or “functional fragment of Defense System IV component” or “functional portion of a Hachiman defense system component” or “functional fragment of Hachiman defense system component” refers to a functional portion of a Hachiman polynucleotide or polypeptide, as disclosed herein, which expression is sufficient to elicit an anti-phage activity alone or in combination with the at least one of the other Hachiman polynucleotides or polypeptides disclosed herein or functional portions thereof.

[1017] The terms “HamA”, “HamB”, “hamA”, and “hamB”, also refer to functional HamA, HamB, hamA, and hamB, homologs, which exhibit the desired activity (i.e., conferring phage resistance). Such homologs can be, for example, at least 80%, at least 81%, at least 82%, at least 83%, at least 84%, at least 85%, at least 86%, at least 87%, at least 88%, at least 89%, at least 90%, at least 91%, at least 92%, at least 93%, at least 94%, at least 95%, at least 96%, at least 97%, at least 98%, at least 99% or 100% identical or homologous to the polypeptide sequences referenced in Table 12 rows 2-1782 columns H and I and L and M, respectively, or 80%, at least 81%, at least 82%, at least 83%, at least 84%, at least 85%, at least 86%, at least 87%, at least 88%, at least 89%, at least 90%, at least 91%, at least 92%, at least 93%, at least 94%, at least 95%, at least 96%, at least 97%, at least 98%, at least 99% or 100% homologous or identical to the polynucleotide sequences referenced in Table 12 rows 2-1782 columns H and J and L and N, respectively. In some embodiments, such homologs comprise at least 80%, at least 81%, at least 82%, at least 83%, at least 84%, at least 85%, at least 86%, at least 87%, at least 88%, at least 89%, at least 90%, at least 91%, at least 92%, at least 93%, at least 94%, at least 95%, at least 96%, at least 97%, at least 98%, at least 99% or 100% homology or identity within similar domain regions of the polypeptide sequences referenced in Table 12 rows 2-1782 columns H and I and L and M, respectively, or 80%, at least 81%, at least 82%, at least 83%, at least 84%, at least 85%, at least 86%, at least 87%, at least 88%, at least 89%, at least 90%, at least 91%, at least 92%, at least 93%, at least 94%, at least 95%, at least 96%, at least 97%, at least 98%, at least 99% or 100% homology or identity within nucleotide sequences encoding similar domain regions to the polynucleotide sequences referenced in Table 12 rows 2-1782 columns H and J and L and N, respectively.

[1018] Table 12 presents embodiments of components of Defense System IV that may be found in a diverse array of bacteria and archaea genomes (referenced in Table 18). Table 12 presents embodiments of nucleic acid sequences encoding gene cassettes of Defense System IV (referenced in Table 18).

[1019] The Shedu Defense System

[1020] In some embodiments, a defense system disclosed herein comprises a Shedu anti-phage defense system. (Table 13)

[1021] In some embodiments, a Shedu defense system provides a host cell with resistance to entry of foreign nucleic acid invasion. In some embodiments, a host cell expressing a functional Shedu defense system (Defense System V) provides the host cell resistance foreign nucleic acid invasion.

[1022] In some embodiments, a Shedu defense system provides a host cell with resistance to at least one phage. In some embodiments, a microbial cell comprising a Shedu defense system is protected from phage infection. In some embodiments, a microbial cell expressing a Shedu defense system is protected from phage infection. In some embodiments, a microbial cell expressing a functional Shedu defense system is protected from phage infection. In some embodiments, a bacterial cell comprising a Shedu defense system is protected from phage infection. In some embodiments, a bacterial cell expressing a Shedu defense system is protected from phage infection. In some embodiments, a bacterial cell expressing a functional Shedu defense system is protected from phage infection.

[1023] In some embodiments, a Shedu defense system provides a host cell with resistance to a plasmid.

[1024] In some embodiments, a Shedu defense system (Defense System V) provides a host cell with resistance to plasmid transformation. In some embodiments, a host cell expressing a functional Shedu defense system (Defense System V) provides a host cells with resistance to plasmid transformation.

[1025] In some embodiments, a Shedu defense system (Defense system V) provides a host cell with resistance to entry of conjugative elements. In some embodiments, a host cell expressing a function Shedu defense system (Defense System V) provides the host cell resistance from entry of conjugative elements.

[1026] As used herein, the term “a Shedu anti-phage defense system” may be used interchangeably with the term “a Defense System V”, having all the same meanings and qualities. A skilled artisan would appreciate that the term “Shedu system” may be used interchangeably in some embodiments with “Shedu defense system”, “Shedu the defense system”, “Shedu anti-phage system”, and “Defense System V”, having all the same meanings and qualities.

[1027] In some embodiments, a microbial species does not comprise an endogenous Defense System V. In some embodiments, a microbial species does not express an endogenous Defense System V. In some embodiments, a microbial species does not express a functional Defense System V.

[1028] In some embodiments, a bacterial species does not comprise an endogenous Defense System V. In some embodiments, a bacterial species does not express an endogenous Defense System V. In some embodiments, a bacterial species does not express an endogenous functional Defense System V.

[1029] A Shedu defense system comprises, in some embodiments, a nucleic acid construct comprising a nucleic acid sequence encoding a SduA polypeptide comprising a pfam14082 domain or a DUF4263 domain or a pfam01939 domain, or a combination thereof. In some embodiments, a Shedu defense system comprises a SduA polypeptide comprising an endonuclease NucS activity. A skilled artisan would appreciate that an endonuclease NucS activity encompasses an enzymatic activity cleaving both 3′ and 5′ ssDNA extremities of branched DNA structures, wherein the NucS endonuclease may bind to ssDNA. In some embodiments, a Shedu defense system comprises a nucleic acid construct comprising a nucleic acid sequence comprising a sduA gene.

[1030] A Shedu defense system comprises, in some embodiments, a nucleic acid construct comprising a nucleic acid sequence comprising a sduA gene encoding a pfam14082 domain or a DUF4263 domain or a pfam01939 domain, or a combination thereof. In some embodiments, a Shedu defense system comprising a sduA gene encodes a polypeptide comprising an endonuclease NucS activity.

[1031] In some embodiments, a Defense System V comprises a SduA polypeptide comprising a pfam14082 domain or a pfam01939 domain or comprising an amino acid sequence having at least 80% identity to a sequence selected from the group referenced in Table 13 rows 2-1247 columns H and I or a combination thereof.

[1032] In some embodiments, a Shedu defense system having an anti-phage activity comprises a nucleic acid construct comprising a nucleic acid sequence encoding a SduA polypeptide. In some embodiments, a Shedu defense system having an anti-phage activity comprises a nucleic acid construct comprising a nucleic acid sequence comprising a sduA gene.

[1033] In some embodiments, the Shedu anti-phage defense system comprises a nucleic acid construct comprising nucleic acid sequences encoding a cassette comprising a sduA gene.

[1034] In some embodiments, a construct comprising the Shedu defense system encodes one component of the defense system. In some embodiments, the components of a Shedu defense system comprise a sduA gene. In some embodiments, the components of a Shedu defense system consist of a sduA gene. In some embodiments, the components of a Shedu defense system comprise nucleic acid sequences encoding a SduA polypeptide. In some embodiments, the components of a Shedu defense system consist of nucleic acid sequences encoding a SduA polypeptide.

[1035] In some embodiments, a construct comprising the Shedu defense system encodes one component of the defense system, whereby a second construct may be used to assemble the functional defense system. In some embodiments, a construct comprising the Shedu defense system encodes one component of the defense system, whereby additional constructs may be used to assemble the functional defense system. In some embodiments, the Shedu defense system comprises non-coding RNA.

[1036] In some embodiments, the components making up a functional Shedu anti-phage defense system comprise a SduA polypeptide encoded by a sduA gene.

[1037] In some embodiments, a Shedu defense system having an anti-phage activity comprises a nucleic acid encoding a SduA polypeptide.

[1038] In some embodiments, a Shedu defense system having an anti-phage activity comprises a nucleic acid comprising a sduA gene.

[1039] In some embodiments, the Shedu system (Defense System V) composition and order is as shown in FIG. 3B.

[1040] In some embodiments, a Shedu defense system having an anti-phage activity originates from a microbial genome, for example a bacterial and or an archaeal genome (Table 13). A skilled artisan would appreciate that the Shedu system is not present in the majority of bacteria and or archaea species.

[1041] In some embodiments, a Shedu defense system having an anti-phage activity comprises a nucleic acid construct comprising non-coding regions. In some embodiments, the non-coding regions comprises nucleic acid sequence not naturally occurring in the microbial species of origin. In some embodiments, the non-coding regions comprises nucleic acid sequence is the naturally occurring in the microbial species of origin.

[1042] In some embodiments, Shedu defense system components comprise functional portions of a SduA polypeptides. In some embodiments, the Shedu defense system functional portions of a SduA polypeptide component is encoded by a sduA gene.

[1043] Non-limiting embodiments of endogenous Shedu systems and the respective location of their component are provided in Table 13 herein. In some embodiments, a Shedu (Defense System V) gene cassette comprises the nucleic acid sequence:

(SEQ ID NO: 9; construct 28 Table 4)

| | |
|---|---|
| 1 | aatgaaattt gaacgccttt cggcagtgat atttgtacac ctcattttta cgtgccagcg |
| 61 | tgatgtacat gaaaagtggt gaaaagattc ctattgtggc tgagagtagt agcatgatga |
| 121 | tggtgtttct tttttctttt ttgatggttt tcatgagtga tttggccccc tttttgtttt |
| 181 | gtcttcttta aattaggggt gacgttgggg gagatgcaag gggaatctgt agaaaaattg |
| 241 | attgagaccg atatagataa attccatatt tttatttatg aaatcctata ctgtcaatat |
| 301 | taatcaaaac aattaatgag atcaaatttt tttgttcatc agacattaat agaatgattg |
| 361 | tatggataat agtagtttct ttatcacaac aacgcattat catgaagctc cacaatagga |
| 421 | ttgtagaata acctcaaatt caatcctatg ttcattgaaa agggggcggg gaactcttta |
| 481 | aacatctcca cgaggtattt tgagtgtatg tgctttatta attctacatg cttaggctaa |
| 541 | ctaatcatta atagactaca aaaaacattc atgcctagta cagaaacaca cccttctcat |
| 601 | tgaagaagac taaccagtgg tattcgcaaa agaagaaaag aggattacct caacagccac |
| 661 | ctaccttttt atattgtaaa tatgtcctat ttaattcgga gtagtgtata ctattagtag |
| 721 | aaaattccaa gcgtagctat cgaggagtgt taacaaaata tgagtgacaa aattaatgta |
| 781 | tggacaacat caagagactc tgctgtatgt ggtgacattg aattaaaaaa aacatctact |
| 841 | actagactta tttttaggcc tgaaatagtg aacaataata aaaatcctaa ggcatctgtt |
| 901 | agaggatgct ttatctttca aaagaaaggt agaaatgccc tttgggatga ttataaggaa |
| 961 | ttagatatga ataagttaaa agcagaggaa tggattaaac tagagataaa ctctgatgct |
| 1021 | atgctgactc ttactaaaga aattcagaag cattatgcag tgcatgaaaa gtatggggtt |
| 1081 | aggtatggag catttcacct tttcaaggat aaccctgata tcgagaaact gattgaaatg |
| 1141 | tttgagagta acactgattt gcttactcaa ttaatggagg atgacaagag tgaagctcta |
| 1201 | gagaaaacat tagaatggat tgttacaaat gataatccag ataaaataat tgacaggctt |
| 1261 | aaaaatctaa aagagcaaga tttagaccaa cttaatactc ttattgggat agctaatcta |
| 1321 | aaaaaggtat tgtctgtttg ggaaagcaac aaactcacta atacctctga gaagttttgg |
| 1381 | caaagtgtct taaaagaaaa cacttggatt ttgagtcaga ttttctctaa cccgactgtt |
| 1441 | ttgataaatg atgaagccta tgtaggcgga aagactgtca aaaatgatag tggtaagtta |
| 1501 | gtagatttct tatatgcaaa ccctttctca aaagatgctg tacttattga gattaagact |
| 1561 | ccatcaacgc ctctaattac tcccactgaa tacagaacag gagtatattc cgcacataaa |
| 1621 | gacttgacag gagcagttac gcaagtgttg acttataaga caaccctaca gagggagtat |
| 1681 | cagaatatag actataacaa ttatagacag ggaatcaaaa ctgattttga cattattact |
| 1741 | ccttgttgtg ttgttatagc aggcatgttt gatacattaa ctgatacagc tcatagacat |
| 1801 | tcctttgaac tgtacagaaa agagttaaaa aatgtaactg taattacttt tgatgaactg |
| 1861 | tttgaaaggg ttaaggggtt aatcaagcta ttggaaggat aaacccttgc cttctttttt |
| 1921 | tactgcctct aaatttatag aatgcatccg ttaaagctaa gtagaaatat tagaagaaag |
| 1981 | ggcaaaattt aaagagagaa atttgccttt tctttttatc aaactgatca aaaaatttta |
| 2041 | tatttcaatc actttatttc gccacctgaa tttttttatt ttttaaaagt gccttgcctc |
| 2101 | tcaccaattc aggtcattat aaaacaaaaa aagaaccgtt tatcaacaac aaacggtccg |
| 2161 | attaaaaatc ttgtgcgtat ctattaaaaa taacttaata aaacatgctt att. |

[1044] The coding region for the sduA gene sequence within this embodiment of a Shedu cassette (SEQ ID NO: 9) is as follows: nucleotides 760-1902 encode an embodiment of a SduA polypeptide.

[1045] In some embodiments, a Defense System V comprising a SduA polypeptide is encoded by the nucleic acid sequence set forth in SEQ ID NO: 9. In some embodiments, a Defense System V comprising a SduA polypeptide, is encoded by a nucleic acid sequence having at least 80% homology to the sequence set forth in SEQ ID NO: 9. In some embodiments, a Defense System V comprising a SduA polypeptide, is encoded by a nucleic acid sequence having at least 85% homology, or 90% homology, or 95% homology, or 97% homology, or 98% homology, or 99% homology to the sequence set forth in SEQ ID NO: 9. In some embodiments, a Defense System V comprising a SduA polypeptide, is encoded by a nucleic acid sequence having at least 80% identity to the sequence set forth in SEQ ID NO: 9. In some embodiments, a Defense System V comprising a SduA polypeptide, is encoded by a nucleic acid sequence having at least 85% identity, or 90% identity, or 95% identity, or 97% identity, or 98% identity, or 99% identity to the sequence set forth in SEQ ID NO: 9.

[1046] In some embodiments, the components of a Shedu system may be identified by the presence of similar domains present within each component. In some embodiments, domains comprise pfam domains and or clusters of orthologous groups (COG) domains.

[1047] In some embodiments, the term “SduA” refers to the polynucleotide or expression product e.g., the polypeptide encoded by the sduA gene. In some embodiments, the term “SduA” refers to a SduA polypeptide. In some embodiments, the sduA gene encodes a polypeptide comprising a pfam14082 domain. In some embodiments, the sduA gene encodes a polypeptide comprising a DUF4263 domain. In some embodiments, the sduA gene encodes a polypeptide comprising a pfam01939 domain. In some embodiments, the sduA gene encodes a polypeptide comprising a pfam14082 domain, a DUF4236 domain, or a pfam01939 domain, or any combination thereof. In some embodiments, the SduA polypeptide comprises a pfam14082 domain. In some embodiments, the SduA polypeptide comprises a DUF4263 domain. In some embodiments, the SduA polypeptide comprises a pfam01939 domain. In some embodiments, the SduA polypeptide comprises a pfam14082 domain, a DUF4263 domain, or pfam01939 domain, or any combination thereof.

[1048] In some embodiments, a SduA polypeptide is about 367 amino acids long (median gene size).

[1049] In some embodiments, the SduA polypeptide comprises the amino acid sequence having at least 80% homology to a sequence selected from the group consisting of the polypeptides referenced in Table 13, rows 2-1247, columns H and I. In some embodiments, the SduA polypeptide comprises the amino acid sequence having at least 80% homology within similar domain regions within a sequence selected from the group consisting of the polypeptides referenced in Table 13, rows 2-1247, columns H and I. In some embodiments, the SduA polypeptide comprises a homolog of a polypeptide having the amino acid sequences set forth in the polypeptides referenced in Table 13, rows 2-1247, columns H and I.

[1050] In some embodiments, a SduA polypeptide homolog comprises an endonuclease NucS domain. In some embodiments, a SduA polypeptide homolog comprises an endonuclease NucS activity. In some embodiments, a SduA polypeptide homolog comprises an activity that cleaves both 3′ and 5′ ssDNA extremities of branched DNA structures. In some embodiments, a SduA polypeptide homolog binds to ssDNA. In some embodiments, a SduA polypeptide homolog comprises an activity that cleaves both 3′ and 5′ ssDNA extremities of branched DNA structures and it binds to ssDNA. In some embodiments, an SduA polypeptide comprises a member of the PD-(D/E)XK superfamily.

[1051] In some embodiments, the SduA polypeptide comprises the amino acid sequence having at least 80% identity to a sequence selected from the group consisting of the polypeptides referenced in Table 13, rows 2-1247, columns H and I. In some embodiments, the SduA polypeptide comprises the amino acid sequence having at least 80% identity within similar domain regions within a sequence selected from the group consisting of the polypeptides referenced in Table 13, rows 2-1247, columns H and I.

[1052] In some embodiments, the SduA polypeptide comprises an amino acid sequence having at least 80%, at least 85%, at least 90%, or at least 95% homology to a sequence selected from the group consisting of the polypeptides referenced in Table 13, rows 2-1247, columns H and I. In some embodiments, the SduA polypeptide comprises the amino acid sequence having at least 80%, 85%, 90%, 95% homology within similar domain regions within a sequence selected from the group consisting of the polypeptides referenced in Table 13, rows 2-1247, columns H and I. In some embodiments, the SduA polypeptide comprises an amino acid sequence having at least 80%, at least 85%, at least 90%, or at least 95% identity to a sequence selected from the group consisting of the polypeptides referenced in Table 13, rows 2-1247, columns H and I. In some embodiments, the SduA polypeptide comprises the amino acid sequence having at least 80%, 85%, 90%, 95% identity within similar domain regions within a sequence selected from the group consisting of the polypeptides referenced in Table 13, rows 2-1247, columns H and I. In some embodiments, the SduA polypeptide comprises an amino acid sequence selected from the group consisting of the polypeptides referenced in Table 13, rows 2-1247, columns H and I.

[1053] In some embodiments, the SduA polypeptide comprises an amino acid sequence encoded by a nucleic acid sequence having at least 80%, at least 85%, at least 90%, or at least 95% homology to a sequence selected from the group consisting of the polynucleotides referenced in Table 13, rows 2-1247, columns H and J. In some embodiments, the SduA polypeptide comprises the amino acid sequence encoded by a nucleic acid sequence having at least 80%, 85%, 90%, 95% homology within similar domain regions within a sequence selected from the group consisting of the polynucleotides referenced in Table 13, rows 2-1247, columns H and J. In some embodiments, the SduA polypeptide comprises an amino acid sequence encoded by a nucleic acid sequence having at least 80%, at least 85%, at least 90%, or at least 95% identity to a sequence selected from the group consisting of the polynucleotides referenced in Table 13, rows 2-1247, columns H and J. In some embodiments, the SduA polypeptide comprises the amino acid sequence encoded by a nucleic acid sequence having at least 80%, 85%, 90%, 95% homology within similar domain regions within a sequence selected from the group consisting of the polynucleotides referenced in Table 13, rows 2-1247, columns H and J. In some embodiments, the SduA polypeptide comprises an amino acid sequence encoded from a nucleic acid sequence selected from the group consisting of the polynucleotides referenced in Table 13, rows 2-1247, columns H and J.

[1054] In some embodiments, the nucleic acid sequence of a sduA gene comprises a nucleic acid sequence having at least 80%, at least 85%, at least 90%, or at least 95% homology to a sequence selected from the group consisting of the polynucleotides referenced in Table 13, rows 2-1247, columns H and J. In some embodiments, the sduA gene comprises a nucleic acid sequence having at least 80%, 85%, 90%, 95% homology within encoded similar domain regions in comparison with nucleotide sequence encoding these domain within a sequence selected from the group consisting of the polynucleotides referenced in Table 13, rows 2-1247, columns H and J. In some embodiments, the nucleic acid sequence of a sduA gene comprises a nucleic acid sequence having at least 80%, at least 85%, at least 90%, or at least 95% identity to a sequence selected from the group consisting of the polynucleotides referenced in Table 13, rows 2-1247, columns H and J. In some embodiments, the sduA gene comprises a nucleic acid sequence having at least 80%, 85%, 90%, 95% identity within encoded similar domain regions in comparison with nucleotide sequence encoding these domain within a sequence selected from the group consisting of the polynucleotides referenced in Table 13, rows 2-1247, columns H and J. In some embodiments, the nucleic acid sequence of a sduA gene comprises a nucleic acid sequence selected from the group consisting of the polynucleotides referenced in Table 13, rows 2-1247, columns H and J.

[1055] A skilled artisan would appreciate that the terms a “functional portion of a Defense System V component” or “functional fragment of Defense System V component” or “functional portion of a Shedu defense system component” or “functional fragment of Shedu defense system component” refers to a functional portion of a Shedu polynucleotide or polypeptide, as disclosed herein, which expression is sufficient to elicit an anti-phage activity alone.

[1056] The terms “SduA” and “sduA”, also refer to functional SduA and sduA, homologs, which exhibit the desired activity (i.e., conferring phage resistance). Such homologs can be, for example, at least 80%, at least 81%, at least 82%, at least 83%, at least 84%, at least 85%, at least 86%, at least 87%, at least 88%, at least 89%, at least 90%, at least 91%, at least 92%, at least 93%, at least 94%, at least 95%, at least 96%, at least 97%, at least 98%, at least 99% or 100% identical or homologous to the polypeptide sequences referenced in Table 13 rows 2-1247 columns H and I, respectively, or 80%, at least 81%, at least 82%, at least 83%, at least 84%, at least 85%, at least 86%, at least 87%, at least 88%, at least 89%, at least 90%, at least 91%, at least 92%, at least 93%, at least 94%, at least 95%, at least 96%, at least 97%, at least 98%, at least 99% or 100% identical or homologous to the polynucleotide sequences referenced in Table 13 rows 2-1247 columns H and J, respectively. In some embodiments, such homologs comprise at least 80%, at least 81%, at least 82%, at least 83%, at least 84%, at least 85%, at least 86%, at least 87%, at least 88%, at least 89%, at least 90%, at least 91%, at least 92%, at least 93%, at least 94%, at least 95%, at least 96%, at least 97%, at least 98%, at least 99% or 100% homology or identity within similar domain regions of the polypeptide sequences referenced in Table 13 rows 2-1247 columns H and I, respectively, or 80%, at least 81%, at least 82%, at least 83%, at least 84%, at least 85%, at least 86%, at least 87%, at least 88%, at least 89%, at least 90%, at least 91%, at least 92%, at least 93%, at least 94%, at least 95%, at least 96%, at least 97%, at least 98%, at least 99% or 100% identity or homology within nucleotide sequences encoding similar domain regions to the sequences referenced in Table 13 rows 2-1247 columns H and J, respectively.

[1057] Table 13 presents embodiments of components of Defense System V that may be found in a diverse array of bacteria and archaea genomes (referenced in Table 18). Table 13 presents embodiments of nucleic acid sequences encoding gene cassettes of Defense System V (referenced in Table 18).

[1058] The Gabija Defense System

[1059] In some embodiments, a defense system disclosed herein comprises a Gabija anti-phage defense system. (Table 14)

[1060] In some embodiments, a Gabija defense system provides a host cell with resistance to entry of foreign nucleic acid invasion. In some embodiments, a host cell expressing a functional Gabija defense system (Defense System VI) provides the host cell resistance foreign nucleic acid invasion.

[1061] In some embodiments, a Gabija defense system provides a host cell with resistance to at least one phage.

[1062] In some embodiments, a microbial cell comprising a Gabija defense system protects the microbial cell from phage infection. In some embodiments, a microbial cell expressing a Gabija defense system protects the microbial cell from phage infection. In some embodiments, a microbial cell expressing a functional Gabija defense system protects the microbial cell from phage infection. In some embodiments, a bacterial cell comprising a Gabija defense system protects the bacterial cell from phage infection. In some embodiments, a bacterial cell expressing a Gabija defense system protects the bacterial cell from phage infection. In some embodiments, a bacterial cell expressing a functional Gabija defense system protects the bacterial cell from phage infection.

[1063] In some embodiments, a Gabija defense system (Defense System VI) provides a host cell with resistance to plasmid transformation In some embodiments, a host cell expressing a functional Gabija defense system (Defense System VI) provides a host cells with resistance to plasmid transformation.

[1064] In some embodiments, a Gabija defense system (Defense system VI) provides a host cell with resistance to entry of conjugative elements. In some embodiments, a host cell expressing a function Gabija defense system (Defense System VI) provides the host cell resistance from entry of conjugative elements.

[1065] As used herein, the term “a Gabija anti-phage defense system” may be used interchangeably with the term “a Defense System VI”, having all the same meanings and qualities. A skilled artisan would appreciate that the term “Gabija system” may be used interchangeably in some embodiments with “Gabija defense system”, “Gabija defense system”, “Gabija anti-phage system”, and “Defense System VI”, having all the same meanings and qualities.

[1066] In some embodiments, a microbial species does not comprise an endogenous Defense System VI. In some embodiments, a microbial species does not express an endogenous Defense System VI. In some embodiments, a microbial species does not express an endogenous functional Defense System VI.

[1067] In some embodiments, a bacterial species does not comprise an endogenous Defense System VI. In some embodiments, a bacterial species does not express an endogenous Defense System VI. In some embodiments, a bacterial species does not express an endogenous functional Defense System VI.

[1068] A Gabija defense system comprises, in some embodiments, a nucleic acid construct comprising a nucleic acid sequence encoding a GajA polypeptide comprising a pfam13175 domain or a COG3593 domain or a combination thereof, and a GajB polypeptide comprising a pfam04257 domain or a pfam00580 domain or a pfam13361 domain or a combination thereof. In some embodiments, a Gabija defense system comprises a nucleic acid construct comprising a nucleic acid sequence comprising a gajA gene and a gajB gene.

[1069] In some embodiments, a Gabija defense system comprises, a GajA polypeptide comprising a pfam13175 domain or a COG3593 domain or a combination thereof, and a GajB polypeptide comprising a pfam04257 domain or a pfam00580 domain or a pfam13361 domain or any combination thereof. In some embodiments, a Gabija defense system comprises a GajA polypeptide and a GajB polypeptide.

[1070] In some embodiments, a Defense System VI comprises a GajA polypeptide comprising a pfam13175 domain or a COG3593 domain or a combination thereof, or comprising an amino acid sequence having at least 80% identity to a sequence selected from the group referenced in Table 14 rows 2-4599 columns H and I; or a GajB polypeptide comprising a pfam04257 domain or a pfam00580 domain or a pfam13361 domain or any combination thereof or comprising an amino acid sequence having at least 80% identity to a sequence selected from the group referenced in Table 14 rows 2-4599 columns L and M; or a combination thereof.

[1071] In some embodiments, a Defense System VI comprises at least two different polypeptide components selected from a GajA polypeptide comprising a pfam13175 domain or a COG3593 domain or a combination thereof, or comprising an amino acid sequence having at least 80% identity to a sequence selected from the group referenced in Table 14 rows 2-4599 columns H and I; and a GajB polypeptide comprising a pfam04257 domain or a pfam00580 domain or a pfam13361 domain or any combination thereof or comprising an amino acid sequence having at least 80% identity to a sequence selected from the group referenced in Table 14 rows 2-4599 columns L and M.

[1072] In some embodiments, a Gabija defense system having an anti-phage activity comprises a nucleic acid construct comprising a nucleic acid sequence encoding a GajA polypeptide and a GajB polypeptide. In some embodiments, a Gabija defense system having an anti-phage activity comprises a nucleic acid construct comprising a nucleic acid sequence encoding a GajA polypeptide comprising an ATPase domain, and a GajB polypeptide comprising a helicase activity. In some embodiments, a Gabija defense system having an anti-phage activity comprises a nucleic acid construct comprising a nucleic acid sequence encoding a GajA polypeptide comprising an ATPase domain. In some embodiments, a Gabija defense system having an anti-phage activity comprises a nucleic acid construct comprising a nucleic acid sequence encoding a GajB polypeptide comprising a helicase activity. In some embodiments, a Gabija defense system having an anti-phage activity comprises a nucleic acid construct comprising a nucleic acid sequence encoding a GajA polypeptide comprising an ATP-dependent endonuclease, and a GajB polypeptide comprising a UvrD helicase activity. In some embodiments, a Gabija defense system having an anti-phage activity comprises a nucleic acid construct comprising a nucleic acid sequence encoding a GajA polypeptide comprising an ATP-dependent endonuclease activity. In some embodiments, a Gabija defense system having an anti-phage activity comprises a nucleic acid construct comprising a nucleic acid sequence encoding a GajB polypeptide comprising a UvrD helicase activity.

[1073] In some embodiments, the Gabija anti-phage defense system comprises a nucleic acid construct comprising nucleic acid sequences encoding a cassette comprising gajA and gajB genes.

[1074] In some embodiments, a Gabija (Defense System VI) gene cassette comprises the nucleic acid sequence:

(SEQ ID NO: 5; construct 7 of Table 4)

| | |
|---|---|
| 1 | gatcaaacaa tttattccta ttggaatggg ggaagagtcc caaactctca aagagctagt |
| 61 | tgatattgtt tggctgctgt gatggattta tttctaagaa aatagtgtgg gctattcatt |
| 121 | tttatgttgg atgtttgcag acttaataat gatagcttta gggaacactt actctgtaaa |
| 181 | atcggttatt ccctaaaccg ggatttaggt tcacagtata caagctctgg ggttacagaa |
| 241 | tacacttaat cttacagcat cattcaacca aaagagtctc tttatgataa tgcctgtgtc |
| 301 | gagtcatttt acggtattaa aaaaagaaga agtaaattat gtgcaatatc tagactacca |
| 361 | attttccaag ataagaaata tatgttttac gtttcggaaa tattagttgt atcaatggtt |
| 421 | tatagagcat tctacatttt cttgtgcaaa tcatgtaaca cagaaaaatg aagtttatga |
| 481 | aaaatattta tttatttttc actggtgaat actgaaatag tattcattta ttttttgttt |
| 541 | attttacaaa tttttttgaa agtcgttcaa tagcagagaa tttctagtat aattttggta |
| 601 | aataattcta tagattgatc ggaattatga atttaattta cagatatttt agagtaacat |
| 661 | tggagctatt atattaaaaa agaatgcttc aagattgagc gaacgatagc tttgggataa |
| 721 | attagctttt tggcggatag tgaagcagta acgagtaagt tagtaaataa agtgttaaat |
| 781 | agaataacag aagaatagga gagggcttta tgtatttaaa aagtttaaaa atctacaact |
| 841 | ttagaaaatt tggaacaaat aacaacaaga tagaatttgt tgatgctaaa agttttcaag |
| 901 | aacaaagaaa taaaaaagaa gtaaatattg ctccaacaac aactttaatt gtaggaaaga |
| 961 | ataactgtgg aaaaacaacg attattaaat cgttagataa tcttattaat aataataaag |
| 1021 | acgcttttaa agcaaatgat tttaattttt tatacttaaa aaaactaatt gagtattatg |
| 1081 | aacaagcaat tccaaaatta gatgatgaat taaaagaaaa aattaaaaca ccgtatcttc |
| 1141 | aatttaatat ttgtattgga attgagaata atagtaatga cttagttacc aatatagttc |
| 1201 | gttttatgaa attagatgat attaataatt ctgaattaaa aattgttata aaagtagaat |
| 1261 | tggagaacga agaagttttc attagagatg tgaaaaaact gttagagaaa aatgataatt |
| 1321 | cgagtcttcg gtttaatagc tttttggaat tgataaatga ttcggatttt aaaataaatt |
| 1381 | attataatac agataatgat aaaatagata attttaacat aaaaaattta attgaattga |
| 1441 | gaccgattaa agcaaataac attgaaagcg aaaaatgcct ttcaaaagct tttagtaaaa |
| 1501 | taattgaata tcgctataaa acattattcg aagaggaaag cgataatctt aattcgacaa |
| 1561 | tcataaatat taatcgaaca cttaccaaat taattagtga aaaacatacg gttagtataa |
| 1621 | ataagtcttt agaagaaatt gaatcaaatg aaaaacttca agtattgcta agggcagatt |
| 1681 | tgacttttca aaatgtgatg aataatttaa tcaaatatga atacgtcgaa cgtaatatga |
| 1741 | atatacctga gaatcaattt ggtttaggtt atacaaattt gatgatgata atagcggatt |
| 1801 | taattgatta tatggaaaaa tacccagaaa actcatttaa cagtaaggtt aatttaattt |
| 1861 | caattgaaga acctgaaaca tttatgcatc cacaaatgca ggagttattt ataaaaaata |
| 1921 | taaatgaagc gattgcttct ttattgaaaa gtaaaaataa aaacgtaaat agccagttga |
| 1981 | taattacaac acactcatca catatactaa atagtaaaat acacagtggt aatactttta |
| 2041 | ataatataaa ttacgttact accaaaaata attatactca tgtagtgaat ttgcatgatg |
| 2101 | atataattat ccctaaaagt gaaaaaaaag ctcataaaag agagcaggat cttaagttct |
| 2161 | taaaaaaaca tattaagtat aaagtttctg agttgttttt ttcagatgct attatttttg |
| 2221 | ttgaaggtgt gactgaagaa acgcttctta aatattatat tgatgataat aataagctca |
| 2281 | ataaatatta tatatcggtt ttcaatattg atggggctca cggaatggtt tatcacaatt |
| 2341 | taattgaaat actacaagta cctgctttga taattacgga tttagatata gaaagagatg |
| 2401 | atgatgaaaa gaaaaatttc aagcaaatct ctgatttaac gggaaaattc acaactaata |
| 2461 | aaacaattaa aaagtataat gatgactcta atagtttaga ggaattacag catgagcagc |
| 2521 | ttaaaataaa taatatgtat attgcatatc aaggtaaaat cgaagaatat tatgcaacaa |
| 2581 | gttttgaaga agcatttatc ttaacaaatt acaaaaatga acttttaaat agtgtactaa |
| 2641 | aaaaaatgaa acctcagatt tatgaaaata ttatgggtga gggagatgat ttcacaaaga |
| 2701 | taaaggaaaa ttcctataaa ctccaaaaaa agttatcaaa tgataaaagt gattttgcga |
| 2761 | atgagctact ctataagttt ataacggagg atataacaat tccttctttg ccaaagtata |
| 2821 | ttaagagtgg cctttcatgg ttagctaaaa aattagaagg ggaggaataa gggtgagttt |
| 2881 | atccaaaata atcccatcta ataagaaaga agagcagaaa tcaataaatg caatttttaa |
| 2941 | ttctattgat aaaagtgaag gtatcatttt taattctggt gctggtgctg gaaaaacata |
| 3001 | cgctcttatt gaaagtttga aatacataat aagaaactac gagaagagct taaaacaaca |
| 3061 | taatcaacaa attatctgta tcacatatac gaatgttgca actaaagaag taaaagagag |
| 3121 | attaggaaac acagatttag tattagtttc tacaattcat gaaagaatgt ggggactcat |
| 3181 | taaagattat caaaaagaat tagttgagat tcacaaagaa aagttggaag atgaaatctc |
| 3241 | aagtttaaaa caaaaattag aaaaaggtca gggatacgaa aaatttcaag aattagaaga |
| 3301 | ggacttaaag ggaaatttta aaaaaataat gattgagaat agggaactat tttttcaaaa |
| 3361 | ttatagtgct aaagcagcag aggtaaaaaa atcatttaaa atactcttaa acgattaccc |
| 3421 | taatatgctg aaaaatgttg gaaattttaa gagaatagta aatgcaattt acaaattaga |
| 3481 | tcagtatagt aaatgctatg aaaatataag cttaaataaa cagggttata aatctgtaga |
| 3541 | gtacaattcg atttataata acgatcaact ttataaaatg agaataagcc atgatacttt |
| 3601 | gttagattat ggtctgaaaa taattaagaa atatgacttg ttaaaacaaa taatcattga |
| 3661 | taaatatcca tttattttta ttgatgagta tcaggatacg gatgaaaaag ttatattaat |
| 3721 | aatgagttat ttagagcaat atgcaaaaaa aattgatcac aaaattttta taggttattt |
| 3781 | tggtgatact gctcaaaata tttatgatga tggagtagga agtgaaataa caaagattca |
| 3841 | ctcaggatta aaacagatag ataaagtgtt taatagaaga tctacaaaag aagtcattga |
| 3901 | ggttataaac aaaattagaa acgatagcat cgaacaaata tcaatttatg atgattgtga |
| 3961 | aggcggtagt gtaaagtttt ataaagggac ttcaggtaat gttaaggact taatagagcg |
| 4021 | gtatatatat gaatggaaaa taactacgga aaatcaacta cattgtctag ttttaactaa |
| 4081 | taagattgtt gcagaatata gtggttttaa aaacatatac gaagctttca aagagacaga |
| 4141 | taaatataaa gggagcaatt ataatcaact taatacggaa ctcttaagta atgatttatc |
| 4201 | taagcttggt gaaattccta agttgttatt taatatagtt agattacaga ataatcttgt |
| 4261 | ggataaaacg acttcagtta ttgatattac acctaaagaa agcctattcg atgagatgag |
| 4321 | tatagaaggg ttaaggaatt taattaaact attaaaacaa taccaaggga aaacattagg |
| 4381 | tgaatatata gaatcgatat caactgttta ttctcaagtt aatgatgaaa attataaaaa |
| 4441 | aataatagat tggacttttg gttttgaaaa tatcacattc gaactattta aaaatcatct |
| 4501 | tatagaaaag ttatttaata atatattaga tgatgatgtt gatcgtgcaa ccgcaactat |
| 4561 | acaaaaaata ctagaagttg atattgttga gtatggattg tggtataaat ttattatgga |
| 4621 | taaacaagaa gagaaggtta tttatcatac ttatcatggt acaaagggac gagagtttga |
| 4681 | taatgttatt attattatgg aaaatgcttt tggaagaaat cacaattatt ttaatttctt |
| 4741 | ttttgaaaat ttcttgcatc cagatgtatt agaaggtgaa aagaaactga acttcgagaa |
| 4801 | aataaagaat ttgttatatg tttcttgctc tagagctatt aagaatttaa gagttttata |
| 4861 | tattgatgat gttaccgatt ttgaaagtga aattaaggaa atgtttggag aagtatatcc |
| 4921 | tttttagtaa taattgaatg aagatatttt tcatgaataa aaaaatgttg tgttgatggg |
| 4981 | aagcatcata aaaaaacact cttaaccttt ttacaaagaa acaccccact cgttaggctt |
| 5041 | aattattaag tttatgtatt attttattat tcaaaacctt atttttgcta ttgattagcc |
| 5101 | gctcataata tttaattatg agcggtttta taacatccga gcacaagttt taaaaatgaa |
| 5161 | aattcaggac taggtttatt attcaagacg atgattacat atcatttaag gtgcaggaaa |
| 5221 | ataattaaag cattataagt aatatcgata tttcagtttg ttaagatttt ctaagggaaa |
| 5281 | tttgttcttt tatctagaaa ataattggat tatctaattc atcat. |

[1075] The coding regions for each of the gajA and gajB gene sequences within this embodiment of a Gabija cassette (SEQ ID NO: 5) are as follows: nucleotides 810-2870 encode an embodiment of a GajA polypeptide, and nucleotides 2873-4927 encode an embodiment of a GajB polypeptide.

[1076] In some embodiments, a Defense System VI comprising a GajA polypeptide and a GajB polypeptide is encoded by the nucleic acid sequence set forth in SEQ ID NO: 5. In some embodiments, a Defense System VI comprising a GajA polypeptide and a GajB polypeptide, is encoded by a nucleic acid sequence having at least 80% homology to the sequence set forth in SEQ ID NO: 5. In some embodiments, a Defense System VI comprising a GajA polypeptide and a GajB polypeptide, is encoded by a nucleic acid sequence having at least 85% homology, or 90% homology, or 95% homology, or 97% homology, or 98% homology, or 99% homology to the sequence set forth in SEQ ID NO: 5. In some embodiments, a Defense System VI comprising a GajA polypeptide and a GajB polypeptide, is encoded by a nucleic acid sequence having at least 80% identity to the sequence set forth in SEQ ID NO: 5. In some embodiments, a Defense System VI comprising a GajA polypeptide and a GajB polypeptide, is encoded by a nucleic acid sequence having at least 85% identity, or 90% identity, or 95% identity, or 97% identity, or 98% identity, or 99% identity to the sequence set forth in SEQ ID NO: 5.

[1077] In some embodiments, a Gabija (Defense System VI) gene cassette comprises the nucleic acid sequence:

(SEQ ID NO: 6; construct 8 of Table 4)

| | |
|---|---|
| 1 | ataatagtac tatttaacga tacctgtcaa aaaacataat cgatatttta tcaaaattaa |
| 61 | aaaaagaaac cattttattt aacttttctt taaaatggtt tcttggatta tgggacttag |
| 121 | ttttttgtct ggaaaatata atgggaattt attgtataat aaaactatgt agaaatacat |
| 181 | ggttttttta tttattgagg atgggattct agtgaagggg aacagcttgc ttaactattt |
| 241 | ataaaataca gggataagaa cagaattaaa gaaggtatat gttaaaagta aaataattaa |
| 301 | gaagataagg tgatgaataa tgaaattcag taatattaca ataaagaact tcaggaattt |
| 361 | tgaaaaagta aatataaatt tagataataa aaatgtgatt ttcgggatga atgatattgg |
| 421 | aaaaacaaat tttttatatg cattgagatt tcttttagat aaagagataa gaaaattcgg |
| 481 | ttttaataaa tctgattatc ataaacatga cacttctaaa aaaattgaaa ttattttaac |
| 541 | acttgatttg tctaattatg aaaaggatga agatacaaaa aaacttattt cagtggttaa |
| 601 | gggtgctaga acatcggcaa atgcagatgt tttttatatc gcactagaat ctaaatatga |
| 661 | tgataaagaa ttatatggga acataatttt aaaatgggga tcggaactag ataatttaat |
| 721 | agatatacca gggagaggga acataaacgc gttagataat gtatttaagg tgatttatat |
| 781 | aaatccgctt gttgatttag acaaattgtt cgcacaaaat aaaaaatata tttttgaaga |
| 841 | gtcacagggt aatgaatcag atgaagggat tttaaataat attaaatctt taacagatca |
| 901 | agtaaatcaa caaataggag aaatgacaat tattaagggt ttccagcaag agataacaag |
| 961 | tgaatatagg tctttaaaaa aagaagaggt ttctattgag ctgaagtccg aaatggcaat |
| 1021 | taaaggattt ttctcagata ttattccata tataaaaaaa gacggtgatt ctaattacta |
| 1081 | tccaacctca ggggatggta gaagaaaaat gctttcttac tctatatata actatctggc |
| 1141 | taagaaaaaa tatgaggata aaattgttat ttatttaatt gaggaacccg aaattagtct |
| 1201 | acatagatca atgcaaattg ctttatcaaa acagttattt gaacaatcta catataaata |
| 1261 | ttttttctta tccactcact ctcctgaact tctttatgaa atggataata caagattaat |
| 1321 | aagagtgcat tcaactgaaa aggttgtatg ttcttcccat atgtataatg tggaagaagc |
| 1381 | ctatggaagt gtcaagaaaa agctaaataa agctttatca tcggctctat ttgctgaaag |
| 1441 | agtactttta atagaaggtc cttcagaaaa aatattattt gaaaaggttt tagacgaagt |
| 1501 | agaaccagaa tatgaattaa atggaggttt cttgcttgaa gtaggaggga cgtactttaa |
| 1561 | tcattatgtg tgtacattaa atgatttagg tataacccat ataattaaaa cagataatga |
| 1621 | tttgaaatca aaaaaaggta aaaaaggtgt atacgaatta ctaggattaa atagatgctt |
| 1681 | aaacttatta ggacgtgaaa atctagatga gattactatt gacatccctg aagatataaa |
| 1741 | aggtaagaag aaaaaagaga gacttaatga aagaaaaaaa gagattttta aacaatataa |
| 1801 | aaatgaggta ggggaattct taggggaacg aatatattta tcggaaatcg atctggaaaa |
| 1861 | tgatttatat tctgcaattg gtgaaagcat gaaaagaatt tttgaaaacg aagatcccgt |
| 1921 | gcactattta cagaaaagta aactatttaa catggtcgag ctagtaaata atttaagtac |
| 1981 | taaagattgt tttgatgttt ttgagcacga aaaatttgca tgcctaaagg agttggtggg |
| 2041 | tagtgataga ggatgaaatg tctagagaac aaataataaa ggatgggggt aatattcttg |
| 2101 | ttaccgctgg agcaggttcg ggtaaaacaa caatattagt tagtaaaatt gaagctgatt |
| 2161 | taaaagaaaa taaaactcat tactcaattg cagctgttac ttttacaaat aaggcagcaa |
| 2221 | aagaaatcga gggaagatta gggtattcat caagagggaa ttttattggc actaacgatg |
| 2281 | gttttgtcga gtctgaaatt attaggccgt ttattaaaga tgcatttgga aatgattatc |
| 2341 | cagacaattt cactgctgaa tattttgata accaatttgc ttcatacgat aagggattgc |
| 2401 | aagtgctaaa atatcaaaat atattaggga cttatagtaa tcctaaaaag aattttaagt |
| 2461 | ttcaattggc tttagatatt ttaaaaaaat cacttgtcgc tagacaatat atattttcaa |
| 2521 | aatacttcaa gatatttata gacgagtacc aagattcgga taaggatatg cataatttat |
| 2581 | ttatgtattt aaaggatcag cttaaaatta agttatttat tgttggtgac ccaaaacaat |
| 2641 | ctatttatat ctggagggga gcagaacctg aaaattttaa tggtcttata gaaaattcta |
| 2701 | cggattttaa taaatatcat ttaacttcca actttcgatg ctgtcaggat attcaaaatt |
| 2761 | actctaattt atttaatgaa gaaactagaa gcttaattaa agaaaaaaat gaggttcaaa |
| 2821 | atgtaatcag tatagcagac gatatgccaa tttcagatat tttattaaaa ttaacagaag |
| 2881 | aaaagcaggt attaaacata gaagcggaat tagtgatttt agtccggaga cgtaatcaag |
| 2941 | ccattgaaat aatgaaagaa ctaaatgaag aagggtttaa ttttattttt attccccaaa |
| 3001 | ccccattaga tagggcaact ccaaatgcaa ctcttttaaa agaggtaatt aaatatgtta |
| 3061 | aaaatgatag atattcaata tatgatttag ctgctgaaat tgtaggtaat ctaagttcac |
| 3121 | gagaaattaa ggagatacaa aaaataatta atgaattact agtacctaat attaatcagg |
| 3181 | tactaattaa tcaggtatta attaatttat ttgctaaatt agaaattact ttagatacta |
| 3241 | gagaaattac agcatttaca gaagtaatga tgacgaatga atttgacata gcatttgata |
| 3301 | caaatgaata tttacataaa atatttactg tacattctgc aaaaggatta gaatttaatc |
| 3361 | aagtcattat tactgcaagt gattacaatg tacactataa tagagatact aacgaacatt |
| 3421 | atgttgctac aactagagca aaagataaat taattgtcat tatggataat aagaagtact |
| 3481 | cagattatat tgagacgcta atgaaagaac ttaaaattaa aaatattatt aagtcaatat |
| 3541 | aaggaaactt aagtttgaca taataacgat gaaatataaa agtttgtttt cgtaaatagc |
| 3601 | caatgtcact aagttatcaa gacttaaatt ttaaaacctt taaaaataaa gactctaaca |
| 3661 | tattagtcat aattaatatg ttagggtctt ttgttttatt tgaaatgtta ttttcaactt |
| 3721 | tataagacaa tgaatattat ttttgtttaa taatatccag agtgctcaaa ataaatatca |
| 3781 | gaaggtaatt cctaataata ttgcgtgtgt agttaatagt taaaataata aaataaaaaa |
| 3841 | agatggtata atttagtata ccatcttttt ttattttatt aggaggttca aaa. |

[1078] The coding regions for each of the gajA and gajB gene sequences within this embodiment of a Gabija cassette (SEQ ID NO: 6) are as follows: nucleotides 320-2056 encode an embodiment of a GajA polypeptide, and nucleotides 2058-3542 encode an embodiment of a GajB polypeptide.

[1079] In some embodiments, a Defense System VI comprising a GajA polypeptide and a GajB polypeptide is encoded by the nucleic acid sequence set forth in SEQ ID NO: 6. In some embodiments, a Defense System VI comprising a GajA polypeptide and a GajB polypeptide, is encoded by a nucleic acid sequence having at least 80% homology to the sequence set forth in SEQ ID NO: 6. In some embodiments, a Defense System VI comprising a GajA polypeptide and a GajB polypeptide, is encoded by a nucleic acid sequence having at least 85% homology, or 90% homology, or 95% homology, or 97% homology, or 98% homology, or 99% homology to the sequence set forth in SEQ ID NO: 6. In some embodiments, a Defense System VI comprising a GajA polypeptide and a GajB polypeptide, is encoded by a nucleic acid sequence having at least 80% identity to the sequence set forth in SEQ ID NO: 6. In some embodiments, a Defense System VI comprising a GajA polypeptide and a GajB polypeptide, is encoded by a nucleic acid sequence having at least 85% identity, or 90% identity, or 95% identity, or 97% identity, or 98% identity, or 99% identity to the sequence set forth in SEQ ID NO: 6.

[1080] In some embodiments, a construct comprising the Gabija defense system encodes one component of the defense system, whereby multiple constructs, for example but not limited to, two constructs may be used to assemble the functional defense system. In some embodiments, the components of a Gabija defense system comprise genes gajA and gajB. In some embodiments, the components of a Gabija defense system consist of genes gajA and gajB. In some embodiments, the components of a Gabija defense system comprise nucleic acid sequences encoding a GajA polypeptide and a GajB polypeptide. In some embodiments, the components of a Gabija defense system consist of nucleic acid sequences encoding a GajA polypeptide and a GajB polypeptide.

[1081] In some embodiments, a construct comprising the Gabija defense system encodes one component of the defense system, whereby a second construct may be used to assemble the functional defense system. In some embodiments, a construct comprising the Gabija defense system encodes one component of the defense system, whereby additional constructs may be used to assemble the functional defense system. For example, in some embodiments each of GajA and GajB may be encoded by nucleic acid sequences comprised in different constructs, wherein expression of the combination of constructs produces a functional Gabija defense system.

[1082] In some embodiments, the components making up a functional Gabija anti-phage defense system comprise a GajA polypeptide and a GajB polypeptide, each encoded by a gajA and a gajB gene, respectively. In some embodiments, a gajA gene encodes a polypeptide comprising an ATPase activity. In some embodiments, a gajB gene encodes a polypeptide comprising a helicase activity.

[1083] In some embodiments, a Gabija defense system having an anti-phage activity comprises a nucleic acid encoding a GajA polypeptide. In some embodiments, a Gabija defense system having an anti-phage activity comprises a nucleic acid encoding a GajA polypeptide and a GajB polypeptide. In some embodiments, a Gabija defense system having an anti-phage activity comprises a nucleic acid encoding a GajB polypeptide.

[1084] In some embodiments, a Gabija defense system having an anti-phage activity comprises a nucleic acid comprising a gajA gene. In some embodiments, a Gabija defense system having an anti-phage activity comprises a nucleic acid comprising a gajA gene and a gajB gene. In some embodiments, a Gabija defense system having an anti-phage activity comprises a nucleic acid comprising gajB gene.

[1085] In some embodiments, a Gabija defense system having an anti-phage activity comprises a nucleic acid construct comprising nucleic acids encoding polypeptides in a set order. In one embodiment, the 5′ to 3′ order of polypeptides encoded is GajA and GajB. In some embodiments the 5′ to 3′ order of polypeptides does not affect the anti-phage activity. In some embodiments the 5′ to 3′ order of polypeptides does affect the anti-phage activity.

[1086] In some embodiments, the 5′ to 3′ order of polypeptides is random, for example any order of nucleic acid sequences encoding GajA and GajB.

[1087] In some embodiments, a Gabija defense system having an anti-phage activity comprises a nucleic acid construct comprising genes in a set order. In some embodiment, the 5′ to 3′ order of genes is gajA and gajB. In some embodiment, the 5′ to 3′ order of genes in a Gabija defense system is not gajA and gajB. In some embodiments the 5′ to 3′ order of genes does not affect the anti-phage activity. In some embodiments the 5′ to 3′ order of genes does affect the anti-phage activity.

[1088] In some embodiments, the 5′ to 3′ order of genes is random, for example any order of gajA and gajB.

[1089] In some embodiments, the Gabija system (Defense System VI) composition and order is as shown in FIG. 3B.

[1090] In some embodiments, a Gabija defense system having an anti-phage activity originates from a microbial genome, for example a bacterial or an archaeal genome (Table 14). A skilled artisan would appreciate that the Gabija system is not present in the majority of bacteria and or archaea species.

[1091] In some embodiments, a functional Gabija defense system comprises a construct comprising nucleic acid sequences encoding polypeptides, wherein the nucleic acid sequence encoding each polypeptide may originate from a different microbial species. For example, the source of the nucleic acid sequence encoding a GajA polypeptide may be one microbial species, while the source of the nucleic acid sequence encoding a GajB polypeptide may be a different microbial species. In some embodiments, a functional Gabija defense system comprises a non-naturally occurring combination of polypeptide components. In some embodiments, a functional Gabija defense system comprises a combination of at least two polypeptides that do not naturally occur together.

[1092] In some embodiments, a functional Gabija defense system comprises a construct comprising nucleic acid sequences encoding polypeptides, wherein the nucleic acid sequence encoding each polypeptide may originate from a different bacterial species. For example, the source of the nucleic acid sequence encoding a GajA polypeptide may be one bacterial species, while the source of the nucleic acid sequence encoding a GajB polypeptide may be a different bacterial species.

[1093] In some embodiments, the source of the nucleic acid encoding a GajA polypeptide and a GajB polypeptide is the same. In some embodiments, the source of the nucleic acid encoding a GajA polypeptide and a GajB polypeptide is the not the same. In some embodiments, the source of the nucleic acid sequence of any of the components of a Gabija defense system comprises any of the species listed in Table 14.

[1094] In some embodiments, a Gabija defense system having an anti-phage activity comprises a nucleic acid construct comprising non-coding regions between the nucleic acid sequences encoding the polypeptides. In some embodiments, the non-coding regions between the nucleic acid sequences comprises nucleic acid sequence not naturally occurring in the microbial species of origin. In some embodiments, the non-coding regions between the nucleic acid sequences comprises nucleic acid sequence is the naturally occurring in the microbial species of origin.

[1095] In some embodiments, a Gabija system disclosed herein comprises a multi-gene phage resistance system broadly distributed in microbial genomes, for example but not limited to bacteria and archaea. According to some embodiments, the Gabija system components are located in a gene cluster (a cassette of genes) in a microbial cell genome. According to some embodiments, the Gabija system components are located in close proximity (e.g. positioned within 20 genes, 10 genes, 5 genes or less one from the other) in a genome of a prokaryotic cell. According to some embodiments the prokaryotic cell expresses an endogenous Gabija defense system. According to some embodiments, the prokaryotic cell expresses an endogenous functional Gabija defense system. According to some embodiments, the species of prokaryotic cell is selected from the group consisting of the species listed in Table 14. According to some embodiments a prokaryotic cell expresses a non-endogenous Gabija defense system. According to some embodiments, a prokaryotic cell expresses a non-endogenous functional Gabija defense system. According to some embodiments, the species of prokaryotic cell expressing a non-endogenous functional Gabija defense system is selected from the group consisting of the species listed in Table 14.

[1096] In some embodiments, Gabija defense system components comprise GajA and GajB polypeptides. In some embodiments, Gabija defense system components comprise functional portions of GajA and GajB polypeptides. In some embodiments, the Gabija defense system functional components are encoded by gajA and gajB genes.

[1097] Non-limiting embodiments of endogenous Gabija systems and the respective location of their components are provided in Table 14 herein.

[1098] In some embodiments, the components of a Gabija system may be identified by the presence of similar domains present within each component. In some embodiments, domains comprise pfam domains and or clusters of orthologous groups (COG) domains.

[1099] In some embodiments, the term “GajA” refers to the polynucleotide or expression product e.g., the polypeptide encoded by the gajA gene. In some embodiments, the term “GajA” refers to a GajA polypeptide. In some embodiments, the gajA gene encodes a polypeptide comprising a pfam13175 domain. In some embodiments, the gajA gene encodes a polypeptide comprising a COG3593 domain. In some embodiments, the gajA gene encodes a polypeptide comprising a pfam13175 domain and a COG3593 domain. In some embodiments, the GajA polypeptide comprises a pfam13175 domain. In some embodiments, the GajA polypeptide comprises a COG3593 domain. In some embodiments, the GajA polypeptide comprises a pfam13175 domain and a COG3593 domain.

[1100] In some embodiments, GajA polypeptide is encoded by a gene positioned within 5-60 genes of a gene encoding a GajB polypeptide in a genome of a prokaryotic cell. In some embodiments, GajA polypeptide is encoded by a gene positioned within 5 genes upstream (5′) or downstream (3′) to a gene encoding a GajB polypeptide in a genome of a prokaryotic cell. In some embodiments, GajA polypeptide is encoded by a gene positioned within 5 genes upstream (5′) and downstream (3′) to a gene encoding a GajB polypeptide in a genome of a prokaryotic cell.

[1101] In some embodiments, GajA and GajB are encoded by genes positioned sequentially 5′ to 3′ in a genome of a prokaryotic cell. In some embodiments, GajA and GajB are encoded by genes positioned contiguously 5′ to 3′ in a genome of a prokaryotic cell.

[1102] In some embodiments, gajA and gajB genes are positioned sequentially 5′ to 3′ in a genome of a prokaryotic cell. In some embodiments, gajA and gajB, genes are positioned contiguously 5′ to 3′ in a genome of a prokaryotic cell.

[1103] In some embodiments, a GajA polypeptide is about 670 amino acids long (median gene size).

[1104] In some embodiments, the GajA polypeptide comprises the amino acid sequence having at least 80% homology to a sequence selected from the group consisting of the polypeptides referenced in Table 14, rows 2-4599, columns H and I. In some embodiments, the GajA polypeptide comprises the amino acid sequence having at least 80% homology within similar domain regions within a sequence selected from the group consisting of the polypeptides referenced in Table 14, rows 2-4599, column H. In some embodiments, the GajA polypeptide comprises a homolog of a polypeptide having the amino acid sequences set forth in the polypeptides referenced in Table 14, rows 2-4599, columns H and I.

[1105] In some embodiments, a GajA polypeptide homolog comprises an ATPase domain. In some embodiments, a GajA polypeptide homolog comprises an ATPase activity. In some embodiments, a GajA polypeptide homolog comprises an ATP-dependent endonuclease domain. In some embodiments, a GajA polypeptide homolog comprises an ATP-dependent endonuclease activity.

[1106] In some embodiments, the GajA polypeptide comprises the amino acid sequence having at least 80% identity to a sequence selected from the group consisting of the polypeptides referenced in Table 14, rows 2-4599, columns H and I. In some embodiments, the GajA polypeptide comprises the amino acid sequence having at least 80% identity within similar domain regions within a sequence selected from the group consisting of the polypeptides referenced in Table 14, rows 2-4599, columns H and I.

[1107] In some embodiments, the GajA polypeptide comprises an amino acid sequence having at least 80%, at least 85%, at least 90%, or at least 95% homology to a sequence selected from the group consisting of the polypeptides referenced in Table 14, rows 2-4599, columns H and I. In some embodiments, the GajA polypeptide comprises the amino acid sequence having at least 80%, 85%, 90%, 95% homology within similar domain regions within a sequence selected from the group consisting of the polypeptides referenced in Table 14, rows 2-4599, columns H and I. In some embodiments, the GajA polypeptide comprises an amino acid sequence having at least 80%, at least 85%, at least 90%, or at least 95% identity to a sequence selected from the group consisting of the polypeptides referenced in Table 14, rows 2-4599, columns H and I. In some embodiments, the GajA polypeptide comprises the amino acid sequence having at least 80%, 85%, 90%, 95% identity within similar domain regions within a sequence selected from the group consisting of the polypeptides referenced in Table 14, rows 2-4599, columns H and I. In some embodiments, the GajA polypeptide comprises an amino acid sequence selected from the group consisting of the polypeptides referenced in Table 14, rows 2-4599, columns H and I.

[1108] In some embodiments, the GajA polypeptide comprises an amino acid sequence encoded by a nucleic acid sequence having at least 80%, at least 85%, at least 90%, or at least 95% homology to a sequence selected from the group consisting of the polynucleotides referenced in Table 14, rows 2-4599, columns H and J. In some embodiments, the GajA polypeptide comprises the amino acid sequence encoded by a nucleic acid sequence having at least 80%, 85%, 90%, 95% homology within similar domain regions within a sequence selected from the group consisting of the polynucleotides referenced in Table 14, rows 2-4599, columns H and J. In some embodiments, the GajA polypeptide comprises an amino acid sequence encoded by a nucleic acid sequence having at least 80%, at least 85%, at least 90%, or at least 95% identity to a sequence selected from the group consisting of the polynucleotides referenced in Table 14, rows 2-4599, columns H and J. In some embodiments, the GajA polypeptide comprises the amino acid sequence encoded by a nucleic acid sequence having at least 80%, 85%, 90%, 95% homology within similar domain regions within a sequence selected from the group consisting of the polynucleotides referenced in Table 14, rows 2-4599, columns H and J. In some embodiments, the GajA polypeptide comprises an amino acid sequence encoded from a nucleic acid sequence selected from the group consisting of the polynucleotides referenced in Table 14, rows 2-4599, columns H and J.

[1109] In some embodiments, the nucleic acid sequence of a gajA gene comprises a nucleic acid sequence having at least 80%, at least 85%, at least 90%, or at least 95% homology to a sequence selected from the group consisting of the polynucleotides referenced in Table 14, rows 2-4599, columns H and J. In some embodiments, the gajA gene comprises a nucleic acid sequence having at least 80%, 85%, 90%, 95% homology within encoded similar domain regions in comparison with nucleotide sequence encoding these domain within a sequence selected from the group consisting of the polynucleotides referenced in Table 14, rows 2-4599, columns H and J. In some embodiments, the nucleic acid sequence of a gajA gene comprises a nucleic acid sequence having at least 80%, at least 85%, at least 90%, or at least 95% identity to a sequence selected from the group consisting of the polynucleotides referenced in Table 14, rows 2-4599, columns H and J. In some embodiments, the gajA gene comprises a nucleic acid sequence having at least 80%, 85%, 90%, 95% identity within encoded similar domain regions in comparison with nucleotide sequence encoding these domain within a sequence selected from the group consisting of the polynucleotides referenced in Table 14, rows 2-4599, columns H and J. In some embodiments, the nucleic acid sequence of a gajA gene comprises a nucleic acid sequence selected from the group consisting of the polynucleotides referenced in Table 14, rows 2-4599, columns H and J.

[1110] As used herein, the term “GajB” refers to the polynucleotide or expression product e.g., polypeptide encoded by the gajB gene. In some embodiments, the term “GajB” refers to a GajB polypeptide. In some embodiments, the product of the gajB gene comprises a pfam04257 domain. In some embodiments, the gajB gene encodes a pfam00580 domain. In some embodiments, the gajB gene encodes a pfam13361 domain. In some embodiments, the product of the gajB gene comprises a pfam04257 domain or a pfam00580 domain or a pfam13361 domain, or any combination thereof. In some embodiments, the product of the gajB gene comprises a pfam04257 domain, a pfam00580 domain, and a pfam13361 domain. In some embodiments, the gajB gene encodes a helicase. In some embodiments, the gajB gene encodes a UvrD helicase.

[1111] In some embodiments, GajB polypeptide is encoded by a gene positioned within 5-60 genes of a gene encoding a GajA polypeptide in a genome of a prokaryotic cell. In some embodiments, GajB polypeptide is encoded by a gene positioned within 5 genes upstream (5′) or downstream (3′) to a gene encoding a GajA polypeptide in a genome of a prokaryotic cell. In some embodiments, GajB polypeptide is encoded by a gene positioned within 5 genes upstream (5′) and downstream (3′) to a gene encoding a GajA polypeptide in a genome of a prokaryotic cell.

[1112] In some embodiments, a GajB polypeptide is about 598 amino acids long (median gene size).

[1113] In some embodiments, the GajB polypeptide comprises the amino acid sequence having at least 80% homology to a sequence selected from the group consisting of the polypeptides referenced in Table 14, rows 2-4599, columns L and M. In some embodiments, the GajB polypeptide comprises the amino acid sequence having at least 80% homology within similar domain regions within a sequence selected from the group consisting of the polypeptides referenced in Table 14, rows 2-4599, columns L and M. In some embodiments, the GajB polypeptide comprises a homolog of a polypeptide having the amino acid sequences set forth in the polypeptides referenced in Table 14, rows 2-4599, columns L and M.

[1114] In some embodiments, a GajB polypeptide homolog comprises a UvrD helicase domain. In some embodiments, a GajB polypeptide homolog comprises a UvrD helicase activity.

[1115] In some embodiments, the GajB polypeptide comprises the amino acid sequence having at least 80% identity to a sequence selected from the group consisting of the polypeptides referenced in Table 14, rows 2-4599, columns L and M. In some embodiments, the GajB polypeptide comprises the amino acid sequence having at least 80% identity within similar domain regions within a sequence selected from the group consisting of the polypeptides referenced in Table 14, rows 2-4599, columns L and M.

[1116] In some embodiments, the GajB polypeptide comprises an amino acid sequence having at least 80%, at least 85%, at least 90%, or at least 95% homology to a sequence selected from the group consisting of the polypeptides referenced in Table 14, rows 2-4599, columns L and M. In some embodiments, the GajB polypeptide comprises the amino acid sequence having at least 80%, 85%, 90%, 95% homology within similar domain regions within a sequence selected from the group consisting of the polypeptides referenced in Table 14, rows 2-4599, columns L and M. In some embodiments, the GajB polypeptide comprises an amino acid sequence having at least 80%, at least 85%, at least 90%, or at least 95% identity to a sequence selected from the group consisting of the polypeptides referenced in Table 14, rows 2-4599, columns L and M. In some embodiments, the GajB polypeptide comprises the amino acid sequence having at least 80%, 85%, 90%, 95% identity within similar domain regions within a sequence selected from the group consisting of the polypeptides referenced in Table 14, rows 2-4599, columns L and M. In some embodiments, the GajB polypeptide comprises an amino acid sequence selected from the group consisting of the polypeptides referenced in Table 14, rows 2-4599, columns L and M.

[1117] In some embodiments, the GajB polypeptide comprises an amino acid sequence encoded by a nucleic acid sequence having at least 80%, at least 85%, at least 90%, or at least 95% homology to a sequence selected from the group consisting of the polynucleotides referenced in Table 14, rows 2-4599, columns L and N. In some embodiments, the GajB polypeptide comprises the amino acid sequence encoded by a nucleic acid sequence having at least 80%, 85%, 90%, 95% homology within similar domain regions within a sequence selected from the group consisting of the polynucleotides referenced in Table 14, rows 2-4599, columns L and N. In some embodiments, the GajB polypeptide comprises an amino acid sequence encoded by a nucleic acid sequence having at least 80%, at least 85%, at least 90%, or at least 95% identity to a sequence selected from the group consisting of the polynucleotides referenced in Table 14, rows 2-4599, columns L and N. In some embodiments, the GajB polypeptide comprises the amino acid sequence encoded by a nucleic acid sequence having at least 80%, 85%, 90%, 95% homology within similar domain regions within a sequence selected from the group consisting of the polynucleotides referenced in Table 14, rows 2-4599, columns L and N. In some embodiments, the GajB polypeptide comprises an amino acid sequence encoded from a nucleic acid sequence selected from the group consisting of the polynucleotides referenced in Table 14, rows 2-4599, columns L and N.

[1118] In some embodiments, the nucleic acid sequence of a gajB gene comprises a nucleic acid sequence having at least 80%, at least 85%, at least 90%, or at least 95% homology to a sequence selected from the group consisting of the polynucleotides referenced in Table 14, rows 2-4599, columns L and N. In some embodiments, the gajB gene comprises a nucleic acid sequence having at least 80%, 85%, 90%, 95% homology within encoded similar domain regions in comparison with nucleotide sequence encoding these domain within a sequence selected from the group consisting of the polynucleotides referenced in Table 14, rows 2-4599, columns L and N. In some embodiments, the nucleic acid sequence of a gajB gene comprises a nucleic acid sequence having at least 80%, at least 85%, at least 90%, or at least 95% identity to a sequence selected from the group consisting of the polynucleotides referenced in Table 14, rows 2-4599, columns L and N. In some embodiments, the gajB gene comprises a nucleic acid sequence having at least 80%, 85%, 90%, 95% identity within encoded similar domain regions in comparison with nucleotide sequence encoding these domain within a sequence selected from the group consisting of the polynucleotides referenced in Table 14, rows 2-4599, columns L and N. In some embodiments, the nucleic acid sequence of a gajB gene comprises a nucleic acid sequence selected from the group consisting of the polynucleotides referenced in Table 14, rows 2-4599, columns L and N.

[1119] A skilled artisan would appreciate that the terms a “functional portion of a Defense System VI component” or “functional fragment of Defense System VI component” or “functional portion of a Gabija defense system component” or “functional fragment of Gabija defense system component” refers to a functional portion of a Gabija polynucleotide or polypeptide, as disclosed herein, which expression is sufficient to elicit an anti-phage activity alone or in combination with the at least one of the other Gabija polynucleotides or polypeptides disclosed herein or functional portions thereof.

[1120] The terms “GajA”, “GajB”, “gajA” and “gajB”, also refer to functional GajA, GajB, gajA and gajB, homologs, which exhibit the desired activity (i.e., conferring phage resistance). Such homologs can be, for example, at least 80%, at least 81%, at least 82%, at least 83%, at least 84%, at least 85%, at least 86%, at least 87%, at least 88%, at least 89%, at least 90%, at least 91%, at least 92%, at least 93%, at least 94%, at least 95%, at least 96%, at least 97%, at least 98%, at least 99% or 100% identical or homologous to the polypeptide sequences references in Table 14 rows 2-4599 columns H and I and L and M, respectively, or 80%, at least 81%, at least 82%, at least 83%, at least 84%, at least 85%, at least 86%, at least 87%, at least 88%, at least 89%, at least 90%, at least 91%, at least 92%, at least 93%, at least 94%, at least 95%, at least 96%, at least 97%, at least 98%, at least 99% or 100% identical or homologous to the polynucleotide sequences references in Table 14 rows 2-4599 columns H and J and L and N, respectively. In some embodiments, such homologs comprise at least 80%, at least 81%, at least 82%, at least 83%, at least 84%, at least 85%, at least 86%, at least 87%, at least 88%, at least 89%, at least 90%, at least 91%, at least 92%, at least 93%, at least 94%, at least 95%, at least 96%, at least 97%, at least 98%, at least 99% or 100% homology or identity within similar domain regions of the polypeptide sequences references in Table 14 rows 2-4599 columns H and I and L and M, respectively, or 80%, at least 81%, at least 82%, at least 83%, at least 84%, at least 85%, at least 86%, at least 87%, at least 88%, at least 89%, at least 90%, at least 91%, at least 92%, at least 93%, at least 94%, at least 95%, at least 96%, at least 97%, at least 98%, at least 99% or 100% identity or homology within nucleotide sequences encoding similar domain regions to the polynucleotide sequences references in Table 14 rows 2-4599 columns H and J and L and N, respectively.

[1121] Table 14 presents embodiments of components of Defense System VI that may be found in a diverse array of bacteria and archaea genomes (referenced in Table 18). Table 14 presents embodiments of nucleic acid sequences encoding gene cassettes of Defense System VI (referenced in Table 18).

[1122] The Septu Defense System

[1123] In some embodiments, a defense system disclosed herein comprises a Septu anti-phage defense system (Table 15).

[1124] In some embodiments, a Septu defense system provides a host cell with resistance to entry of foreign nucleic acid invasion. In some embodiments, a host cell expressing a functional Septu defense system (Defense System VII) provides the host cell resistance foreign nucleic acid invasion.

[1125] In some embodiments, a Septu defense system provides a host cell with resistance to at least one phage.

[1126] In some embodiments, a microbial cell comprising a Septu defense system protects the microbial cell from phage infection. In some embodiments, a microbial cell expressing a Septu defense system protects the microbial cell from phage infection. In some embodiments, a microbial cell expressing a functional Septu defense system protects the microbial cell from phage infection. In some embodiments, a bacterial cell comprising a Septu defense system protects the bacterial cell from phage infection. In some embodiments, a bacterial cell expressing a Septu defense system protects the bacterial cell from phage infection. In some embodiments, a bacterial cell expressing a functional Septu defense system protects the bacterial cell from phage infection.

[1127] In some embodiments, a Septu defense system provides a host cell with resistance to plasmid transformation. In some embodiments, a Septu defense system (Defense System VII) provides a host cell with resistance to plasmid transformation. In some embodiments, a host cell expressing a functional Septu defense system (Defense System VII) provides a host cells with resistance to plasmid transformation.

[1128] In some embodiments, a Septu defense system (Defense system VII) provides a host cell with resistance to entry of conjugative elements. In some embodiments, a host cell expressing a function Septu defense system (Defense System VII) provides the host cell resistance from entry of conjugative elements.

[1129] As used herein, the term “a Septu anti-phage defense system” may be used interchangeably with the term “a Defense System VII”, having all the same meanings and qualities. A skilled artisan would appreciate that the term “Septu system” may be used interchangeably in some embodiments with “Septu defense system”, “Septu the defense system”, “Septu anti-phage system”, and “Defense System VII”, having all the same meanings and qualities.

[1130] In some embodiments, a microbial species does not comprise an endogenous Defense System VII. In some embodiments, a microbial species does not express an endogenous Defense System VII. In some embodiments, a microbial species does not express an endogenous functional Defense System VII.

[1131] In some embodiments, a bacterial species does not comprise an endogenous Defense System VII. In some embodiments, a bacterial species does not express an endogenous Defense System VII. In some embodiments, a bacterial species does not express an endogenous functional Defense System VII.

[1132] A Septu defense system comprises, in some embodiments, a nucleic acid construct comprising a nucleic acid sequence encoding a PtuA polypeptide comprising a pfam13304 domain or a pfam02463 domain or a combination thereof, and a PtuB polypeptide comprising pfam13395 domain or a pfam01844 domain or a combination thereof. In some embodiments, a Septu defense system comprises a nucleic acid construct comprising a nucleic acid sequence comprising a ptuA gene and a ptuB gene.

[1133] In some embodiments, a Septu defense system comprises, a PtuA polypeptide comprising a pfam13304 domain or a pfam02463 domain or a combination thereof, and a PtuB polypeptide comprising pfam13395 domain or a pfam01844 domain or a combination thereof. In some embodiments, a Septu defense system comprising anti-phage activity comprises a PtuA polypeptide and a PtuB polypeptide.

[1134] In some embodiments, a Defense System VII comprises a PtuA polypeptide comprising a pfam13304 domain or a pfam02463 domain or a combination thereof, or comprising an amino acid sequence having at least 80% identity to a sequence selected from the group referenced in Table 15 rows 2-12507 columns H and I; or a PtuB polypeptide comprising pfam13395 domain or a pfam 01844 domain or a combination thereof, or comprising an amino acid sequence having at least 80% identity to a sequence selected from the group referenced in Table 15 rows 2-2507 columns L and M; or combination thereof.

[1135] In some embodiments, a Defense System VII comprises at least two different polypeptides selected from a PtuA polypeptide comprising a pfam13304 domain or a pfam02463 domain or a combination thereof, or comprising an amino acid sequence having at least 80% identity to a sequence selected from the group referenced in Table 15 rows 2-12507 columns H and I; and a PtuB polypeptide comprising pfam13395 domain or a pfam 01844 domain or a combination thereof, or comprising an amino acid sequence having at least 80% identity to a sequence selected from the group referenced in Table 15 rows 2-2507 columns L and M.

[1136] In some embodiments, a Septu defense system having an anti-phage activity comprises a nucleic acid construct comprising a nucleic acid sequence encoding a PtuA polypeptide and a PtuB polypeptide. In some embodiments, a Septu defense system having an anti-phage activity comprises a nucleic acid construct comprising a nucleic acid sequence encoding a PtuA polypeptide comprising an AAA domain (“ATPases Associated with diverse cellular Activities” domain) or a RecF/RecN/SMC N-terminal domain (a domain found at the N terminus of structural maintenance of chromosomes (SMC) proteins) or an N-terminal HNH nuclease domain, or any combination thereof, and a PtuB polypeptide comprising a HNH endonuclease activity.

[1137] In some embodiments, a Septu defense system having an anti-phage activity comprises a nucleic acid construct comprising a nucleic acid sequence encoding a PtuA polypeptide comprising an AAA domain (“ATPases Associated with diverse cellular Activities” domain). In some embodiments a PtuA polypeptide comprises a RecF/RecN/SMC N-terminal domain (a domain found at the N terminus of structural maintenance of chromosomes (SMC) proteins). In some embodiments, a PtuA polypeptide comprises an N-terminal HNH nuclease domain. In some embodiments, a PtuA polypeptide comprises an AAA domain (“ATPases Associated with diverse cellular Activities” domain) and a RecF/RecN/SMC N-terminal domain (a domain found at the N terminus of structural maintenance of chromosomes (SMC) proteins) and an N-terminal HNH nuclease domain. In some embodiments, a Septu defense system having an anti-phage activity comprises a nucleic acid construct comprising a nucleic acid sequence encoding a PtuB polypeptide comprising a HNH endonuclease. In some embodiments, a Septu defense system having an anti-phage activity comprises a nucleic acid construct comprising a nucleic acid sequence encoding a PtuA polypeptide comprising an AAA domain (“ATPases Associated with diverse cellular Activities” domain) and a RecF/RecN/SMC N-terminal domain (a domain found at the N terminus of structural maintenance of chromosomes (SMC) proteins). In some embodiments, a Septu defense system having an anti-phage activity comprises a nucleic acid construct comprising a nucleic acid sequence encoding a PtuA polypeptide comprising an AAA domain (“ATPases Associated with diverse cellular Activities” domain) and a RecF/RecN/SMC N-terminal domain (a domain found at the N terminus of structural maintenance of chromosomes (SMC) proteins) and an N-terminal HNH nuclease domain, and a PtuB polypeptide comprising a HNH endonuclease. In some embodiments, a Septu defense system having an anti-phage activity comprises a nucleic acid construct comprising a nucleic acid sequence encoding a PtuA polypeptide comprising an AAA domain (“ATPases Associated with diverse cellular Activities” domain) and a RecF/RecN/SMC N-terminal domain (a domain found at the N terminus of structural maintenance of chromosomes (SMC) proteins), and a PtuB polypeptide comprising a HNH endonuclease.

[1138] In some embodiments, the Septu anti-phage defense system comprises a nucleic acid construct comprising nucleic acid sequences encoding a cassette comprising ptuA and ptuB genes.

[1139] In some embodiments, a Septu (Defense System VII) gene cassette comprises the nucleic acid sequence:

(SEQ ID NO: 12; Table 4 construct 42)

| | |
|---|---|
| 1 | gggaatgcaa aaaggaggcg ggacttgagt gcgagttctg cctctttttt gctgaattta |
| 61 | gaaatctttt aagttttatc taaaaaagca ttcactttat tgttatttat gtagtaagag |
| 121 | taaaatttta ttaaaaattc taaagctgta ttggtttata agctagtgct atatctacta |
| 181 | tttgttctgg agtaagatct tcatcattaa aagaaaggca ttattatttt tggtgaatgt |
| 241 | tatttagtat aaaccatagg ggaatggaat attttatgat aaaattgagt ggagtaaata |
| 301 | attgtaaaga taaataaacg gatagcatgt aaaaaaaggg ttgaccttga gccttattaa |
| 361 | gacgggtgtt gtagtaataa atgaattaag agaaaaacat ttgtaattag tcaacaaaaa |
| 421 | gggagttgct tgaatgttag ttataaaaga attaaaaatt gatgggattg gcggtattaa |
| 481 | tagccttaaa cttaatttta acgaggggtt aaatttgatt tgcggtccaa atggtgtagg |
| 541 | gaaaaccaca attcttgaaa gtattggcca tatgtttagt aatggtagtc gtagtaaggt |
| 601 | taagagaaat gttaaatttg atcaggggag ttgtgaaatt agctattcaa cattcctaga |
| 661 | tactatacat acacagtcat gtattttaag gaattatgaa gaaaatgatt cgctggattg |
| 721 | gcatggtgga aatgcaaatt tggctaaaga ggtcattgtc ttcaaagctc aaagatcatt |
| 781 | cacttatacg caattagatt ctcttcgtaa agatacggaa acaagtgatg gtaaatttct |
| 841 | ggatgattct atgaatggaa ttcaattttt cgactttaag aattggttta tccatcgttt |
| 901 | tttatttagt catgtagata atgaattaac aacagtacaa aaagagaatt ttaaacttgc |
| 961 | gacagattgt tttggtattt tagataatag cattcgtttt agtagtgtta aaagtgatac |
| 1021 | attcgatata attataagta cctcaaatgg tgaaatctat tttgagtatc tatcatcagg |
| 1081 | attcaaatca tgtatctata ttattcatgg gttaattaaa gaaatagagt atcgttttaa |
| 1141 | aaacgatggt ggtattaaag ttcaagatta tgaagggcta atactaatcg atgagttgga |
| 1201 | ccttcattta catccacagt ggcaagcgaa aatgatttat ttaataaagc atatattacc |
| 1261 | taaagctcaa attattgcaa caacacatag tcctcatatg gtacaagctg cagcaattaa |
| 1321 | tgaacttata gctttaggaa tcgatgaaga tgcggatgta tatgtaagac aactacctaa |
| 1381 | tgttcaatat ggatttcagg gatggactgt tgaggaaata ttggaagacg ttatggggtt |
| 1441 | agatgaaaca cggtctccaa tgtacataga ggctataact gaatttgaaa aatctctaga |
| 1501 | tgaagaaaat gaggagaaga tatttgaagc ttattataag ttagatttaa tgctacaccc |
| 1561 | aagtaatcca cttcgcaagt tgttaaagtt acaagtagct caattcggga gggttataga |
| 1621 | gtgattcatt taaaacgccc taatagtcct agtaaactta taaatgaaga agcaaaacta |
| 1681 | actcaagaat ttcttcaaaa tggtaatagt gtttggggaa agccttatat taagcttgct |
| 1741 | cttctagaga tgtcaaataa caaatgtgta tactgtgaat gtagactaga tgaagagagt |
| 1801 | aagtatatgg aggtagagca ctttctacca aaagatactt atcctaatct agttgtcaat |
| 1861 | tggagaaatt tattaccaag ttgtaaaaga tgtaatggaa aaaaagggac acatgattca |
| 1921 | aaaaaagaac ctattatcaa tcctactgtt gatactccaa gtaatcatat aaaaatgttt |
| 1981 | aactattgcc taaagggaaa agatttaaaa gggaaaacaa cagttgatgt attgcaccta |
| 2041 | aaccaacttg atagattagt atacccaaga atgttaattg gaacaaaaac tatagaaaca |
| 2101 | gtagaaaaac ttttagaaat ggcagagaac tttaatttga atattaatgc tactgggcgt |
| 2161 | atcaaaagtc gtattataca tggcactaca cagttgctca tagaagctca accgcattcc |
| 2221 | gaatattctg cgacagttgc ctcggtttta tttaacaatg aagattttgt taagttaaaa |
| 2281 | gagattatga ttaagtgcac aatctggaat acagaacatc aaaagttact gtctaatgca |
| 2341 | gaaagaaata ttttggtaga gccactttac aattgcctca ataataagaa ttaatgattc |
| 2401 | taacgtatac tctagctgaa agtatatagt tagtgtattc cttggggtag cttcaaccta |
| 2461 | tttgatatta gatgtagaat tagagttaca attgatgtga aagtaagtgt caatggttca |
| 2521 | caaattataa agtacacaac agtaaaggta agccatacta tgtaacagca aatgaggtct |
| 2581 | atgtatatgg gaagtaaaaa aagcggtctg ctcaaattat gagtagaccg cttttttact |
| 2641 | taagtatgct atttatcact tcataaatat aaaattacat atcaattact tttttacgac |
| 2701 | tttaccggca acacctgttt accgaattag ttgatgaaga ctcatcaatt aattcaatgc |
| 2761 | ttttatttgc aatatattgc ctcgcgttct tattaaaatc aatcagtgta gagaaaagaa |
| 2821 | gctggaagag ttagagggga tatatgatgt gtttgtgaag ggatatataa tagaggaaat |
| 2881 | ataaaaagtg ctaacaagtt tgcaaacgaa cttgctaaca cctatacaga atagacataa |
| 2941 | aatatcgctg atatgtcatc tttgaaatag ctttaatcag ttaaatcaca cttatacgaa |
| 3001 | atgcttatag taacagtctt aatatcaaga atataatcat ccagatattc ctttactttt |
| 3061 | cagacgaaaa cgagggatga tat. |

[1140] The coding regions for each of the ptuA and ptuB gene sequences within this embodiment of a Septu cassette (SEQ ID NO: 12) are as follows: nucleotides 434-1624 encode an embodiment of a PtuA polypeptide, and nucleotides 1621-2394 encode an embodiment of a PtuB polypeptide.

[1141] In some embodiments, a Defense System VII comprising a PtuA polypeptide and a PtuB polypeptide is encoded by the nucleic acid sequence set forth in SEQ ID NO: 12. In some embodiments, a Defense System VII comprising a PtuA polypeptide and a PtuB polypeptide, is encoded by a nucleic acid sequence having at least 80% homology to the sequence set forth in SEQ ID NO: 12. In some embodiments, a Defense System VII comprising a PtuA polypeptide and a PtuB polypeptide, is encoded by a nucleic acid sequence having at least 85% homology, or 90% homology, or 95% homology, or 97% homology, or 98% homology, or 99% homology to the sequence set forth in SEQ ID NO: 12. In some embodiments, a Defense System VII comprising a PtuA polypeptide and a PtuB polypeptide, is encoded by a nucleic acid sequence having at least 80% identity to the sequence set forth in SEQ ID NO: 12. In some embodiments, a Defense System VII comprising a PtuA polypeptide and a PtuB polypeptide, is encoded by a nucleic acid sequence having at least 85% identity, or 90% identity, or 95% identity, or 97% identity, or 98% identity, or 99% identity to the sequence set forth in SEQ ID NO: 12.

[1142] In some embodiments, a Septu (Defense System VII) gene cassette comprises the nucleic acid sequence:

(SEQ ID NO: 13; construct 43 of Table 4)

| | |
|---|---|
| 1 | ggctttttaa gtgtacattt ttattgaaga ttggatagaa ttcaacaaga tgaatttgat |
| 61 | gtttattaaa cataagatgg aaaggctatg tgttaaataa aaagatgaaa taattaccat |
| 121 | tagtgtataa aataataagt aactagtttg gtaatgattt taaggatatg aagtatatta |
| 181 | accgtgacat attatagttg aaattcagtt ttatatcatg tgaaaatatg cttttgagga |
| 241 | gggtaaagat atgattcgaa tacataaaga taaatatttt gattcaatat atgatgaatt |
| 301 | gttagaacaa gcaactcaag aaaagtatat ggatgagtat ttactagaaa agtttatgaa |
| 361 | aagatacttt aatggtaaat gttcatactg tgaaattcga atgaaagagt tacgactaac |
| 421 | aattgacttt tatagaccta taaatggatc gttaaacacg atggatggtg aatttcatcc |
| 481 | tgatcattat aaatggttaa aaaatgaaga tgataatata ctttcaattt gtgtagaatg |
| 541 | taagcgagcg aaaagtaatc gttttccagt agatggcgat gtcgcttcta ttaatgctga |
| 601 | taagaataaa ttagtgaaag aaagacgttt attgatacat ccttgtagag attatcctga |
| 661 | aaggcatttt gattacgatg aaagtggaat ggtttattat aaaagtaaaa aaggcgaggt |
| 721 | tactgtagat gttttaaatt tgaatcgcgg tatgttggta gaaatgcgtg cccaagtata |
| 781 | tagtgaattt aataatcttt gttatttatt ctcaatggag caaagtccct actatttaaa |
| 841 | gcaaattcta caagaagttc agttggattc aatatttatt ggtttaaaaa agtttatact |
| 901 | ttctgaatgg gtaatcttaa atgagaaaat tccatttctt caagaatttg agccattatt |
| 961 | aggtaagaga ttgcaggaag aagaagtgag agttttatca gttagaaata ataagattag |
| 1021 | tcaaattgat attgataata atatccttta tgttgataat gataagcgga gaaagcgtgt |
| 1081 | tcctgcaagg aaaattaatg attattacga tgtatccgac gagaacgctt tagaaaaata |
| 1141 | ttatggaaaa cagcgtttta ttgaaaaaat tgaaatttat aactttaaaa gtattagaaa |
| 1201 | tatgaaaatt gattttactc tcagtaaaag cagtaatgct ccttggctaa tgttattagg |
| 1261 | agaaaatggt gtgggcaaaa gctcaatttt acaagcaatt gcattaacac taatgggaaa |
| 1321 | cgaacaacgg caaaaaatta taaaaaagaa accttatgaa tatttaacaa aaggctttga |
| 1381 | tgaaggttct ataaagataa aattatcagg catgcaagag cctattagta tttatttaaa |
| 1441 | ttcgaattca tttgaattta caggtgaaaa tcatcaaagg cctagggttc taattttagg |
| 1501 | ttatggctca acgcgattac ttcctagaga agaaatgtta tcaaattata aggtgacttg |
| 1561 | ggcaagaata gaaaatctat ttaatccttt tattccatta gttaatgtaa gagagtatct |
| 1621 | cttatcttta aataatgaag attttaataa tgttaaaaaa gctattgagt ccttattttt |
| 1681 | agatgaagta ataattgatc gggatcagat atatgaagaa gtatattttg gatttgcgaa |
| 1741 | ttcttacagt aaactagaag atttaagtga tggctatcag acaattattg ctctggctac |
| 1801 | tgatattatg atggttatga agaatagatg gcgaaatttt gatgctgaag gaattgtttt |
| 1861 | aatagatgaa attgatgcac atcttcatcc aaggtggaat atagaaattg tttctcgatt |
| 1921 | aaaaaatgct tttccgaaaa ttcaatttat tgcaactacc cataacccgc tatcacttcg |
| 1981 | tggtttaata gatggagaag ttgcagtatt actagaaaat gaggaaagag aagcgtatat |
| 2041 | tactcaaaag ttaccttctc aaaaaggatt taatgtagaa ggattattaa cttctaaatt |
| 2101 | ttttggattg tatgacacca tgccagattt aaatgaatta tttgatcgat attatttact |
| 2161 | tttatctaat cctagtccta atgaaaggca aaaggaagaa ataaaaaatt tacaagataa |
| 2221 | attgtcaaaa tatgaaaaag taggtaccac attaagagaa caaaaattct atgaagcagt |
| 2281 | ggattactat tttgcacagt acagaaaaaa taatgtggaa ttaagtgatg aagagtttaa |
| 2341 | caatattata gaagatgcta ttaaatattt tgaaaggtaa gattttttat gataaaagtt |
| 2401 | caaagagaag cagaaccagc tgtattaaat ctaactgact cagattctat tggttttaaa |
| 2461 | gaattggaag cggcaaaaaa aactactttt acaaaagata cgaaatttcc gttcgaggca |
| 2521 | tataaggatg aaagtgtaaa aaatctttta aaaaaaatgt ttaatggtaa atgtggatat |
| 2581 | tgtgaaagta ttattaatgt gacttcgtat gaagaaattg aacattttag acctaaaaaa |
| 2641 | gctattaata tagaaggtat acaaggattg acttatcctg gttactattg gttggctatg |
| 2701 | agttggaata atttgttgat ttcttgtcaa aggtgcaata ggtcgcataa aaaaaattat |
| 2761 | tttccaatag aaaacgaaag taatcgtgca aaagctcccg gtgaagaaag tggagaggag |
| 2821 | gtattactat taaacccttg tgaagatgac ccgagtgaac atttggaatt taaggataca |
| 2881 | ggtattattg aatttaaaga gggatctaaa aagggagaaa aatctataaa agtttatgct |
| 2941 | cttcatagga gagaacttac tgaagaaaga gcgaaagttg ctaaggatat tgagctgaag |
| 3001 | aaagtacaaa tacttgacgg attaagtact ctaaaggtgc ttttacgcta tcaagaagat |
| 3061 | agtgatcttc aaaaagagat tgaaaaaact gtatcaaata taatatcatt atatgatttt |
| 3121 | atatttgaat atgaaaatga tcctaacagg ccttatcagg caatggtaac tcagattact |
| 3181 | tcggattttc tgagtgaacg taaagaatta atcaataaat tgaagacaac atccaatcgg |
| 3241 | aaaaattcct gtgaacaaag tcatatttca agttaagtta atttaggata agagctataa |
| 3301 | aaaagctctt atcctattta ttatgaagtt tagcgagata gtaaaagtaa cataattaat |
| 3361 | atttaaaaaa ttattttttc ttgagtaacg gtattaactc tgctacattt aatatttttt |
| 3421 | gtctttataa aatgccttat gtcaattata aaaaaatcat gatgctttct aatttagtcc |
| 3481 | tagcgtcttc tttaaattaa gatactataa atatgaggtc cctcaatgct gttgtttata |
| 3541 | aagtattttt gctaactgga ttactttgtt gttacgttca tctgacttag tgttccagct |
| 3601 | ccacctaact caattaatat ttctatgttt atcatcagtc tatcttttta aaattagtat |
| 3661 | atctaaattt ttgcaatgga agcaattggt tttatataat tgtagaagga tttaccaatg |
| 3721 | gacaatagcg ggaggattca aaaaa. |

[1143] The coding regions for each of the ptuA and ptuB gene sequences within this embodiment of a Septu cassette (SEQ ID NO: 13) are as follows: nucleotides 251-2380 encode an embodiment of a PtuA polypeptide, and nucleotides 2389-3276 encode an embodiment of a PtuB polypeptide.

[1144] In some embodiments, a Defense System VII comprising a PtuA polypeptide and a PtuB polypeptide is encoded by the nucleic acid sequence set forth in SEQ ID NO: 13. In some embodiments, a Defense System VII comprising a PtuA polypeptide and a PtuB polypeptide, is encoded by a nucleic acid sequence having at least 80% homology to the sequence set forth in SEQ ID NO: 13. In some embodiments, a Defense System VII comprising a PtuA polypeptide and a PtuB polypeptide, is encoded by a nucleic acid sequence having at least 85% homology, or 90% homology, or 95% homology, or 97% homology, or 98% homology, or 99% homology to the sequence set forth in SEQ ID NO: 13. In some embodiments, a Defense System VII comprising a PtuA polypeptide and a PtuB polypeptide, is encoded by a nucleic acid sequence having at least 80% identity to the sequence set forth in SEQ ID NO: 13. In some embodiments, a Defense System VII comprising a PtuA polypeptide and a PtuB polypeptide, is encoded by a nucleic acid sequence having at least 85% identity, or 90% identity, or 95% identity, or 97% identity, or 98% identity, or 99% identity to the sequence set forth in SEQ ID NO: 13.

[1145] In some embodiments, a construct comprising the Septu defense system encodes one component of the defense system, whereby multiple constructs, for example but not limited to, two constructs may be used to assemble the functional defense system. In some embodiments, the components of a Septu defense system comprise genes ptuA and ptuB. In some embodiments, the components of a Septu defense system consist of genes ptuA and ptuB. In some embodiments, the components of a Septu defense system comprise nucleic acid sequences encoding a PtuA polypeptide and a PtuB polypeptide. In some embodiments, the components of a Septu defense system consist of nucleic acid sequences encoding a PtuA polypeptide and a PtuB polypeptide.

[1146] In some embodiments, a construct comprising the Septu defense system encodes one component of the defense system, whereby a second construct may be used to assemble the functional defense system. In some embodiments, a construct comprising the Septu defense system encodes one component of the defense system, whereby additional constructs may be used to assemble the functional defense system. For example, in some embodiments each of PtuA and PtuB may be encoded by nucleic acid sequences comprised in different constructs, wherein expression of the combination of constructs produces a functional Septu defense system.

[1147] In some embodiments, the components making up a functional Septu anti-phage defense system comprise a PtuA polypeptide and a PtuB polypeptide, each encoded by a ptuA and a ptuB gene, respectively. In some embodiments, a ptuA gene encodes a polypeptide comprising an AAA domain (“ATPases Associated with diverse cellular Activities” domain). In some embodiments, a ptuA gene encodes a polypeptide comprising a RecF/RecN/SMC N-terminal domain (a domain found at the N terminus of structural maintenance of chromosomes (SMC) proteins). In some embodiments, a ptuA gene encodes a polypeptide comprising an N-terminal HNH nuclease domain. In some embodiments, a ptuA gene encodes a polypeptide comprising a AAA domain (“ATPases Associated with diverse cellular Activities” domain) or a RecF/RecN/SMC N-terminal domain (a domain found at the N terminus of structural maintenance of chromosomes (SMC) proteins) or an N-terminal HNH nuclease domain, or any combination thereof. In some embodiments, a ptuA gene encodes a polypeptide comprising a AAA domain (“ATPases Associated with diverse cellular Activities” domain) and a RecF/RecN/SMC N-terminal domain (a domain found at the N terminus of structural maintenance of chromosomes (SMC) proteins). In some embodiments, a ptuA gene encodes a polypeptide comprising a AAA domain (“ATPases Associated with diverse cellular Activities” domain) and a RecF/RecN/SMC N-terminal domain (a domain found at the N terminus of structural maintenance of chromosomes (SMC) proteins) and an N-terminal HNH nuclease domain.

[1148] In some embodiments, a ptuB gene encodes a polypeptide comprising a HNH endonuclease.

[1149] In some embodiments, a Septu defense system having an anti-phage activity comprises a nucleic acid encoding a PtuA polypeptide. In some embodiments, a Septu defense system having an anti-phage activity comprises a nucleic acid encoding a PtuA polypeptide and a PtuB polypeptide. In some embodiments, a Septu defense system having an anti-phage activity comprises a nucleic acid encoding a PtuB polypeptide.

[1150] In some embodiments, a Septu defense system having an anti-phage activity comprises a nucleic acid comprising a ptuA gene. In some embodiments, a Septu defense system having an anti-phage activity comprises a nucleic acid comprising a ptuA gene and a ptuB gene. In some embodiments, a Septu defense system having an anti-phage activity comprises a nucleic acid comprising ptuB gene.

[1151] In some embodiments, a Septu defense system having an anti-phage activity comprises a nucleic acid construct comprising nucleic acids encoding polypeptides in a set order. In one embodiment, the 5′ to 3′ order of polypeptides encoded is PtuA and PtuB. In some embodiments the 5′ to 3′ order of polypeptides does not affect the anti-phage activity. In some embodiments the 5′ to 3′ order of polypeptides does affect the anti-phage activity.

[1152] In some embodiments, the 5′ to 3′ order of polypeptides is random, for example any order of nucleic acid sequences encoding PtuA and PtuB.

[1153] In some embodiments, a Septu defense system having an anti-phage activity comprises a nucleic acid construct comprising genes in a set order. In some embodiment, the 5′ to 3′ order of genes is ptuA and ptuB. In some embodiment, the 5′ to 3′ order of genes in a Septu defense system is not ptuA and ptuB. In some embodiments the 5′ to 3′ order of genes does not affect the anti-phage activity. In some embodiments the 5′ to 3′ order of genes does affect the anti-phage activity.

[1154] In some embodiments, the 5′ to 3′ order of genes is random, for example any order of ptuA and ptuB.

[1155] In some embodiments, the Septu system (Defense System VII) composition and order is as shown in FIG. 3B.

[1156] In some embodiments, a Septu defense system having an anti-phage activity originates from a microbial genome, for example a bacterial or an archaeal genome (Table 15). A skilled artisan would appreciate that the Septu system is not present in the majority of bacteria and or archaea species.

[1157] In some embodiments, a functional Septu defense system comprises a construct comprising nucleic acid sequences encoding polypeptides, wherein the nucleic acid sequence encoding each polypeptide may originate from a different microbial species. For example, the source of the nucleic acid sequence encoding a PtuA polypeptide may be one microbial species, while the source of the nucleic acid sequence encoding a PtuB polypeptide may be a different microbial species. In some embodiments, a functional Septu defense system comprises a non-naturally occurring combination of polypeptide components. In some embodiments, a functional Septu defense system comprises a combination of at least two polypeptides that do not naturally occur together.

[1158] In some embodiments, a functional Septu defense system comprises a construct comprising nucleic acid sequences encoding polypeptides, wherein the nucleic acid sequence encoding each polypeptide may originate from a different bacterial species. For example, the source of the nucleic acid sequence encoding PtuA polypeptide may be one bacterial species, while the source of the nucleic acid sequence encoding a PtuB polypeptide may be a different bacterial species.

[1159] In some embodiments, the source of the nucleic acid encoding a PtuA polypeptide and a PtuB polypeptide is the same. In some embodiments, the source of the nucleic acid encoding a PtuA polypeptide and a PtuB polypeptide is the not the same. In some embodiments, the source of the nucleic acid sequence of any of the components of a Septu defense system comprises any of the species listed in Table 15.

[1160] In some embodiments, a Septu defense system having an anti-phage activity comprises a nucleic acid construct comprising non-coding regions between the nucleic acid sequences encoding the polypeptides. In some embodiments, the non-coding regions between the nucleic acid sequences comprises nucleic acid sequence not naturally occurring in the microbial species of origin. In some embodiments, the non-coding regions between the nucleic acid sequences comprises nucleic acid sequence is the naturally occurring in the microbial species of origin.

[1161] In some embodiments, a Septu system disclosed herein comprises a multi-gene phage resistance system broadly distributed in microbial genomes, for example but not limited to bacteria and archaea. According to some embodiments, the Septu system components are located in a gene cluster (a cassette of genes) in a microbial cell genome. According to some embodiments, the Septu system components are located in close proximity (e.g. positioned within 20 genes, 10 genes, 5 genes or less one from the other) in a genome of a prokaryotic cell. According to some embodiments the prokaryotic cell expresses an endogenous Septu defense system. According to some embodiments, the prokaryotic cell expresses an endogenous functional Septu defense system. According to some embodiments, the species of prokaryotic cell is selected from the group consisting of the species listed in Table 15. According to some embodiments a prokaryotic cell expresses a non-endogenous Septu defense system. According to some embodiments, a prokaryotic cell expresses a non-endogenous functional Septu defense system. According to some embodiments, the species of prokaryotic cell expressing a non-endogenous functional Septu defense system is selected from the group consisting of the species listed in Table 15.

[1162] In some embodiments, Septu defense system components comprise PtuA and PtuB polypeptides. In some embodiments, Septu defense system components comprise functional portions of PtuA and PtuB polypeptides. In some embodiments, the Septu defense system functional components are encoded by ptuA and ptuB genes.

[1163] Non-limiting embodiments of endogenous Septu systems and the respective location of their components are provided in Table 15 herein.

[1164] In some embodiments, the components of a Septu system may be identified by the presence of similar domains present within each component. In some embodiments, domains comprise pfam domains and or clusters of orthologous groups (COG) domains.

[1165] In some embodiments, the term “PtuA” refers to the polynucleotide or expression product e.g., the polypeptide encoded by the ptuA gene. In some embodiments, the term “PtuA” refers to a PtuA polypeptide. In some embodiments, the ptuA gene encodes a polypeptide comprising a pfam13304 domain. In some embodiments, the ptuA gene encodes a polypeptide comprising a pfam02463 domain. In some embodiments, the ptuA gene encodes a polypeptide comprising a pfam13304 domain and a pfam02463 domain. In some embodiments, the PtuA polypeptide comprises a pfam13304 domain. In some embodiments, the PtuA polypeptide comprises a pfam02463 domain. In some embodiments, the PtuA polypeptide comprises a pfam13304 domain and a pfam02463 domain.

[1166] In some embodiments, PtuA polypeptide is encoded by a gene positioned within 5-60 genes of a gene encoding a PtuB polypeptide in a genome of a prokaryotic cell. In some embodiments, PtuA polypeptide is encoded by a gene positioned within 5 genes upstream (5′) or downstream (3′) to a gene encoding a PtuB polypeptide in a genome of a prokaryotic cell. In some embodiments, PtuA polypeptide is encoded by a gene positioned within 5 genes upstream (5′) and downstream (3′) to a gene encoding a PtuB polypeptide in a genome of a prokaryotic cell.

[1167] In some embodiments, PtuA and PtuB are encoded by genes positioned sequentially 5′ to 3′ in a genome of a prokaryotic cell. In some embodiments, PtuA and PtuB are encoded by genes positioned contiguously 5′ to 3′ in a genome of a prokaryotic cell.

[1168] In some embodiments, ptuA and ptuB genes are positioned sequentially 5′ to 3′ in a genome of a prokaryotic cell. In some embodiments, ptuA and ptuB, genes are positioned contiguously 5′ to 3′ in a genome of a prokaryotic cell.

[1169] As used herein, the term “PtuA” refers to the polynucleotide or expression product e.g., polypeptide encoded by the ptuA gene. In some embodiments, the term “PtuA” refers to a PtuA polypeptide. In some embodiments, the product of the ptuA gene comprises a pfam13304 domain. In some embodiments, the ptuA gene encodes a pfam02463 domain. In some embodiments, the product of the ptuA gene comprises a pfam13304 domain or a pfam02463 domain, or any combination thereof. In some embodiments, the product of the ptuA gene comprises a pfam13304 domain and a pfam02463 domain. In some embodiments, the ptuA gene encodes a AAA domain. In some embodiments, the ptuA gene encodes a RecF/RecN/SMC N-terminal domain (a domain found at the N terminus of structural maintenance of chromosomes (SMC) proteins). In some embodiments, the ptuA gene encodes an N-terminal HNH nuclease domain. In some embodiments, the ptuA gene encodes a AAA domain, or a RecF/RecN/SMC N-terminal domain (a domain found at the N terminus of structural maintenance of chromosomes (SMC) proteins), or an N-terminal HNH nuclease domain, or any combination thereof. In some embodiments, the ptuA gene encodes a AAA domain and a RecF/RecN/SMC N-terminal domain (a domain found at the N terminus of structural maintenance of chromosomes (SMC) proteins) and an N-terminal HNH nuclease domain. In some embodiments, the ptuA gene encodes a AAA domain and a RecF/RecN/SMC N-terminal domain (a domain found at the N terminus of structural maintenance of chromosomes (SMC) proteins). In some embodiments, the ptuA gene encodes a RecF/RecN/SMC N-terminal domain (a domain found at the N terminus of structural maintenance of chromosomes (SMC) proteins) and an N-terminal HNH nuclease domain.

[1170] In some embodiments, PtuA polypeptide is encoded by a gene positioned within 5-60 genes of a gene encoding a PtuB polypeptide in a genome of a prokaryotic cell. In some embodiments, PtuA polypeptide is encoded by a gene positioned within 5 genes upstream (5′) or downstream (3′) to a gene encoding a PtuB polypeptide in a genome of a prokaryotic cell. In some embodiments, PtuA polypeptide is encoded by a gene positioned within 5 genes upstream (5′) and downstream (3′) to a gene encoding a PtuB polypeptide in a genome of a prokaryotic cell.

[1171] In some embodiments, a PtuA polypeptide is about 452 amino acids long (median gene size).

[1172] In some embodiments, the PtuA polypeptide comprises the amino acid sequence having at least 80% homology to a sequence selected from the group consisting of the polypeptides referenced in Table 15, rows 2-2507, columns H and I. In some embodiments, the PtuA polypeptide comprises the amino acid sequence having at least 80% homology to similar domain regions in a sequence selected from the group consisting of the polypeptides referenced in Table 15, rows 2-2507, columns H and I. In some embodiments, a PtuA polypeptide homologue comprises an AAA domain (“ATPases Associated with diverse cellular Activities” domain). In some embodiments, a PtuA polypeptide homologue comprises a RecF/RecN/SMC N-terminal domain (a domain found at the N terminus of structural maintenance of chromosomes (SMC) proteins). In some embodiments, a PtuA polypeptide homologue comprises an N-terminal HNH nuclease domain. In some embodiments, a PtuA polypeptide homologue comprises an AAA domain (“ATPases Associated with diverse cellular Activities” domain) and a RecF/RecN/SMC N-terminal domain (a domain found at the N terminus of structural maintenance of chromosomes (SMC) proteins). In some embodiments, a PtuA polypeptide homologue comprises an AAA domain (“ATPases Associated with diverse cellular Activities” domain) and a RecF/RecN/SMC N-terminal domain (a domain found at the N terminus of structural maintenance of chromosomes (SMC) proteins) and an HNH nuclease domain. In some embodiments, the PtuA polypeptide comprises a homolog of a polypeptide having the amino acid sequences set forth in the polypeptides referenced in Table 15, rows 2-2507, columns H and I.

[1173] In some embodiments, the PtuA polypeptide comprises the amino acid sequence having at least 80% identity to a sequence selected from the group consisting of the polypeptides referenced in Table 15, rows 2-2507, columns H and I. In some embodiments, the PtuA polypeptide comprises the amino acid sequence having at least 80% homology to a sequence selected from the group consisting of the polypeptides referenced in Table 15, rows 2-2507, columns H and I. In some embodiments, the PtuA polypeptide comprises the amino acid sequence having at least 80% homology to similar domain regions in a sequence selected from the group consisting of the polypeptides referenced in Table 15, rows 2-2507, columns H and I. In some embodiments, the PtuA polypeptide comprises the amino acid sequence having at least 80% identity to similar domain regions in a sequence selected from the group consisting of the polypeptides referenced in Table 15, rows 2-2507, columns H and I.

[1174] In some embodiments, the PtuA polypeptide comprises an amino acid sequence having at least 80%, at least 85%, at least 90%, or at least 95% homology to a sequence selected from the group consisting of the polypeptides referenced in Table 15, rows 2-2507, columns H and I. In some embodiments, the PtuA polypeptide comprises the amino acid sequence having at least 80%, at least 85%, at least 90%, or at least 95%, homology to similar domain regions in a sequence selected from the group consisting of the polypeptides referenced in Table 15, rows 2-2507, columns H and I. In some embodiments, the PtuA polypeptide comprises an amino acid sequence having at least 80%, at least 85%, at least 90%, or at least 95% identity to a sequence selected from the group consisting of the polypeptides referenced in Table 15, rows 2-2507, columns H and I. In some embodiments, the PtuA polypeptide comprises the amino acid sequence having at least 80%, at least 85%, at least 90%, at least 95% identity to similar domain regions in a sequence selected from the group consisting of the polypeptides referenced in Table 15, rows 2-2507, columns H and I. In some embodiments, the PtuA polypeptide comprises an amino acid sequence selected from the group consisting of the polypeptides referenced in Table 15, rows 2-2507, columns H and I.

[1175] In some embodiments, the PtuA polypeptide comprises an amino acid sequence encoded by a nucleic acid sequence having at least 80%, at least 85%, at least 90%, or at least 95% homology to a sequence selected from the group consisting of the polynucleotides referenced in Table 15, rows 2-2507, columns H and J. In some embodiments, the PtuA polypeptide comprises the amino acid sequence encoded by a nucleic acid sequence having at least 80%, at least 85%, at least 90%, or at least 95%, homology to similar domain regions in a sequence selected from the group consisting of the polynucleotides referenced in Table 15, rows 2-2507, columns H and J. In some embodiments, the PtuA polypeptide comprises an amino acid sequence encoded by a nucleic acid sequence having at least 80%, at least 85%, at least 90%, or at least 95% identity to a sequence selected from the group consisting of the polynucleotides referenced in Table 15, rows 2-2507, columns H and J. In some embodiments, the PtuA polypeptide comprises the amino acid sequence encoded by a nucleic acid sequence having at least 80%, at least 85%, at least 90%, or at least 95%, homology to similar domain regions in a sequence selected from the group consisting of the polynucleotides referenced in Table 15, rows 2-2507, columns H and J. In some embodiments, the PtuA polypeptide comprises an amino acid sequence encoded from a nucleic acid sequence selected from the group consisting of the polynucleotides referenced in Table 15, rows 2-2507, columns H and J.

[1176] In some embodiments, the nucleic acid sequence of a ptuA gene comprises a nucleic acid sequence having at least 80%, at least 85%, at least 90%, or at least 95% homology to a sequence selected from the group consisting of the polynucleotides referenced in Table 15, rows 2-2507, columns H and J. In some embodiments, the nucleic acid sequence of a ptuA gene comprises a nucleic acid sequence having at least 80%, at least 85%, at least 90%, or at least 95% homology within regions encoding similar domain sequences to a sequence selected from the group consisting of the polynucleotides referenced in Table 15, rows 2-2507, columns H and J.

[1177] In some embodiments, the nucleic acid sequence of a ptuA gene encodes a polypeptide comprising an AAA domain (“ATPases Associated with diverse cellular Activities” domain). In some embodiments, the nucleic acid sequence of a ptuA gene encodes a polypeptide comprising a RecF/RecN/SMC N-terminal domain (a domain found at the N terminus of structural maintenance of chromosomes (SMC) proteins). In some embodiments, the nucleic acid sequence of a ptuA gene encodes a polypeptide comprising an HNH nuclease domain. In some embodiments, the nucleic acid sequence of a ptuA gene encodes a polypeptide comprising an AAA domain (“ATPases Associated with diverse cellular Activities” domain) and a RecF/RecN/SMC N-terminal domain (a domain found at the N terminus of structural maintenance of chromosomes (SMC) proteins). In some embodiments, the nucleic acid sequence of a ptuA gene encodes a polypeptide comprising an AAA domain (“ATPases Associated with diverse cellular Activities” domain) and a RecF/RecN/SMC N-terminal domain (a domain found at the N terminus of structural maintenance of chromosomes (SMC) proteins) and an HNH nuclease domain. In some embodiments, the nucleic acid sequence of a ptuA gene comprises a nucleic acid sequence having at least 80%, at least 85%, at least 90%, or at least 95% identity to a sequence selected from the group consisting of the polynucleotides referenced in Table 15, rows 2-2507, columns H and J. In some embodiments, the nucleic acid sequence of a ptuA gene comprises a nucleic acid sequence having at least 80%, at least 85%, at least 90%, or at least 95% identity within regions encoding similar domain sequences to a sequence selected from the group consisting of the polynucleotides referenced in Table 15, rows 2-2507, columns H and J. In some embodiments, the nucleic acid sequence of a ptuA gene comprises a nucleic acid sequence selected from the group consisting of the polynucleotides referenced in Table 15, rows 2-2507, columns H and J.

[1178] As used herein, the term “PtuB” refers to the polynucleotide or expression product e.g., polypeptide encoded by the ptuB gene. In some embodiments, the term “PtuB” refers to a PtuB polypeptide. In some embodiments, the product of the ptuB gene comprises a pfam13395 domain. In some embodiments, the ptuB gene encodes a pfam01844 domain. In some embodiments, the product of the ptuB gene comprises a pfam13395 domain or a pfam01844 domain, or any combination thereof. In some embodiments, the product of the ptuB gene comprises a pfam13395 domain and a pfam01844 domain. In some embodiments, the ptuB gene encodes a HNH endonuclease.

[1179] In some embodiments, PtuB polypeptide is encoded by a gene positioned within 5-60 genes of a gene encoding a PtuA polypeptide in a genome of a prokaryotic cell. In some embodiments, PtuB polypeptide is encoded by a gene positioned within 5 genes upstream (5′) or downstream (3′) to a gene encoding a PtuA polypeptide in a genome of a prokaryotic cell. In some embodiments, PtuB polypeptide is encoded by a gene positioned within 5 genes upstream (5′) and downstream (3′) to a gene encoding a PtuA polypeptide in a genome of a prokaryotic cell.

[1180] In some embodiments, a PtuB polypeptide is about 219 amino acids long (median gene size).

[1181] In some embodiments, the PtuB polypeptide comprises an amino acid sequence having at least 80% homology to a sequence selected from the group consisting of the polypeptides referenced in Table 15, rows 2-2507, columns L and M. In some embodiments, the PtuB polypeptide comprises the amino acid sequence having at least 80% homology to similar domain regions in a sequence selected from the group consisting of the polypeptides referenced in Table 15, rows 2-2507, columns L and M. In some embodiments, a homologue of the PtuB polypeptide comprises an HNH endonuclease. In some embodiments, the PtuB polypeptide comprises an amino acid sequence having at least 80% identity to a sequence selected from the group consisting of the polypeptides referenced in Table 15, rows 2-2507, columns L and M. In some embodiments, the PtuB polypeptide comprises the amino acid sequence having at least 80% identity to similar domain regions in a sequence selected from the group consisting of the polypeptides referenced in Table 15, rows 2-2507, columns L and M.

[1182] In some embodiments, the PtuB polypeptide comprises an amino acid sequence having at least 80%, at least 85%, at least 90%, or at least 95% homology to a sequence selected from the group consisting of the polypeptides referenced in Table 15, rows 2-2507, columns L and M. In some embodiments, the PtuB polypeptide comprises the amino acid sequence having at least 80%, at least 85%, at least 90%, or at least 95%, homology to similar domain regions in a sequence selected from the group consisting of the polypeptides referenced in Table 15, rows 2-2507, columns L and M. In some embodiments, the PtuB polypeptide comprises an amino acid sequence having at least 80%, at least 85%, at least 90%, or at least 95% identity to a sequence selected from the group consisting of the polypeptides referenced in Table 15, rows 2-2507, columns L and M. In some embodiments, the PtuB polypeptide comprises the amino acid sequence having at least 80%, at least 85%, at least 90%, or at least 95%, identity to similar domain regions in a sequence selected from the group consisting of the polypeptides referenced in Table 15, rows 2-2507, columns L and M. In some embodiments, the PtuB polypeptide comprises an amino acid sequence selected from the group consisting of the polypeptides referenced in Table 15, rows 2-2507, columns L and M.

[1183] In some embodiments, the PtuB polypeptide comprises an amino acid sequence encoded from a nucleic acid sequence having at least 80%, at least 85%, at least 90%, or at least 95% homology to a sequence selected from the group consisting of the polynucleotides referenced in Table 15, rows 2-2507, columns L and N. In some embodiments, the PtuB polypeptide comprises the amino acid sequence encoded by a nucleic acid sequence having at least 80%, at least 85%, at least 90%, or at least 95%, homology to similar domain regions in a sequence selected from the group consisting of the polynucleotides referenced in Table 15, rows 2-2507, columns L and N. In some embodiments, the PtuB polypeptide comprises an amino acid sequence encoded from a nucleic acid sequence having at least 80%, at least 85%, at least 90%, or at least 95% identity to a sequence selected from the group consisting of the polynucleotides referenced in Table 15, rows 2-2507, columns L and N. In some embodiments, the PtuB polypeptide comprises the amino acid sequence encoded by a nucleic acid sequence having at least 80%, at least 85%, at least 90%, or at least 95%, identity to similar domain regions in a sequence selected from the group consisting of the polynucleotides referenced in Table 15, rows 2-2507, columns L and N. In some embodiments, the PtuB polypeptide comprises an amino acid sequence encoded from a nucleic acid sequence selected from the group consisting of the polynucleotides referenced in Table 15, rows 2-2507, columns L and N.

[1184] In some embodiments, the nucleic acid sequence of a ptuB gene comprises a nucleic acid sequence having at least 80%, at least 85%, at least 90%, or at least 95% homology to a sequence selected from the group consisting of the polynucleotides referenced in Table 15, rows 2-2507, columns L and N. In some embodiments, the nucleic acid sequence of a ptuB gene comprises a nucleic acid sequence having at least 80%, at least 85%, at least 90%, or at least 95% identity to a sequence selected from the group consisting of the polynucleotides referenced in Table 15, rows 2-2507, columns L and N. In some embodiments, the nucleic acid sequence of a ptuB gene comprises a nucleic acid sequence having at least 80%, at least 85%, at least 90%, or at least 95% homology within the nucleotide sequence encoding similar domain regions to regions with a sequence selected from the group consisting of the polynucleotides referenced in Table 15, rows 2-2507, columns L and N. In some embodiments, the nucleic acid sequence of a ptuB gene comprises a nucleic acid sequence having at least 80%, at least 85%, at least 90%, or at least 95% identity to a sequence encoding similar domain regions selected from the group consisting of the polynucleotides referenced in Table 15, rows 2-2507, columns L and N. In some embodiments, the ptuB gene homolog encodes a polypeptide comprising a HNH endonuclease. In some embodiments, the nucleic acid sequence of a ptuB gene comprises a nucleic acid sequence selected from the group consisting of the polynucleotides referenced in Table 15, rows 2-2507, columns L and N.

[1185] A skilled artisan would appreciate that the terms a “functional portion of a Defense System VII component” or “functional fragment of Defense System VII component” or “functional portion of a Septu defense system component” or “functional fragment of Septu defense system component” refers to a functional portion of a Septu polynucleotide or polypeptide, as disclosed herein, which expression is sufficient to elicit an anti-phage activity alone or in combination with the at least one of the other Septu polynucleotides or polypeptides disclosed herein or functional portions thereof.

[1186] The terms “PtuA”, “PtuB”, “ptuA” and “ptuB”, also refer to functional PtuA, PtuB, ptuA and ptuB, homologs, which exhibit the desired activity (i.e., conferring phage resistance). Such homologs can be, for example, at least 80%, at least 81%, at least 82%, at least 83%, at least 84%, at least 85%, at least 86%, at least 87%, at least 88%, at least 89%, at least 90%, at least 91%, at least 92%, at least 93%, at least 94%, at least 95%, at least 96%, at least 97%, at least 98%, at least 99% or 100% identical or homologous to the polypeptide sequences referenced in Table 15 rows 2-2507 columns H and I and L and M, respectively, or 80%, at least 81%, at least 82%, at least 83%, at least 84%, at least 85%, at least 86%, at least 87%, at least 88%, at least 89%, at least 90%, at least 91%, at least 92%, at least 93%, at least 94%, at least 95%, at least 96%, at least 97%, at least 98%, at least 99% or 100% identical or homologous to the polynucleotide sequences referenced in Table 15 rows 2-2507 columns H and J and L and N, respectively. In some embodiments, such homologs comprise at least 80%, at least 81%, at least 82%, at least 83%, at least 84%, at least 85%, at least 86%, at least 87%, at least 88%, at least 89%, at least 90%, at least 91%, at least 92%, at least 93%, at least 94%, at least 95%, at least 96%, at least 97%, at least 98%, at least 99% or 100% homology or identity within similar domain regions of the polypeptide sequences referenced in Table 15 rows 2-2507 columns H and I and L and M, respectively, or 80%, at least 81%, at least 82%, at least 83%, at least 84%, at least 85%, at least 86%, at least 87%, at least 88%, at least 89%, at least 90%, at least 91%, at least 92%, at least 93%, at least 94%, at least 95%, at least 96%, at least 97%, at least 98%, at least 99% or 100% identity or homology within nucleotide sequences encoding similar domain regions to the polynucleotide sequences referenced in Table 15 rows 2-2507 columns H and J and L and N, respectively.

[1187] Table 15 presents embodiments of components of Defense System VII that may be found in a diverse array of bacteria and archaea genomes (referenced in Table 18). Table 15 presents embodiments of nucleic acid sequences encoding gene cassettes of Defense System VII (referenced in Table 18).

[1188] The Lamassu Defense System

[1189] In some embodiments, a defense system disclosed herein comprises a Lamassu anti-phage defense system. (Table 16)

[1190] In some embodiments, a Lamassu defense system provides a host cell with resistance to entry of foreign nucleic acid invasion. In some embodiments, a host cell expressing a functional Lamassu defense system (Defense System VIII) provides the host cell resistance foreign nucleic acid invasion.

[1191] In some embodiments, a Lamassu defense system provides a host cell with resistance to at least one phage.

[1192] In some embodiments, a microbial cell comprising a Lamassu defense system protects the microbial cell from phage infection. In some embodiments, a microbial cell expressing a Lamassu defense system protects the microbial cell from phage infection. In some embodiments, a microbial cell expressing a functional Lamassu defense system protects the microbial cell from phage infection. In some embodiments, a bacterial cell comprising a Lamassu defense system protects the bacterial cell from phage infection. In some embodiments, a bacterial cell expressing a Lamassu defense system protects the bacterial cell from phage infection. In some embodiments, a bacterial cell expressing a functional Lamassu defense system protects the bacterial cell from phage infection.

[1193] In some embodiments, a Lamassu defense system provides a host cell with resistance to a plasmid.

[1194] As used herein, the term “a Lamassu anti-phage defense system” may be used interchangeably with the term “a Defense System VII”, having all the same meanings and qualities. A skilled artisan would appreciate that the term “Lamassu system” may be used interchangeably in some embodiments with “Lamassu defense system”, “Lamassu the defense system”, “Lamassu anti-phage system”, and “Defense System VIII”, having all the same meanings and qualities.

[1195] In some embodiments, a Lamassu defense system (Defense System VIII) provides a host cell with resistance to plasmid transformation. In some embodiments, a host cell expressing a functional Lamassu defense system (Defense System VIII) provides a host cells with resistance to plasmid transformation.

[1196] In some embodiments, a Lamassu defense system (Defense system VIII) provides a host cell with resistance to entry of conjugative elements. In some embodiments, a host cell expressing a function Lamassu defense system (Defense System VIII) provides the host cell resistance from entry of conjugative elements.

[1197] In some embodiments, a microbial species does not comprise an endogenous Defense System VIII. In some embodiments, a microbial species does not express an endogenous Defense System VIII. In some embodiments, a microbial species does not express an endogenous functional Defense System VIII.

[1198] In some embodiments, a bacterial species does not comprise an endogenous Defense System VIII. In some embodiments, a bacterial species does not express an endogenous Defense System VIII. In some embodiments, a bacterial species does not express an endogenous functional Defense System VIII.

[1199] A Lamassu defense system comprises, in some embodiments, a nucleic acid construct comprising a nucleic acid sequence encoding a LmuA polypeptide comprising a pfam14130 domain or a DUF4297 domain or a combination thereof, and a LmuB polypeptide comprising a pfam02463 domain. In some embodiments, a Lamassu defense system comprises a nucleic acid construct comprising a nucleic acid sequence comprising a lmuA gene and a lmuB gene.

[1200] In some embodiments, a Lamassu defense system comprises, a LmuA polypeptide comprising a pfam14130 domain or a DUF4297 domain or a combination thereof, and a LmuB polypeptide comprising a pfam02463 domain. In some embodiments, a Lamassu defense system comprises a LmuA polypeptide and a LmuB polypeptide.

[1201] In some embodiments, a Defense System VIII comprises a LmuA polypeptide comprising a pfam14130 domain or a DUF4297 domain or a combination thereof, or comprising an amino acid sequence having at least 80% identity to a sequence selected from the group referenced in Table 16 rows 2-698 columns H and I; or a LmuB polypeptide comprising a pfam02463 domain or comprising an amino acid sequence having at least 80% identity to a sequence selected from the group referenced in Table 16 rows 2-698 columns L and M; or a combination thereof.

[1202] In some embodiments, a Defense System VIII comprises at least two different polypeptide components selected from a LmuA polypeptide comprising a pfam14130 domain or a DUF4297 domain or a combination thereof, or comprising an amino acid sequence having at least 80% identity to a sequence selected from the group referenced in Table 16 rows 2-698 column H and I; and a LmuB polypeptide comprising a pfam02463 domain or comprising an amino acid sequence having at least 80% identity to a sequence selected from the group referenced in Table 16 rows 2-698 columns L and M.

[1203] In some embodiments, a Lamassu defense system having an anti-phage activity comprises a nucleic acid construct comprising a nucleic acid sequence encoding a LmuA polypeptide and a LmuB polypeptide. In some embodiments, a Lamassu defense system having an anti-phage activity comprises a nucleic acid construct comprising a nucleic acid sequence encoding a LmuA polypeptide and a LmuB polypeptide comprising a RecF/RecN/SMC N-terminal domain.

[1204] In some embodiments, a Lamassu defense system having an anti-phage activity comprises a nucleic acid construct comprising a nucleic acid sequence encoding a LmuB polypeptide comprising a RecF/RecN/SMC N-terminal domain.

[1205] In some embodiments, the Lamassu anti-phage defense system comprises a nucleic acid construct comprising nucleic acid sequences encoding a cassette comprising lmuA and lmuB genes.

[1206] In some embodiments, a Lamassu (Defense System VIII) gene cassette comprises the nucleic acid sequence:

(SEQ ID NO: 7; construct 13 of Table 4)

| | |
|---|---|
| 1 | tgcatattta taattgtgtg ttgaggcgag tgttaatcta ttgcaaatag ttttgcaatt |
| 61 | ctccactagt caattatatc tcttgatatc catcttgata aaaaactttt aaagacactt |
| 121 | tctcatttgg gaggtgtctt tatttattgg tatcatagtt tttttatggg agctaataaa |
| 181 | agtaacataa gatccgctca tgcattctgt gtctgataat gaaaaaaatt aggtatttat |
| 241 | atttgatagt tcaaaatcta tattattgaa aacataataa aattttcctg ataaatagta |
| 301 | ccattttttt gaaaatcctg atatcatata aataagagag aggatatcag gaggagcgca |
| 361 | atgattgaaa ttgacaacgg gggagccatc gcactaaaag gatttaacta tcaaaaagct |
| 421 | tccatcatac ttgtaatgat tcataatttt gaaaaagata attttatagt catacctgaa |
| 481 | tcgcaagaag attttgaaat tcatcttgga caagatactt attttataca agtgaaagga |
| 541 | acaaaaaaac tttccatagg taagttgaag tcaaggccta gcggaaaagc ttcaatcata |
| 601 | gagaaaaatc tttctcctgg taatgttgga gatataagga aaatatttct ctgggatata |
| 661 | gcggagttaa caaaaaacga attgataagc caagaaggaa cgcttattcc tatgaaacac |
| 721 | agcctttcat tgaaacaaaa gacagagatt ataaatactc ttgatttaga tgaagaacag |
| 781 | aaaaatagaa tgaacaatca atatatatat ataacccctt ttccaaacga tataaatttg |
| 841 | gctttaacat ttttaaaagg agaaatggtt aatgaaaact tgctggtttc taacgatcga |
| 901 | gctaaattag ttttaggaga actatcattg gaaatagatc gtaaaagtga aatagtagtt |
| 961 | tctactgaaa gtgatgtaga aaggaaaaaa atcgacggga attatcttaa gcaggtattc |
| 1021 | attaatatta agcaaaaaga gatgtttgat gaaattttag ataatctctc tatcaacaca |
| 1081 | attatgaaaa aaaaagtaaa gaaggagaaa ttaagaatac cactcttgta tcaaaatatt |
| 1141 | aaagagcaaa cgaagcaaaa ggcagatatt aatttactta tgagggagaa tgatgagggt |
| 1201 | gctattaact atctcagaga tctattggta gagatagtgc cagatatgaa gcctacagaa |
| 1261 | ctatctattg ctttagcaat agactgtttt tgtgagttgg gagaataaaa tctatgataa |
| 1321 | taattgcttt ttctattctt gattttaaaa ataaagaagc acaaaatttt gactttaaag |
| 1381 | ctgggactaa tctaattgtt agtaaaggaa ataccaaagg taaatcaagt cttttaaaat |
| 1441 | caatgtatta tacattagga tttgatgtgc atcaatttcc tagtaactgg aacataaatt |
| 1501 | ttatgtattt ccaaatagaa gtcttaataa ataatgttaa atataatata actagacaaa |
| 1561 | aaaatatttt tagagtaagt gatgtagaag tacctttgaa tgtaaaagag tattcagagt |
| 1621 | ggcttcaaca taaacttgag attaaaatgc agttagctaa tactcatact aagcacttat |
| 1681 | acgaggcata ttcttcggca gtaattttac cattttacat agatcaagac gattcttggg |
| 1741 | atggcggaat ttatagaaat gtaactaata ctctgaatca atatactcgc ataccggcag |
| 1801 | atattttcaa aagtgttttt aatctctcca attacgaact tctggagttg caaaattcgc |
| 1861 | ttactaatta tagtaaagaa aagaatacgg tagtgtctac aataaagagt ttattaaatg |
| 1921 | ttttggaaga ttatagacat gaaaacgcag atgtccctac tgtttcaaaa attgataaaa |
| 1981 | tagccttaaa taaagatatc gatcgctact tgcagatgca aaatgaatta aatgaacaaa |
| 2041 | tagtaaaata taaaatgaag ctattaaaca agcaagaaat gttggattta caaaagcaag |
| 2101 | aattgtctga attagagcag cttttaaaaa tgaacaaaaa gagatataac tctattgaaa |
| 2161 | cagaatgtca atattgtcat tctaaattaa caaaagaaca atctttaaca agacttgatt |
| 2221 | tatcgaataa ttattttgaa atatcgcttt tgaaagagga aatagaaaaa gaagtagtaa |
| 2281 | aattgactaa tgaaattata atattcgaat cacaacaaaa ttctattgaa tctaaaattg |
| 2341 | atgaaattca tcgtaggatt caaaattcta aagatctact tacgattgat gattatgtaa |
| 2401 | aagcaactgc taaaaaagaa gcatcaaatg aattggaaag tttagttgat aaacaagttc |
| 2461 | tttctaaata taatttagaa gaaaaaatta aagtattaag aagggaaatt aataaactga |
| 2521 | agaaagagaa agaaagttta agagagatta ttgagcgaga ttacactgat ttggtatttg |
| 2581 | aaataaaaaa agtgttgaat gatttaaatg atacaaagct ggatttatct gaattaaatc |
| 2641 | tggatgaact taaatttctt gaatttaaga aaatatcggg gagtggtatg gataaaaata |
| 2701 | aaaaattttt agcttactat ttaatttatt ttagtttgtt gagaaagtat agctcttata |
| 2761 | taattccctt ttgtatggat tcgtttatta aaaatgaaat tacgggtgag actgcaaaaa |
| 2821 | agatgtttga agcaatagaa aaatattttt ttgacactaa tcagtctttc ttttcaatcg |
| 2881 | tttctgaaaa ccttaaacat ttagagtttg tagatagtta caataagatt aatgttgagg |
| 2941 | gtaagctgtt ggttagagat aaatatgatg agattgcttt gaaattcaaa tttgatagtt |
| 3001 | aaaattatta aagggccttg aatgacattt gatagttcaa actttcaaat gcctgaagag |
| 3061 | aaaaatgatt atccgaaaga aattaactca tatagaatta tgcacttaat attcttaatt |
| 3121 | ttttagtaga atactcaatc ctttgatttt ttttggaata taataacatt tttcatcaga |
| 3181 | aaacaacaag gggaaaagcc aatttcttta cagtaggagt tggctttatt gtgcagaaac |
| 3241 | taaattaaat attatatgtt ttttcgatct taaccatatg aaaggataaa taaacaaaga |
| 3301 | gttgattgac ttcgttcttc gcttcataga ttgaggagtt gattcaactt tccattct |

[1207] The coding regions for each of the lmuA and lmuB gene sequences within this embodiment of a Lamassu cassette (SEQ ID NO: 7) are as follows: nucleotides 361-1308 encode an embodiment of a LmuA polypeptide, and nucleotides 1314-3002 encode an embodiment of a LmuB polypeptide.

[1208] In some embodiments, a Defense System VIII comprising a LmuA polypeptide and a LmuB polypeptide is encoded by the nucleic acid sequence set forth in SEQ ID NO: 7. In some embodiments, a Defense System VIII comprising a LmuA polypeptide and a LmuB polypeptide, is encoded by a nucleic acid sequence having at least 80% homology to the sequence set forth in SEQ ID NO: 7. In some embodiments, a Defense System VIII comprising a LmuA polypeptide and a LmuB polypeptide, is encoded by a nucleic acid sequence having at least 85% homology, or 90% homology, or 95% homology, or 97% homology, or 98% homology, or 99% homology to the sequence set forth in SEQ ID NO: 7. In some embodiments, a Defense System VIII comprising a LmuA polypeptide and a LmuB polypeptide, is encoded by a nucleic acid sequence having at least 80% identity to the sequence set forth in SEQ ID NO: 7. In some embodiments, a Defense System VIII comprising a LmuA polypeptide and a LmuB polypeptide, is encoded by a nucleic acid sequence having at least 85% identity, or 90% identity, or 95% identity, or 97% identity, or 98% identity, or 99% identity to the sequence set forth in SEQ ID NO: 7.

[1209] In some embodiments, a Lamassu (Defense System VIII) gene cassette comprises the nucleic acid sequence:

(SEQ ID NO: 8; construct 14 of Table 4)

| | |
|---|---|
| 1 | gaagatgcgg ttaacaaaat agaagagatt ttgttggtaa tgtgaccaat tttgtgatca |
| 61 | ctggttttgt atagtatagg aatagaaaaa taacaaccgt atcaaacgtt aatttgacac |
| 121 | ggtttctaca actatgccct cggagaggct cgaactcatg gccttcatcc tgtcaaagtg |
| 181 | taaatagaag tcgttagttt aacgtaagtc aaatcggaaa tcggcactat ttacggatac |
| 241 | cgttatatca acgtttgcag ctaaatagtt atacgtccgt cttgttttct attattaatt |
| 301 | aaagcgtgta gtaccgccat actgcaagat ataaaaccgt taattgtcat tttaggatcc |
| 361 | ttcacattca ttgattatta cgaagctgca ggaatggcta tgtaaacagt acatgtttgg |
| 421 | aaagaaatga agatgatagg agaaaatctt catgaaattt atcatcgagc gaattaaatg |
| 481 | gacgtatgta aaaggtgatg aacaacccac gatgaaaatt aaatacaagt aaacgagcca |
| 541 | cgctcgtcac tgggcgtggt tttaatgtgt gtaattggaa actgtatgta aaaaagaaat |
| 601 | taacaagttt gttagtactg gatgatttag gataaaaaat gaaatttata acaaattata |
| 661 | gcttaaaatt gatataatat gataagaagg atgttttgct attgtaattt aagaaacaag |
| 721 | aattttgaac agaaaaaatt cactatataa atgaaattgt aaaattgcct ttgggattta |
| 781 | aaggagggat ggctagtgga tataagttct tatcctagct tggaaactta tgaagcacgt |
| 841 | gagaatacag gttcaaggtc ttcaaacaga ttagctatgc aaattagttt tgctatgtgg |
| 901 | aagatttttg aattatatca aaatgaagat tttactgtgg ctatggattg tattgatgat |
| 961 | gtagtcatat ttaaaacatc aaatgaaaat ccaactattg tgacttatca attgaaaaca |
| 1021 | aaggatgcta ctacggggaa ctttgaactg agaaagctaa ttggtgataa tgtatttttg |
| 1081 | aaaatgtatg atcacattga aaaaatagat gcagatgttg aagaaatata tttaataact |
| 1141 | aacaatcctt tgaaatttag aaagaaaacg gttaatgcag aacggatttt atttgaaaaa |
| 1201 | ttagatgaag atataaaaga gttaattgaa gaaaatatgt ctcagagtaa agtttttgca |
| 1261 | gataaaggat tatcatctaa gtttatatat tctttggtag atatgtcttt tcataatcat |
| 1321 | agagaaatca gtcaatataa attaaattct ttattaatga aagaaaaaat agatattagt |
| 1381 | ataacagctg cagatgcact ttttaatgca ttgcaagata ttttaacaac taagcaaaat |
| 1441 | tatgagttta gtttacaaga tgaatttaat acggtactaa agaaaaaaag ttactcgaaa |
| 1501 | acggaattta catcactatt ggataactcg aaaaaaatta atgcctatgt tttatctttc |
| 1561 | gaggatattc gtaccaacta taaaagcaaa cctttaaagc tgaaagaaga aagtttatac |
| 1621 | aggagagcga tggctagtgt taaagaaaaa tgcaataaat ctcctaatat attacaaaat |
| 1681 | ataaatgaag atatttttca atatgctaaa gagcagattg atatcaatga cgaaataacg |
| 1741 | agaattgagc tagtcatact tttacaaagt gtttttgacg acaagataaa tgttgagtta |
| 1801 | tctaaagaag aaaaagaaat tctatatatg caaaatatcg aattagccct aagggaggga |
| 1861 | taaactcatg aataaaataa taattcgtaa gttatttata tttgatgtga ttgaaaaaaa |
| 1921 | agccaaaagt gtagattttg aagatggtat caatattgtt acaagtaaag gaaatcaact |
| 1981 | gggtaaatca actataatga aatctattta ttatacattg ggtgcagaag tgttttttgc |
| 2041 | cgacagatta aatgtaaaga gtaaaatcca tatgttagag acagacgtta atgataagaa |
| 2101 | atataccttt attagacatg gcgatgttgt tgtgataaaa gatggtaaag gaatttttaa |
| 2161 | gacgtcgaac gcttctgaat tatcatctaa gttgcatgat atatttggat ttagcgtttt |
| 2221 | tctagaagat aaacagaaaa aatatgtgat agctccacct gtatttcgtt acattcctta |
| 2281 | ttatattgac caagaccatg gttggacatc agaattgaaa tcttttgata aattaggtca |
| 2341 | attcgataaa aaaagcaggg atttattatt ttattatcat ttaaatattc ttgatgaaga |
| 2401 | ttatggagta aagttgaaag agaaaaaaga actagatgct tcaatgactg atttgaaaac |
| 2461 | taggaaaaaa gagattttag gcctactcgc atacataaga gagaatatta cagcttttaa |
| 2521 | tttagaaatg gatattacag cgttacaaat tcaaaagaga gaaatactta ataaatataa |
| 2581 | aaagtattca tatgatttga ataacatacg aagaaaaatt ttagaatatc aagaagaaat |
| 2641 | atttaaaatt gacaatgtaa ttgataattt aaatagtact ttgaaacaaa atgataaagt |
| 2701 | aagagaacat ataaaacatc aatttgatgt agagtgcccg tattgtaata atcattttga |
| 2761 | aatacaggcg aaagatatat taagaattaa ttataatatt gtagacttag aggcatcaaa |
| 2821 | attagaaatg ctagatataa aagaaaaatt attggggaaa atgaaaaaag tacaaaaaga |
| 2881 | gtatgaagat tatcaagcta cgttgaaagc tattgaagaa gaaaaagttg attcagaaaa |
| 2941 | tacacttgaa gacatactga aatttaaagg gttacaagaa actcaaaatc aactaaatac |
| 3001 | ggaacttgtc aaaaatactg gtgatataga agaaaagtca gaagacttaa aagaaataag |
| 3061 | acgagattta aaaaaatggc aggatgaaat agataaagtt aacagtaggt ataaggatat |
| 3121 | cttaaattta aatctaatta gatttaatac gaatgaacat gcactccctg aaaaatataa |
| 3181 | tattggaaaa aacctcaaag catctggtag cggtcaagtt cgagttaatt tagctagagt |
| 3241 | atattcattt ataaagcttc ttgaagaata taatcctaca ggattaaaat atccattagt |
| 3301 | aattgactct cctaaaggcg gagaacagag tactacaaat agtgaattga ttttaagatt |
| 3361 | gttgacggag aaagcgcaaa tttcaaatca aattatttta gctacaattg attttgaaag |
| 3421 | tttttataat ggagatacta aaaaattcaa cataatctct ttagaaaatg aaccttatca |
| 3481 | tttattatct gctgaagatt atcaaaataa tcaagtgata attgatgact ttgtttcttt |
| 3541 | atattttgaa gcaaatcaat aaatagaaat agtaaaagga cgctttaata cgaagcgtcc |
| 3601 | tatttaattt gaaggagccc tcaaacaggg aatcctt. |

[1210] The coding regions for each of the lmuA and lmuB gene sequences within this embodiment of a Lamassu cassette (SEQ ID NO: 8) are as follows: nucleotides 877-1863 encode an embodiment of a LmuA polypeptide, and nucleotides 1868-3562 encode an embodiment of a LmuB polypeptide.

[1211] In some embodiments, a Defense System VIII comprising a LmuA polypeptide and a LmuB polypeptide is encoded by the nucleic acid sequence set forth in SEQ ID NO: 8. In some embodiments, a Defense System VIII comprising a LmuA polypeptide and a LmuB polypeptide, is encoded by a nucleic acid sequence having at least 80% homology to the sequence set forth in SEQ ID NO: 8. In some embodiments, a Defense System VIII comprising a LmuA polypeptide and a LmuB polypeptide, is encoded by a nucleic acid sequence having at least 85% homology, or 90% homology, or 95% homology, or 97% homology, or 98% homology, or 99% homology to the sequence set forth in SEQ ID NO: 8. In some embodiments, a Defense System VIII comprising a LmuA polypeptide and a LmuB polypeptide, is encoded by a nucleic acid sequence having at least 80% identity to the sequence set forth in SEQ ID NO: 8. In some embodiments, a Defense System VIII comprising a LmuA polypeptide and a LmuB polypeptide, is encoded by a nucleic acid sequence having at least 85% identity, or 90% identity, or 95% identity, or 97% identity, or 98% identity, or 99% identity to the sequence set forth in SEQ ID NO: 8.

[1212] In some embodiments, a construct comprising the Lamassu defense system encodes one component of the defense system, whereby multiple constructs, for example but not limited to, two constructs may be used to assemble the functional defense system. In some embodiments, the components of a Lamassu defense system comprise genes lmuA and lmuB. In some embodiments, the components of a Lamassu defense system consist of genes lmuA and lmuB. In some embodiments, the components of a Lamassu defense system comprise nucleic acid sequences encoding a LmuA polypeptide and a LmuB polypeptide. In some embodiments, the components of a Lamassu defense system consist of nucleic acid sequences encoding a LmuA polypeptide and a LmuB polypeptide.

[1213] In some embodiments, a construct comprising the Lamassu defense system encodes one component of the defense system, whereby a second construct may be used to assemble the functional defense system. In some embodiments, a construct comprising the Lamassu defense system encodes one component of the defense system, whereby additional constructs may be used to assemble the functional defense system. For example, in some embodiments each of LmuA and LmuB may be encoded by nucleic acid sequences comprised in different constructs, wherein expression of the combination of constructs produces a functional Lamassu defense system.

[1214] In some embodiments, the components making up a functional Lamassu anti-phage defense system comprise a LmuA polypeptide and a LmuB polypeptide, each encoded by a lmuA and a lmuB gene, respectively.

[1215] In some embodiments, a lmuB gene encodes a polypeptide comprising a RecF/RecN/SMC N-terminal domain. In some embodiments, a LmuB polypeptide comprises a RecF/RecN/SMC N-terminal domain.

[1216] In some embodiments, a Lamassu defense system having an anti-phage activity comprises a nucleic acid encoding a LmuA polypeptide. In some embodiments, a Lamassu defense system having an anti-phage activity comprises a nucleic acid encoding a LmuA polypeptide and a LmuB polypeptide. In some embodiments, a Lamassu defense system having an anti-phage activity comprises a nucleic acid encoding a LmuB polypeptide.

[1217] In some embodiments, a Lamassu defense system having an anti-phage activity comprises a nucleic acid comprising a lmuA gene. In some embodiments, a Lamassu defense system having an anti-phage activity comprises a nucleic acid comprising a lmuA gene and a lmuB gene. In some embodiments, a Lamassu defense system having an anti-phage activity comprises a nucleic acid comprising lmuB gene.

[1218] In some embodiments, a Lamassu defense system having an anti-phage activity comprises a nucleic acid construct comprising nucleic acids encoding polypeptides in a set order. In one embodiment, the 5′ to 3′ order of polypeptides encoded is LmuA and LmuB. In some embodiments the 5′ to 3′ order of polypeptides does not affect the anti-phage activity. In some embodiments the 5′ to 3′ order of polypeptides does affect the anti-phage activity.

[1219] In some embodiments, the 5′ to 3′ order of polypeptides is random, for example any order of nucleic acid sequences encoding LmuA and LmuB.

[1220] In some embodiments, a Lamassu defense system having an anti-phage activity comprises a nucleic acid construct comprising genes in a set order. In some embodiment, the 5′ to 3′ order of genes is lmuA and lmuB. In some embodiment, the 5′ to 3′ order of genes in a Lamassu defense system is not lmuA and lmuB. In some embodiments the 5′ to 3′ order of genes does not affect the anti-phage activity. In some embodiments the 5′ to 3′ order of genes does affect the anti-phage activity.

[1221] In some embodiments, the 5′ to 3′ order of genes is random, for example any order of lmuA and lmuB.

[1222] In some embodiments, the Lamassu system (Defense System VIII) composition and order is as shown in FIG. 3B.

[1223] In some embodiments, a Lamassu defense system having an anti-phage activity originates from a microbial genome, for example a bacterial or an archaeal genome (Table 16). A skilled artisan would appreciate that the Lamassu system is not present in the majority of bacteria and or archaea species.

[1224] In some embodiments, a functional Lamassu defense system comprises a construct comprising nucleic acid sequences encoding polypeptides, wherein the nucleic acid sequence encoding each polypeptide may originate from a different microbial species. For example, the source of the nucleic acid sequence encoding a LmuA polypeptide may be one microbial species, while the source of the nucleic acid sequence encoding a LmuB polypeptide may be a different microbial species. In some embodiments, a functional Lamassu defense system comprises a non-naturally occurring combination of polypeptide components. In some embodiments, a functional Lamassu defense system comprises a combination of at least two polypeptides that do not naturally occur together.

[1225] In some embodiments, a functional Lamassu defense system comprises a construct comprising nucleic acid sequences encoding polypeptides, wherein the nucleic acid sequence encoding each polypeptide may originate from a different bacterial species. For example, the source of the nucleic acid sequence encoding a LmuA polypeptide may be one bacterial species, while the source of the nucleic acid sequence encoding a LmuB polypeptide may be a different bacterial species.

[1226] In some embodiments, the source of the nucleic acid encoding a LmuA polypeptide and a LmuB polypeptide is the same. In some embodiments, the source of the nucleic acid encoding a LmuA polypeptide and a LmuB polypeptide is the not the same. In some embodiments, the source of the nucleic acid sequence of any of the components of a Lamassu defense system comprises any of the species listed in Table 16.

[1227] In some embodiments, a Lamassu defense system having an anti-phage activity comprises a nucleic acid construct comprising non-coding regions between the nucleic acid sequences encoding the polypeptides. In some embodiments, the non-coding regions between the nucleic acid sequences comprises nucleic acid sequence not naturally occurring in the microbial species of origin. In some embodiments, the non-coding regions between the nucleic acid sequences comprises nucleic acid sequence is the naturally occurring in the microbial species of origin.

[1228] In some embodiments, a Lamassu system disclosed herein comprises a multi-gene phage resistance system broadly distributed in microbial genomes, for example but not limited to bacteria and archaea. A skilled artisan would appreciate that the majority of bacteria and archaea do not comprise a Lamassu defense system.

[1229] According to some embodiments, the Lamassu defense system components are located in a gene cluster (a cassette of genes) in a microbial cell genome. According to some embodiments, the Lamassu system components are located in close proximity (e.g. positioned within 20 genes, 10 genes, 5 genes or less one from the other) in a genome of a prokaryotic cell. According to some embodiments the prokaryotic cell expresses an endogenous Lamassu defense system. According to some embodiments, the prokaryotic cell expresses an endogenous functional Lamassu defense system. According to some embodiments, the species of prokaryotic cell is selected from the group consisting of the species listed in Table 16.

[1230] According to some embodiments a prokaryotic cell expresses a non-endogenous Lamassu defense system. According to some embodiments, a prokaryotic cell expresses a non-endogenous functional Lamassu defense system. According to some embodiments, the species of prokaryotic cell expressing a non-endogenous functional Lamassu defense system is selected from the group consisting of the species listed in Table 16.

[1231] In some embodiments, Lamassu defense system components comprise LmuA and LmuB polypeptides. In some embodiments, Lamassu defense system components comprise functional portions of LmuA and LmuB polypeptides. In some embodiments, the Lamassu defense system functional components are encoded by lmuA and lmuB genes.

[1232] Non-limiting embodiments of endogenous Lamassu systems and the respective location of their components are provided in Table 16 herein.

[1233] In some embodiments, the components of a Lamassu system may be identified by the presence of similar domains present within each component. In some embodiments, domains comprise pfam domains and or clusters of orthologous groups (COG) domains.

[1234] In some embodiments, the term “LmuA” refers to the polynucleotide or expression product e.g., the polypeptide encoded by the lmuA gene. In some embodiments, the term “LmuA” refers to a LmuA polypeptide. In some embodiments, the lmuA gene encodes a polypeptide comprising a pfam14130 domain. In some embodiments, the lmuA gene encodes a polypeptide comprising a DUF4297 domain. In some embodiments, the lmuA gene encodes a polypeptide comprising a pfam14130 domain and a DUF4297 domain. In some embodiments, the LmuA polypeptide comprises a pfam14130 domain. In some embodiments, the LmuA polypeptide comprises a DUF4297 domain. In some embodiments, the LmuA polypeptide comprises a pfam14130 domain and a DUF4297 domain.

[1235] In some embodiments, LmuA polypeptide is encoded by a gene positioned within 5-60 genes of a gene encoding a LmuB polypeptide in a genome of a prokaryotic cell. In some embodiments, LmuA polypeptide is encoded by a gene positioned within 5 genes upstream (5′) or downstream (3′) to a gene encoding a LmuB polypeptide in a genome of a prokaryotic cell. In some embodiments, LmuA polypeptide is encoded by a gene positioned within 5 genes upstream (5′) and downstream (3′) to a gene encoding a LmuB polypeptide in a genome of a prokaryotic cell.

[1236] In some embodiments, LmuA and LmuB are encoded by genes positioned sequentially 5′ to 3′ in a genome of a prokaryotic cell. In some embodiments, LmuA and LmuB are encoded by genes positioned contiguously 5′ to 3′ in a genome of a prokaryotic cell.

[1237] In some embodiments, lmuA and lmuB genes are positioned sequentially 5′ to 3′ in a genome of a prokaryotic cell. In some embodiments, lmuA and lmuB, genes are positioned contiguously 5′ to 3′ in a genome of a prokaryotic cell.

[1238] As used herein, the term “LmuA” refers to the polynucleotide or expression product e.g., polypeptide encoded by the lmuA gene. In some embodiments, the term “LmuA” refers to a LmuA polypeptide. In some embodiments, the product of the lmuA gene comprises a pfam14130 domain. In some embodiments, the lmuA gene encodes a DUF4297 domain. In some embodiments, the product of the lmuA gene comprises a pfam14130 domain or a DUF4297 domain, or any combination thereof. In some embodiments, the product of the lmuA gene comprises a pfam14130 domain and a DUF4297 domain.

[1239] In some embodiments, LmuA polypeptide is encoded by a gene positioned within 5-60 genes of a gene encoding a LmuB polypeptide in a genome of a prokaryotic cell. In some embodiments, LmuA polypeptide is encoded by a gene positioned within 5 genes upstream (5′) or downstream (3′) to a gene encoding a LmuB polypeptide in a genome of a prokaryotic cell. In some embodiments, LmuA polypeptide is encoded by a gene positioned within 5 genes upstream (5′) and downstream (3′) to a gene encoding a LmuB polypeptide in a genome of a prokaryotic cell.

[1240] In some embodiments, a LmuA polypeptide is about 361 amino acids long (median gene size).

[1241] In some embodiments, the LmuA polypeptide comprises the amino acid sequence having at least 80% homology to a sequence selected from the group consisting of the polypeptides referenced in Table 16, rows 2-698, columns H and I. In some embodiments, the LmuA polypeptide comprises the amino acid sequence having at least 80% homology within similar domain regions within a sequence selected from the group consisting of the polypeptides referenced in Table 16, rows 2-698, columns H and I. In some embodiments, the LmuA polypeptide comprises a homolog of a polypeptide having the amino acid sequences set forth in the polypeptides referenced in Table 16, rows 2-698, columns H and I.

[1242] In some embodiments, the LmuA polypeptide comprises the amino acid sequence having at least 80% identity to a sequence selected from the group consisting of the polypeptides referenced in Table 16, rows 2-698, columns H and I. In some embodiments, the LmuA polypeptide comprises the amino acid sequence having at least 80% identity within similar domain regions within a sequence selected from the group consisting of the polypeptides referenced in Table 16, rows 2-698, columns H and I.

[1243] In some embodiments, the LmuA polypeptide comprises an amino acid sequence having at least 80%, at least 85%, at least 90%, or at least 95% homology to a sequence selected from the group consisting of the polypeptides referenced in Table 16, rows 2-698, columns H and I. In some embodiments, the LmuA polypeptide comprises the amino acid sequence having at least 80%, 85%, 90%, 95% homology within similar domain regions within a sequence selected from the group consisting of the polypeptides referenced in Table 16, rows 2-698, columns H and I. In some embodiments, the LmuA polypeptide comprises an amino acid sequence having at least 80%, at least 85%, at least 90%, or at least 95% identity to a sequence selected from the group consisting of the polypeptides referenced in Table 16, rows 2-698, columns H and I. In some embodiments, the LmuA polypeptide comprises the amino acid sequence having at least 80%, 85%, 90%, 95% identity within similar domain regions within a sequence selected from the group consisting of the polypeptides referenced in Table 16, rows 2-698, columns H and I. In some embodiments, the LmuA polypeptide comprises an amino acid sequence selected from the group consisting of the polypeptides referenced in Table 16, rows 2-698, columns H and I.

[1244] In some embodiments, the LmuA polypeptide comprises an amino acid sequence encoded by a nucleic acid sequence having at least 80%, at least 85%, at least 90%, or at least 95% homology to a sequence selected from the group consisting of the polynucleotides referenced in Table 16, rows 2-698, columns H and J. In some embodiments, the LmuA polypeptide comprises the amino acid sequence encoded by a nucleic acid sequence having at least 80%, 85%, 90%, 95% homology within similar domain regions within a sequence selected from the group consisting of the polynucleotides referenced in Table 16, rows 2-698, columns H and J. In some embodiments, the LmuA polypeptide comprises an amino acid sequence encoded by a nucleic acid sequence having at least 80%, at least 85%, at least 90%, or at least 95% identity to a sequence selected from the group consisting of the polynucleotides referenced in Table 16, rows 2-698, columns H and J. In some embodiments, the LmuA polypeptide comprises the amino acid sequence encoded by a nucleic acid sequence having at least 80%, 85%, 90%, 95% homology within similar domain regions within a sequence selected from the group consisting of the polynucleotides referenced in Table 16, rows 2-698, columns H and J. In some embodiments, the LmuA polypeptide comprises an amino acid sequence encoded from a nucleic acid sequence selected from the group consisting of the polynucleotides referenced in Table 16, rows 2-698, columns H and J.

[1245] In some embodiments, the nucleic acid sequence of a lmuA gene comprises a nucleic acid sequence having at least 80%, at least 85%, at least 90%, or at least 95% homology to a sequence selected from the group consisting of the polynucleotides referenced in Table 16, rows 2-698, columns H and J. In some embodiments, the lmuA gene comprises a nucleic acid sequence having at least 80%, 85%, 90%, 95% homology within encoded similar domain regions in comparison with nucleotide sequence encoding these domain within a sequence selected from the group consisting of the polynucleotides referenced in Table 16, rows 2-698, columns H and J. In some embodiments, the nucleic acid sequence of a lmuA gene comprises a nucleic acid sequence having at least 80%, at least 85%, at least 90%, or at least 95% identity to a sequence selected from the group consisting of the polynucleotides referenced in Table 16, rows 2-698, columns H and J. In some embodiments, the lmuA gene comprises a nucleic acid sequence having at least 80%, 85%, 90%, 95% identity within encoded similar domain regions in comparison with nucleotide sequence encoding these domain within a sequence selected from the group consisting of the polynucleotides referenced in Table 16, rows 2-698, columns H and J. In some embodiments, the nucleic acid sequence of a lmuA gene comprises a nucleic acid sequence selected from the group consisting of the polynucleotides referenced in Table 16, rows 2-698, columns H and J.

[1246] As used herein, the term “LmuB” refers to the polynucleotide or expression product e.g., polypeptide encoded by the lmuB gene. In some embodiments, the term “LmuB” refers to a LmuB polypeptide. In some embodiments, the product of the lmuB gene comprises a pfam02463 domain. In some embodiments, the lmuB gene encodes a RecF/RecN/SMC N-terminal domain.

[1247] In some embodiments, LmuB polypeptide is encoded by a gene positioned within 5-60 genes of a gene encoding a LmuA polypeptide in a genome of a prokaryotic cell. In some embodiments, LmuB polypeptide is encoded by a gene positioned within 5 genes upstream (5′) or downstream (3′) to a gene encoding a LmuA polypeptide in a genome of a prokaryotic cell. In some embodiments, LmuB polypeptide is encoded by a gene positioned within 5 genes upstream (5′) and downstream (3′) to a gene encoding a LmuA polypeptide in a genome of a prokaryotic cell.

[1248] In some embodiments, a LmuB polypeptide is about 559 amino acids long (median gene size).

[1249] In some embodiments, the LmuB polypeptide comprises an amino acid sequence having at least 80% homology to a sequence selected from the group consisting of the polypeptides referenced in Table 16, rows 2-698, columns L and M. In some embodiments, the LmuB polypeptide comprises the amino acid sequence having at least 80% homology within similar domain regions within a sequence selected from the group consisting of the polypeptides referenced in Table 16, rows 2-698, columns L and M. In some embodiments, a homologue of the LmuB polypeptide comprises a RecF/RecN/SMC N-terminal domain. In some embodiments, the LmuB polypeptide comprises an amino acid sequence having at least 80% identity to a sequence selected from the group consisting of the polypeptides referenced in Table 16, rows 2-698, columns L and M.

[1250] In some embodiments, the LmuB polypeptide comprises the amino acid sequence having at least 80% identity to a sequence selected from the group consisting of the polypeptides referenced in Table 16, rows 2-698, columns L and M. In some embodiments, the LmuB polypeptide comprises the amino acid sequence having at least 80% identity within similar domain regions within a sequence selected from the group consisting of the polypeptides referenced in Table 16, rows 2-698, columns L and M.

[1251] In some embodiments, the LmuB polypeptide comprises an amino acid sequence having at least 80%, at least 85%, at least 90%, or at least 95% homology to a sequence selected from the group consisting of the polypeptides referenced in Table 16, rows 2-698, columns L and M. In some embodiments, the LmuB polypeptide comprises the amino acid sequence having at least 80%, 85%, 90%, 95% homology within similar domain regions within a sequence selected from the group consisting of the polypeptides referenced in Table 16, rows 2-698, columns L and M. In some embodiments, the LmuB polypeptide comprises an amino acid sequence having at least 80%, at least 85%, at least 90%, or at least 95% identity to a sequence selected from the group consisting of the polypeptides referenced in Table 16, rows 2-698, columns L and M. In some embodiments, the LmuB polypeptide comprises the amino acid sequence having at least 80%, 85%, 90%, 95% identity within similar domain regions within a sequence selected from the group consisting of the polypeptides referenced in Table 16, rows 2-698, columns L and M. In some embodiments, the LmuB polypeptide comprises an amino acid sequence selected from the group consisting of the polypeptides referenced in Table 16, rows 2-698, columns L and M.

[1252] In some embodiments, the LmuB polypeptide comprises an amino acid sequence encoded by a nucleic acid sequence having at least 80%, at least 85%, at least 90%, or at least 95% homology to a sequence selected from the group consisting of the polynucleotides referenced in Table 16, rows 2-698, columns L and N. In some embodiments, the LmuB polypeptide comprises the amino acid sequence encoded by a nucleic acid sequence having at least 80%, 85%, 90%, 95% homology within similar domain regions within a sequence selected from the group consisting of the polynucleotides referenced in Table 16, rows 2-698, columns L and N. In some embodiments, the LmuB polypeptide comprises an amino acid sequence encoded by a nucleic acid sequence having at least 80%, at least 85%, at least 90%, or at least 95% identity to a sequence selected from the group consisting of the polynucleotides referenced in Table 16, rows 2-698, columns L and N. In some embodiments, the LmuB polypeptide comprises the amino acid sequence encoded by a nucleic acid sequence having at least 80%, 85%, 90%, 95% homology within similar domain regions within a sequence selected from the group consisting of the polynucleotides referenced in Table 16, rows 2-698, columns L and N. In some embodiments, the LmuB polypeptide comprises an amino acid sequence encoded from a nucleic acid sequence selected from the group consisting of the polynucleotides referenced in Table 16, rows 2-698, columns L and N.

[1253] In some embodiments, the nucleic acid sequence of a lmuB gene comprises a nucleic acid sequence having at least 80%, at least 85%, at least 90%, or at least 95% homology to a sequence selected from the group consisting of the polynucleotides referenced in Table 16, rows 2-698, columns L and N. In some embodiments, the lmuB gene comprises a nucleic acid sequence having at least 80%, 85%, 90%, 95% homology within encoded similar domain regions in comparison with nucleotide sequence encoding these domain within a sequence selected from the group consisting of the polynucleotides referenced in Table 16, rows 2-698, columns L and N. In some embodiments, the nucleic acid sequence of a lmuB gene comprises a nucleic acid sequence having at least 80%, at least 85%, at least 90%, or at least 95% identity to a sequence selected from the group consisting of the polynucleotides referenced in Table 16, rows 2-698, columns L and N. In some embodiments, the lmuB gene comprises a nucleic acid sequence having at least 80%, 85%, 90%, 95% identity within encoded similar domain regions in comparison with nucleotide sequence encoding these domain within a sequence selected from the group consisting of the polynucleotides referenced in Table 16, rows 2-698, columns L and N. In some embodiments, the lmuB gene homolog encodes a polypeptide comprising a RecF/RecN/SMC N-terminal domain. In some embodiments, the nucleic acid sequence of a lmuB gene comprises a nucleic acid sequence selected from the group consisting of the polynucleotides referenced in Table 16, rows 2-698, columns L and N.

[1254] A skilled artisan would appreciate that the terms a “functional portion of a Defense System VIII component” or “functional fragment of Defense System VIII component” or “functional portion of a Lamassu defense system component” or “functional fragment of Lamassu defense system component” refers to a functional portion of a Lamassu polynucleotide or polypeptide, as disclosed herein, which expression is sufficient to elicit an anti-phage activity alone or in combination with the at least one of the other Lamassu polynucleotides or polypeptides disclosed herein or functional portions thereof.

[1255] The terms “LmuA”, “LmuB”, “lmuA” and “lmuB”, also refer to functional LmuA, LmuB, lmuA and lmuB, homologs, which exhibit the desired activity (i.e., conferring phage resistance). Such homologs can be, for example, at least 80%, at least 81%, at least 82%, at least 83%, at least 84%, at least 85%, at least 86%, at least 87%, at least 88%, at least 89%, at least 90%, at least 91%, at least 92%, at least 93%, at least 94%, at least 95%, at least 96%, at least 97%, at least 98%, at least 99% or 100% identical or homologous to the polypeptide sequences referenced in Table 16 rows 2-698 columns H and I and L and M, respectively, or 80%, at least 81%, at least 82%, at least 83%, at least 84%, at least 85%, at least 86%, at least 87%, at least 88%, at least 89%, at least 90%, at least 91%, at least 92%, at least 93%, at least 94%, at least 95%, at least 96%, at least 97%, at least 98%, at least 99% or 100% identical or homologous to the polynucleotide sequences referenced in Table 16 rows 2-698 columns H and J and L and N, respectively, respectively. In some embodiments, such homologs comprise at least 80%, at least 81%, at least 82%, at least 83%, at least 84%, at least 85%, at least 86%, at least 87%, at least 88%, at least 89%, at least 90%, at least 91%, at least 92%, at least 93%, at least 94%, at least 95%, at least 96%, at least 97%, at least 98%, at least 99% or 100% homology or identity within similar domain regions of the polypeptide sequences referenced in Table 16 rows 2-698 columns H and I and L and M, respectively, or 80%, at least 81%, at least 82%, at least 83%, at least 84%, at least 85%, at least 86%, at least 87%, at least 88%, at least 89%, at least 90%, at least 91%, at least 92%, at least 93%, at least 94%, at least 95%, at least 96%, at least 97%, at least 98%, at least 99% or 100% identity or homology within nucleotide sequences encoding similar domain regions to the polynucleotide sequences referenced in Table 16 rows 2-698 columns H and J and L and N, respectively.

[1256] Table 16 presents embodiments of components of Defense System VIII that may be found in a diverse array of bacteria and archaea genomes (referenced in Table 18). Table 16 presents embodiments of nucleic acid sequences encoding gene cassettes of Defense System VIII (referenced in Table 18).

[1257] The Kiwa Defense System

[1258] In some embodiments, a defense system disclosed herein comprises a Kiwa anti-phage defense system. (Table 17)

[1259] In some embodiments, a Kiwa defense system provides a host cell with resistance to entry of foreign nucleic acid invasion. In some embodiments, a host cell expressing a functional Kiwa defense system (Defense System IX) provides the host cell resistance foreign nucleic acid invasion.

[1260] In some embodiments, a Kiwa defense system provides a host cell with resistance to at least one phage.

[1261] In some embodiments, a microbial cell comprising a Kiwa defense system protects the microbial cell from phage infection. In some embodiments, a microbial cell expressing a Kiwa defense system protects the microbial cell from phage infection. In some embodiments, a microbial cell expressing a functional Kiwa defense system protects the microbial cell from phage infection. In some embodiments, a bacterial cell comprising a Kiwa defense system protects the bacterial cell from phage infection. In some embodiments, a bacterial cell expressing a Kiwa defense system protects the bacterial cell from phage infection. In some embodiments, a bacterial cell expressing a functional Kiwa defense system protects the bacterial cell from phage infection.

[1262] In some embodiments, a Kiwa defense system provides a host cell with resistance to a plasmid.

[1263] As used herein, the term “a Kiwa anti-phage defense system” may be used interchangeably with the term “a Defense System IX”, having all the same meanings and qualities. A skilled artisan would appreciate that the term “Kiwa system” may be used interchangeably in some embodiments with “Kiwa defense system”, and “Kiwa the defense system”, “Kiwa anti-phage system”, having all the same meanings and qualities.

[1264] In some embodiments, a microbial species does not comprise an endogenous Defense System IX. In some embodiments, a microbial species does not express an endogenous Defense System IX. In some embodiments, a microbial species does not express an endogenous functional Defense System IX.

[1265] In some embodiments, a bacterial species does not comprise an endogenous Defense System IX. In some embodiments, a bacterial species does not express an endogenous Defense System IX. In some embodiments, a bacterial species does not express an endogenous functional Defense System IX.

[1266] A Kiwa defense system comprises, in some embodiments, a nucleic acid construct comprising a nucleic acid sequence encoding a KwaA polypeptide and a KwaB polypeptide comprising a pfam16162 domain or a DUF4868 domain or a combination thereof. In some embodiments, a Kiwa defense system comprises, a nucleic acid construct comprising a nucleic acid sequence encoding a KwaA polypeptide and a KwaB polypeptide comprising a pfam16162 domain or a DUF4868 domain or a combination thereof, wherein said KwaA polypeptide is encoded by a gene positioned within 5 genes of a gene encoding a KwaB polypeptide in the genome of a prokaryotic cell. In some embodiments, a Kiwa defense system comprises a nucleic acid construct comprising a nucleic acid sequence comprising a kwaA gene and a kwaB gene.

[1267] In some embodiments, a Kiwa defense system comprises, a KwaA polypeptide and a KwaB polypeptide comprising a pfam16162 domain or a DUF4868 domain or a combination thereof. In some embodiments, a Kiwa defense system comprises, a KwaA polypeptide and a KwaB polypeptide comprising a pfam16162 domain or a DUF4868 domain or a combination thereof, wherein said KwaA polypeptide is encoded by a gene positioned within 5 genes of a gene encoding a KwaB polypeptide in the genome of a prokaryotic cell. In some embodiments, a Kiwa defense system comprises KwaA polypeptide and a KwaB polypeptide.

[1268] A Kiwa defense system comprises, in some embodiments, a nucleic acid construct comprising a nucleic acid sequence encoding a KwaA polypeptide and a KwaB polypeptide comprising a pfam16162 domain or DUF4868 domain or a combination thereof. In some embodiments, a Kiwa defense system comprises a nucleic acid construct comprising a nucleic acid sequence encoding a KwaA polypeptide and a KwaB polypeptide.

[1269] In some embodiments, a Defense System IX comprises a KwaA polypeptide comprising an amino acid sequence having at least 80% identity to a sequence selected from the group referenced in Table 17 rows 2-935 columns H and I; or a KwaB polypeptide comprising a pfam16162 domain or a DUF4868 domain or a combination thereof, or comprising an amino acid sequence having at least 80% identity to a sequence selected from the group referenced in Table 17 rows 2-935 columns H and I; or a combination thereof.

[1270] In some embodiments, a Defense System IX comprises at least two different polypeptide components selected from a KwaA polypeptide comprising an amino acid sequence having at least 80% identity to a sequence selected from the group referenced in Table 17 rows 2-935 columns H and I; and a KwaB polypeptide comprising a pfam16162 domain or a DUF4868 domain or a combination thereof, or comprising an amino acid sequence having at least 80% identity to a sequence selected from the group referenced in Table 17 rows 2-935 columns H and I.

[1271] In some embodiments, a Kiwa defense system having an anti-phage activity comprises a nucleic acid construct comprising a nucleic acid sequence encoding a KwaA polypeptide and a KwaB polypeptide. In some embodiments, a Kiwa defense system having an anti-phage activity comprises a nucleic acid construct comprising a nucleic acid sequence comprising a kwaA gene and a kwaB gene.

[1272] In some embodiments, the Kiwa anti-phage defense system comprises a nucleic acid construct comprising nucleic acid sequences encoding a cassette comprising kwaA and kwaB genes.

[1273] In some embodiments, a Kiwa (Defense System IX) gene cassette comprises the nucleic acid sequence:

(SEQ ID NO: 3; construct 2 in Table 4)

| | |
|---|---|
| 1 | taatggtctt ccttccattg gtatctcgtg agtatacaag caatatcgaa tcggcaaata |
| 61 | tactcattag tatactcaca agcctgttga tgtgggttgg ttcaggttga cttcagttga |
| 121 | ggagaaaagc tggaaaagcc ttgcgtggcg cggatttcag gcataaaaaa agacctcagt |
| 181 | tgaggtctat ttacatactt ttggtgcgaa ggccggactc gaacatcgca actatcctta |
| 241 | tgatcttaat ggattaaaaa ttaccatatt ggtcatgata ccatcattga taccatcaga |
| 301 | cccgattgat gataatcgaa cagtaataaa atatgactaa acaatttatg cttcaacata |
| 361 | agattgaatg ctttgatcta ccattttaat gcagtggaaa aatttttaac acaatactta |
| 421 | agaaaaataa tttcatataa aaactacatt tcatttcata tagttaacac accaaaaaca |
| 481 | actgtatata aacccagtaa aaaatggtag aatcactatt gtgttcaatt gttgaacatt |
| 541 | tataatacat ttgtcggata ggggggtgtt tatgcaaagg aacacataca acaaagtagg |
| 601 | tctatacatc ctatctttag ctatgctttt tgtttttatt attatcctga ctgccaaaat |
| 661 | ccccttttgc ttcacttcgg attgtagctt cataggtttg aagaaacttg tattaacaaa |
| 721 | tattgttcct attgtttgct ttgtattttt tctatttagt atttattttt ataatagatt |
| 781 | aaaaaacata acaaaataca atggacaaga tagcgttaaa ataacatcat gtcaaagcga |
| 841 | aagctatgaa agtttaacat tcttagcaac atacattgta ccttttatgg ggtttagttt |
| 901 | tgaagacatg caaaagaata tagcatatct tttgcttgta gtagtaatag gcattatttt |
| 961 | tattaaaaca gacaagtatt atgcgaatcc aactttagct ctgtttggct ttaaactata |
| 1021 | cagggtaaat atactacacc caggaagtgg agaaacaaaa aatctgatag ctatttcaaa |
| 1081 | tgatgtatta aaagtggacg ataatgttta ttatagtttc tttgacgaat ttgtttttat |
| 1141 | agcaaggaaa aaaatatgac tactcagcag ttaaaagaaa aaatttcaaa aataattgat |
| 1201 | aactttagcg gaatcagggt tgtatttact actactgcta atgaactaaa gctttccaga |
| 1261 | attgaaggga gtgcattaaa tagcatagct gaagggttta ttgacaaaat caaagaagac |
| 1321 | attataaata atgaagatct cacctcaccc ttgctgtcca attttgatga tagaaaaaat |
| 1381 | gccttgttta aatttgatta cgaacaatat cctgaagaat ttaacaaaat cactcaggcc |
| 1441 | atcgctatcc ctcctaactc acaagattat tataaccctt taaataaatt cacagatgtg |
| 1501 | aaaggaatta taattttaat aagtggagat aacaaatgcc tggctcttta taaaaacaaa |
| 1561 | actaaccttg cagtattgag aaatagcaga aaaatgttta atttagtccc tgaccctgat |
| 1621 | ggatacttga aacaactccc taatgagata ttacggttag atttcaatta tgatctattt |
| 1681 | tcaattggtg aggattttta cattaaaaat cacaagactc ttgaaactca aatgaaattt |
| 1741 | catcaagtga ttgaagccca agcagttatt gctttaaatt ctttacggga ttcactacta |
| 1801 | attgaagaca tatcaggttt agaaaagagt tcgagagaaa tttcattcgc tagaaagttg |
| 1861 | gcaaaaatct ccaaacattc tcctgttttg gggaaaatag atactaaaac aattattgat |
| 1921 | tatgtatccc aacataaata tttatctgca atacttcaga ttaatgaagc gggagataag |
| 1981 | ttattaatta aaaccaagac atcacagaag catttcatta aactcatgag cgatgattat |
| 2041 | ttacaatcag atctaaccaa aataatatac atgagcatag caaaagacag attagatgaa |
| 2101 | tagaacttta agtagaagtg acaaatatta taaaccattc ttgaaatata tttgtcacta |
| 2161 | ttactaat. |

[1274] The coding regions for each of the kwaA and kwaB gene sequences within this embodiment of a Kiwa cassette (SEQ ID NO: 3) are as follows: nucleotides 572-1159 encode an embodiment of a KwaA polypeptide, and nucleotides 1156-2103 encode an embodiment of a KwaB polypeptide.

[1275] In some embodiments, a Defense System IX comprising a KwaA polypeptide and a KwaB polypeptide is encoded by the nucleic acid sequence set forth in SEQ ID NO: 3. In some embodiments, a Defense System IX comprising a KwaA polypeptide and a KwaB polypeptide, is encoded by a nucleic acid sequence having at least 80% homology to the sequence set forth in SEQ ID NO: 3. In some embodiments, a Defense System IX comprising a KwaA polypeptide and a KwaB polypeptide, is encoded by a nucleic acid sequence having at least 85% homology, or 90% homology, or 95% homology, or 97% homology, or 98% homology, or 99% homology to the sequence set forth in SEQ ID NO: 3. In some embodiments, a Defense System IX comprising a KwaA polypeptide and a KwaB polypeptide, is encoded by a nucleic acid sequence having at least 80% identity to the sequence set forth in SEQ ID NO: 3. In some embodiments, a Defense System IX comprising a KwaA polypeptide and a KwaB polypeptide, is encoded by a nucleic acid sequence having at least 85% identity, or 90% identity, or 95% identity, or 97% identity, or 98% identity, or 99% identity to the sequence set forth in SEQ ID NO: 3.

[1276] In some embodiments, a construct comprising the Kiwa defense system encodes one component of the defense system, whereby multiple constructs may be used to assemble the functional defense system. In some embodiments, the components of a Kiwa defense system comprise genes kwaA and kwaB. In some embodiments, the components of a Kiwa defense system consist of genes kwaA and kwaB. In some embodiments, the components of a Kiwa defense system comprise nucleic acid sequences encoding a KwaA polypeptide and a KwaB polypeptide. In some embodiments, the components of a Kiwa defense system consist of nucleic acid sequences encoding a KwaA polypeptide and a KwaB polypeptide.

[1277] In some embodiments, a construct comprising the Kiwa defense system encodes one component of the defense system, whereby a second construct may be used to assemble the functional defense system. In some embodiments, a construct comprising the Kiwa defense system encodes one component of the defense system, whereby additional constructs may be used to assemble the functional defense system. For example, in some embodiments each of KwaA and KwaB may be encoded by nucleic acid sequences comprised in different constructs, wherein expression of the combination of constructs produces a functional Kiwa defense system.

[1278] In some embodiments, the components making up a functional Kiwa anti-phage defense system comprise a KwaA polypeptide and a KwaB polypeptide, each encoded by a kwaA and a kwaB gene, respectively.

[1279] In some embodiments, a Kiwa defense system having an anti-phage activity comprise a nucleic acid encoding a KwaA polypeptide. In some embodiments, a Kiwa defense system having an anti-phage activity comprise a nucleic acid encoding a KwaA polypeptide and a KwaB polypeptide.

[1280] In some embodiments, a Kiwa defense system having an anti-phage activity comprise a nucleic acid comprising a kwaA gene. In some embodiments, a Kiwa defense system having an anti-phage activity comprise a nucleic acid comprising a kwaA gene and a kwaB gene.

[1281] In some embodiments, a Kiwa defense system having an anti-phage activity comprises a nucleic acid construct comprising nucleic acids encoding polypeptides in a set order. In one embodiment, the 5′ to 3′ order of polypeptides encoded is KwaA and KwaB. In some embodiments the 5′ to 3′ order of polypeptides does not affect the anti-phage activity. In some embodiments the 5′ to 3′ order of polypeptides does affect the anti-phage activity.

[1282] In some embodiments, the 5′ to 3′ order of polypeptides is random, for example any order of KwaA and KwaB.

[1283] In some embodiments, a Kiwa defense system having an anti-phage activity comprises a nucleic acid construct comprising genes in a set order. In some embodiment, the 5′ to 3′ order of genes is kwaA and kwaB. In some embodiment, the 5′ to 3′ order of genes in a Kiwa defense system is not kwaA and kwaB. In some embodiments the 5′ to 3′ order of genes does not affect the anti-phage activity. In some embodiments the 5′ to 3′ order of genes does affect the anti-phage activity.

[1284] In some embodiments, the 5′ to 3′ order of genes is random, for example any order of kwaA and kwaB.

[1285] In some embodiments, the Kiwa system (Defense System IX) composition and order is as shown in FIG. 3B.

[1286] In some embodiments, a Kiwa defense system having an anti-phage activity originates from a microbial genome, for example a bacterial or an archaeal genome (Table 17). A skilled artisan would appreciate that the Kiwa system is not present in the majority of bacteria and or archaea species.

[1287] In some embodiments, a functional Kiwa defense system comprises a construct comprising nucleic acid sequences encoding polypeptides, wherein the nucleic acid sequence encoding each polypeptide may originate from a different microbial species. For example, the source of the nucleic acid sequence encoding a KwaA polypeptide may be one microbial species, while the source of the nucleic acid sequence encoding a KwaB polypeptide may be a different microbial species. In some embodiments, a functional Kiwa defense system comprises a non-naturally occurring combination of polypeptide components. In some embodiments, a functional Kiwa defense system comprises a combination of at least two polypeptides that do not naturally occur together.

[1288] In some embodiments, a functional Kiwa defense system comprises a construct comprising nucleic acid sequences encoding polypeptides, wherein the nucleic acid sequence encoding each polypeptide may originate from a different bacterial species. For example, the source of the nucleic acid sequence encoding a KwaA polypeptide may be one bacterial species, while the source of the nucleic acid sequence encoding a KwaB polypeptide may be a different bacterial species.

[1289] In some embodiments, the source of the nucleic acid encoding a KwaA polypeptide and a KwaB polypeptide is the same. In some embodiments, the source of the nucleic acid encoding a KwaA polypeptide and a KwaB polypeptide is the not the same. In some embodiments, the source of the nucleic acid sequence of any of the components of a Kiwa defense system comprises any of the species listed in Table 17.

[1290] In some embodiments, a Kiwa defense system having an anti-phage activity comprises a nucleic acid construct comprising non-coding regions between the nucleic acid sequences encoding the polypeptides. In some embodiments, the non-coding regions between the nucleic acid sequences comprises nucleic acid sequence not naturally occurring in the microbial species of origin. In some embodiments, the non-coding regions between the nucleic acid sequences comprises nucleic acid sequence is the naturally occurring in the microbial species of origin.

[1291] In some embodiments, a Kiwa system disclosed herein comprises a multi-gene phage resistance system broadly distributed in microbial genomes, for example but not limited to bacteria and archaea. According to some embodiments, the Kiwa system components are located in a gene cluster (a cassette of genes) in a microbial cell genome. According to some embodiments, the Kiwa system components are located in close proximity (e.g. positioned within 20 genes, 10 genes, 5 genes or less one from the other) in a genome of a prokaryotic cell. According to some embodiments the prokaryotic cell expresses an endogenous Kiwa defense system. According to some embodiments, the prokaryotic cell expresses an endogenous functional Kiwa defense system. According to some embodiments, the species of prokaryotic cell is selected from the group consisting of the species listed in Table 17. According to some embodiments a prokaryotic cell expresses a non-endogenous Kiwa defense system. According to some embodiments, a prokaryotic cell expresses a non-endogenous functional Kiwa defense system. According to some embodiments, the species of prokaryotic cell expressing a non-endogenous functional Kiwa defense system is selected from the group consisting of the species listed in Table 17.

[1292] In some embodiments, Kiwa defense system components comprise KwaA and KwaB polypeptides. In some embodiments, a Kiwa defense system components comprise functional portions of KwaA and KwaB polypeptides. In some embodiments, the Kiwa defense system components are encoded by kwaA and kwaB genes.

[1293] Non-limiting embodiments of endogenous Kiwa systems and the respective location of their components are provided in Table 17 herein.

[1294] In some embodiments, the components of a Kiwa system may be identified by the presence of similar domains present within each component. In some embodiments, domains comprise pfam domains and or clusters of orthologous groups (COG) domains.

[1295] In some embodiments, a Defense System IX comprises a membrane associated complex.

[1296] In some embodiments, the term “KwaA” refers to the polynucleotide or expression product e.g., the polypeptide encoded by the kwaA gene. In some embodiments, the term “KwaA” refers to a KwaA polypeptide. In some embodiments, a KwaA polypeptide comprises transmembrane helices. In some embodiments, a kwaA gene encodes a polypeptide comprising transmembrane helices.

[1297] In some embodiments, KwaA polypeptide is encoded by a gene positioned within 5-60 genes of a gene encoding a KwaB polypeptide in a genome of a prokaryotic cell. In some embodiments, KwaA polypeptide is encoded by a gene positioned within 5 genes upstream (5′) or downstream (3′) to a gene encoding a KwaB polypeptide in a genome of a prokaryotic cell. In some embodiments, KwaA polypeptide is encoded by a gene positioned within 5 genes upstream (5′) and downstream (3′) to a gene encoding a KwaB polypeptide in a genome of a prokaryotic cell.

[1298] In some embodiments, KwaA and KwaB are encoded by genes positioned sequentially 5′ to 3′ in a genome of a prokaryotic cell. In some embodiments, KwaA and KwaB are encoded by genes positioned contiguously 5′ to 3′ in a genome of a prokaryotic cell. In some embodiments, nucleic acid encoding additional copies of KwaB is positions 3′ of the nucleic acid sequence first encoding a KwaB polypeptide.

[1299] In some embodiments, kwaA and kwaB genes are positioned sequentially 5′ to 3′ in a genome of a prokaryotic cell. In some embodiments, kwaA and kwaB, genes are positioned contiguously 5′ to 3′ in a genome of a prokaryotic cell.

[1300] In some embodiments, a KwaA polypeptide is about 194 amino acids long (median gene size).

[1301] In some embodiments, the KwaA polypeptide comprises the amino acid sequence having at least 80% homology to a sequence selected from the group consisting of the polypeptides referenced in Table 17, rows 2-935, columns H and I. In some embodiments, the KwaA polypeptide comprises the amino acid sequence having at least 80% homology within similar domain regions to a sequence selected from the group consisting of the polypeptides referenced in Table 17, rows 2-935, columns H and I. In some embodiments, a KwaA homolog comprises transmembrane helices. In some embodiments, the KwaA polypeptide comprises a homolog of a polypeptide having the amino acid sequences set forth in the polypeptides referenced in Table 17, rows 2-935, columns H and I.

[1302] In some embodiments, the KwaA polypeptide comprises the amino acid sequence having at least 80% identity to a sequence selected from the group consisting of the polypeptides referenced in Table 17, rows 2-935, columns H and I. In some embodiments, the KwaA polypeptide comprises the amino acid sequence having at least 80% identity within similar domain regions to a sequence selected from the group consisting of the polypeptides referenced in Table 17, rows 2-935, columns H and I.

[1303] In some embodiments, the KwaA polypeptide comprises the amino acid sequence having at least 80% identity to a sequence selected from the group consisting of the polypeptides referenced in Table 17, rows 2-935, columns H and I. In some embodiments, the KwaA polypeptide comprises the amino acid sequence having at least 80% identity within similar domain regions within a sequence selected from the group consisting of the polypeptides referenced in Table 17, rows 2-935, columns H and I.

[1304] In some embodiments, the KwaA polypeptide comprises an amino acid sequence having at least 80%, at least 85%, at least 90%, or at least 95% homology to a sequence selected from the group consisting of the polypeptides referenced in Table 17, rows 2-935, columns H and I. In some embodiments, the KwaA polypeptide comprises the amino acid sequence having at least 80%, 85%, 90%, 95% homology within similar domain regions within a sequence selected from the group consisting of the polypeptides referenced in Table 17, rows 2-935, columns H and I. In some embodiments, the KwaA polypeptide comprises an amino acid sequence having at least 80%, at least 85%, at least 90%, or at least 95% identity to a sequence selected from the group consisting of the polypeptides referenced in Table 17, rows 2-935, columns H and I. In some embodiments, the KwaA polypeptide comprises the amino acid sequence having at least 80%, 85%, 90%, 95% identity within similar domain regions within a sequence selected from the group consisting of the polypeptides referenced in Table 17, rows 2-935, columns H and I. In some embodiments, the KwaA polypeptide comprises an amino acid sequence selected from the group consisting of the polypeptides referenced in Table 17, rows 2-935, columns H and I.

[1305] In some embodiments, the KwaA polypeptide comprises an amino acid sequence encoded by a nucleic acid sequence having at least 80%, at least 85%, at least 90%, or at least 95% homology to a sequence selected from the group consisting of the polynucleotides referenced in Table 17, rows 2-935, columns H and J. In some embodiments, the KwaA polypeptide comprises the amino acid sequence encoded by a nucleic acid sequence having at least 80%, 85%, 90%, 95% homology within similar domain regions within a sequence selected from the group consisting of the polynucleotides referenced in Table 17, rows 2-935, columns H and J. In some embodiments, the KwaA polypeptide comprises an amino acid sequence encoded by a nucleic acid sequence having at least 80%, at least 85%, at least 90%, or at least 95% identity to a sequence selected from the group consisting of the polynucleotides referenced in Table 17, rows 2-935, columns H and J. In some embodiments, the KwaA polypeptide comprises the amino acid sequence encoded by a nucleic acid sequence having at least 80%, 85%, 90%, 95% homology within similar domain regions within a sequence selected from the group consisting of the polynucleotides referenced in Table 17, rows 2-935, columns H and J. In some embodiments, the KwaA polypeptide comprises an amino acid sequence encoded from a nucleic acid sequence selected from the group consisting of the polynucleotides referenced in Table 17, rows 2-935, columns H and J.

[1306] In some embodiments, the nucleic acid sequence of a kwaA gene comprises a nucleic acid sequence having at least 80%, at least 85%, at least 90%, or at least 95% homology to a sequence selected from the group consisting of the polynucleotides referenced in Table 17, rows 2-935, columns H and J. In some embodiments, the kwaA gene comprises a nucleic acid sequence having at least 80%, 85%, 90%, 95% homology within encoded similar domain regions in comparison with nucleotide sequence encoding these domain within a sequence selected from the group consisting of the polynucleotides referenced in Table 17, rows 2-935, columns H and J. In some embodiments, the nucleic acid sequence of a kwaA gene comprises a nucleic acid sequence having at least 80%, at least 85%, at least 90%, or at least 95% identity to a sequence selected from the group consisting of the polynucleotides referenced in Table 17, rows 2-935, columns H and J. In some embodiments, the kwaA gene comprises a nucleic acid sequence having at least 80%, 85%, 90%, 95% identity within encoded similar domain regions in comparison with nucleotide sequence encoding these domain within a sequence selected from the group consisting of the polynucleotides referenced in Table 17, rows 2-935, columns H and J. In some embodiments, a kwaA gene homolog encodes a polypeptide comprising transmembrane helices. In some embodiments, the nucleic acid sequence of a kwaA gene comprises a nucleic acid sequence selected from the group consisting of the polynucleotides referenced in Table 17, rows 2-935, columns H and J.

[1307] As used herein, the term “KwaB” refers to the polynucleotide or expression product e.g., polypeptide encoded by the kwaB gene. In some embodiments, the term “KwaB” refers to a KwaB polypeptide. In some embodiments, the product of the kwaB gene comprises a pfam16162 domain. In some embodiments, the product of the kwaB gene comprises a DUF4868 domain.

[1308] In some embodiments, KwaB polypeptide is encoded by a gene positioned within 5-60 genes of a gene encoding a KwaA polypeptide in a genome of a prokaryotic cell. In some embodiments, KwaB polypeptide is encoded by a gene positioned within 5 genes upstream (5′) or downstream (3′) to a gene encoding a KwaA polypeptide in a genome of a prokaryotic cell. In some embodiments, KwaB polypeptide is encoded by a gene positioned within 5 genes upstream (5′) and downstream (3′) to a gene encoding a KwaA polypeptide in a genome of a prokaryotic cell.

[1309] In some embodiments, KwaA and KwaB are encoded by genes positioned sequentially 5′ to 3′ in a genome of a prokaryotic cell. In some embodiments KwaA and KwaB are encoded by genes positioned contiguously 5′ to 3′ in a genome of a prokaryotic cell.

[1310] In some embodiments, a KwaB polypeptide is about 315 amino acids long (median gene size).

[1311] In some embodiments, the KwaB polypeptide comprises the amino acid sequence having at least 80% homology to a sequence selected from the group consisting of the polypeptides referenced in Table 17, rows 2-935, columns L and M. In some embodiments, the KwaB polypeptide comprises the amino acid sequence having at least 80% homology within similar domain regions within a sequence selected from the group consisting of the polypeptides referenced in Table 17, rows 2-935, columns L and M. In some embodiments, the KwaB polypeptide comprises a homolog of a polypeptide having the amino acid sequences set forth in the polypeptides referenced in Table 17, rows 2-935, columns L and M.

[1312] In some embodiments, the KwaB polypeptide comprises the amino acid sequence having at least 80% identity to a sequence selected from the group consisting of the polypeptides referenced in Table 17, rows 2-935, columns L and M. In some embodiments, the KwaB polypeptide comprises the amino acid sequence having at least 80% identity within similar domain regions within a sequence selected from the group consisting of the polypeptides referenced in Table 17, rows 2-935, columns L and M.

[1313] In some embodiments, the KwaB polypeptide comprises an amino acid sequence having at least 80%, at least 85%, at least 90%, or at least 95% homology to a sequence selected from the group consisting of the polypeptides referenced in Table 17, rows 2-935, columns L and M. In some embodiments, the KwaB polypeptide comprises the amino acid sequence having at least 80%, 85%, 90%, 95% homology within similar domain regions within a sequence selected from the group consisting of the polypeptides referenced in Table 17, rows 2-935, columns L and M. In some embodiments, the KwaB polypeptide comprises an amino acid sequence having at least 80%, at least 85%, at least 90%, or at least 95% identity to a sequence selected from the group consisting of the polypeptides referenced in Table 17, rows 2-935, columns L and M. In some embodiments, the KwaB polypeptide comprises the amino acid sequence having at least 80%, 85%, 90%, 95% identity within similar domain regions within a sequence selected from the group consisting of the polypeptides referenced in Table 17, rows 2-935, columns L and M. In some embodiments, the KwaB polypeptide comprises an amino acid sequence selected from the group consisting of the polypeptides referenced in Table 17, rows 2-935, columns L and M.

[1314] In some embodiments, the KwaB polypeptide comprises an amino acid sequence encoded by a nucleic acid sequence having at least 80%, at least 85%, at least 90%, or at least 95% homology to a sequence selected from the group consisting of the polynucleotides referenced in Table 17, rows 2-935, columns L and N. In some embodiments, the KwaB polypeptide comprises the amino acid sequence encoded by a nucleic acid sequence having at least 80%, 85%, 90%, 95% homology within similar domain regions within a sequence selected from the group consisting of the polynucleotides referenced in Table 17, rows 2-935, columns L and N. In some embodiments, the KwaB polypeptide comprises an amino acid sequence encoded by a nucleic acid sequence having at least 80%, at least 85%, at least 90%, or at least 95% identity to a sequence selected from the group consisting of the polynucleotides referenced in Table 17, rows 2-935, columns L and N. In some embodiments, the KwaB polypeptide comprises the amino acid sequence encoded by a nucleic acid sequence having at least 80%, 85%, 90%, 95% homology within similar domain regions within a sequence selected from the group consisting of the polynucleotides referenced in Table 17, rows 2-935, columns L and N. In some embodiments, the KwaB polypeptide comprises an amino acid sequence encoded from a nucleic acid sequence selected from the group consisting of the polynucleotides referenced in Table 17, rows 2-935, columns L and N.

[1315] In some embodiments, the nucleic acid sequence of a kwaB gene comprises a nucleic acid sequence having at least 80%, at least 85%, at least 90%, or at least 95% homology to a sequence selected from the group consisting of the polynucleotides referenced in Table 17, rows 2-935, columns L and N. In some embodiments, the kwaB gene comprises a nucleic acid sequence having at least 80%, 85%, 90%, 95% homology within encoded similar domain regions in comparison with nucleotide sequence encoding these domain within a sequence selected from the group consisting of the polynucleotides referenced in Table 17, rows 2-935, columns L and N. In some embodiments, the nucleic acid sequence of a kwaB gene comprises a nucleic acid sequence having at least 80%, at least 85%, at least 90%, or at least 95% identity to a sequence selected from the group consisting of the polynucleotides referenced in Table 17, rows 2-935, columns L and N. In some embodiments, the kwaB gene comprises a nucleic acid sequence having at least 80%, 85%, 90%, 95% identity within encoded similar domain regions in comparison with nucleotide sequence encoding these domain within a sequence selected from the group consisting of the polynucleotides referenced in Table 17, rows 2-935, columns L and N. In some embodiments, the nucleic acid sequence of a kwaB gene comprises a nucleic acid sequence selected from the group consisting of the polynucleotides referenced in Table 17, rows 2-935, columns L and N.

[1316] A skilled artisan would appreciate that the terms a “functional portion of a Defense System IX component” or “functional fragment of Defense System IX component” or “functional portion of a Kiwa defense system component” or “functional fragment of Kiwa defense system component” refers to a functional portion of a Kiwa polynucleotide or polypeptide, as disclosed herein, which expression is sufficient to elicit an anti-phage activity alone or in combination with the at least one of the other Kiwa polynucleotides or polypeptides disclosed herein or functional portions thereof.

[1317] The terms “KwaA”, “KwaB”, “kwaA” and “kwaB”, also refer to functional KwaA, KwaB, kwaA and kwaB homologs, which exhibit the desired activity (i.e., conferring phage resistance). Such homologs can be, for example, at least 80%, at least 81%, at least 82%, at least 83%, at least 84%, at least 85%, at least 86%, at least 87%, at least 88%, at least 89%, at least 90%, at least 91%, at least 92%, at least 93%, at least 94%, at least 95%, at least 96%, at least 97%, at least 98%, at least 99% or 100% identical or homologous to the polypeptide sequences referenced in Table 17 rows 2-935 columns H and I and L and M, respectively, or 80%, at least 81%, at least 82%, at least 83%, at least 84%, at least 85%, at least 86%, at least 87%, at least 88%, at least 89%, at least 90%, at least 91%, at least 92%, at least 93%, at least 94%, at least 95%, at least 96%, at least 97%, at least 98%, at least 99% or 100% identical or homologous to the polynucleotide sequences referenced in Table 17 rows 2-935 columns H and J and L and N, respectively, respectively. In some embodiments, such homologs comprise at least 80%, at least 81%, at least 82%, at least 83%, at least 84%, at least 85%, at least 86%, at least 87%, at least 88%, at least 89%, at least 90%, at least 91%, at least 92%, at least 93%, at least 94%, at least 95%, at least 96%, at least 97%, at least 98%, at least 99% or 100% homology or identity within similar domain regions of the polypeptide sequences referenced in Table 17 rows 2-935 columns H and I and L and M, respectively, or 80%, at least 81%, at least 82%, at least 83%, at least 84%, at least 85%, at least 86%, at least 87%, at least 88%, at least 89%, at least 90%, at least 91%, at least 92%, at least 93%, at least 94%, at least 95%, at least 96%, at least 97%, at least 98%, at least 99% or 100% identity or homology within nucleotide sequences encoding similar domain regions to the polynucleotide sequences referenced in Table 17 rows 2-935 columns H and J and L and N, respectively.

[1318] Table 17 presents embodiments of components of Defense System IX that may be found in a diverse array of bacteria and archaea genomes (referenced in Table 18). Table 17 presents embodiments of nucleic acid sequences encoding gene cassettes of Defense System IX (referenced in Table 18).

[1319] The Wadjet Defense System

[1320] In some embodiments, a defense system disclosed herein comprises a Wadjet anti-plasmid defense system. (Table 11)

[1321] In some embodiments, a Wadjet defense system provides a host cell with resistance to entry of foreign nucleic acid invasion. In some embodiments, a host cell expressing a functional Wadjet defense system (Defense System Xa; Defense System Xb; or Defense System Xc) provides the host cell resistance foreign nucleic acid invasion.

[1322] In some embodiments, a Wadjet defense system provides a host cell with reduced efficiency of transformation of plasmids. In some embodiments, a Wadjet defense system provides a host cell with protective activity against plasmids.

[1323] In some embodiments, a Type I Wadjet defense system provides a host cell with reduced efficiency of transformation of plasmids. In some embodiments, a Wadjet Type I defense system provides a host cell with protective activity against plasmids. In some embodiments, a Type II Wadjet defense system provides a host cell with reduced efficiency of transformation of plasmids. In some embodiments, a Wadjet Type II defense system provides a host cell with protective activity against plasmids. In some embodiments, a Type III Wadjet defense system provides a host cell with reduced efficiency of transformation of plasmids. In some embodiments, a Wadjet Type III defense system provides a host cell with protective activity against plasmids.

[1324] In some embodiments, expression of a Wadjet Type I defense system in microbial cells protects the microbial cell from plasmid entry, reducing or eliminating plasmid transformation. In some embodiments, expression of a Wadjet Type II defense system in a microbial cell protects the microbial cell from plasmid entry, reducing or eliminating plasmid transformation. In some embodiments, expression of a Wadjet Type III defense system in a microbial cell protects the microbial cell from plasmid entry, reducing or eliminating plasmid transformation.

[1325] In some embodiments, expression of a Wadjet Type I defense system in bacterial cell protects the bacterial cell from plasmid entry, reducing or eliminating plasmid transformation. In some embodiments, expression of a Wadjet Type II defense system in bacteria protects the bacterial cell from plasmid entry, reducing or eliminating plasmid transformation. In some embodiments, expression of a Wadjet Type III defense system in bacteria protects the bacterial cell from plasmid entry, reducing or eliminating plasmid transformation.

[1326] In some embodiments, a microbial cell comprising a Wadjet Type I defense system protects the microbial cell from plasmid entry, reducing or eliminating plasmid transformation. In some embodiments, a microbial cell expressing a Wadjet Type I defense system protects the microbial cell from plasmid entry, reducing or eliminating plasmid transformation. In some embodiments, a microbial cell expressing a functional Wadjet Type I defense system protects the microbial cell from plasmid entry, reducing or eliminating plasmid transformation.

[1327] In some embodiments, a bacterial cell comprising a Wadjet Type I defense system protects the bacterial cell from plasmid entry, reducing or eliminating plasmid transformation. In some embodiments, a bacterial cell expressing a Wadjet Type I defense system protects the bacterial cell from plasmid entry, reducing or eliminating plasmid transformation. In some embodiments, a bacterial cell expressing a functional Wadjet Type I defense system protects the bacterial cell from plasmid entry, reducing or eliminating plasmid transformation.

[1328] In some embodiments, a microbial cell comprising a Wadjet Type II defense system protects the microbial cell from plasmid entry, reducing or eliminating plasmid transformation. In some embodiments, a microbial cell expressing a Wadjet Type II defense system protects the microbial cell from plasmid entry, reducing or eliminating plasmid transformation. In some embodiments, a microbial cell expressing a functional Wadjet Type II defense system protects the microbial cell from plasmid entry, reducing or eliminating plasmid transformation.

[1329] In some embodiments, a bacterial cell comprising a Wadjet Type II defense system protects the bacterial cell from plasmid entry, reducing or eliminating plasmid transformation. In some embodiments, a bacterial cell expressing a Wadjet Type II defense system protects the bacterial cell from plasmid entry, reducing or eliminating plasmid transformation. In some embodiments, a bacterial cell expressing a functional Wadjet Type II defense system protects the bacterial cell from plasmid entry, reducing or eliminating plasmid transformation.

[1330] In some embodiments, a microbial cell comprising a Wadjet Type III defense system protects the microbial cell from plasmid entry, reducing or eliminating plasmid transformation. In some embodiments, a microbial cell expressing a Wadjet Type III defense system protects the microbial cell from plasmid entry, reducing or eliminating plasmid transformation. In some embodiments, a microbial cell expressing a functional Wadjet Type III defense system protects the microbial cell from plasmid entry, reducing or eliminating plasmid transformation.

[1331] In some embodiments, a bacterial cell comprising a Wadjet Type III defense system protects the bacterial cell from plasmid entry, reducing or eliminating plasmid transformation. In some embodiments, a bacterial cell expressing a Wadjet Type III defense system protects the bacterial cell from plasmid entry, reducing or eliminating plasmid transformation. In some embodiments, a bacterial cell expressing a functional Wadjet Type III defense system protects the bacterial cell from plasmid entry, reducing or eliminating plasmid transformation.

[1332] In some embodiments, a Wadjet defense system provides a host cell with resistance to at least one phage. In some embodiments, a Wadjet Type I defense system provides a host cell with resistance to at least one phage. In some embodiments, a Wadjet Type II defense system provides a host cell with resistance to at least one phage. In some embodiments, a Wadjet Type III defense system provides a host cell with resistance to at least one phage.

[1333] In some embodiments, a Wadjet defense system (Defense system Xa, Xb, or Xc) provides a host cell with resistance to entry of conjugative elements. In some embodiments, a host cell expressing a function Wadjet defense system (Defense System Xa, Xb, or Xc) provides the host cell resistance from entry of conjugative elements.

[1334] As used herein, the term “a Wadjet anti-plasmid defense system” may be used interchangeably with the term “a Defense System X”, having all the same meanings and qualities. Further, in some embodiments, the term “a Wadjet Type I defense system” may be used interchangeably with the term “a Defense System Xa”, having all the same meanings and qualities, and in some embodiments, the term “a Wadjet Type II defense system” may be used interchangeably with the term “a Defense System Xb”, having all the same meanings and qualities, and in some embodiments, the term “a Wadjet Type III defense system” may be used interchangeably with the term “a Defense System Xc”, having all the same meanings and qualities.

[1335] A skilled artisan would appreciate that the term “Wadjet system” may be used interchangeably in some embodiments with “Wadjet defense system”, “Wadjet the defense system”, “Wadjet defense system”, “Wadjet anti-plasmid system”, “Wadjet Type I defense system”, “Wadjet Type II defense system”, “Wadjet Type III defense system”, “Defense System Xa”, “Defense System Xb”, and “Defense System Xc”.

[1336] In some embodiments, a microbial species does not comprise an endogenous Defense System X. In some embodiments, a microbial species does not express an endogenous Defense System X. In some embodiments, a microbial species does not express an endogenous functional Defense System X.

[1337] In some embodiments, a bacterial species does not comprise an endogenous Defense System X. In some embodiments, a bacterial species does not express an endogenous Defense System X. In some embodiments, a bacterial species does not express an endogenous functional Defense System X.

[1338] In some embodiments, a microbial species does not comprise an endogenous Defense System Xa. In some embodiments, a microbial species does not express an endogenous Defense System Xa. In some embodiments, a microbial species does not express an endogenous functional Defense System Xa.

[1339] In some embodiments, a bacterial species does not comprise an endogenous Defense System Xa. In some embodiments, a bacterial species does not express an endogenous Defense System Xa. In some embodiments, a bacterial species does not express an endogenous functional Defense System Xa.

[1340] In some embodiments, a microbial species does not comprise an endogenous Defense System Xb. In some embodiments, a microbial species does not express an endogenous Defense System Xb. In some embodiments, a microbial species does not express an endogenous functional Defense System Xb.

[1341] In some embodiments, a bacterial species does not comprise an endogenous Defense System Xb. In some embodiments, a bacterial species does not express an endogenous Defense System Xb. In some embodiments, a bacterial species does not express an endogenous functional Defense System Xb.

[1342] In some embodiments, a microbial species does not comprise an endogenous Defense System Xc. In some embodiments, a microbial species does not express an endogenous Defense System Xc. In some embodiments, a microbial species does not express an endogenous functional Defense System Xc.

[1343] In some embodiments, a bacterial species does not comprise an endogenous Defense System Xc. In some embodiments, a bacterial species does not express an endogenous Defense System Xc. In some embodiments, a bacterial species does not express an endogenous functional Defense System Xc.

[1344] A Wadjet defense system (Defense System X) comprises, in some embodiments, a nucleic acid construct comprising a nucleic acid construct comprising a nucleic acid sequence encoding a JetA polypeptide comprising a pfam11855 domain or a DUF3375 domain or a pfam09660 domain or a DUF2397 domain or no known domain, or any combination thereof; a JetB polypeptide comprising a pfam13835 domain or a DUF4194 domain or a pfam09661 domain or a DUF2398 domain or no known domain, or any combination thereof; a JetC polypeptide comprising a pfam13555 domain or a pfam13558 domain or a COG4913 domain or a COG1196 domain, or a combination thereof; and a JetD polypeptide comprising a pfam11795 domain or a DUF3322 domain or a pfam09983 domain or a DUF2220 domain or a pfam11796 domain or a DUF3323 domain or a pfam09664 domain or a DUF2399 domain or a COG4924 domain, or any combination thereof.

[1345] A Wadjet defense system (Defense System X) comprises, in some embodiments, a JetA polypeptide comprising a pfam11855 domain or a DUF3375 domain or a pfam09660 domain or a DUF2397 domain or no known domain, or any combination thereof; a JetB polypeptide comprising a pfam13835 domain or a DUF4194 domain or a pfam09661 domain or a DUF2398 domain or no known domain, or any combination thereof; a JetC polypeptide comprising a pfam13555 domain or a pfam13558 domain or a COG4913 domain or a COG1196 domain, or a combination thereof; and a JetD polypeptide comprising a pfam11795 domain or a DUF3322 domain or a pfam09983 domain or a DUF2220 domain or a pfam11796 domain or a DUF3323 domain or a pfam09664 domain or a DUF2399 domain or a COG4924 domain, or any combination thereof.

[1346] In some embodiments, a Wadjet Type I defense system (Defense System Xa) comprises a nucleic acid construct comprising a nucleic acid construct comprising a nucleic acid sequence encoding a JetA polypeptide comprising a pfam11855 domain or a DUF3375 domain, or any combination thereof; a JetB polypeptide comprising a pfam13835 domain or a DUF4194 domain, or any combination thereof; a JetC polypeptide comprising a pfam13555 domain or a pfam13558 domain or a COG4913 domain, or a combination thereof; and a JetD polypeptide comprising a pfam11795 domain or a DUF3322 domain or a pfam09983 domain or a DUF2220 domain or a COG4924 domain, or any combination thereof. In some embodiments, a Wadjet Type I defense system comprises a nucleic acid construct comprising a nucleic acid sequence comprising a jetA, jetB, jetC, jetD gene.

[1347] In some embodiments, a Wadjet Type I defense system (Defense System Xa) comprises a JetA polypeptide comprising a pfam11855 domain or a DUF3375 domain, or any combination thereof; a JetB polypeptide comprising a pfam13835 domain or a DUF4194 domain, or any combination thereof; a JetC polypeptide comprising a pfam13555 domain or a pfam13558 domain or a COG4913 domain, or a combination thereof; and a JetD polypeptide comprising a pfam11795 domain or a DUF3322 domain or a pfam09983 domain or a DUF2220 domain or a COG4924 domain, or any combination thereof. In some embodiments, a Wadjet Type I defense system comprises a JetA polypeptide, a JetB polypeptide, a JetC polypeptide, and a JetD polypeptide.

[1348] In some embodiments, a Defense System Xa comprises a JetA polypeptide comprising a pfam11855 domain or a DUF3375 domain or a combination thereof, or comprising an amino acid sequence having at least 80% identity to a sequence selected from the group referenced in Table 11 rows 2-2322 columns J and K; or a JetB polypeptide comprising a pfam13835 domain or a DUF4194 domain or a combination thereof, or comprising an amino acid sequence having at least 80% identity to a sequence selected from the group referenced in Table 11 rows 2-2322 columns N and O; or a JetC polypeptide comprising a pfam13555 domain or a pfam13558 domain or a COG4913 domain or a combination thereof, or comprising an amino acid sequence having at least 80% identity to a sequence selected from the group referenced in Table 11 rows 2-2322 columns R and S; or a JetD polypeptide comprising a pfam11795 domain or a DUF3322 domain or a pfam09983 domain or a DUF2220 domain or a COG4924 domain or any combination thereof, or comprising an amino acid sequence having at least 80% identity to a sequence selected from the group referenced in Table 11 rows 2-2322 columns V and W; or any combination thereof.

[1349] In some embodiments, a Defense System Xa comprises at least two different polypeptide components selected from a JetA polypeptide comprising a pfam11855 domain or a DUF3375 domain or a combination thereof, or comprising an amino acid sequence having at least 80% identity to a sequence selected from the group referenced in Table 11 rows 2-2322 columns J and K; a JetB polypeptide comprising a pfam13835 domain or a DUF4194 domain or a combination thereof, or comprising an amino acid sequence having at least 80% identity to a sequence selected from the group referenced in Table 11 rows 2-2322 columns N and O; a JetC polypeptide comprising a pfam13555 domain or a pfam13558 domain or a COG4913 domain or a combination thereof, or comprising an amino acid sequence having at least 80% identity to a sequence selected from the group referenced in Table 11 rows 2-2322 columns R and S; and a JetD polypeptide comprising a pfam11795 domain or a DUF3322 domain or a pfam09983 domain or a DUF2220 domain or a COG4924 domain or any combination thereof, or comprising an amino acid sequence having at least 80% identity to a sequence selected from the group referenced in Table 11 rows 2-2322 columns V and W. In some embodiments, a Defense System Xa comprises at least three different polypeptide components selected from a JetA polypeptide comprising a pfam11855 domain or a DUF3375 domain or a combination thereof, or comprising an amino acid sequence having at least 80% identity to a sequence selected from the group referenced in Table 11 rows 2-2322 columns J and K; a JetB polypeptide comprising a pfam13835 domain or a DUF4194 domain or a combination thereof, or comprising an amino acid sequence having at least 80% identity to a sequence selected from the group referenced in Table 11 rows 2-2322 columns N and O; a JetC polypeptide comprising a pfam13555 domain or a pfam13558 domain or a COG4913 domain or a combination thereof, or comprising an amino acid sequence having at least 80% identity to a sequence selected from the group referenced in Table 11 rows 2-2322 columns R and S; and a JetD polypeptide comprising a pfam11795 domain or a DUF3322 domain or a pfam09983 domain or a DUF2220 domain or a COG4924 domain or any combination thereof, or comprising an amino acid sequence having at least 80% identity to a sequence selected from the group referenced in Table 11 rows 2-2322 columns V and W. In some embodiments, a Defense System Xa comprises four different polypeptide components selected from a JetA polypeptide comprising a pfam11855 domain or a DUF3375 domain or a combination thereof, or comprising an amino acid sequence having at least 80% identity to a sequence selected from the group referenced in Table 11 rows 2-2322 columns J and K; a JetB polypeptide comprising a pfam13835 domain or a DUF4194 domain or a combination thereof, or comprising an amino acid sequence having at least 80% identity to a sequence selected from the group referenced in Table 11 rows 2-2322 columns N and O; a JetC polypeptide comprising a pfam13555 domain or a pfam13558 domain or a COG4913 domain or a combination thereof, or comprising an amino acid sequence having at least 80% identity to a sequence selected from the group referenced in Table 11 rows 2-2322 columns R and S; and a JetD polypeptide comprising a pfam11795 domain or a DUF3322 domain or a pfam09983 domain or a DUF2220 domain or a COG4924 domain or any combination thereof, or comprising an amino acid sequence having at least 80% identity to a sequence selected from the group referenced in Table 11 rows 2-2322 columns V and W.

[1350] In some embodiments, a Wadjet Type II defense system (Defense System Xb) comprises a nucleic acid construct comprising a nucleic acid construct comprising a nucleic acid sequence encoding a JetAⁱⁱ polypeptide comprising a pfam09660 domain or a DUF2397 domain, or any combination thereof; a JetBⁱⁱ polypeptide comprising a pfam09661 domain or a DUF2398 domain, or any combination thereof; a JetCⁱⁱ polypeptide comprising a pfam13558 domain; and a JetDⁱⁱ polypeptide comprising a pfam11796 domain or a DUF3323 domain or a pfam09664 domain or a DUF2399 domain, or any combination thereof. In some embodiments, a Wadjet Type II defense system comprises a nucleic acid construct comprising a nucleic acid sequence comprising a jetAⁱⁱ, jetBⁱⁱ, jetCⁱⁱ, jetDⁱⁱ gene.

[1351] In some embodiments, a Wadjet Type II defense system (Defense System Xb) comprises a JetAⁱⁱ polypeptide comprising a pfam09660 domain or a DUF2397 domain, or any combination thereof; a JetBⁱⁱ polypeptide comprising a pfam09661 domain or a DUF2398 domain, or any combination thereof; a JetCⁱⁱ polypeptide comprising a pfam13558 domain; and a JetDⁱⁱ polypeptide comprising a pfam11796 domain or a DUF3323 domain or a pfam09664 domain or a DUF2399 domain, or any combination thereof. In some embodiments, a Wadjet Type II defense system comprises a JetAⁱⁱ polypeptide, a JetBⁱⁱ polypeptides, a JetCⁱⁱ polypeptide, and a JetDⁱⁱ polypeptide.

[1352] In some embodiments, a Defense System Xb comprises a JetAⁱⁱ polypeptide comprising a pfam09660 domain or a DUF2397 domain or a combination thereof, or comprising an amino acid sequence having at least 80% identity to a sequence selected from the group referenced in Table 11 rows 2323-2844 columns J and K; or a JetBⁱⁱ polypeptide comprising a pfam09661 domain or a DUF2398 domain or a combination thereof, or comprising an amino acid sequence having at least 80% identity to a sequence selected from the group referenced in Table 11 rows 2323-2844 columns N and O; or a JetCⁱⁱ polypeptide comprising a pfam13558 domain or comprising an amino acid sequence having at least 80% identity to a sequence selected from the group referenced in Table 11 rows 2323-2844 columns R and S; or a JetDⁱⁱ polypeptide comprising a pfam11796 domain or a DUF3323 domain or a pfam09664 domain or a DUF2399 domain or a combination thereof, or comprising an amino acid sequence having at least 80% identity to a sequence selected from the group referenced in Table 11 rows 2323-2844 columns V and W; or any combination thereof.

[1353] In some embodiments, a Defense System Xb comprises at least two different polypeptide components selected from a JetAⁱⁱ polypeptide comprising a pfam09660 domain or a DUF2397 domain or a combination thereof, or comprising an amino acid sequence having at least 80% identity to a sequence selected from the group referenced in Table 11 rows 2323-2844 columns J and K; a JetBⁱⁱ polypeptide comprising a pfam09661 domain or a DUF2398 domain or a combination thereof, or comprising an amino acid sequence having at least 80% identity to a sequence selected from the group referenced in Table 11 rows 2323-2844 columns N and O; a JetCⁱⁱ polypeptide comprising a pfam13558 domain or comprising an amino acid sequence having at least 80% identity to a sequence selected from the group referenced in Table 11 rows 2323-2844 columns R and S; and a JetDⁱⁱ polypeptide comprising a pfam11796 domain or a DUF3323 domain or a pfam09664 domain or a DUF2399 domain or a combination thereof, or comprising an amino acid sequence having at least 80% identity to a sequence selected from the group referenced in Table 11 rows 2323-2844 columns V and W. In some embodiments, a Defense System Xb comprises at least three different polypeptide components selected from a JetAⁱⁱ polypeptide comprising a pfam09660 domain or a DUF2397 domain or a combination thereof, or comprising an amino acid sequence having at least 80% identity to a sequence selected from the group referenced in Table 11 rows 2323-2844 columns J and K; a JetBⁱⁱ polypeptide comprising a pfam09661 domain or a DUF2398 domain or a combination thereof, or comprising an amino acid sequence having at least 80% identity to a sequence selected from the group referenced in Table 11 rows 2323-2844 columns N and O; a JetCⁱⁱ polypeptide comprising a pfam13558 domain or comprising an amino acid sequence having at least 80% identity to a sequence selected from the group referenced in Table 11 rows 2323-2844 columns R and S; and a JetDⁱⁱ polypeptide comprising a pfam11796 domain or a DUF3323 domain or a pfam09664 domain or a DUF2399 domain or a combination thereof, or comprising an amino acid sequence having at least 80% identity to a sequence selected from the group referenced in Table 11 rows 2323-2844 columns V and W. In some embodiments, a Defense System Xb comprises four different polypeptide components selected from a JetAⁱⁱ polypeptide comprising a pfam09660 domain or a DUF2397 domain or a combination thereof, or comprising an amino acid sequence having at least 80% identity to a sequence selected from the group referenced in Table 11 rows 2323-2844 columns J and K; a JetBⁱⁱ polypeptide comprising a pfam09661 domain or a DUF2398 domain or a combination thereof, or comprising an amino acid sequence having at least 80% identity to a sequence selected from the group referenced in Table 11 rows 2323-2844 columns N and O; a JetCⁱⁱ polypeptide comprising a pfam13558 domain or comprising an amino acid sequence having at least 80% identity to a sequence selected from the group referenced in Table 11 rows 2323-2844 columns R and S; and a JetDⁱⁱ polypeptide comprising a pfam11796 domain or a DUF3323 domain or a pfam09664 domain or a DUF2399 domain or a combination thereof, or comprising an amino acid sequence having at least 80% identity to a sequence selected from the group referenced in Table 11 rows 2323-2844 columns V and W.

[1354] In some embodiments, a Wadjet Type III defense system (Defense System Xc) comprises a nucleic acid construct comprising a nucleic acid construct comprising a nucleic acid sequence encoding a JetDⁱⁱⁱ polypeptide comprising a pfam09664 domain or a DUF2399 domain or a pfam09983 domain or a DUF2220 domain, or any combination thereof; a JetAⁱⁱⁱ polypeptide comprising no known domain; a JetBⁱⁱⁱ polypeptide comprising no known domain; and a JetCⁱⁱⁱ polypeptide comprising a COG1196 domain. In some embodiments, a Wadjet Type III defense system (Defense System Xc) comprises a nucleic acid construct comprising a nucleic acid construct comprising a nucleic acid sequence encoding a JetDⁱⁱⁱ polypeptide comprising a pfam09664 domain or a DUF2399 domain or a pfam09983 domain or a DUF2220 domain, or any combination thereof; a JetAⁱⁱⁱ polypeptide; a JetBⁱⁱⁱ polypeptide; and a JetCⁱⁱⁱ polypeptide comprising a COG1196 domain, said JetAⁱⁱⁱ polypeptide being encoded by a gene positioned within 5 genes of a gene encoding JetDⁱⁱⁱ and or JetCⁱⁱⁱ in a genome of a prokaryote, and said JetBⁱⁱⁱ polypeptide being encoded by a gene positioned within 5 genes of a gene encoding JetDⁱⁱⁱ and or JetCⁱⁱⁱ in the genome of the prokaryote. In some embodiments, a Wadjet Type III defense system comprises a nucleic acid construct comprising a nucleic acid sequence comprising a jetDⁱⁱⁱ, jetAⁱⁱⁱ, jetBⁱⁱⁱ, and a jetCⁱⁱⁱ gene.

[1355] In some embodiments, a Wadjet Type III defense system (Defense System Xc) comprises a JetDⁱⁱⁱ polypeptide comprising a pfam09664 domain or a DUF2399 domain or a pfam09983 domain or a DUF2220 domain, or any combination thereof; a JetAⁱⁱⁱ polypeptide; a JetBⁱⁱⁱ polypeptide; and a JetCⁱⁱⁱ polypeptide comprising a COG1196 domain. In some embodiments, a Wadjet Type III defense system (Defense System Xc) comprises a JetDⁱⁱⁱ polypeptide comprising a pfam09664 domain or a DUF2399 domain or a pfam09983 domain or a DUF2220 domain, or any combination thereof; a JetAⁱⁱⁱ polypeptide; a JetBⁱⁱⁱ polypeptide; and a JetCⁱⁱⁱ polypeptide comprising a COG1196 domain, said JetAⁱⁱⁱ polypeptide being encoded by a gene positioned within 5 genes of a gene encoding JetDⁱⁱⁱ and or JetCⁱⁱⁱ in a genome of a prokaryote, and said JetBⁱⁱⁱ polypeptide being encoded by a gene positioned within 5 genes of a gene encoding JetDⁱⁱⁱ and or JetCⁱⁱⁱ in the genome of the prokaryote. In some embodiments, a Wadjet Type III defense system comprises a JetDⁱⁱⁱ polypeptide, a JetAⁱⁱⁱ polypeptide, a JetBⁱⁱⁱ polypeptide, and a JetCⁱⁱⁱ polypeptide.

[1356] In some embodiments, a Defense System Xc comprises a JetAⁱⁱⁱ polypeptide comprising an amino acid sequence having at least 80% identity to a sequence selected from the group referenced in Table 11 rows 2845-3174 columns J and K; or a JetBⁱⁱⁱ polypeptide comprising an amino acid sequence having at least 80% identity to a sequence selected from the group referenced in Table 11 rows 2845-3174 columns N and O; or a JetCⁱⁱⁱ polypeptide comprising a COG1196 domain or comprising an amino acid sequence having at least 80% identity to a sequence selected from the group referenced in Table 11 rows 2845-3174 columns R and S; or a JetDⁱⁱⁱ polypeptide comprising a pfam09983 domain or a pfam09664 domain or a DUF2220 or a DUF2399 domain or a combination thereof, or comprising an amino acid sequence having at least 80% identity to a sequence selected from the group referenced in Table 11 rows 2845-3174 columns V and W; or any combination thereof.

[1357] In some embodiments, a Defense System Xc comprises at least two different polypeptide components selected from a JetAⁱⁱⁱ polypeptide comprising an amino acid sequence having at least 80% identity to a sequence selected from the group referenced in Table 11 rows 2845-3174 columns J and K; a JetBⁱⁱⁱ polypeptide comprising an amino acid sequence having at least 80% identity to a sequence selected from the group referenced in Table 11 rows 2845-3174 columns N and O; a JetCⁱⁱⁱ polypeptide comprising a COG1196 domain or comprising an amino acid sequence having at least 80% identity to a sequence selected from the group referenced in Table 11 rows 2845-3174 columns R and S; and a JetDⁱⁱⁱ polypeptide comprising a pfam09983 domain or a pfam09664 domain or a DUF2220 or a DUF2399 domain or a combination thereof, or comprising an amino acid sequence having at least 80% identity to a sequence selected from the group referenced in Table 11 rows 2845-3174 columns V and W. In some embodiments, a Defense System Xc comprises at least three different polypeptide components selected from a JetAⁱⁱⁱ polypeptide comprising an amino acid sequence having at least 80% identity to a sequence selected from the group referenced in Table 11 rows 2845-3174 columns J and K; a JetBⁱⁱⁱ polypeptide comprising an amino acid sequence having at least 80% identity to a sequence selected from the group referenced in Table 11 rows 2845-3174 columns N and O; a JetCⁱⁱⁱ polypeptide comprising a COG1196 domain or comprising an amino acid sequence having at least 80% identity to a sequence selected from the group referenced in Table 11 rows 2845-3174 columns R and S; and a JetDⁱⁱⁱ polypeptide comprising a pfam09983 domain or a pfam09664 domain or a DUF2220 or a DUF2399 domain or a combination thereof, or comprising an amino acid sequence having at least 80% identity to a sequence selected from the group referenced in Table 11 rows 2845-3174 columns V and W. In some embodiments, a Defense System Xc comprises four different polypeptide components selected from a JetAⁱⁱⁱ polypeptide comprising an amino acid sequence having at least 80% identity to a sequence selected from the group referenced in Table 11 rows 2845-3174 columns J and K; a JetBⁱⁱⁱ polypeptide comprising an amino acid sequence having at least 80% identity to a sequence selected from the group referenced in Table 11 rows 2845-3174 columns N and O; a JetCⁱⁱⁱ polypeptide comprising a COG1196 domain or comprising an amino acid sequence having at least 80% identity to a sequence selected from the group referenced in Table 11 rows 2845-3174 columns R and S; and a JetDⁱⁱⁱ polypeptide comprising a pfam09983 domain or a pfam09664 domain or a DUF2220 or a DUF2399 domain or a combination thereof, or comprising an amino acid sequence having at least 80% identity to a sequence selected from the group referenced in Table 11 rows 2845-3174 columns V and W.

[1358] In some embodiments, a JetAⁱⁱⁱ polypeptide comprises identical domains as are present in JetA and JetAⁱⁱ. In some embodiments, a JetAⁱⁱⁱ polypeptide comprises homologous domains with domains present in JetA and JetAⁱⁱ, wherein the amino acid sequences comprise at least 80% homology. In some embodiments, a JetBⁱⁱⁱ polypeptide comprises identical domains as are present in JetB and JetBⁱⁱ. In some embodiments, a JetBⁱⁱⁱ polypeptide comprises homologous domains with domains present in JetB and JetBⁱⁱ, wherein the amino acid sequences comprise at least 80% homology.

[1359] In some embodiments, a Wadjet Type I defense system having an anti-plasmid activity comprises a nucleic acid construct comprising a nucleic acid sequence encoding a JetA polypeptide, a JetB polypeptide, a JetC polypeptide, and a JetD polypeptide. In some embodiments, a Wadjet Type I defense system having an anti-plasmid activity comprises a nucleic acid construct comprising a nucleic acid sequence comprising a jetA gene, a jetB gene, a jetC gene, and a jetD gene.

[1360] In some embodiments, a Wadjet Type II defense system having an anti-plasmid activity comprises a nucleic acid construct comprising a nucleic acid sequence encoding a JetAⁱⁱ polypeptide, a JetBⁱⁱ polypeptide, a JetCⁱⁱ polypeptide, and a JetDⁱⁱ polypeptide. In some embodiments, a Wadjet Type II defense system having an anti-plasmid activity comprises a nucleic acid construct comprising a nucleic acid sequence comprising a jetAⁱⁱ gene, a jetBⁱⁱ gene, a jetCⁱⁱ gene, and a jetDⁱⁱ gene.

[1361] In some embodiments, a Wadjet Type III defense system having an anti-plasmid activity comprises a nucleic acid construct comprising a nucleic acid sequence encoding a JetAⁱⁱⁱ polypeptide, a JetBⁱⁱⁱ polypeptide, a JetCⁱⁱⁱ polypeptide, and a JetDⁱⁱⁱ polypeptide. In some embodiments, a Wadjet Type III defense system having an anti-plasmid activity comprises a nucleic acid construct comprising a nucleic acid sequence comprising a jetAⁱⁱⁱ gene, a jetBⁱⁱⁱ gene, a jetCⁱⁱⁱ gene, and a jetDⁱⁱⁱ gene.

[1362] In some embodiments, the Wadjet Type I anti-plasmid defense system comprises a nucleic acid construct comprising nucleic acid sequences encoding a cassette comprising jetA, jetB, jetC, and jetD genes. In some embodiments, a construct comprising the Wadjet Type I defense system encodes one component of the defense system, whereby multiple constructs may be used to assemble the functional defense system.

[1363] In some embodiments, a Wadjet Type I (Defense System Xa) gene cassette comprises the nucleic acid sequence:

(SEQ ID NO: 17; construct 59 of Table 4)

| | |
|---|---|
| 1 | gttgatcaag aaacaactta tagcgtgtag tttttgttgg ataaaatttt aaaagttatg |
| 61 | taatttgatg caggggaatt gaaacgtaat atagaaattt ataattataa ttatagagtt |
| 121 | aaatgatggt gcttaatgga agacgatgat agcgaaaaag gaggctgaaa tgaaaaaact |
| 181 | atttgaatgc attccggaaa attatttcaa tttgtttgct gggaaaaatc gggggtttta |
| 241 | tgctgaagtt gcttttttac tatatgaaca attccatatc aatcgagctg gtattttata |
| 301 | cagtttgatg aaagatgagg ttcaagaatt aatagaaacg aaagaagagt taggagaatg |
| 361 | tattgatata gaagatgaaa tagaagaaaa agagcaagac agtgctggga gagcaaatga |
| 421 | ggtgcttcga cgtttaaaga aacttaaatg gattgatgta gaagtacgtg atcaatttga |
| 481 | agagtttata gtgcttccag tgtattctag ccgtattttg gctgtgctaa aggaaatttg |
| 541 | tgaaaataga acaattgaat atcaaagata ttgttttacg acatatcaat tattaacagg |
| 601 | agtggaggcg gaggagcgcc cagcttcagc tattttggag tctgaaaaat atagtgagca |
| 661 | actttatgat gaattaacaa ttttactgca caatatgaaa aatcatatgg aaacaattgc |
| 721 | agctaaagat gatatacaac aagtgttaga gcatcatttt ggagaatata aaaaagatat |
| 781 | aattgataaa agttaccatc gtttaaggac atcggatcat gtgtcgagat atcgaaataa |
| 841 | aatattggag cgtatacaga cttggttttt agatgataaa ttcatgaaac gtgctgccga |
| 901 | agatgctgta gaaagtggat attctgctaa ctgggaagaa gcaatggatg gattaagtaa |
| 961 | gaaaatgtat agggttgaag aaatttatag taatttagat gaaatttgta atcaaattga |
| 1021 | tgcacgccat tatcaatatt tacgagcagt tttagatcgt tctagatatt taagtactta |
| 1081 | taatgacagt atcaattaca aaatatctta tattttagaa catatagggc aaatggacga |
| 1141 | gaatatactc gattcttctc tgtttcgttt agtacagttg cggcaacttc aagaagcgtc |
| 1201 | actgttatcc ccacgtaaga aaaaaggtgt atatgaacca gaacagcatg aggttaatga |
| 1261 | aattagtgat gagatgcgag aggagctaaa ggctgaaaat ataagacgta tggaaaaggt |
| 1321 | tatgaatcga aagaaaatcc aaaaatttgt gttagaagca atgaaggggc gtcaagagat |
| 1381 | agagatgagt gaattgaatt tgcaaaatga ggatgacgct ttgtatttaa tttacgttta |
| 1441 | tttgtatggt tatagtaagg gaactggata caagcttagt gaagagccac ctgaatttat |
| 1501 | tacacaaaag gggtatacat tttctaatcg tacgataaaa cgagaaaatt agggggaagt |
| 1561 | tatgcaaaat gtatcggaaa gagaaagaga agagatgggg attgttgtta attatttatt |
| 1621 | ctcccataat tttttattga aagaatttga acgtgagaag tatcacctgg cagtacggaa |
| 1681 | taaagatatt attaagcaat atttacaggt aattggttgg gattttattg tggatgaaaa |
| 1741 | gcatgggtgt attgttattg tttcgccaca ttacgagcat cgtttgaaat tgaagaaaga |
| 1801 | cgaaacgatt tggttgttag tattaagact tatttatgag gaaaagcgta gcgctctatc |
| 1861 | tattagtcaa tatcccttta ccactcttca agaaatcaag gggaaatatg agacgtttcg |
| 1921 | attaccgttt gtatcaaaaa caaaattacg tgaacttgtg cagattggaa agcaaaatca |
| 1981 | acttttgaga ccaattgata atgacataga gtcggatgat tgtcgttttc agcttttcca |
| 2041 | ttcatgcatt catgtgctgc aacaaggaga tttaaatgta ttgtatgaaa aaataaaatc |
| 2101 | ttatagtgag ggtggggatc acagtgaaat ggatgaagaa actacgatta attaattggc |
| 2161 | attattatag tgatgaaaca attttatttg gaaaacaaac agtgatatct ggacatacag |
| 2221 | gagcagggaa atcgactgtt attgatgctt tacaagtcct atttatttcc gatgagcgga |
| 2281 | agattaaatt taattcagca gcatatgagg aggccaatcg tactttaatt aattatttgc |
| 2341 | gggggaagat aggtacagaa gaaaaacctt ttgtaagaga agggtatttt acaacatata |
| 2401 | ttgttgctga gttttatgat gagaaggcag gagagagttt tgtaattggt atttcaattg |
| 2461 | atgtatttaa agatgatgaa aaagtaaaag agtattttat tataccgaaa tctgagatta |
| 2521 | atatgatttc gttttttagt acaaaagacg agaaacgtta tgtggaaaag caagcagact |
| 2581 | tttgtaaaaa aataagagaa caatttccag aggctataat tgaaaaaagt tcaaatcaat |
| 2641 | atcaaaaggc tttattacaa cgttttggtg gattacatga aagatttgtt aaaacgtttg |
| 2701 | caagagcatt atcgtttaaa ccaatcgata acatgaaaga ttttgtatat aaaaatatat |
| 2761 | tggacgaaaa agaattaaaa atcgacgtta tgaggaatat ttttcaaaca catgaagaat |
| 2821 | tgcaaagaga attagaagaa ttaaaagaac gaaaggaaga gctggagcga atagataata |
| 2881 | tttatttgga atgtgtaaag ctggaagcgg atatttccat acaagaatat gttcttagag |
| 2941 | ggctagagta tttattaata caagaagaaa agagcatgtg taaaaaaagt attgaacaga |
| 3001 | gagaaaaaga attaagaaaa tgtgaatcag atcaaaaaaa gacagcggaa caaaaagagc |
| 3061 | atgctagaaa aaaagagact gagtatgaaa ttaagattaa ggatagtgct gaacaaaaaa |
| 3121 | gacaaaaaca attacaagaa caaatagctc aagcgaaaaa agaatgtggt gatttagagt |
| 3181 | gtaccaaaaa catatatgtt catagtttag caagagaaga aaaggatgtt tctagtcttt |
| 3241 | taaattatca aggtaatgaa tatttctctt taagcaagga cgagaagcat gcattggaaa |
| 3301 | taggaagaga ttgtctagcc ttcttgtcac ataatgatgg tactggaggg aatagggaag |
| 3361 | agcaaacatt aaataaactt ggagagagtt taaaaagaat tagtgggcgt ttttataaga |
| 3421 | gtacagcaga attggaacac agatctgctg aattgaaaac agaagagaaa gaattacttt |
| 3481 | ctgatataga gaatttaaaa agaaggaagc gtccttatcc catgtctgtt gaaaagttga |
| 3541 | agggattact agaaaaacat ttagaggatc aatcgaaggt atggattctt tgtgaagagt |
| 3601 | tagaaataaa aaatgataaa tggcgaaatg ccctagaagg gtatttgaat actcaaagat |
| 3661 | ttgatatttt ggtagaacca catatgtttg cgactgcact gtctatctac gaaaaggaaa |
| 3721 | agtggaatct tggtcttgaa ggtgttggac ttgttgatac tgaaaaagaa caaacatatt |
| 3781 | tagggaaagt tgagaagggt tctttagctg aagagatagt aggtggtaac ccaatagtac |
| 3841 | aggctcgaat tcatcattta ttaggtaggg ttataaaggc agacaatgaa caagaattac |
| 3901 | gaaagtataa aacagctgtt actgcgacat gtatgagtta tcaacgtctt gtagcacgcc |
| 3961 | aaattcctag aaaagtatat gaaaccccat atataggtgc acatgctatt caaaagcaat |
| 4021 | tagaaattaa agaagaaaac ttaaaggaaa ttcaaacaga actgcaaata gtaggatact |
| 4081 | atattaaaga ctttaagaaa tggattgaaa ttttagaaga taagcaatcg gattataaga |
| 4141 | attatatatt aaatttctca ttaaacgata gtatcttgga gtttaataag aacataaata |
| 4201 | aatggaagag tgaactaaat actcttgatt tgtcacgttt agaaagttta cgccaaaagt |
| 4261 | tgaaagagtg gaatggaaaa tataatcaat ttaatggaga agaaggtaga ctgtttgaac |
| 4321 | aaattgggaa ggtgaaggaa gaacttcaaa gagtgaatgc tgagttatgg aaaaaggaaa |
| 4381 | aggccgcaac agagatttta gagaagtgga aaaattggaa gtttgaatat agaatcgaat |
| 4441 | tattacaaga ggctgagcaa aggtacgagc aagctatttc tacaaataaa gcttatggtg |
| 4501 | ctataaaaaa taaatacgaa aataataaaa aagaaaatca aaataaatac gaagaaaaaa |
| 4561 | ggggttttct agaaagtgaa cgtaagtctt ataatgaagc gcgaactttc caaggaatta |
| 4621 | tacaggctaa agataataag cagtacgaag aagcgctccg gaaaattgca aacctcgata |
| 4681 | tcccaaagtt tgaacaagag atcaaggaaa cgttgcagca agctgaagag gaatttcagt |
| 4741 | ctcactttat ttacaagatg cgtgaggcta ttcaagcggc gcgtagagaa tttaatcaat |
| 4801 | tgaaccatgc gttaggaaga tttaaattcc gaaatgacac gtatcgattt gtaataaagc |
| 4861 | caagtgaaca atataaaaaa ttttatgatg taattatgga tgaaagagta cagccggaga |
| 4921 | tatctctatt tgattttggt gatgaagata gggcggagat tttaaaggac ttatttggta |
| 4981 | gattagtggt gggcgagtat ggtgaaaacg aagagtttgt ggactatcgt aattatctcg |
| 5041 | attttgattt aagcattaat aatgaaaatg gaacaagatt tatgtctaac ttattacgtg |
| 5101 | agcaatctgg tggagagacg caaacacctt tttatattgc catcctagca tcatttcaac |
| 5161 | acctttatcg aaataaaaat accattcgtt tagtagtgtt tgatgaggct tttaataaaa |
| 5221 | tggatgaaga gcggattcaa attagtttac gtcttattaa acagttggac ttgcaattaa |
| 5281 | ttgcagctgt gccagatgag aaaatggctc atatggcagc tgaggcagat acagctataa |
| 5341 | taattaaccg aatagggcat tcatgtttta ctgacatatt atcttatcca agggaggacg |
| 5401 | aggcaattgg attacaagag caagattctt tcagtcttat tgaataaata tgaaaatagt |
| 5461 | aaaactgctc atacaggtga gagaagtgct cagcgccctc aattttcatt tcggcaaaaa |
| 5521 | catgaacttt ctaaagcata taatgatgaa atggattata cgaaccgatt agaaattaat |
| 5581 | actgcattaa aggacttaat tcgtaaaaaa attattgaag tgaaatggga aaagtgggaa |
| 5641 | gagaatcgaa ttgctgaaaa ggtttattta cagtatgatt ttattccaca agcttataga |
| 5701 | gaagctggta tagaaccaaa aattgaaaag atgaatagga ttttaaaagt gttagaacca |
| 5761 | cttgctgttc attcatggga gtgggttcga caatggtata aagaagtaca acagtcgttt |
| 5821 | caaaataata aaacggcacg aattaattta aacgatgtta aaggatatga actacttgta |
| 5881 | aaagcacttt ctagattaga aggtttggaa gatagtatac cgaaaaggac ctttagccaa |
| 5941 | ttagtattcg gggatacaaa actttttgaa actacgatac aaaaccgatt attaataata |
| 6001 | tataaaaggt acggagatat agaatatgaa agtgataaag aatatttaga gagtattggg |
| 6061 | attttagaga atatccaacc tgtctatata aaaggaaatg ttgatattcg tgttagagga |
| 6121 | gagaagattg ctctcggttc ctttcctggt gggttcggtt taatggatga aacaataaaa |
| 6181 | gaactagaaa ttcagtatgt acacgatgaa agtataatgc ttattgaaaa catgaccaca |
| 6241 | tactatgaac aaattaaaaa aaataataat attttattta tctatacagg tgggtttcct |
| 6301 | aagaagaatg tacagcaatt gttaaaaaag ttgaatatat atttggaaaa tcatccagtt |
| 6361 | ccagtatatc actatggaga tctggactac ggaggaatcc aaatatttga gtacattaag |
| 6421 | cgttcgtttt tttcagggct tgagccgtat atgatggatg tagctaccta caggcaattt |
| 6481 | gtaaagtacg ggatggaatt tggtgaaggg tatgaagaaa aattactgaa gatgttagag |
| 6541 | aatgagcagt attctttatg gcatgagtta attaaagaaa tgcttaaaga aaagaagcgt |
| 6601 | gttgagcagg aagtgatagt tagaaacgta atttagtgta tttatataaa tttaaaaagg |
| 6661 | atgtctatag accaggataa cggtttatgg gcatttttta ttaggttttg tataaaagag |
| 6721 | atttagttag aggaaatgag atttaatatg ttttgtaaac gccataatat taacgcctga |
| 6781 | atttttttag gagaggaaag tagagtgttg gctttgtttt tcgtaattaa ctaagtaatg |
| 6841 | tgagaagttt tttatatggg gttatttata taattattaa gtgctagata atgaattgtt |
| 6901 | agtccatcct tattttggag gcatgttcta attaaataaa ctggttggat gtaataagtg |
| 6961 | aattcctggt aatttatcgt tggaaaaaaa tatatattat gtataattag tgtataaata |
| 7021 | aaattctctg aaatttgaaa ggtgataaaa. |

[1364] The coding regions for each of the jetA, jetB, jetC, and jetD gene sequences within this embodiment of a Wadjet Type I cassette (SEQ ID NO: 17) are as follows: nucleotides 146-1552 encode an embodiment of a JetA polypeptide, nucleotides 1562-2155 encode an embodiment of a JetB polypeptide, nucleotides 2133-5447 encode an embodiment of a JetC polypeptide, and nucleotides 5551-6636 encode an embodiment of a JetD polypeptide.

[1365] In some embodiments, a Defense System Xa comprising a JetA polypeptide, a JetB polypeptide, a JetC polypeptide, and a JetD polypeptide is encoded by the nucleic acid sequence set forth in SEQ ID NO: 17. In some embodiments, a Defense System Xa comprising a JetA polypeptide, a JetB polypeptide, a JetC polypeptide, and a JetD polypeptide, is encoded by a nucleic acid sequence having at least 80% homology to the sequence set forth in SEQ ID NO: 17. In some embodiments, a Defense System Xa comprising a JetA polypeptide, a JetB polypeptide, a JetC polypeptide, and a JetD polypeptide, is encoded by a nucleic acid sequence having at least 85% homology, or 90% homology, or 95% homology, or 97% homology, or 98% homology, or 99% homology to the sequence set forth in SEQ ID NO: 17. In some embodiments, a Defense System Xa comprising a JetA polypeptide, a JetB polypeptide, a JetC polypeptide, and a JetD polypeptide, is encoded by a nucleic acid sequence having at least 80% identity to the sequence set forth in SEQ ID NO: 17. In some embodiments, a Defense System Xa comprising a JetA polypeptide, a JetB polypeptide, a JetC polypeptide, and a JetD polypeptide, is encoded by a nucleic acid sequence having at least 85% identity, or 90% identity, or 95% identity, or 97% identity, or 98% identity, or 99% identity to the sequence set forth in SEQ ID NO: 17.

[1366] In some embodiments, the Wadjet Type II anti-plasmid defense system comprises a nucleic acid construct comprising nucleic acid sequences encoding a cassette comprising jetAⁱⁱ, jetBⁱⁱ, jetⁱⁱC, and jetⁱⁱD genes. In some embodiments, a construct comprising the Wadjet Type II defense system encodes one component of the defense system, whereby multiple constructs may be used to assemble the functional defense system.

[1367] In some embodiments, a Wadjet Type II (Defense System Xb) gene cassette comprises the nucleic acid sequence:

(SEQ ID NO: 18; construct 60 of Table 4)

| | |
|---|---|
| 1 | tctttgggtt cctttacttt ttgtaaaaaa tttaattctt tgcctgaagt atttcgaaaa |
| 61 | actgaaagcc tttaaaaaga atttcaccaa tcagtttaat tacagaccaa gattacaata |
| 121 | aatttaaaac cattcgatgt caatgtttaa atggaaaaac gtaagtatag gaatccttag |
| 181 | ttcaatatta tacaatggga ataatagaca aaaaatagga tgatgatcca tggattcaac |
| 241 | aatgaaaaaa ataatagagg ccagttattt aacagccgac tccgcggcac actatcgaac |
| 301 | gattcttcgc tatttttatc accagcacga aagaatgaga gattttattg caccggaaga |
| 361 | gttattggaa catatgcgtt cgatacctgc cttcgcggac tttcaagagg accagctcca |
| 421 | ccagcaatta gcgcagcttg taaaatggaa taatttaatt gccaggcagg atatgacaaa |
| 481 | cgcaaaaaca attgaagaat ataaaaagaa acggttccgt tatcaatgta caccctacac |
| 541 | ggttgagatt gagagaatga ttgtgcaact agaaaaatta ggagatacgt tccaagggtc |
| 601 | gttagaacgc tcccaatttg atcgcctttt ccaagcaata accagccttc aaaatgaact |
| 661 | agagaatgac ctaaacaaat cggcagaaga atatatgcgg atttgggagg acgtatttcg |
| 721 | ctattttcaa acgattcgta ccagcactgc tgattatatt gcttatatta atagtgaaca |
| 781 | aaccgatcaa cgaatgcaaa cagaggcatt tctagtctat aaaaatcagt ttacaacata |
| 841 | tttgcgagat tttattgtat ccttgcaaaa aacatcgctg caaatccagc attcattatc |
| 901 | agaattaacc ttggaacggt tacagcattt ttttcaaaaa ttaatcgagc atcgcggggc |
| 961 | aattccccgt cttgaggatg tttcgtcatc tacaaacgat tggcttactg aatatgagga |
| 1021 | atattggttt tcattacggc agtggttttt agggtcggct gttcagcaaa gtgaactaga |
| 1081 | tatccttcag tggcagacca atgaaatgat tcgccggatg acaagatacg ttcagcgcat |
| 1141 | cggtgaaagg cagcagcatt ttcgcagccg aaaaaaggac tatctgcaat tatcaaaatg |
| 1201 | gtttgttgaa tgcagggata gtgaggaagc tcataaactt tcagcagttg tattcggctc |
| 1261 | gatgacgatt caacatctcc agcttgagga agcgaccact gaaaaccttc atgtcgatac |
| 1321 | atgggatgag gcaccgactg aattaacgat aaaaccgaga acggtccgct accgtgaaaa |
| 1381 | aacaaaaccg ggatcgttta actcgaatga acagaagaaa aaagagcagc gagaactcta |
| 1441 | tttaaaggaa agagaacaag agaaaaagtt aatcgaaaaa tatatgaccc aaggtaaaat |
| 1501 | tacgctttca gcactctcga cagttgaacc attcatccgc aaggttttgt taagctggat |
| 1561 | tgggaaatca atggcggcca aaaatcgcat ggtcaagact gattacgggc ttcacgtaaa |
| 1621 | ggtaatgctt gattatgaga aaactattac cttacaagct gaggatggca atttactaat |
| 1681 | gcctgatgcg acattcttgt ttgaggagac taggtgatga taatggaaca aacgcaatta |
| 1741 | ttcgatgaaa aggcaatcca aggaatggac atcttgtttc atcattactg gatcttacgt |
| 1801 | gccgaacaac ctgaatggta tcagctgatt cgtgagcggg agaaggtatt gcgccgctat |
| 1861 | cttgatgaaa agttcggcct gcggctaatt gttcatcaac attttattaa actggaaaaa |
| 1921 | attcctgttg aaccggaagg ctggatgggc atccaagatt tccaagagcc aatggactat |
| 1981 | gcgatttttt gctgcgcact tgccttttta gaggggaaag cagtggatga acagtttttg |
| 2041 | ctttccgaac tatgtcaaga gattcaagcc gattatcctg gagattttcc gcttgattgg |
| 2101 | acgctctata cccaccggaa atcattgata agagctgtaa aagttttgat ggaatttcag |
| 2161 | ctcatacgaa ccattgatgg ggatatcggc cgcttcgatc aaaatgaaga gcaggaagtt |
| 2221 | ttatatgaag ctagcaccta tagtcgatat ttcatgagaa catatccaga tgatttttcg |
| 2281 | agctatcagc actggagcga gttactaaaa gaagattgga aattgaacca agaggatgaa |
| 2341 | cgtaggaagc gggtgtaccg caagctgttc ttttcacctg gtttgcatcg gctagatcaa |
| 2401 | caggatcctg attttctcta tatccggaac tatcgtaacc gcttagcaga agatattgaa |
| 2461 | aagcacagtg agtataaact ccatgtctat aaaaatacgg catttttatc gattgcggag |
| 2521 | ccaaggcaat atcaacaggt ttttcctaat tccaaggcat ccactgacat tatccttcag |
| 2581 | ttgtcaaagt acattcatgg ggagcctgag cgcttcaaag caaacgaaaa tggtgaaata |
| 2641 | ctgatgacgg aaggtgagtt tgaacaagtt gtggatgatt tacggcagca atttggaaca |
| 2701 | ggctgggcaa agtattttcg cgatatgagt acaaaaggaa ttcgaacgga actgcttcgt |
| 2761 | gccatgaagg attggatgat ggcggaagtg gattcagaaa cttctcttat tcggattaag |
| 2821 | tcattaacag gggtcatgac gggggaatat ccgagtgatt ttcaaacagg aggaacagaa |
| 2881 | tgatgacaga ggcaaaatgg gtgatgaacc gtgcggggtt attgaatttt tggtattacg |
| 2941 | atgatgaaat ttttcctttc tcggatggaa agctactgct taggggaacg aacggctccg |
| 3001 | ggaaatctgt aaccatgcaa agcttcctgc ctgttttgtt agacgggaaa aaatcacctg |
| 3061 | accgactcga tccatttgga tctaaagccc gcagaatgga agattattta ctcggggaaa |
| 3121 | aagaggtggt cgatcgtgat gagcgtacag ggtatctttt tatcgaatat aaaaaggccg |
| 3181 | gcgtagagcg atacattaca actgggatcg ggatgcaagc caagcggcat aaaggaatta |
| 3241 | agtcttggta ttttgtgatt accgataatc gcagaattgg atatgatttt gaacttgcac |
| 3301 | attcgcaact aggagaccga gttccttttt ccgcaaagga actggaaaat cggatcggag |
| 3361 | agggcggcta tgttgttcat acccagcgcg aatatatgga gctggtgaat aaatatattt |
| 3421 | ttggtttcca atcaaatgaa gcttatgaag acttgatcaa gcttttaatc caattacgaa |
| 3481 | gtcctaaact ttcgaaggat tttaaaccga cagtgattta tgaaatatta gagtcggcct |
| 3541 | tgcctccttt gaccgatgat gagttaaggc atctatctga taccattgaa agtatggatc |
| 3601 | aaacccagca gcagctcgaa cagttggaac gggaatttgc ctctagcagc aggctggtta |
| 3661 | accagtatca ttcctataat caatatattt tggccgaacg ggcagggaag tggcaggatg |
| 3721 | ccttaaaaag gtacactgtt gctgaggaac atgtaaaagg tttaacagcc caagacgaag |
| 3781 | aattgactca agaaattaaa caagaagagg aacagaagca gcaatttgcc cagcagcaag |
| 3841 | aaattgcctt agaagaaaaa aagcggttgg agcgccatga ggtttggaat ctggaagagg |
| 3901 | ataagcgtaa gaaaatagaa aatacaaaat ctttaagtag tgaaataaat tccttacaaa |
| 3961 | agaaatggga ccacaaaaac agtcagtaca atcgtctatg gcaggagcgg gagcagagtc |
| 4021 | aaaaccagat aaggcagcat gaaagcggca tggaagattt attaggggag ctgcaatttg |
| 4081 | atgcggaaga ggctgctttt tcagagcatg aggttaacgt ccatgatttc gaacgtcatc |
| 4141 | aggaggagga gtttgatttt tccatctgga ttggtgagat tggcagtcat gaacaattac |
| 4201 | ttgcgaattt aaatcaatta gctgatgagg aaaatcgtct gtcagaagag cataaccggc |
| 4261 | tccaacggca atcctctgag aaaaagaaag aggtagatgc aatccgcaag aatctcgatc |
| 4321 | atttagccga ttggtttacg gaagagaagc aaaggttgga gcatcaggta tttacttgga |
| 4381 | ttgagcagca tccaaagctt attttttcaa atgaaagacg ccaagaaatc gcccgatcaa |
| 4441 | tcgaaggttt atatgaagaa aatcggtacg agcaagtgag ggaaaaactc cttgctgtgg |
| 4501 | ttaatgatta tattaccgat atcagtacga agaaaaagct catggagaca aaaatagaag |
| 4561 | ataaaaagca cgaattggaa gcagcacgag cagaattgca tcactggaag acattaaaaa |
| 4621 | tgccaaaccc ggatcgtgct aaggatacag aggcatttcg cttgcagctg ctagaagacg |
| 4681 | ggcaggcatt tattccgttt tatgcggccg ttgagttcca agatgatgtg accgaagaac |
| 4741 | agaaagagcg gattgaatct gcgttaaaac aaacgggcat attggacagc ttgatcactg |
| 4801 | aaaatgccct tgccccaacc catgatcggg taattcgtcc tgagccgcaa ttactcggat |
| 4861 | atacgttagc agattatttg cgtccggatt tagaggcaga cagtcttatt tcaaacaaac |
| 4921 | ttgttgatga aatattacgg agcatctccc ttgaacagga aggggcaggt tttcatgtgg |
| 4981 | atgtcgatgg atcatattca cttggttgtt tagtggggca tgcaccaaat gaagggccgt |
| 5041 | ctaaatatat cggccgctca tcccgcaaac gataccagca agagaaaatc aaagaatgtc |
| 5101 | aggaaaccat tgagcaactc caattagagt tagaggagct aaaggtgcaa ctcagtcaat |
| 5161 | acgaagagaa tctcctccaa gcagcacaat ggaagcagac catgccaaca gatcaggaac |
| 5221 | ttaatgactt gaatgttcag attgaaaaga ccggccatca attggaggag caaaaaaagg |
| 5281 | ttctttttca gctggatgaa cagtggaagc aagtacacgg tcacctccaa gtgattaaaa |
| 5341 | tacagctcca tcaagaaggc cgccagctaa atctttcttt aactaaagaa gtcttagggc |
| 5401 | aagcattaat ctcagctaaa aactatcgtg atcaactcta tagctttaaa gatctttttc |
| 5461 | aaaaatgttt atttgcccgg aaaagaatag aggatttaac tcatcgctta tttgaaatgg |
| 5521 | aaacggaact ggacgatctt aaaggggatc aaaatgtcaa ggaatcacag ttgcggaaag |
| 5581 | aaaaggctga aattgagtca attgagcaac agctgaagct aaaagggatc gaggaagtaa |
| 5641 | gacttcggat tcaacaagtg cagcaggagc taagggaagc aacagaaggc atcaatcatc |
| 5701 | tacttgaaac cattcctcag aagaaagcaa aacaagaaac ctgtcaaaat gaattagcag |
| 5761 | cagctaaaac aagtgcggaa ttctggtcaa atatggcgga cgaatgggaa cagatggtga |
| 5821 | gagcggatat cgcccgtggt tttgtagaag ttgttgaaat ggatcctgtt aaaatcgtta |
| 5881 | aacagctgga atccatttta ggaaaatatg accgttcgaa gctaaatgaa cagctaacaa |
| 5941 | agacgttcat caatgaacag atatttttaa cggagtacag gatgtttgaa tacccggaag |
| 6001 | agaccgagcg tccagagtgg ttttcgaagg aatggggcga atactatgaa ccatttatga |
| 6061 | atgaatggaa tcagcttcaa agccgccgtt taattctaat ggaatataaa ggccagcgtg |
| 6121 | tcagtccgta ttttgtgttc acatcactgg aaaaagagtt agaagaccaa aaaggttggc |
| 6181 | ttgatgaaca agaccgccaa ctctatgagg atattatcgt caatacagtt ggagtaatct |
| 6241 | tacgaaatcg aatcaaacgt gccgaaaaat gggtgagtga gatggacaaa atcatggaaa |
| 6301 | gccgtgataa ttcatctgga ttaacgttct cgattgcatg gaaaccatta acggccgaat |
| 6361 | cggaacaaga attggataca aaagacttgg ttaagctttt gcagcggaat agtaagtttt |
| 6421 | tgaacgagga tgatttaaat cggattacaa aacacttcca atcgagaata ggaaaagcga |
| 6481 | aggaattaat tcagttacgg aatgaaggat cgacgcttca tcaagtgtta aaagaagtgt |
| 6541 | tggattatcg gaagtggttc acttttgttc tttcatttaa acgtgtaaat gaaccgaaac |
| 6601 | gagaattgac gaacaatgcc ttctttaaat ttagcggcgg cgagaaggca atggcgatgt |
| 6661 | atattccgtt gtttacggcg gcctattcaa gatataaaga agcaggagag atggcgccgt |
| 6721 | atatcatttc actcgatgag gcctttgccg gggtcgatga gaataatatc cgtgacatgt |
| 6781 | ttgaagtggt ggaacagctt ggctttaact atataatgaa ctcacaagcc ttatggggag |
| 6841 | attatgacac catttcaagt ctatcaattt gcgagttagt acggccaaag aatgccgact |
| 6901 | ttgttactgt gattcgctat caatgggacg ggaaacagcg cacctttgtg gtggacgatg |
| 6961 | agcacgttga ggagctagtg acacatgatt gacaaagtac aggtgtttag ggacgaacca |
| 7021 | ggttttgtta aattgtttac cctatttaaa gaaaaatacc gttcaatcgg gagaatcggc |
| 7081 | ggcatggtga gtttggatgg cttttcctat gatgaggtgg aatcaattgc cggctttttg |
| 7141 | ggacagtctg ttgaagcgct ccttgaaaaa gggaaggttt cattactttc ttttgaaaaa |
| 7201 | gaattaccgt tgaccggttt tgcagagtat tcccttattg aattgcttga agaagtgctc |
| 7261 | ggggagtcga tacttactaa acatgaggaa agtggcattg aagaagagaa agaaaagagg |
| 7321 | tttttacaag agttatcttt tatatgtcct gagggaagtt ggtggtggga ctggattgag |
| 7381 | tcgaaaccgc cggattcccg gtggatttgg tcgctttata agcaggatgc ggttggttta |
| 7441 | atggaaaaat tcatcaccgt ttttaaagca tatcaagatc ttccctgtaa ggagaataag |
| 7501 | tatgaaagac tgccgctgtt tgcccaacga acaacgggaa atccacatat tttcgataat |
| 7561 | aatcaactaa ctgggaaatt gctcgtcaat tgcctgcagg tagatcaaca gcttaagggg |
| 7621 | cgacgcgtac cgggaatgcc gaaaacaaca gaggatctaa atgatttgct aggtttgtat |
| 7681 | ggtttgatga gggatgattt gtggagtttt gtttcctgcc gcggattact tgcggaaggt |
| 7741 | gaaatgggga ttcatcctgt ttggaaagcc gcagctgaaa ctgacacagt tctaaacgtt |
| 7801 | ccgcttaagg aattactgaa aataaaaaga atctggcccg ctgcaggaaa aaaggtttgg |
| 7861 | attgttgaaa attcaagtgt ttgttcgacg attgttgatg aggttgctga tgctcctgta |
| 7921 | atctgcaccc acgggcaatt tcgggctgcg agctggatat tgttggagtt attagtggaa |
| 7981 | gcgggctgtc acctttacta ttcgggtgac ctagatccgg aaggggtatc gatggcacag |
| 8041 | cggcttttcg atcgttatca gggtcatgta acttgttgga ggatggatgt tgaatcctat |
| 8101 | gataaaacca tttcagatga ggatatttct ggcaggcttt ctaaattgga gtcaataact |
| 8161 | gcacctgaac ttcttgaagt agtgaatgtc cttaaaatgc ggcaaaaagc gggctatcaa |
| 8221 | gaaggtttag ttgagcaact tgttcaggat attaaaaacg agtttaatgt gttactttag |
| 8281 | gttgaatcaa atatagtagg aatccagttg gatccccacc acaaaaagcg ctat. |

[1368] The coding regions for each of the jetAⁱⁱ, jetBⁱⁱ, jetCⁱⁱ, and jetDⁱⁱ gene sequences within this embodiment of a Wadjet Type II cassette (SEQ ID NO: 18) are as follows: nucleotides 230-1717 encode an embodiment of a JetAⁱⁱ polypeptide, nucleotides 1717-2883 encode an embodiment of a JetBⁱⁱ polypeptide, nucleotides 2883-6992 encode an embodiment of a JetCⁱⁱ polypeptide, and nucleotides 6985-8280 encode an embodiment of a JetDⁱⁱ polypeptide.

[1369] In some embodiments, a Defense System Xb comprising a JetAⁱⁱ polypeptide, a JetBⁱⁱ polypeptide, a JetCⁱⁱ polypeptide, and a JetDⁱⁱ polypeptide is encoded by the nucleic acid sequence set forth in SEQ ID NO: 18. In some embodiments, a Defense System Xb comprising a JetAⁱⁱ polypeptide, a JetBⁱⁱ polypeptide, a JetCⁱⁱ polypeptide, and a JetDⁱⁱ polypeptide, is encoded by a nucleic acid sequence having at least 80% homology to the sequence set forth in SEQ ID NO: 18. In some embodiments, a Defense System Xb comprising a JetAⁱⁱ polypeptide, a JetBⁱⁱ polypeptide, a JetCⁱⁱ polypeptide, and a JetDⁱⁱ polypeptide, is encoded by a nucleic acid sequence having at least 85% homology, or 90% homology, or 95% homology, or 97% homology, or 98% homology, or 99% homology to the sequence set forth in SEQ ID NO: 18. In some embodiments, a Defense System Xb comprising a JetAⁱⁱ polypeptide, a JetBⁱⁱ polypeptide, a JetCⁱⁱ polypeptide, and a JetDⁱⁱ polypeptide, is encoded by a nucleic acid sequence having at least 80% identity to the sequence set forth in SEQ ID NO: 18. In some embodiments, a Defense System Xb comprising a JetAⁱⁱ polypeptide, a JetBⁱⁱ polypeptide, a JetCⁱⁱ polypeptide, and a JetDⁱⁱ polypeptide, is encoded by a nucleic acid sequence having at least 85% identity, or 90% identity, or 95% identity, or 97% identity, or 98% identity, or 99% identity to the sequence set forth in SEQ ID NO: 18.

[1370] In some embodiments, the Wadjet Type III anti-plasmid defense system comprises a nucleic acid construct comprising nucleic acid sequences encoding a cassette comprising jetAⁱⁱⁱ jetBⁱⁱⁱ, jetCⁱⁱⁱ, and jetDⁱⁱⁱ genes. In some embodiments, a construct comprising the Wadjet Type III defense system encodes one component of the defense system, whereby multiple constructs may be used to assemble the functional defense system.

[1371] In some embodiments, a Wadjet Type III (Defense System Xc) gene cassette comprises the nucleic acid sequence:

(SEQ ID NO: 19; construct 61 of Table 4)

| | |
|---|---|
| 1 | ttccgatact ctttagccat aaagcgatga attctgctgt tccgccgaat atcgcaacgg |
| 61 | ttagtgcata tggtaaacct acgcctagtg cacggatttc agttggaaag agttctgctt |
| 121 | ttacattgcg ttaatcgatg tgtaaccagt aacgatgatg aggccgacca tcatgagtga |
| 181 | aaatgctacc atgggttcta tatccatcat ttttaaaact tggtggatat ggagggacct |
| 241 | ggtactgttt tggttttgtg atgtctgtgg gatttcttgc tagcttctgc atgatttgtc |
| 301 | ggtaagtcga tatattcgga gttgcggtcg atataattgg ataatcgttg atatattttt |
| 361 | taaaggtatg gcattcattg gtagaaagag tgatgcgagc ttatgttaca atggaaatag |
| 421 | cttgtaagta aggaagtgac agtatgaatg gtatacaatt tgttcaattg tatgtaatga |
| 481 | aaagtgctga aaagattgat gagttgtata taaaaaaaga acaaggtatc acaactctcc |
| 541 | ccattataaa gcagaccccg cgtaagatta taaaaacagc ggaacttctt tttagtgaag |
| 601 | aagaggtttc ggatgtttct actactatta caaaaaactt ttattcacct aatgtaagga |
| 661 | aaagagaaag tgatgtttta aagtggttaa cgatacatga aatgatagat tgtatagaac |
| 721 | gagggatttt aattaaggaa gttcgttttg agaaggatgg gaaaactgtg cattccattt |
| 781 | tctatcgaat ggggtacggt ttgtttacat atatggaaaa gaaacaacag ctagaaaagg |
| 841 | taagagagga agaggcttta cagcaatgga tgaagcgcaa gcagtctatg ccgaagtaca |
| 901 | taaatgagta tacggaaaga ttgtggcatg ttttgtgcaa tattgaaagt gatttgtctt |
| 961 | ctatagatga aaaacgttgg tcgtttcaga agacgttttt atttttagag tttttacttg |
| 1021 | ctacatataa aatgagttgt gaaaagcgta cgtttgattg gaaagagatt ggtgcggcgt |
| 1081 | attatgaagt gattggtggt tctaaaaagt ttgatcaaca taaaaaagag tttcttaata |
| 1141 | agctggaaga tttgttagat gctccgccgc attgtttagg tttagtgagc ttagggacag |
| 1201 | tgacgcctat ctttttttgc gggaatttat atgaaggtaa tacgcgttat gagtgtgaca |
| 1261 | cagtgcgttc tttaacggat ttagttgtat ttcgtcatgc gtataaaacg gatgcgaagg |
| 1321 | tgttatggct cgttgaaaat agagcggtat taacgaggat tgccgcagag gatgatttta |
| 1381 | tttcaagtac aggtagtctc gttatcggag tggatgggca attacgtagt gggcataaaa |
| 1441 | ggttgattca aagcgtattg gaccactcaa aatctattac gaaaattatt atttggacgg |
| 1501 | attatgatgg ggcaggagag attattagtg ataagttatt cgaactagtt gctccatatg |
| 1561 | aacagtatac aagatggatt tcttcagaag gtaaggcgtt aaataaagat gaatttgagc |
| 1621 | aatccgttcg tttacgcgaa agtgaacaag aagagagttt aggaggtgtg gatgcttgga |
| 1681 | aggaatggat cagtcagtaa tttcgatttt gcaaacagat ccgtcgcata tgggagtacg |
| 1741 | aaatgcgatg aaagatttaa ataaattatc aggtgttatt tcagagcttg gagagagtga |
| 1801 | gtattttaat gatccattga aaacgtatga gtttctacta ttattaaata ttttaaatga |
| 1861 | agaagcgctt ggattgacgt cttctattga agatgtgcgt acgttgaaat tccgttaccg |
| 1921 | taatatgtac ggcggggatc cgtcaattcg tttagagcat ttcattaata ttttagataa |
| 1981 | atatggatgg atctcaaaag ggaaaagcaa gattacgatg atggacgttg ggaagcgaat |
| 2041 | gattgatgtg ttaattcgcc tagcaaacga ttcgttagcg tattacatgc aagatgaaat |
| 2101 | aacgaggtct ttatatcaag caaaccgtga tgcggattta agtgaagcgt atgatgataa |
| 2161 | aggtgtatcg ggcggaaata aattagcgag tatgataaaa aatgtagaag aagcggtaga |
| 2221 | aagactgaaa gagagagaac tcgaatattt agcggaccgc tatgcgttgc cgcaagtgca |
| 2281 | gattattcat cgtttaatga atgaattaaa tgttcgtttt gaagaaaggt tccaaaagtt |
| 2341 | tcaaacgttt gaagaaagtc ttgtgttaga gcctcttgtg aaaagaggaa cgagcgttat |
| 2401 | gtttgaaggt tcacaggtta gtcttggaac gattaagaag attttacatt ttacacatat |
| 2461 | tcagcagtct acagtcggag cgaatattcg tcatgatgcg cttcgtcgtt ttattgaaaa |
| 2521 | ttgttttacg aagcaaaata tggaattgcc agatgcacat gaaattttaa gttttatgga |
| 2581 | gcaagaccgt agagaaggcg agagacaaga tgggttatgg atgccagtac agtttgcggc |
| 2641 | gccgttatca agtgctgcga tttctagtgg tattcagttt ttagaagagt acgagccata |
| 2701 | tacggatcat atagaagaag ttgtgcagga agaatatgaa gagatagaag aaatgtcaga |
| 2761 | agcagaagtg aagaagctaa tggcagatca gcagtggagt atgacgaaag agcaaattca |
| 2821 | aacggaacga ttagaagagt ttcttatgga acaagaagaa gtcgatatgg aagagcttgt |
| 2881 | gcttgaagcc ggttctaata cgtggggaga tgcggtaaat gcattaatcg cactgtcagc |
| 2941 | tttaaccgct aataataagg cggatattat cgataatcaa aatgtaaaag aaagaaacat |
| 3001 | agaaaaagaa tgggaatggg gcagtgacga tgataaaaga aaacgagttc gaagccgaga |
| 3061 | aaggaattaa tccgctcgcg aaattaggag aacttcggta catattgtct cgtgatgaag |
| 3121 | agcatacgtt tatgcaactt ttattttcat cttcagcgcg tatgagagca acaaattttg |
| 3181 | gattgcgccg caaagaagta atgaaaatgc ttgggttaaa tagtgaggat atagaagggt |
| 3241 | ttgagtcatt tgtaatgcga ataaatggtg cgctaagtgg ctattttcag tgtgtatatg |
| 3301 | atgagagacg tgatcaagtc attgtgatga tgcgagtacc agcaaaacaa gcgagagaag |
| 3361 | tattatcttc agaaagttta ggattactta tgtttatttt ctaccatcaa gaagtgttgc |
| 3421 | aaaatgaatt tacattattt aatcaattac ttagtgcgct tggacatgaa acgttgcaag |
| 3481 | cacgtagaaa agtacaaaca aatttagatc cacttttaaa aattggggct attacgaaat |
| 3541 | atgattctcc gtcccaagaa gaagcatatg cgttaactgc cattggaagt agaatgtttt |
| 3601 | cagattcgtt cttacatagg gcggctgagt ttagtcagtc acaacaactt catatggatg |
| 3661 | atgttttaaa attctttaag cgttataacg taggaggtgg agagacgata tgattccata |
| 3721 | ccgtatttct ttttctggta tacgtgatta taagccgaga acgatttctt taatggggaa |
| 3781 | gcgtgatcac attttaattt caggtgcaaa tggtgccggg aaatcgacgc tgacattttg |
| 3841 | ctggggcgct gttatggcgt ctacgaaagt aaatgtggaa gggcttcgtt cgaaaaatct |
| 3901 | tccagacaat agagtatggc gagcgaaaat tgaacttata tatgaaaatg atggatttgt |
| 3961 | agatgcagca agatttgtga gatttacgct tgatttagaa caagagccag gtcatccatt |
| 4021 | gaaaaaagaa tattatattg cagaaggcga tcgggtagat gagtgggagc aagaaacgcg |
| 4081 | tttctcatct tcagataagc attttaactt tagagagtat aaaagaatgc ttcttcaaaa |
| 4141 | atataaaatt gatccagatg cgttctattt aatttggtac caacaagatg taaatcaatt |
| 4201 | tgcagtgatg aagcctgaag agaggttccg tatttttagc gagatgacag gaattgaaag |
| 4261 | tattcaaaag tcttgggagt ctttcaaaga acaagaacgt gataaggaag cgattttgca |
| 4321 | aacggctcgt aataaccaaa ttcaatataa gttcgaactt gagcgttggg agaaagagaa |
| 4381 | aaatcgttat gaagatcaac aaagccgtat aaaacgaggg attctgcaat ataaaacagc |
| 4441 | gttatgtaca ctagaagatc attattatac agaacgtatg aagtataagg atgagctaga |
| 4501 | agatgtgaaa gagaatcttg atgagaagta tgaagaagct cagcaaggag aaaaacagtt |
| 4561 | tgcacaatta gaggcggagt tactagcgaa acaagctgag tttcaaagtg cagaaaaaga |
| 4621 | gcgtgaaatt gccgaggaac gacaactaca gtgcaaaaag gaaagtaaag ataaagagcg |
| 4681 | agaatggaat gcaatgaaag aagagataaa agacgtaaca gatcgcgtga aaaatatagg |
| 4741 | aattagtgaa gatgttgtaa gagcagaaaa gagtagtaaa gagcagcaat tgcaagaagc |
| 4801 | tgaaaaggaa aaggtatata cagagcagct tattagtgag acaagttata atttaaatga |
| 4861 | attaaggtca gaagttgcga agctagaagt gcaagtagat aatgatgaag cagctgtcgt |
| 4921 | ttctgcaaag aattacatag tgcaatataa gtctagtttc tatatggaag aaaagcatac |
| 4981 | aaaagtagaa agtatgatga gacagacgaa agatcttgtt gaaacggtga agaaagatct |
| 5041 | tcagcaaaaa tacgaagaga aaaagcagct agagctaaat cgttacgtca gtccgaggca |
| 5101 | agaagaagga cttagatact taagaaggga agggttacaa gcttatccgc ttcgagactt |
| 5161 | aatagaatta gaaggcgacg cagaatttcg tcatgaagat attttaaata caattaaata |
| 5221 | tgcgatcttc gtagaatcaa aagaattcag accaccgaat gatttgtatt acgtaccgtt |
| 5281 | gccactcatt gttccaactg aaagtgttat ttccttaccg cagtataagc tgagaattaa |
| 5341 | agaaggagac aacgaaaaac ttgtttctgt agcaatgaaa gctttatggt gggtaaaaca |
| 5401 | attctttaca ggtgagcagc catgtattca aaagaatagt ttaattgata taagaggatt |
| 5461 | ccgtggggaa caagaaaaaa cggaatacat tttaagtgaa aaagcaatta tgcaacgttt |
| 5521 | agaagagaca ggaaaatgga ttgaagaaca tgaaaaacag ctcatccaat atgagcgtga |
| 5581 | tattcaaaca ctggaagaaa aagaaagaaa acttcacgac attgtatata aactaagaga |
| 5641 | tgcagaagcc gttttacaaa aagctgccga acgcacattt agaatcgaac agttagggcg |
| 5701 | aaaaacggaa gagaaacaaa ggctagaaca ggaaatacaa aggctatatg caattaacca |
| 5761 | agaattgcat acgcgcatat ctcgcttaag agagcgtctt gaaacgttag aacagtacga |
| 5821 | aatgatatat gaagaactgc ataaggaaaa agaaaaaatt gcacatatgc aaaagcttga |
| 5881 | acaaattcat agagagttat tggatgagct caagagagta gtagagcaaa gagatatact |
| 5941 | ggatgagact tgtaatagat tggaaattga atgtaataaa gcgagtcaaa aaacgaaaca |
| 6001 | acaaaaacaa gaagtagaag aactacgcgc gtatattcag cgtttagaaa agaaaaaaca |
| 6061 | agatgttcaa gagcatttca taacgacaga agaaaaacta attagcatac aaagagaaaa |
| 6121 | ccaggatgcg aatgacacgt atggaaaatt attagagcaa ctaggttggg aaaaacaaat |
| 6181 | agaagagtgg tctgaagcga aagcactttc tcaaaaacaa agcgcagaga ttacactaga |
| 6241 | aggagcactc ggtgaaacag ttgatccact agcgccagaa aattacgcga agatgaaaga |
| 6301 | agaaaatgaa aaaagtaatg cagaactgca taacgcagaa caaattttga acgaacttcg |
| 6361 | cgaaaatata gcacttatga gagaacgtct cgaaacgacg atccaaatga atgctcataa |
| 6421 | aatccataaa aagtttgaac agtacatgga acaattccac ttcgaaggaa aagtagaatg |
| 6481 | gaacatggac acaaacaaac acggtgacat gcgttactat ctctacataa aagcgcgtaa |
| 6541 | aaaaggtcac cgtggcaaaa tggaagacat tagcgccaaa ggacgcggag gcaaagtagg |
| 6601 | aagcggcgta tcaggaggag aagaatccct ttcatctcta ctattcgcac tagccttact |
| 6661 | acaaacaatc gaagcatccc caggctacat catcctagac gaatacgaca gcgccctaga |
| 6721 | cgacagccga aaagaaaaag tcttcaccct attcgaagag gaactaaatc ggaaaatgat |
| 6781 | catcgtctca ccaaaaagtc atgatccaaa ctacttacaa cacttctcgc aagcattaac |
| 6841 | agttatgcac gatgcgagtg tgccggttag tcgaattttg cagattaaga gggcggtaga |
| 6901 | agaaactgaa actgtaatca aggataacta atttaaaacg tccatatcaa attttgatat |
| 6961 | ggacgtttta ttgctgttta atatggagat aaagaaaata aggatgtgat tgtaaa. |

[1372] The coding regions for each of the jetAⁱⁱⁱ, jetBⁱⁱⁱ, jetCⁱⁱⁱ, and jetDⁱⁱⁱ gene sequences within this embodiment of a Wadjet Type III cassette (SEQ ID NO: 19) are as follows: nucleotides 444-1700 encode an embodiment of a JetDⁱⁱⁱ polypeptide, nucleotides 1676-3070 encode an embodiment of a JetAⁱⁱⁱ polypeptide, nucleotides 3030-3713 encode an embodiment of a JetBⁱⁱⁱ polypeptide, and nucleotides 3710-6931 encode an embodiment of a JetCⁱⁱⁱ polypeptide.

[1373] In some embodiments, a Defense System Xc comprising a JetAⁱⁱⁱ polypeptide, a JetBⁱⁱⁱ polypeptide, a JetCⁱⁱⁱ polypeptide, and a JetDⁱⁱⁱ polypeptide is encoded by the nucleic acid sequence set forth in SEQ ID NO: 19. In some embodiments, a Defense System Xc comprising a JetAⁱⁱⁱ polypeptide, a JetBⁱⁱⁱ polypeptide, a JetCⁱⁱⁱ polypeptide, and a JetDⁱⁱⁱ polypeptide, is encoded by a nucleic acid sequence having at least 80% homology to the sequence set forth in SEQ ID NO: 19. In some embodiments, a Defense System Xc comprising a JetAⁱⁱⁱ polypeptide, a JetBⁱⁱⁱ polypeptide, a JetCⁱⁱⁱ polypeptide, and a JetDⁱⁱⁱ polypeptide, is encoded by a nucleic acid sequence having at least 85% homology, or 90% homology, or 95% homology, or 97% homology, or 98% homology, or 99% homology to the sequence set forth in SEQ ID NO: 19. In some embodiments, a Defense System Xc comprising a JetAⁱⁱⁱ polypeptide, a JetBⁱⁱⁱ polypeptide, a JetCⁱⁱⁱ polypeptide, and a JetDⁱⁱⁱ polypeptide, is encoded by a nucleic acid sequence having at least 80% identity to the sequence set forth in SEQ ID NO: 19. In some embodiments, a Defense System Xc comprising a JetAⁱⁱⁱ polypeptide, a JetBⁱⁱⁱ polypeptide, a JetCⁱⁱⁱ polypeptide, and a JetDⁱⁱⁱ polypeptide, is encoded by a nucleic acid sequence having at least 85% identity, or 90% identity, or 95% identity, or 97% identity, or 98% identity, or 99% identity to the sequence set forth in SEQ ID NO: 19.

[1374] In some embodiments, the components of a Wadjet Type I defense system (Defense System Xa) comprise genes jetA, jetB, jetC, and jetD. In some embodiments, the components of a Wadjet Type I defense system consist of genes jetA, jetB, jetC, and jetD. In some embodiments, the components of a Wadjet Type I defense system comprise nucleic acid sequences encoding a JetA polypeptide, a JetB polypeptide, a JetC polypeptide, and a JetD polypeptide. In some embodiments, the components of a Wadjet Type I defense system consist of nucleic acid sequences encoding a JetA polypeptide, a JetB polypeptide, a JetC polypeptide, and a JetD polypeptide. In some embodiments, the components of a Wadjet Type I defense system comprise a jetB gene, a jetC gene, and a jetD gene. In some embodiments, the components of a Wadjet Type I defense system consist of a jetB gene, a jetC gene, and a jetD gene. In some embodiments, the components of a Wadjet Type I defense system comprise nucleic acid sequences encoding a JetB polypeptide, and a JetC polypeptide, and an MKsG polypeptide. In some embodiments, the components of a Wadjet Type I defense system consist of nucleic acid sequences encoding a JetB polypeptide, and a JetC polypeptide, and an MKsG polypeptide.

[1375] In some embodiments, the components of a Wadjet Type I defense system (Defense System Xa) comprise JetA, JetB, JetC, and JetD polypeptides. In some embodiments, the components of a Wadjet Type I defense system (Defense System Xa) consist of JetA, JetB, JetC, and JetD polypeptides. In some embodiments, the components of a Wadjet Type I defense system (Defense System Xa) comprise JetB, JetC, and JetD polypeptides. In some embodiments, the components of a Wadjet Type I defense system (Defense System Xa) consist of JetB, JetC, and JetD polypeptides. In some embodiments, the components of a Wadjet Type I defense system (Defense System Xa) comprise JetC, and JetD polypeptides. In some embodiments, the components of a Wadjet Type I defense system (Defense System Xa) consist of, and JetD polypeptides. In some embodiments, the components of a Wadjet Type I defense system (Defense System Xa) comprise a JetD polypeptide. In some embodiments, the components of a Wadjet Type I defense system (Defense System Xa) consist of a JetD polypeptide. In some embodiments, the components of a Wadjet Type I defense system (Defense System Xa) comprise JetA, JetC, and JetD polypeptides. In some embodiments, the components of a Wadjet Type I defense system (Defense System Xa) consist of JetA, JetC, and JetD polypeptides. In some embodiments, the components of a Wadjet Type I defense system (Defense System Xa) comprise JetA and JetD polypeptides. In some embodiments, the components of a Wadjet Type I defense system (Defense System Xa) consist of JetA and JetD polypeptides. In some embodiments, the components of a Wadjet Type I defense system (Defense System Xa) comprise JetA and JetC polypeptides. In some embodiments, the components of a Wadjet Type I defense system (Defense System Xa) consist of JetA and JetC polypeptides. In some embodiments, the components of a Wadjet Type I defense system (Defense System Xa) comprise JetB and JetC polypeptides. In some embodiments, the components of a Wadjet Type I defense system (Defense System Xa) consist of JetB and JetC polypeptides. In some embodiments, the components of a Wadjet Type I defense system (Defense System Xa) comprise JetB and JetD polypeptides. In some embodiments, the components of a Wadjet Type I defense system (Defense System Xa) consist of JetB and JetD polypeptides. In some embodiments, the components of a Wadjet Type I defense system (Defense System Xa) comprise JetB and JetC polypeptides. In some embodiments, the components of a Wadjet Type I defense system (Defense System Xa) consist of JetC and JetD polypeptides.

[1376] In some embodiments, the components of a Wadjet Type II defense system (Defense System Xb) comprise JetAⁱⁱ, JetBⁱⁱ, JetCⁱⁱ, and JetDⁱⁱ polypeptides. In some embodiments, the components of a Wadjet Type II defense system (Defense System Xb) consist of JetAⁱⁱ, JetBⁱⁱ, JetCⁱⁱ, and JetDⁱⁱ polypeptides. In some embodiments, the components of a Wadjet Type II defense system (Defense System Xb) comprise JetBⁱⁱ, JetCⁱⁱ, and JetDⁱⁱ polypeptides. In some embodiments, the components of a Wadjet Type II defense system (Defense System Xb) consist of JetBⁱⁱ, JetCⁱⁱ, and JetDⁱⁱ polypeptides. In some embodiments, the components of a Wadjet Type II defense system (Defense System Xb) comprise JetCⁱⁱ, and JetDⁱⁱ polypeptides. In some embodiments, the components of a Wadjet Type II defense system (Defense System Xb) consist of, and JetDⁱⁱ polypeptides. In some embodiments, the components of a Wadjet Type II defense system (Defense System Xb) comprise a JetDⁱⁱ polypeptide. In some embodiments, the components of a Wadjet Type II defense system (Defense System Xb) consist of a JetDⁱⁱ polypeptide. In some embodiments, the components of a Wadjet Type II defense system (Defense System Xb) comprise JetAⁱⁱ, JetCⁱⁱ, and JetDⁱⁱ polypeptides. In some embodiments, the components of a Wadjet Type II defense system (Defense System Xb) consist of JetAⁱⁱ, JetCⁱⁱ, and JetDⁱⁱ polypeptides. In some embodiments, the components of a Wadjet Type II defense system (Defense System Xb) comprise JetAⁱⁱ and JetDⁱⁱ polypeptides. In some embodiments, the components of a Wadjet Type II defense system (Defense System Xb) consist of JetAⁱⁱ and JetDⁱⁱ polypeptides. In some embodiments, the components of a Wadjet Type II defense system (Defense System Xb) comprise JetAⁱⁱ and JetCⁱⁱ polypeptides. In some embodiments, the components of a Wadjet Type II defense system (Defense System Xb) consist of JetAⁱⁱ and JetCⁱⁱ polypeptides. In some embodiments, the components of a Wadjet Type II defense system (Defense System Xb) comprise JetBⁱⁱ and JetCⁱⁱ polypeptides. In some embodiments, the components of a Wadjet Type II defense system (Defense System Xb) consist of JetBⁱⁱ and JetCⁱⁱ polypeptides. In some embodiments, the components of a Wadjet Type II defense system (Defense System Xb) comprise JetBⁱⁱ and JetDⁱⁱ polypeptides. In some embodiments, the components of a Wadjet Type II defense system (Defense System Xb) consist of JetBⁱⁱ and JetDⁱⁱ polypeptides. In some embodiments, the components of a Wadjet Type II defense system (Defense System Xb) comprise JetBⁱⁱ and JetCⁱⁱ polypeptides. In some embodiments, the components of a Wadjet Type II defense system (Defense System Xb) consist of JetCⁱⁱ and JetDⁱⁱ polypeptides.

[1377] In some embodiments, the components of a Wadjet Type III defense system (Defense System Xc) comprise JetAⁱⁱⁱ, JetBⁱⁱⁱ, JetCⁱⁱⁱ, and JetDⁱⁱⁱ polypeptides. In some embodiments, the components of a Wadjet Type III defense system (Defense System Xc) consist of JetAⁱⁱⁱ, JetBⁱⁱⁱ, JetCⁱⁱⁱ, and JetDⁱⁱⁱ polypeptides. In some embodiments, the components of a Wadjet Type III defense system (Defense System Xc) comprise JetBⁱⁱⁱ, JetCⁱⁱⁱ, and JetDⁱⁱⁱ polypeptides. In some embodiments, the components of a Wadjet Type III defense system (Defense System Xc) consist of JetBⁱⁱⁱ, JetCⁱⁱⁱ, and JetDⁱⁱⁱ polypeptides. In some embodiments, the components of a Wadjet Type III defense system (Defense System Xc) comprise JetCⁱⁱⁱ, and JetDⁱⁱⁱ polypeptides. In some embodiments, the components of a Wadjet Type III defense system (Defense System Xc) consist of, and JetDⁱⁱⁱ polypeptides. In some embodiments, the components of a Wadjet Type III defense system (Defense System Xc) comprise a JetDⁱⁱⁱ polypeptide. In some embodiments, the components of a Wadjet Type III defense system (Defense System Xc) consist of a JetDⁱⁱⁱ polypeptide. In some embodiments, the components of a Wadjet Type III defense system (Defense System Xc) comprise JetAⁱⁱⁱ, JetCⁱⁱⁱ, and JetDⁱⁱⁱ polypeptides. In some embodiments, the components of a Wadjet Type III defense system (Defense System Xc) consist of JetAⁱⁱⁱ, JetCⁱⁱⁱ, and JetDⁱⁱⁱ polypeptides. In some embodiments, the components of a Wadjet Type III defense system (Defense System Xc) comprise JetAⁱⁱⁱ and JetDⁱⁱⁱ polypeptides. In some embodiments, the components of a Wadjet Type III defense system (Defense System Xc) consist of JetAⁱⁱⁱ and JetDⁱⁱⁱ polypeptides. In some embodiments, the components of a Wadjet Type III defense system (Defense System Xc) comprise JetA¹¹ⁱ and JetCⁱⁱⁱ polypeptides. In some embodiments, the components of a Wadjet Type III defense system (Defense System Xc) consist of JetAⁱⁱⁱ and JetCⁱⁱⁱ polypeptides. In some embodiments, the components of a Wadjet Type III defense system (Defense System Xc) comprise JetBⁱⁱⁱ and JetCⁱⁱⁱ polypeptides. In some embodiments, the components of a Wadjet Type III defense system (Defense System Xc) consist of JetBⁱⁱⁱ and JetCⁱⁱⁱ polypeptides. In some embodiments, the components of a Wadjet Type III defense system (Defense System Xc) comprise JetBⁱⁱⁱ and JetDⁱⁱⁱ polypeptides. In some embodiments, the components of a Wadjet Type III defense system (Defense System Xc) consist of JetBⁱⁱⁱ and JetDⁱⁱⁱ polypeptides. In some embodiments, the components of a Wadjet Type III defense system (Defense System Xc) comprise JetBⁱⁱⁱ and JetCⁱⁱⁱ polypeptides. In some embodiments, the components of a Wadjet Type III defense system (Defense System Xc) consist of JetCⁱⁱⁱ and JetDⁱⁱⁱ polypeptides.

[1378] In some embodiments, a Wadjet system Type I, Type II, or Type III, comprising a non-functional JetA/JetAⁱⁱ/JetAⁱⁱⁱ polypeptide or lacking a JetA/JetAⁱⁱ/JetAⁱⁱⁱ polypeptide has increased transformation efficiency. In some embodiments, a Wadjet system Type I, Type II, or Type III, comprising a non-functional JetC/JetCⁱⁱ/JetCⁱⁱⁱ polypeptide or lacking a JetC/JetCⁱⁱ/JetCⁱⁱⁱ polypeptide has increased transformation efficiency. In some embodiments, a Wadjet system Type I, Type II, or Type III, comprising a non-functional JetD/JetDⁱⁱ/JetDⁱⁱⁱ polypeptide or lacking a JetD/JetDⁱⁱ/JetDⁱⁱⁱ polypeptide has increased transformation efficiency.

[1379] In some embodiments, a construct comprising the Wadjet defense system encodes more than one component of the defense system but less than all of the components required for a functionally active defense system, whereby multiple constructs may be used to assemble the functional defense system. For example, in some embodiments each of jetA, jetB, jetC, and jetD may be encoded by nucleic acid sequences comprised in different constructs, wherein expression of the combination of constructs produces a functional a Wadjet Type I defense system. In some embodiments each of jetAⁱⁱ, jetBⁱⁱ, jetCⁱⁱ, and jetDⁱⁱ may be encoded by nucleic acid sequences comprised in different constructs, wherein expression of the combination of constructs produces a functional a Type II Wadjet defense system. In some embodiments each of jetAⁱⁱⁱ, jetBⁱⁱⁱ, jetCⁱⁱⁱ, and jetDⁱⁱⁱ may be encoded by nucleic acid sequences comprised in different constructs, wherein expression of the combination of constructs produces a functional a Type III Wadjet defense system.

[1380] In some embodiments, components of a Wadjet Type I defense system (Defense Systems Xa) may be encoded by a nucleic acid encoding 1, 2, 3, or 4 components of the Wadjet defense system as described herein. For example, in some embodiments, a construct comprises a nucleic acid comprising a jetA gene. In some embodiments, a construct comprises a nucleic acid comprising a jetA gene and a jetB gene. In some embodiments, a construct comprises a nucleic acid comprising a jetA gene and a jetC gene. In some embodiments, a construct comprises a nucleic acid comprising a jetA gene and a jetD gene. In some embodiments, a construct comprises a nucleic acid comprising a jetB gene. In some embodiments, a construct comprises a nucleic acid comprising a jetB gene and a jetC gene. In some embodiments, a construct comprises a nucleic acid comprising a jetB gene and a jetD gene. In some embodiments, a construct comprises a nucleic acid comprising a jetC gene. In some embodiments, a construct comprises a nucleic acid comprising a jetC gene and a jetD gene. In some embodiments, a construct comprises a nucleic acid comprising a jetD gene. In some embodiments, a construct comprises a nucleic acid comprising a jetA gene, a jetB gene, and a jetC gene. In some embodiments, a construct comprises a nucleic acid comprising a jetA gene, a jetB gene, and a jetD gene. In some embodiments, a construct comprises a nucleic acid comprising a jetA gene, a jetC gene, and a jetD gene. In some embodiments, a construct comprises a nucleic acid comprising a jetD gene, a jetB gene, and a jetC gene. In some embodiments, a construct comprises a nucleic acid comprising a jetD gene, a jetB gene, a jetC gene, and a jetA gene.

[1381] In some embodiments, components of a Wadjet Type II defense system (Defense Systems Xb) may be encoded by a nucleic acid encoding 1, 2, 3, or 4 components of the Wadjet defense system as described herein. For example, in some embodiments, a construct comprises a nucleic acid comprising a jetAⁱⁱ gene. In some embodiments, a construct comprises a nucleic acid comprising a jetAⁱⁱ gene and a jetBⁱⁱ gene. In some embodiments, a construct comprises a nucleic acid comprising a jetAⁱⁱ gene and a jetDⁱⁱ gene. In some embodiments, a construct comprises a nucleic acid comprising a jetBⁱⁱ gene. In some embodiments, a construct comprises a nucleic acid comprising a jetBⁱⁱ gene and a jetCⁱⁱ gene. In some embodiments, a construct comprises a nucleic acid comprising a jetBⁱⁱ gene and a jetDⁱⁱ gene. In some embodiments, a construct comprises a nucleic acid comprising a jetCⁱⁱ gene. In some embodiments, a construct comprises a nucleic acid comprising a jetCⁱⁱ gene and a jetDⁱⁱ gene. In some embodiments, a construct comprises a nucleic acid comprising a jetDⁱⁱ gene. In some embodiments, a construct comprises a nucleic acid comprising a jetAⁱⁱ gene, a jetBⁱⁱ gene, and a jetCⁱⁱ gene. In some embodiments, a construct comprises a nucleic acid comprising a jetAⁱⁱ gene, a jetBⁱⁱ gene, and a jetDⁱⁱ gene. In some embodiments, a construct comprises a nucleic acid comprising a jetAⁱⁱ gene, a jetCⁱⁱ gene, and a jetDⁱⁱ gene. In some embodiments, a construct comprises a nucleic acid comprising a jetDⁱⁱ gene, a jetBⁱⁱ gene, and a jetCⁱⁱ gene. In some embodiments, a construct comprises a nucleic acid comprising a jetDⁱⁱ gene, a jetBⁱⁱ gene, a jetCⁱⁱ gene, and a jetAⁱⁱ gene.

[1382] In some embodiments, components of a Wadjet Type III defense system (Defense Systems Xc) may be encoded by a nucleic acid encoding 1, 2, 3, or 4 components of the Wadjet defense system as described herein. For example, in some embodiments, a construct comprises a nucleic acid comprising a jetAⁱⁱⁱ gene. In some embodiments, a construct comprises a nucleic acid comprising a jetAⁱⁱⁱ gene and a jetBⁱⁱⁱ gene. In some embodiments, a construct comprises a nucleic acid comprising a jetAⁱⁱⁱ gene and a jetCⁱⁱⁱ gene. In some embodiments, a construct comprises a nucleic acid comprising a jetAⁱⁱⁱ gene and a jetDⁱⁱⁱ gene. In some embodiments, a construct comprises a nucleic acid comprising a jetBⁱⁱⁱ gene. In some embodiments, a construct comprises a nucleic acid comprising a jetBⁱⁱⁱ gene and a jetCⁱⁱⁱ gene. In some embodiments, a construct comprises a nucleic acid comprising a jetBⁱⁱⁱ gene and a jetDⁱⁱⁱ gene. In some embodiments, a construct comprises a nucleic acid comprising a jetDⁱⁱⁱ gene. In some embodiments, a construct comprises a nucleic acid comprising a jetCⁱⁱⁱ gene and a jetDⁱⁱⁱ gene. In some embodiments, a construct comprises a nucleic acid comprising a jetDⁱⁱⁱ gene. In some embodiments, a construct comprises a nucleic acid comprising a jetAⁱⁱⁱ gene, a jetⁱⁱⁱB gene, and a jetCⁱⁱⁱ gene. In some embodiments, a construct comprises a nucleic acid comprising a jetAⁱⁱⁱ gene, a jetBⁱⁱⁱ gene, and a jetDⁱⁱⁱ gene. In some embodiments, a construct comprises a nucleic acid comprising a jetAⁱⁱⁱ gene, a jetCⁱⁱⁱ gene, and a jetDⁱⁱⁱ gene. In some embodiments, a construct comprises a nucleic acid comprising a jetDⁱⁱⁱ gene, a jetBⁱⁱⁱ gene, and a jetCⁱⁱⁱ gene. In some embodiments, a construct comprises a nucleic acid comprising a jetDⁱⁱⁱ gene, a jetBⁱⁱⁱ gene, a jetCⁱⁱⁱ gene, and a jetAⁱⁱⁱ gene.

[1383] In some embodiments, components of a Wadjet defense system (Defense System Xa, Xb, or Xc) may comprise a nucleic acid encoding 1, 2, 3, or 4 polypeptide components of the Wadjet defense system. For example, in some embodiments, a construct comprises a nucleic acid encoding a JetA or a JetAⁱⁱ or a JetAⁱⁱⁱ polypeptide, respectively. In some embodiments, a construct comprises a nucleic acid encoding a JetA or a JetAⁱⁱ or a JetAⁱⁱⁱ polypeptide, respectively and a JetB or a JetBⁱⁱ or a JetBⁱⁱⁱ polypeptide, respectively. In some embodiments, a construct comprises a nucleic acid encoding a JetA or a JetAⁱⁱ or a JetAⁱⁱⁱ polypeptide, respectively and a JetC or a JetCⁱⁱ or a JetCⁱⁱⁱ polypeptide, respectively. In some embodiments, a construct comprises a nucleic acid encoding a JetA or a JetAⁱⁱ or a JetAⁱⁱⁱ polypeptide, respectively and a JetD or a JetDⁱⁱ or a JetDⁱⁱⁱ polypeptide, respectively. In some embodiments, a construct comprises a nucleic acid encoding a JetB or a JetBⁱⁱ or a JetBⁱⁱⁱ polypeptide, respectively. In some embodiments, a construct comprises a nucleic acid encoding a JetB or a JetBⁱⁱ or a JetBⁱⁱⁱ polypeptide, respectively and a JetC or a JetCⁱⁱ or a JetCⁱⁱⁱ polypeptide, respectively. In some embodiments, a construct comprises a nucleic acid encoding a JetB or a JetBⁱⁱ or a JetBⁱⁱⁱ polypeptide, respectively and a JetD or a JetDⁱⁱ or a JetDⁱⁱⁱ polypeptide, respectively. In some embodiments, a construct comprises a nucleic acid encoding a JetC or a JetCⁱⁱ or a JetCⁱⁱⁱ polypeptide, respectively. In some embodiments, a construct comprises a nucleic acid encoding a JetC or a JetCⁱⁱ or a JetCⁱⁱⁱ polypeptide, respectively and a JetD or a JetDⁱⁱ or a JetDⁱⁱⁱ polypeptide, respectively. In some embodiments, a construct comprises a nucleic acid encoding a JetD or a JetDⁱⁱ or a JetDⁱⁱⁱ polypeptide, respectively. In some embodiments, a construct comprises a nucleic acid encoding a JetA or a JetAⁱⁱ or a JetAⁱⁱⁱ polypeptide, respectively, a JetB or a JetBⁱⁱ or a JetBⁱⁱⁱ polypeptide, respectively, and a JetC or a JetCⁱⁱ or a JetCⁱⁱⁱ polypeptide, respectively. In some embodiments, a construct comprises a nucleic acid encoding a JetA or a JetAⁱⁱ or a JetAⁱⁱⁱ polypeptide, a JetB or a JetBⁱⁱ or a JetBⁱⁱⁱ polypeptide, respectively, and a JetD or a JetDⁱⁱ or a JetDⁱⁱⁱ polypeptide, respectively. In some embodiments, a construct comprises a nucleic acid encoding a JetA or a JetAⁱⁱ or a JetAⁱⁱⁱ polypeptide, a JetC polypeptide, and a JetD or a JetDⁱⁱ or a JetDⁱⁱⁱ polypeptide, respectively. In some embodiments, a construct comprises a nucleic acid encoding a JetD or a JetDⁱⁱ or a JetDⁱⁱⁱ polypeptide, respectively, a JetB or a JetBⁱⁱ or a JetBⁱⁱⁱ polypeptide, respectively, and a JetC or a JetCⁱⁱ or a JetCⁱⁱⁱ polypeptide, respectively.

[1384] In some embodiments, the components making up a functional Wadjet Type I anti-plasmid defense system comprise a JetA polypeptide, a JetB polypeptide, a JetC polypeptide, and a JetD polypeptide, each encoded by a jetA, a jetB, a jetC, and a jetD gene, respectively.

[1385] In some embodiments, the components making up a functional Wadjet Type II anti-plasmid defense system comprise a JetAⁱⁱ polypeptide, a JetBⁱⁱ polypeptide, a JetCⁱⁱ polypeptide, and a JetDⁱⁱ polypeptide, each encoded by a jetAⁱⁱ, a jetBⁱⁱ, a jetCⁱⁱ, and a jetDⁱⁱ gene, respectively

[1386] In some embodiments, the components making up a functional Wadjet Type III anti-plasmid defense system comprise a JetAⁱⁱⁱ polypeptide, a JetBⁱⁱⁱ polypeptide, a JetCⁱⁱⁱ polypeptide, and a JetDⁱⁱⁱ polypeptide, each encoded by a jetAⁱⁱⁱ, a jetBⁱⁱⁱ, a jetCⁱⁱⁱ, and a jetDⁱⁱⁱ gene, respectively

[1387] In some embodiments, a Wadjet defense system having an anti-plasmid activity (Defense System Xa, Xb, or Xc) comprises a nucleic acid encoding a JetA or a JetAⁱⁱ or a JetAⁱⁱⁱ polypeptide, respectively. In some embodiments, a Wadjet defense system having an anti-plasmid activity (Defense System Xa, Xb, or Xc) comprise a nucleic acid encoding a JetA or a JetAⁱⁱ or a JetAⁱⁱⁱ polypeptide, respectively and a JetB or a JetBⁱⁱ or a JetBⁱⁱⁱ polypeptide, respectively. In some embodiments, a Wadjet defense system having an anti-plasmid activity (Defense System Xa, Xb, or Xc) comprise a nucleic acid encoding a JetA or a JetAⁱⁱ or a JetAⁱⁱⁱ polypeptide, respectively and a JetC or a JetCⁱⁱ or a JetCⁱⁱⁱ polypeptide, respectively. In some embodiments, a Wadjet defense system having an anti-plasmid activity (Defense System Xa, Xb, or Xc) comprise a nucleic acid encoding a JetA or a JetAⁱⁱ or a JetAⁱⁱⁱ polypeptide, respectively and a JetD or a JetDⁱⁱ or a JetDⁱⁱⁱ polypeptide, respectively. In some embodiments, a Wadjet defense system having an anti-plasmid activity (Defense System Xa, Xb, or Xc) comprise a nucleic acid encoding a JetA or a JetAⁱⁱ or a JetAⁱⁱⁱ polypeptide, respectively, a JetB or a JetBⁱⁱ or a JetBⁱⁱⁱ polypeptide, respectively, and a JetC or a JetCⁱⁱ or a JetCⁱⁱⁱ polypeptide, respectively. In some embodiments, a Wadjet defense system having an anti-plasmid activity (Defense System Xa, Xb, or Xc) comprise a nucleic acid encoding a JetA or a JetAⁱⁱ or a JetAⁱⁱⁱ polypeptide, respectively, a JetB or a JetBⁱⁱ or a JetBⁱⁱⁱ polypeptide, respectively, and a JetD or a JetDⁱⁱ or a JetDⁱⁱⁱ polypeptide, respectively. In some embodiments, a Wadjet defense system having an anti-plasmid activity (Defense System Xa, Xb, or Xc) comprise a nucleic acid encoding a JetA or a JetAⁱⁱ or a JetAⁱⁱⁱ polypeptide, respectively, a JetC or a JetCⁱⁱ or a JetCⁱⁱⁱ polypeptide, respectively, and a JetD or a JetDⁱⁱ or a JetDⁱⁱⁱ polypeptide, respectively. In some embodiments, a Wadjet defense system having an anti-plasmid activity (Defense System Xa, Xb, or Xc) comprise a nucleic acid encoding a JetB or a JetBⁱⁱ or a JetBⁱⁱⁱ polypeptide, respectively. In some embodiments, a Wadjet defense system having an anti-plasmid activity (Defense System Xa, Xb, or Xc) comprise a nucleic acid encoding a JetB or a JetBⁱⁱ or a JetBⁱⁱⁱ polypeptide, respectively and a JetC or a JetCⁱⁱ or a JetCⁱⁱⁱ polypeptide, respectively. In some embodiments, a Wadjet defense system having an anti-plasmid activity (Defense System Xa, Xb, or Xc) comprise a nucleic acid encoding a JetB or a JetBⁱⁱ or a JetBⁱⁱⁱ polypeptide, respectively and a JetD or a JetDⁱⁱ or a JetDⁱⁱⁱ polypeptide, respectively. In some embodiments, a Wadjet defense system having an anti-plasmid activity (Defense System Xa, Xb, or Xc) comprise a nucleic acid encoding a JetC or a JetCⁱⁱ or a JetCⁱⁱⁱ polypeptide, respectively. In some embodiments, a Wadjet defense system having an anti-plasmid activity (Defense System Xa, Xb, or Xc) comprise a nucleic acid encoding a JetC or a JetCⁱⁱ or a JetCⁱⁱⁱ polypeptide, respectively and a JetD or a JetDⁱⁱ or a JetDⁱⁱⁱ polypeptide, respectively.

[1388] In some embodiments, a Wadjet defense system having an anti-plasmid activity (Defense System Xa, Xb, or Xc) comprises a nucleic acid comprising a jetA, jetAⁱⁱ, or jetAⁱⁱⁱ gene, respectively. In some embodiments, a Wadjet defense system having an anti-plasmid activity (Defense System Xa, Xb, or Xc) comprises a nucleic acid comprising a jetA, jetAⁱⁱ, or jetAⁱⁱⁱ gene, respectively and a jetB, jetBⁱⁱ, or jetBⁱⁱⁱ gene, respectively. In some embodiments, a Wadjet defense system having an anti-plasmid activity (Defense System Xa, Xb, or Xc) comprises a nucleic acid comprising a jetA, jetAⁱⁱ, or jetAⁱⁱⁱ gene, respectively and a jetC, jetCⁱⁱ, or jetCⁱⁱⁱ gene, respectively. In some embodiments, a Wadjet defense system having an anti-plasmid activity (Defense System Xa, Xb, or Xc) comprises a nucleic acid comprising a jetA, jetAⁱⁱ, or jetAⁱⁱⁱ gene, respectively and a jetD, jetDⁱⁱ, or jetDⁱⁱⁱ gene, respectively. In some embodiments, a Wadjet defense system having an anti-plasmid activity (Defense System Xa, Xb, or Xc) comprises a nucleic acid comprising a jetA, jetAⁱⁱ, or jetAⁱⁱⁱ gene, respectively, a jetB, jetBⁱⁱ, or jetBⁱⁱⁱ gene, respectively, and a jetC, jetCⁱⁱ, or jetCⁱⁱⁱ gene, respectively. In some embodiments, a Wadjet defense system having an anti-plasmid activity (Defense System Xa, Xb, or Xc) comprises a nucleic acid comprising a jetA, jetAⁱⁱ, or jetAⁱⁱⁱ gene, respectively, a jetB, jetBⁱⁱ, or jetBⁱⁱⁱ gene, respectively, and a jetD, jetDⁱⁱ, or jetDⁱⁱⁱ gene, respectively gene. In some embodiments, a Wadjet defense system having an anti-plasmid activity comprise a nucleic acid comprising a jetA, jetAⁱⁱ, or jetAⁱⁱⁱ gene, respectively, a jetC, jetCⁱⁱ, or jetCⁱⁱⁱ gene, respectively, and a jetD gene. In some embodiments, a Wadjet defense system having an anti-plasmid activity (Defense System Xa, Xb, or Xc) comprises a nucleic acid comprising a jetB, jetBⁱⁱ, or jetBⁱⁱⁱ gene, respectively. In some embodiments, a Wadjet defense system having an anti-plasmid activity (Defense System Xa, Xb, or Xc) comprises a nucleic acid comprising a jetB, jetBⁱⁱ, or jetBⁱⁱⁱ gene, respectively and a jetC, jetCⁱⁱ, or jetCⁱⁱⁱ gene, respectively. In some embodiments, a Wadjet defense system having an anti-plasmid activity comprise a nucleic acid comprising a jetB, jetBⁱⁱ, or jetBⁱⁱⁱ gene, respectively and a jetD, jetDⁱⁱ, or jetDⁱⁱⁱ gene, respectively. In some embodiments, a Wadjet defense system having an anti-plasmid activity (Defense System Xa, Xb, or Xc) comprises a nucleic acid comprising a jetB, jetBⁱⁱ, or jetBⁱⁱⁱ gene, respectively, a jetD, jetDⁱⁱ, or jetDⁱⁱⁱ gene, respectively, and a jetC, jetCⁱⁱ, or jetCⁱⁱⁱ gene, respectively. In some embodiments, a Wadjet defense system having an anti-plasmid activity (Defense System Xa, Xb, or Xc) comprises a nucleic acid comprising a jetC, jetCⁱⁱ, or jetCⁱⁱⁱ gene, respectively. In some embodiments, a Wadjet defense system having an anti-plasmid activity (Defense System Xa, Xb, or Xc) comprises a nucleic acid comprising a jetC, jetCⁱⁱ, or jetCⁱⁱⁱ gene, respectively and a jetD, jetDⁱⁱ, or jetDⁱⁱⁱ gene, respectively. In some embodiments, a Wadjet defense system having an anti-plasmid activity (Defense System Xa, Xb, or Xc) comprises a nucleic acid comprising a jetD, jetDⁱⁱ, or jetDⁱⁱⁱ gene, respectively.

[1389] In some embodiments, a Wadjet Type I defense system having an anti-plasmid activity comprises a nucleic acid construct comprising nucleic acids encoding polypeptides in a set order. In one embodiment, the 5′ to 3′ order of polypeptides encoded is JetA, JetB, JetC, and JetD. In some embodiments the 5′ to 3′ order of polypeptides does not affect the anti-plasmid activity. In some embodiments the 5′ to 3′ order of polypeptides does affect the anti-plasmid activity.

[1390] In some embodiments, the 5′ to 3′ order of polypeptides is random comprising any order of JetA, JetB, JetC, and JetD. In some embodiments, for example but not limited to, the order is JetB, JetC, JetD, and JetA; or JetC, JetD, JetA, and JetB; or JetD, JetA, JetB, and JetC.

[1391] In some embodiments, a Wadjet Type I defense system having an anti-plasmid activity comprises a nucleic acid construct comprising genes in a set order. In some embodiment, the 5′ to 3′ order of genes is jetA, jetB, jetC, and jetD. In some embodiment, the 5′ to 3′ order of genes in a Wadjet defense system is not jetA, jetB, jetC, and jetD. In some embodiments the 5′ to 3′ order of genes does not affect the anti-plasmid activity. In some embodiments the 5′ to 3′ order of genes does affect the anti-plasmid activity.

[1392] In some embodiments, the 5′ to 3′ order of genes is random, for example any order of jetA, jetB, jetC, and jetD. In some embodiments, for example but not limited to, the order is jetB, jetC, jetD, and jetA; or jetC, jetD, jetA, and jetB; or jetD, jetA, jetB, and jetC.

[1393] In some embodiments, a Wadjet Type II defense system having an anti-plasmid activity comprises a nucleic acid construct comprising nucleic acids encoding polypeptides in a set order. In one embodiment, the 5′ to 3′ order of polypeptides encoded is JetAⁱⁱ, JetBⁱⁱ, JetCⁱⁱ, and JetDⁱⁱ. In some embodiments the 5′ to 3′ order of polypeptides does not affect the anti-plasmid activity. In some embodiments the 5′ to 3′ order of polypeptides does affect the anti-plasmid activity.

[1394] In some embodiments, the 5′ to 3′ order of polypeptides is random comprising any order of JetAⁱⁱ, JetBⁱⁱ, JetCⁱⁱ, and JetDⁱⁱ. In some embodiments, for example but not limited to, the order is JetBⁱⁱ, JetCⁱⁱ, JetDⁱⁱ, and JetAⁱⁱ; or JetCⁱⁱ, JetDⁱⁱ, JetAⁱⁱ, and JetBⁱⁱ; or JetDⁱⁱ, JetAⁱⁱ, JetBⁱⁱ, and JetCⁱⁱ.

[1395] In some embodiments, a Wadjet Type II defense system having an anti-plasmid activity comprises a nucleic acid construct comprising genes in a set order. In some embodiment, the 5′ to 3′ order of genes is jetAⁱⁱ, jetBⁱⁱ, jetCⁱⁱ, and jetDⁱⁱ. In some embodiment, the 5′ to 3′ order of genes in a Wadjet defense system is not jetAⁱⁱ, jetBⁱⁱ, jetCⁱⁱ, and jetDⁱⁱ. In some embodiments the 5′ to 3′ order of genes does not affect the anti-plasmid activity. In some embodiments the 5′ to 3′ order of genes does affect the anti-plasmid activity.

[1396] In some embodiments, the 5′ to 3′ order of genes is random, for example any order of jetAⁱⁱ, jetBⁱⁱ, jetCⁱⁱ, and jetDⁱⁱ. In some embodiments, for example but not limited to, the order is jetBⁱⁱ, jetCⁱⁱ, jetDⁱⁱ, and jetAⁱⁱ; or jetCⁱⁱ, jetDⁱⁱ, jetAⁱⁱ, and jetBⁱⁱ; or jetDⁱⁱ, jetAⁱⁱ, jetBⁱⁱ, and jetCⁱⁱ.

[1397] In some embodiments, a Wadjet Type III defense system having an anti-plasmid activity comprises a nucleic acid construct comprising nucleic acids encoding polypeptides in a set order. In one embodiment, the 5′ to 3′ order of polypeptides encoded is JetAⁱⁱⁱ, JetBⁱⁱⁱ, JetCⁱⁱⁱ, and JetDⁱⁱⁱ. In some embodiments the 5′ to 3′ order of polypeptides does not affect the anti-plasmid activity. In some embodiments the 5′ to 3′ order of polypeptides does affect the anti-plasmid activity.

[1398] In some embodiments, the 5′ to 3′ order of polypeptides is random comprising any order of JetAⁱⁱⁱ, JetBⁱⁱⁱ, JetCⁱⁱⁱ, and JetDⁱⁱⁱ. In some embodiments, for example but not limited to, the order is JetBⁱⁱⁱ, JetCⁱⁱⁱ, JetDⁱⁱⁱ, and JetAⁱⁱⁱ; or JetCⁱⁱⁱ, JetDⁱⁱⁱ, JetAⁱⁱⁱ, and JetBⁱⁱⁱ; or JetDⁱⁱⁱ, JetAⁱⁱⁱ, JetBⁱⁱⁱ, and JetCⁱⁱⁱ.

[1399] In some embodiments, a Wadjet Type I defense system having an anti-plasmid activity comprises a nucleic acid construct comprising genes in a set order. In some embodiment, the 5′ to 3′ order of genes is jetAⁱⁱⁱ, jetBⁱⁱⁱ, jetCⁱⁱⁱ, and jetDⁱⁱⁱ. In some embodiment, the 5′ to 3′ order of genes in a Wadjet defense system is not jetAⁱⁱⁱ, jetBⁱⁱⁱ, jetCⁱⁱⁱ, and jetDⁱⁱⁱ. In some embodiments the 5′ to 3′ order of genes does not affect the anti-plasmid activity. In some embodiments the 5′ to 3′ order of genes does affect the anti-plasmid activity.

[1400] In some embodiments, the 5′ to 3′ order of genes is random, for example any order of jetAⁱⁱⁱ, jetBⁱⁱⁱ, jetCⁱⁱⁱ, and jetDⁱⁱⁱ. In some embodiments, for example but not limited to, the order is jetBⁱⁱⁱ, jetCⁱⁱⁱ, jetDⁱⁱⁱ, and jetAⁱⁱⁱ; or jetCⁱⁱⁱ, jetDⁱⁱⁱ, jetAⁱⁱⁱ, and jetBⁱⁱⁱ; or jetDⁱⁱⁱ, jetAⁱⁱⁱ, jetBⁱⁱⁱ, and jetCⁱⁱⁱ.

[1401] In some embodiments, the Wadjet Type I system (Defense System Xa) composition and order is as shown in FIG. 7B. In some embodiments, the Wadjet Type II system (Defense System Xb) composition and order is as shown in FIG. 7B. In some embodiments, the Wadjet Type III system (Defense System Xc) composition and order is as shown in FIG. 7B.

[1402] In some embodiments, a Wadjet Type I defense system having an anti-plasmid activity originates from a microbial genome, for example a bacterial or an archaeal genome (Table 11). In some embodiments, a Wadjet Type II defense system having an anti-plasmid activity originates from a microbial genome, for example a bacterial or an archaeal genome (Table 11). In some embodiments, a Wadjet Type III defense system having an anti-plasmid activity originates from a microbial genome, for example a bacterial or an archaeal genome (Table 11).

[1403] A skilled artisan would appreciate that a Wadjet system (Defense Xa, Xb, Xc) is not present in the majority of bacteria and or archaea species.

[1404] In some embodiments, a functional Wadjet defense system (Defense System Xa, Xb, or Xc) comprises a construct comprising nucleic acid sequences encoding polypeptides, wherein the nucleic acid sequence encoding each polypeptide may originate from a different microbial species. For example, the source of the nucleic acid sequence encoding a JetA, a JetAⁱⁱ, or a JetAⁱⁱⁱ polypeptides, respectively polypeptide may be one microbial species, the source of the nucleic acid sequence encoding a JetB, a JetBⁱⁱ, or a JetBⁱⁱⁱ polypeptides, respectively may be a different microbial species, the source of the nucleic acid sequence encoding a JetC, a JetCⁱⁱ, or a JetCⁱⁱⁱ polypeptides, respectively may be yet a different microbial species, and the source of the nucleic acid sequence encoding a JetD, a JetDⁱⁱ, or a JetDⁱⁱⁱ polypeptides, respectively may be still a different microbial species. In some embodiments, a functional Wadjet defense system (Defense System Xa, Xb, or Xc) comprises a non-naturally occurring combination of polypeptide components. In some embodiments, a functional Wadjet defense system (Defense System Xa, Xb, or Xc) comprises a combination of at least two polypeptides that do not naturally occur together. In some embodiments, a functional Wadjet defense system (Defense System Xa, Xb, or Xc) comprises a combination of at least three polypeptides that do not naturally occur together. In some embodiments, a functional Wadjet defense system (Defense System Xa, Xb, or Xc) comprises a combination of four polypeptides that do not naturally occur together.

[1405] In some embodiments, a functional Wadjet defense system (Defense System Xa, Xb, or Xc) comprises a construct comprising nucleic acid sequences encoding polypeptides, wherein the nucleic acid sequence encoding each polypeptide may originate from a different bacterial species. For example, the source of the nucleic acid sequence encoding a JetA, a JetAⁱⁱ, or a JetAⁱⁱⁱ polypeptides, respectively may be one bacterial species, the source of the nucleic acid sequence encoding a JetB, a JetBⁱⁱ, or a JetBⁱⁱⁱ polypeptides, respectively may be a different bacterial species, the source of the nucleic acid sequence encoding a JetC, a JetCⁱⁱ, or a JetCⁱⁱⁱ polypeptides, respectively may be yet a different bacterial species, and the source of the nucleic acid sequence encoding a JetD, a JetDⁱⁱ, or a JetDⁱⁱⁱ polypeptides, respectively may be still a different bacterial species.

[1406] In some embodiments, the source of the nucleic acid encoding a JetA, a JetAⁱⁱ, or a JetAⁱⁱⁱ polypeptides, respectively, a JetB, a JetBⁱⁱ, or a JetBⁱⁱⁱ polypeptides, respectively, a JetC, a JetCⁱⁱ, or a JetCⁱⁱⁱ polypeptides, respectively, and a JetD, a JetDⁱⁱ, or a JetDⁱⁱⁱ polypeptides, respectively is the same. In some embodiments, the source of the nucleic acid encoding a JetA, a JetAⁱⁱ, or a JetAⁱⁱⁱ polypeptides, respectively, a JetB, a JetBⁱⁱ, or a JetBⁱⁱⁱ polypeptides, respectively, a JetC, a JetCⁱⁱ, or a JetCⁱⁱⁱ polypeptides, respectively, and a JetD, a JetDⁱⁱ, or a JetDⁱⁱⁱ polypeptides, respectively is the not the same. In some embodiments, the source of some of the components is the same, while the source of other components is not the same. In some embodiments, the source of the nucleic acid sequence of some of the components is same and the source of other of the components is different. For example, but not limited to the source of any of the nucleic acid sequences encoding JetA, a JetAⁱⁱ, or a JetAⁱⁱⁱ polypeptides, respectively; JetB, a JetBⁱⁱ, or a JetBⁱⁱⁱ polypeptides, respectively; JetC, a JetCⁱⁱ, or a JetCⁱⁱⁱ polypeptides, respectively; and a JetD, a JetDⁱⁱ, or a JetDⁱⁱⁱ polypeptides, respectively may be the same or different, having any combination thereof. In some embodiments, the source of the nucleic acid sequence of any of the components of a Wadjet defense system (Defense Systems Xa, Xb, or Xc) comprises any of the species listed in Table 11.

[1407] In some embodiments, a Wadjet defense system (Defense Systems Xa, Xb, or Xc) having an anti-plasmid activity comprises a nucleic acid construct comprising non-coding regions between the nucleic acid sequences encoding the polypeptides. In some embodiments, the non-coding regions between the nucleic acid sequences comprises nucleic acid sequence not naturally occurring in the microbial species of origin. In some embodiments, the non-coding regions between the nucleic acid sequences comprises nucleic acid sequence is the naturally occurring in the microbial species of origin.

[1408] In some embodiments, a Wadjet system disclosed herein (Defense Systems Xa, Xb, or Xc) comprises a multi-gene phage resistance system broadly distributed in microbial genomes. According to some embodiments, the Wadjet system (Defense Systems Xa, Xb, or Xc) components are located in a gene cluster in a microbial cell genome. According to some embodiments, the Wadjet system (Defense Systems Xa, Xb, or Xc) components are located in close proximity (e.g. positioned within 20 genes, 10 genes, 5 genes or less one from the other) in a genome of a prokaryotic cell. According to some embodiments the prokaryotic cell expresses an endogenous Wadjet defense system (Defense Systems Xa, Xb, or Xc). According to some embodiments, the prokaryotic cell expresses an endogenous functional Wadjet defense system (Defense Systems Xa, Xb, or Xc). According to some embodiments, the species of prokaryotic cell is selected from the group consisting of the species listed in Table 11. According to some embodiments, a prokaryotic cell expresses a non-endogenous Wadjet defense system (Defense Systems Xa, Xb, or Xc). According to some embodiments, a prokaryotic cell expresses a non-endogenous functional Wadjet defense system (Defense Systems Xa, Xb, or Xc). According to some embodiments, the species of prokaryotic cell expressing a non-endogenous functional Wadjet defense system (Defense Systems Xa, Xb, or Xc) is selected from the group consisting of the species listed in Table 11.

[1409] In some embodiments, Wadjet Type I defense system components comprise JetA, JetB, JetC and JetD polypeptides. In some embodiments, Wadjet Type I defense system components comprise functional portions of JetA, JetB, JetC and JetD polypeptides. In some embodiments, the Wadjet Type I defense system components are encoded by jetA, jetB, jetC and jetD genes. In some embodiments, Wadjet Type I defense system components comprise JetB, JetC and JetD polypeptides.

[1410] In some embodiments, Wadjet Type II defense system components comprise JetAⁱⁱ, JetBⁱⁱ, JetCⁱⁱ and JetDⁱⁱ polypeptides. In some embodiments, Wadjet Type II defense system components comprise functional portions of JetAⁱⁱ, JetBⁱⁱ, JetCⁱⁱ and JetDⁱⁱ polypeptides. In some embodiments, the Wadjet Type II defense system components are encoded by jetAⁱⁱ, jetBⁱⁱ, jetCⁱⁱ and jetDⁱⁱ genes.

[1411] In some embodiments, Wadjet Type III defense system components comprise JetAⁱⁱⁱ, JetBⁱⁱⁱ, JetCⁱⁱⁱ and JetDⁱⁱⁱ polypeptides. In some embodiments, Wadjet Type III defense system components comprise functional portions of JetAⁱⁱⁱ, JetBⁱⁱⁱ, JetCⁱⁱⁱ and JetDⁱⁱⁱ polypeptides. In some embodiments, the Wadjet Type III defense system components are encoded by jetAⁱⁱⁱ, jetBⁱⁱⁱ, jetCⁱⁱⁱ and jetDⁱⁱⁱ genes.

[1412] Non-limiting embodiments of endogenous Wadjet systems (Defense Systems Xa, Xb, and Xc) and the respective location of their components are provided in Table 11 herein.

[1413] In some embodiments, the components of a Wadjet system may be identified by the presence of similar domains present within each component. In some embodiments, domains comprise pfam domains and or clusters of orthologous groups (COG) domains.

[1414] In some embodiments, the term “JetA” refers to the polynucleotide or expression product e.g., the polypeptide encoded by the jetA gene, comprising variants jetA, jetAⁱⁱ and jetAⁱⁱⁱ, associated with Defense Systems Xa, Xb, and Xc, respectively. In some embodiments, the terms “jetA”, “jetAⁱⁱ” and “jetAⁱⁱⁱ”, may be used interchangeably. In some embodiments, the term “JetA” refers to a JetA polypeptide or a JetAⁱⁱ polypeptide or a JetAⁱⁱⁱ polypeptide (FIG. 7B). In some embodiments, the terms JetA, JetAⁱⁱ, and JetAⁱⁱⁱ may be used interchangeably.

[1415] A skilled artisan would recognize that each Defense System X (Xa, Xb, and Xc) comprises a JetA polypeptide (A), a JetB polypeptide (B), a Jet C polypeptide (C), and a JetD polypeptide (C), wherein the polypeptides are encoded by a jetA gene, a jetB gene, a jetC gene, or a jetD gene, and variants thereof.

[1416] In some embodiments, the jetA gene encodes a polypeptide comprising a pfam11855 domain. In some embodiments, the jetA gene encodes a polypeptide comprising a DUF3375 domain. In some embodiments, the jetA gene encodes a polypeptide comprising a pfam09660 domain. In some embodiments, the jetA gene encodes a polypeptide comprising a DUF2397 domain. In some embodiments, the jetA gene encodes a polypeptide comprising no known domain. In some embodiments, the jetA gene encodes a polypeptide comprising a pfam11855 domain, or a DUF3375 domain, or a pfam09660 domain, or a DUF2397 domain, or any combination thereof. In some embodiments, the jetA gene encodes a polypeptide comprising a pfam11855 domain and a DUF3375 domain. In some embodiments, a jetA gene encodes a polypeptide comprising a pfam09660 domain and a DUF2397 domain.

[1417] In some embodiments, the jetA gene encodes a polypeptide comprising a member of the MukF-like family. MukF appears to play a role in chromosome partitioning during cell division. MukF has been described as a member of the kleisin family, which includes proteins that commonly mediate the interaction between SMCs and other accessory proteins.

[1418] In some embodiments, JetA polypeptide is encoded by a gene positioned within 5-60 genes of a gene encoding a JetB, JetC, and or JetD polypeptide in a genome of a prokaryotic cell. In some embodiments, JetA polypeptide is encoded by a gene positioned within 5 genes upstream (5′) or downstream (3′) to a gene encoding a JetB, JetC, and or JetD polypeptide in a genome of a prokaryotic cell. In some embodiments, JetA polypeptide is encoded by a gene positioned within 5 genes upstream (5′) and downstream (3′) to a gene encoding a JetB, JetC, and or JetD polypeptide, or any combination thereof, in a genome of a prokaryotic cell.

[1419] In some embodiments, JetA and JetB are encoded by genes positioned sequentially 5′ to 3′ in a genome of a prokaryotic cell. In some embodiments, JetA and JetB are encoded by genes positioned contiguously 5′ to 3′ in a genome of a prokaryotic cell. In some embodiments, JetA, JetB, and JetC are encoded by genes positioned sequentially 5′ to 3′ in a genome of a prokaryotic cell. In some embodiments, JetA, JetB, and JetC are encoded by genes positioned contiguously 5′ to 3′ in a genome of a prokaryotic cell. In some embodiments, JetA, JetB, JetC, and JetD are encoded by genes positioned sequentially 5′ to 3′ in a genome of a prokaryotic cell. In some embodiments, JetA, JetB, JetC, and JetD are encoded by genes positioned contiguously 5′ to 3′ in a genome of a prokaryotic cell. In some embodiments, JetD, JetA JetB, and JetC are encoded by genes positioned sequentially 5′ to 3′ in a genome of a prokaryotic cell. In some embodiments, JetD, JetA, JetB, and JetC are encoded by genes positioned contiguously 5′ to 3′ in a genome of a prokaryotic cell.

[1420] In some embodiments, jetA and jetB genes are positioned sequentially 5′ to 3′ in a genome of a prokaryotic cell. In some embodiments, jetA, and jetB, genes are positioned contiguously 5′ to 3′ in a genome of a prokaryotic cell. In some embodiments, jetA, jetB, and jetC genes are positioned sequentially 5′ to 3′ in a genome of a prokaryotic cell. In some embodiments, jetA, jetB, and jetC genes are positioned contiguously 5′ to 3′ in a genome of a prokaryotic cell. In some embodiments, jetA, jetB, jetC, and jetD genes are positioned sequentially 5′ to 3′ in a genome of a prokaryotic cell. In some embodiments, jetA, jetB, jetC, and jetD genes are positioned contiguously 5′ to 3′ in a genome of a prokaryotic cell. In some embodiments, jetD, jetA, jetB, and jetC genes are positioned sequentially 5′ to 3′ in a genome of a prokaryotic cell. In some embodiments, jetD, jetD, jetB, and jetC genes are positioned contiguously 5′ to 3′ in a genome of a prokaryotic cell.

[1421] In some embodiments, a JetA polypeptide is about 488 amino acids long (median gene size).

[1422] In some embodiments, the JetA polypeptide comprises the amino acid sequence having at least 80% homology to a sequence selected from the group consisting of the polypeptides referenced in Table 11, rows 2-3174, columns J and K. In some embodiments, the JetA polypeptide comprises the amino acid sequence having at least 80% homology to similar domain regions within a sequence selected from the group consisting of the polypeptides referenced in Table 11, rows 2-3174, columns J and K. In some embodiments, the JetA polypeptide comprises a homolog of a polypeptide having the amino acid sequences set forth in the polypeptides referenced in Table 11, rows 2-3174, columns J and K. In some embodiments, a homolog of a JetA polypeptide comprises a member of the MukF-like family. In some embodiments, the JetA polypeptide comprises the amino acid sequence having at least 80% identity to a sequence selected from the group consisting of the polypeptides referenced in Table 11, rows 2-3174, columns J and K. In some embodiments, the JetA polypeptide comprises the amino acid sequence having at least 80% identity to similar domain regions within a sequence selected from the group consisting of the polypeptides referenced in Table 11, rows 2-3174, columns J and K. In some embodiments, the JetA polypeptide comprises a homolog of a polypeptide having the amino acid sequences set forth in the polypeptides referenced in Table 11, rows 2-3174, columns J and K.

[1423] In some embodiments, the JetA polypeptide comprises the amino acid sequence having at least 80% identity to a sequence selected from the group consisting of the polypeptides referenced in Table 11, rows 2-3174, columns J and K. In some embodiments, the JetA polypeptide comprises the amino acid sequence having at least 80% identity within similar domain regions within a sequence selected from the group consisting of the polypeptides referenced in Table 11, rows 2-3174, columns J and K.

[1424] In some embodiments, an JetA polypeptide comprises a MukF-like domain. In some embodiments, an JetA polypeptide comprises a MukF-like activity.

[1425] In some embodiments, the JetA polypeptide comprises an amino acid sequence having at least 80%, at least 85%, at least 90%, or at least 95% homology to a sequence selected from the group consisting of the polypeptides referenced in Table 11, rows 2-3174, column J and K. In some embodiments, the JetA polypeptide comprises the amino acid sequence having at least 80%, 85%, 90%, 95% homology within similar domain regions within a sequence selected from the group consisting of the polypeptides referenced in Table 11, rows 2-3174, columns J and K. In some embodiments, the JetA polypeptide comprises an amino acid sequence having at least 80%, at least 85%, at least 90%, or at least 95% identity to a sequence selected from the group consisting of the polypeptides referenced in Table 11, rows 2-3174, columns J and K. In some embodiments, the JetA polypeptide comprises the amino acid sequence having at least 80%, 85%, 90%, 95% identity within similar domain regions within a sequence selected from the group consisting of the polypeptides referenced in Table 11, rows 2-3174, columns J and K. In some embodiments, the JetA polypeptide comprises an amino acid sequence selected from the group consisting of the polypeptides referenced in Table 11, rows 2-3174, columns J and K.

[1426] In some embodiments, the JetA polypeptide comprises an amino acid sequence encoded by a nucleic acid sequence having at least 80%, at least 85%, at least 90%, or at least 95% homology to a sequence selected from the group consisting of the polynucleotides referenced in Table 11, rows 2-3174, columns J and L. In some embodiments, the JetA polypeptide comprises the amino acid sequence encoded by a nucleic acid sequence having at least 80%, 85%, 90%, 95% homology within similar domain regions within a sequence selected from the group consisting of the polynucleotides referenced in Table 11, rows 2-3174, columns J. and L In some embodiments, the JetA polypeptide comprises an amino acid sequence encoded by a nucleic acid sequence having at least 80%, at least 85%, at least 90%, or at least 95% identity to a sequence selected from the group consisting of the polynucleotides referenced in Table 11, rows 2-3174, columns J and L. In some embodiments, the JetA polypeptide comprises the amino acid sequence encoded by a nucleic acid sequence having at least 80%, 85%, 90%, 95% homology within similar domain regions within a sequence selected from the group consisting of the polynucleotides referenced in Table 11, rows 2-3174, columns J and L. In some embodiments, the JetA polypeptide comprises an amino acid sequence encoded from a nucleic acid sequence selected from the group consisting of the polynucleotides referenced in Table 11, rows 2-3174, columns J and L.

[1427] In some embodiments, the nucleic acid sequence of a jetA gene comprises a nucleic acid sequence having at least 80%, at least 85%, at least 90%, or at least 95% homology to a sequence selected from the group consisting of the polynucleotides referenced in Table 11, rows 2-3174, columns J and L. In some embodiments, the jetA gene comprises a nucleic acid sequence having at least 80%, 85%, 90%, 95% homology within encoded similar domain regions in comparison with nucleotide sequence encoding these domain within a sequence selected from the group consisting of the polynucleotides referenced in Table 11, rows 2-3174, columns J and L. In some embodiments, the nucleic acid sequence of a jetA gene comprises a nucleic acid sequence having at least 80%, at least 85%, at least 90%, or at least 95% identity to a sequence selected from the group consisting of the polynucleotides referenced in Table 11, rows 2-3174, columns J and L. In some embodiments, the jetA gene comprises a nucleic acid sequence having at least 80%, 85%, 90%, 95% identity within encoded similar domain regions in comparison with nucleotide sequence encoding these domain within a sequence selected from the group consisting of the polynucleotides referenced in Table 11, rows 2-3174, columns J and L. In some embodiments, the nucleic acid sequence of a jetA gene comprises a nucleic acid sequence selected from the group consisting of the polynucleotides referenced in Table 11, rows 2-3174, columns J and L.

[1428] In some embodiments, the term “JetB” refers to the polynucleotide or expression product e.g., the polypeptide encoded by the jetB gene, comprising variants jetB, jetBⁱⁱ and jetBⁱⁱⁱ, associated with Defense Systems Xa, Xb, and Xc, respectively. In some embodiments, the terms “jetB”, “jetBⁱⁱ” and “jetBⁱⁱⁱ”, may be used interchangeably. In some embodiments, the term “JetB” refers to a JetB polypeptide or a JetBⁱⁱ polypeptide or a JetBⁱⁱⁱ polypeptide (FIG. 7B). In some embodiments, the terms JetB, JetBⁱⁱ, and JetBⁱⁱⁱ may be used interchangeably.

[1429] In some embodiments, the product of the jetB gene comprises a pfam13835 domain. In some embodiments, the product of the jetB gene comprises a DUF4194 domain. In some embodiments, the product of the jetB gene comprises a pfam09661 domain. In some embodiments, the product of the jetB gene comprises a DUF2398 domain. In some embodiments, the product of the jetB gene comprises a pfam13835 domain and a DUF4194 domain. In some embodiments, the product of the jetB gene comprises a pfam09661 domain and a DUF2398 domain. In some embodiments, the product of the jetB gene comprises a pfam13835 domain, or a DUF4194 domain, or pfam09661 domain, or a DUF2398 domain, or any combination thereof. In some embodiments, the product of the jetB gene comprises a pfam13835 domain, a DUF4194 domain, a pfam09661 domain, and a DUF2398 domain. In some embodiments, the jetB gene encodes a member of MukE-like family.

[1430] In some embodiments, JetB polypeptide is encoded by a gene positioned within 5-60 genes of a gene encoding a JetA, a JetC, and or a JetD polypeptide in a genome of a prokaryotic cell. In some embodiments, JetB polypeptide is encoded by a gene positioned within 5 genes upstream (5′) or downstream (3′) to a gene encoding a JetA, JetC, and or a JetD polypeptide in a genome of a prokaryotic cell.

[1431] In some embodiments, JetB and JetC are encoded by genes positioned sequentially 5′ to 3′ in a genome of a prokaryotic cell. In some embodiments JetB and JetC are encoded by genes positioned contiguously 5′ to 3′ in a genome of a prokaryotic cell. In some embodiments, JetB and JetD are encoded by genes positioned sequentially 5′ to 3′ in a genome of a prokaryotic cell. In some embodiments JetB and JetD are encoded by genes positioned contiguously 5′ to 3′ in a genome of a prokaryotic cell. In some embodiments, JetB and JetA are encoded by genes positioned sequentially 5′ to 3′ in a genome of a prokaryotic cell. In some embodiments JetB and JetA are encoded by genes positioned contiguously 5′ to 3′ in a genome of a prokaryotic cell. In some embodiments, JetB, JetC, and JetD are encoded by genes positioned sequentially 5′ to 3′ in a genome of a prokaryotic cell. In some embodiments, JetB, JetC, and JetD are encoded by genes positioned contiguously 5′ to 3′ in a genome of a prokaryotic cell.

[1432] In some embodiments, JetB polypeptide is encoded by a gene positioned within 5 genes upstream or downstream to a gene encoding jetA, jetC, and or jetD, in a genome of a prokaryotic cell. In some embodiments, JetB polypeptide is encoded by a gene positioned within 5 genes upstream or downstream to a gene encoding jetA in a genome of a prokaryotic cell. In some embodiments, JetB polypeptide is encoded by a gene positioned within 5 genes upstream or downstream to a gene encoding jetD in a genome of a prokaryotic cell. In some embodiments, JetB polypeptide is encoded by a gene positioned within 5 genes upstream or downstream to a gene encoding jetC in a genome of a prokaryotic cell.

[1433] In some embodiments, a JetB polypeptide is about 247 amino acids long (median gene size).

[1434] In some embodiments, the JetB polypeptide comprises an amino acid sequence having at least 80% homology to a sequence selected from the group consisting of the polypeptides referenced in Table 11, rows 2-3174, columns N and O. In some embodiments, the JetB polypeptide comprises an amino acid sequence having at least 80% homology to similar domain regions within a sequence selected from the group consisting of the polypeptides referenced in Table 11, rows 2-3174, columns N and O. In some embodiments, a homolog of the JetB polypeptide comprises a MukE-like family member. In some embodiments, the JetB polypeptide comprises an amino acid sequence having at least 80% identity to a sequence selected from the group consisting of the polypeptides referenced in Table 11, rows 2-3174, columns N and O. In some embodiments, the JetB polypeptide comprises an amino acid sequence having at least 80% identity to similar domain regions within a sequence selected from the group consisting of the polypeptides referenced in Table 11, rows 2-3174, columns N and O. In some embodiments, a JetB homolog comprises an amino acid sequence having at least 80% identity to a sequence selected from the group consisting of the polypeptides referenced in Table 11, rows 2-3174, columns N and O.

[1435] In some embodiments, a JetB polypeptide homolog comprises a MukE-like domain. In some embodiments, a JetB polypeptide homolog comprises a MukE-like activity.

[1436] In some embodiments, the JetB polypeptide comprises the amino acid sequence having at least 80% identity to a sequence selected from the group consisting of the polypeptides referenced in Table 11, rows 2-3174, columns N and O. In some embodiments, the JetB polypeptide comprises the amino acid sequence having at least 80% identity within similar domain regions within a sequence selected from the group consisting of the polypeptides referenced in Table 11, rows 2-3174, columns N and O.

[1437] In some embodiments, the JetB polypeptide comprises an amino acid sequence having at least 80%, at least 85%, at least 90%, or at least 95% homology to a sequence selected from the group consisting of the polypeptides referenced in Table 11, rows 2-3174, columns N and O. In some embodiments, the JetB polypeptide comprises the amino acid sequence having at least 80%, 85%, 90%, 95% homology within similar domain regions within a sequence selected from the group consisting of the polypeptides referenced in Table 11, rows 2-3174, columns N and O. In some embodiments, the JetB polypeptide comprises an amino acid sequence having at least 80%, at least 85%, at least 90%, or at least 95% identity to a sequence selected from the group consisting of the polypeptides referenced in Table 11, rows 2-3174, columns N and O. In some embodiments, the JetB polypeptide comprises the amino acid sequence having at least 80%, 85%, 90%, 95% identity within similar domain regions within a sequence selected from the group consisting of the polypeptides referenced in Table 11, rows 2-3174, columns N and O. In some embodiments, the JetB polypeptide comprises an amino acid sequence selected from the group consisting of the polypeptides referenced in Table 11, rows 2-3174, columns N and O.

[1438] In some embodiments, the JetB polypeptide comprises an amino acid sequence encoded by a nucleic acid sequence having at least 80%, at least 85%, at least 90%, or at least 95% homology to a sequence selected from the group consisting of the polynucleotides referenced in Table 11, rows 2-3174, columns N and P. In some embodiments, the JetB polypeptide comprises the amino acid sequence encoded by a nucleic acid sequence having at least 80%, 85%, 90%, 95% homology within similar domain regions within a sequence selected from the group consisting of the polynucleotides referenced in Table 11, rows 2-3174, columns N and P. In some embodiments, the JetB polypeptide comprises an amino acid sequence encoded by a nucleic acid sequence having at least 80%, at least 85%, at least 90%, or at least 95% identity to a sequence selected from the group consisting of the polynucleotides referenced in Table 11, rows 2-3174, columns N and P. In some embodiments, the JetB polypeptide comprises the amino acid sequence encoded by a nucleic acid sequence having at least 80%, 85%, 90%, 95% homology within similar domain regions within a sequence selected from the group consisting of the polynucleotides referenced in Table 11, rows 2-3174, columns N and P. In some embodiments, the JetB polypeptide comprises an amino acid sequence encoded from a nucleic acid sequence selected from the group consisting of the polynucleotides referenced in Table 11, rows 2-3174, columns N and P.

[1439] In some embodiments, the nucleic acid sequence of a jetB gene comprises a nucleic acid sequence having at least 80%, at least 85%, at least 90%, or at least 95% homology to a sequence selected from the group consisting of the polynucleotides referenced in Table 11, rows 2-3174, columns N and P. In some embodiments, the jetB gene comprises a nucleic acid sequence having at least 80%, 85%, 90%, 95% homology within encoded similar domain regions in comparison with nucleotide sequence encoding these domain within a sequence selected from the group consisting of the polynucleotides referenced in Table 11, rows 2-3174, columns N and P. In some embodiments, the nucleic acid sequence of a jetB gene comprises a nucleic acid sequence having at least 80%, at least 85%, at least 90%, or at least 95% identity to a sequence selected from the group consisting of the polynucleotides referenced in Table 11, rows 2-3174, columns N and P. In some embodiments, the jetB gene comprises a nucleic acid sequence having at least 80%, 85%, 90%, 95% identity within encoded similar domain regions in comparison with nucleotide sequence encoding these domain within a sequence selected from the group consisting of the polynucleotides referenced in Table 11, rows 2-3174, columns N and P. In some embodiments, the nucleic acid sequence of a jetB gene comprises a nucleic acid sequence selected from the group consisting of the polynucleotides referenced in Table 11, rows 2-3174, columns N and P.

[1440] In some embodiments, the term “JetC” refers to the polynucleotide or expression product e.g., the polypeptide encoded by the jetC gene, comprising variants jetC, jetCⁱⁱ and jetCⁱⁱⁱ, associated with Defense Systems Xa, Xb, and Xc, respectively. In some embodiments, the terms “jetC”, “jetCⁱⁱ” and “jetCⁱⁱⁱ”, may be used interchangeably. In some embodiments, the term “JetC” refers to a JetC polypeptide or a JetCⁱⁱ polypeptide or a JetCⁱⁱⁱ polypeptide (FIG. 7B). In some embodiments, the terms JetC, JetCⁱⁱ, and JetCⁱⁱⁱ may be used interchangeably.

[1441] In some embodiments, the product of a jetC gene comprises a pfam13555 domain. In some embodiments, the product of a jetC gene comprises a pfam13558 domain. In some embodiments, the product of a jetC gene comprises a COG4913 domain. In some embodiments, the product of a jetC gene comprises a COG1196 domain. In some embodiments, the product of a jetC gene comprises a pfam1555 domain or a pfam13558 domain or a COG4913 domain, or a COG1196 domain, or a combination thereof. In some embodiments, the product of a jetC gene comprises a pfam1555 domain and a pfam13558 domain. In some embodiments, the product of a jetC gene comprises a pfam1555 domain, a pfam13558 domain, and a COG4913 domain. In some embodiments, the product of a jetC gene comprises a pfam1555 domain and a COG4913 domain. In some embodiments, the product of a jetC gene comprises a pfam13558 domain and a COG4913 domain. In some embodiments, the product of a jetC gene comprises a MukB-like family member. MukB appears to be functionally related to the structural maintenance of chromosomes (SMC) proteins. MukB is also known as the E. coli condesin, a structural maintenance of chromosomes (SMC)-like protein, which forms a complex with MukE and the kleisin MukF. MukB is known to be able to mediate knotting of a DNA ring, an intramolecular reaction. In some embodiments, the product of a jetC gene comprises an ATP binding domain. In some embodiments, the product of a jetC gene comprises an exonuclease SbcC domain. In some embodiments, the product of a jetC gene comprises a MukB-like family member, or an ATP binding domain or an exonuclease SbcC domain, or a combination thereof. In some embodiments, the product of a jetC gene comprises a MukB-like family member and an ATP binding domain. In some embodiments, the product of a jetC gene comprises a MukB-like family member and an exonuclease SbcC domain. In some embodiments, the product of a jetC gene comprises an ATP binding domain and an exonuclease SbcC domain. In some embodiments, the product of a jetC gene comprises a MukB-like family member, an ATP binding domain and an exonuclease SbcC domain.

[1442] In some embodiments, JetC polypeptide is encoded by a gene positioned within 5-60 genes of a gene encoding JetA, and/or JetB and/or JetD in a genome of a prokaryotic cell. In some embodiments, JetC polypeptide is encoded by a gene positioned within 5 genes upstream (5′) or downstream (3′) to a gene encoding JetA, and/or JetB and/or JetD in a genome of a prokaryotic cell. In some embodiments, JetC polypeptide is encoded by a gene positioned within 5 genes upstream and downstream to a gene encoding JetA, and/or JetB and/or JetD in a genome of a prokaryotic cell.

[1443] In some embodiments, JetC and JetD are encoded by genes positioned sequentially 5′ to 3′ in a genome of a prokaryotic cell. In some embodiments, JetC and JetD are encoded by genes positioned contiguously 5′ to 3′ in a genome of a prokaryotic cell.

[1444] In some embodiments, jetC and jetD genes are positioned sequentially 5′ to 3′ in a genome of a prokaryotic cell. In some embodiments, jetC and jetD genes are positioned contiguously 5′ to 3′ in a genome of a prokaryotic cell.

[1445] In some embodiments, a JetC polypeptide is about 1476 amino acids long (median gene size).

[1446] In some embodiments, the JetC polypeptide comprises an amino acid sequence having at least 80% homology to a sequence selected from the group consisting of the polypeptides referenced in Table 11, rows 2-3174, columns R and S. In some embodiments, the JetC polypeptide comprises an amino acid sequence having at least 80% identity to a sequence selected from the group consisting of the polypeptides referenced in Table 11, rows 2-3174, columns R and S. In some embodiments, the JetC polypeptide comprises an amino acid sequence having at least 80% homology to similar domain regions within a sequence selected from the group consisting of the polypeptides referenced in Table 11, rows 2-3174, columns R and S. In some embodiments, the JetC polypeptide comprises an amino acid sequence having at least 80% identity to similar domain regions a sequence selected from the group consisting of the polypeptides referenced in Table 11, rows 2-3174, columns R and S. In some embodiments, an JetC homolog comprises an amino acid sequence having at least 80% homology to a sequence selected from the group consisting of the polypeptides referenced in Table 11, rows 2-3174, columns R and S.

[1447] In some embodiments, an JetC polypeptide homolog comprises an ATP binding domain. In some embodiments, an JetC polypeptide homolog comprises an exonuclease SbcC activity. In some embodiments, an JetC polypeptide homolog comprises an MukB like activity.

[1448] In some embodiments, the JetC polypeptide comprises an amino acid sequence having at least 80%, at least 85%, at least 90%, or at least 95% homology to a sequence selected from the group consisting of SEQ ID NOs: In some embodiments, the JetC polypeptide comprises an amino acid sequence having at least 80%, at least 85%, at least 90%, or at least 95% homology to similar domain regions within a sequence selected from the group consisting of the polypeptides referenced in Table 11, rows 2-3174, columns R and S. In some embodiments, a JetC homolog comprises an ATP binding domain. In some embodiments, a JetC homolog comprises an exonuclease SbcC activity. In some embodiments, a JetC homolog comprises a member of the MukB-like family. In some embodiments, a JetC homolog comprises an ATP binding domain, or an exonuclease SbcC activity, or a member of the MukB-like family, or any combination thereof. In some embodiments, a JetC homolog comprises an ATP binding domain and an exonuclease SbcC activity. In some embodiments, a JetC homolog comprises an ATP binding domain and a member of the MukB-like family. In some embodiments, a JetC homolog comprises an exonuclease SbcC activity and a member of the MukB-like family. In some embodiments, a JetC homolog comprises an ATP binding domain, and an exonuclease SbcC activity, and a member of the MukB-like family.

[1449] In some embodiments, the JetC polypeptide comprises an amino acid sequence having at least 80%, at least 85%, at least 90%, or at least 95% identity to a sequence selected from the group consisting of the polypeptides referenced in Table 11, rows 2-3174, columns R and S. In some embodiments, the JetC polypeptide comprises an amino acid sequence having at least 80%, at least 85%, at least 90%, or at least 95% identity to similar domain regions within a sequence selected from the group consisting of the polypeptides referenced in Table 11, rows 2-3174, columns R and S. In some embodiments, the JetC polypeptide comprises an amino acid sequence selected from the group consisting of the polypeptides referenced in Table 11, rows 2-3174, columns R and S.

[1450] In some embodiments, the JetC polypeptide comprises an amino acid sequence encoded by a nucleic acid sequence having at least 80%, at least 85%, at least 90%, or at least 95% homology to a sequence selected from the group consisting of the polynucleotides referenced in Table 11, rows 2-3174, columns R and T. In some embodiments, the JetC polypeptide comprises the amino acid sequence encoded by a nucleic acid sequence having at least 80%, 85%, 90%, 95% homology within similar domain regions within a sequence selected from the group consisting of the polynucleotides referenced in Table 11, rows 2-3174, columns R and T. In some embodiments, the JetC polypeptide comprises an amino acid sequence encoded by a nucleic acid sequence having at least 80%, at least 85%, at least 90%, or at least 95% identity to a sequence selected from the group consisting of the polynucleotides referenced in Table 11, rows 2-3174, columns R and T. In some embodiments, the JetC polypeptide comprises the amino acid sequence encoded by a nucleic acid sequence having at least 80%, 85%, 90%, 95% homology within similar domain regions within a sequence selected from the group consisting of the polynucleotides referenced in Table 11, rows 2-3174, columns R and T. In some embodiments, the JetC polypeptide comprises an amino acid sequence encoded from a nucleic acid sequence selected from the group consisting of the polynucleotides referenced in Table 11, rows 2-3174, columns R and T.

[1451] In some embodiments, the nucleic acid sequence of a jetC gene comprises a nucleic acid sequence having at least 80%, at least 85%, at least 90%, or at least 95% homology to a sequence selected from the group consisting of the polynucleotides referenced in Table 11, rows 2-3174, column N. In some embodiments, the jetC gene comprises a nucleic acid sequence having at least 80%, 85%, 90%, 95% homology within encoded similar domain regions in comparison with nucleotide sequence encoding these domain within a sequence selected from the group consisting of the polynucleotides referenced in Table 11, rows 2-3174, columns R and T. In some embodiments, the nucleic acid sequence of a jetC gene comprises a nucleic acid sequence having at least 80%, at least 85%, at least 90%, or at least 95% identity to a sequence selected from the group consisting of the polynucleotides referenced in Table 11, rows 2-3174, columns R and T. In some embodiments, the jetC gene comprises a nucleic acid sequence having at least 80%, 85%, 90%, 95% identity within encoded similar domain regions in comparison with nucleotide sequence encoding these domain within a sequence selected from the group consisting of the polynucleotides referenced in Table 11, rows 2-3174, columns R and T. In some embodiments, the nucleic acid sequence of a jetC gene comprises a nucleic acid sequence selected from the group consisting of the polynucleotides referenced in Table 11, rows 2-3174, columns R and T.

[1452] In some embodiments, the jetC gene homolog encodes a polypeptide comprising an ATP binding domain. In some embodiments, a jetC gene homolog encodes a polypeptide comprising an exonuclease SbcC activity. In some embodiments, a jetC gene homolog encodes a polypeptide comprising a member of the MukB-like family. In some embodiments, a JetC homolog jetC gene homolog encodes a polypeptide comprising ATP binding domain, or an exonuclease SbcC activity, or a member of the MukB-like family, or any combination thereof. In some embodiments, a jetC gene homolog encodes a polypeptide comprising an ATP binding domain and an exonuclease SbcC activity. In some embodiments, a jetC gene homolog encodes a polypeptide comprising an ATP binding domain and a member of the MukB-like family. In some embodiments, a jetC gene homolog encodes a polypeptide comprising an exonuclease SbcC activity and a member of the MukB-like family. In some embodiments, a jetC gene homolog encodes a polypeptide comprising an ATP binding domain, and an exonuclease SbcC activity, and a member of the MukB-like family.

[1453] In some embodiments, the term “JetD” refers to the polynucleotide or expression product e.g., the polypeptide encoded by the jetD gene, comprising variants jetD, jetDⁱⁱ and jetDⁱⁱⁱ, associated with Defense Systems Xa, Xb, and Xc, respectively. In some embodiments, the terms “jetD”, “jetDⁱⁱ” and “jetDⁱⁱⁱ”, may be used interchangeably. In some embodiments, the term “JetD” refers to a JetD polypeptide or a JetDⁱⁱ polypeptide or a JetDⁱⁱⁱ polypeptide (FIG. 7B). In some embodiments, the terms JetD, JetDⁱⁱ, and JetDⁱⁱⁱ may be used interchangeably.

[1454] In some embodiments, the product of the jetD gene comprises a pfam11795 domain. In some embodiments, the product of the jetD gene comprises a DUF3322 domain. In some embodiments, the product of the jetD gene comprises a pfam09983 domain. In some embodiments, the product of the jetD gene comprises a DUF2220 domain. In some embodiments, the product of the jetD gene comprises a pfam11796 domain. In some embodiments, the product of the jetD gene comprises a DUF3323 domain. In some embodiments, the product of the jetD gene comprises a pfam09664 domain. In some embodiments, the product of the jetD gene comprises a DUF2399 domain. In some embodiments, the product of the jetD gene comprises a COG4924 domain. In some embodiments, the product of the jetD gene comprises a pfam11795 domain, or a DUF3322 domain, or a pfam09983 domain, or a DUF2220 domain, or a pfam11796 domain, or a DUF3323 domain, or a pfam09664 domain, or DUF2399 domain, or a COG4924 domain, or any combination thereof. In some embodiments, the product of the jetD gene comprises a pfam11795 domain and a DUF3322 domain. In some embodiments, the product of the jetD gene comprises a pfam09983 and a DUF2220 domain. In some embodiments, the product of the jetD gene comprises a pfam11796 domain and a DUF3323 domain. In some embodiments, the product of the jetD gene comprises a pfam09664 domain and DUF2399 domain. In some embodiments, the product of the jetD gene comprises a pfam11796 domain and a DUF3323 domain, and a pfam09664 domain, and a DUF2399 domain. In some embodiments, the product of the jetD gene comprises a pfam11795 domain and a DUF3322 domain, and a pfam09983 domain, and a DUF2220 domain. In some embodiments, the product of the jetD gene comprises a pfam11795 domain and a DUF3322 domain, and a pfam09983 domain, and a DUF2220 domain, and a COG4924 domain.

[1455] In some embodiments, a JetD polypeptide comprises a pfam11795 domain. In some embodiments, a JetD polypeptide comprises a DUF3322 domain. In some embodiments, a JetD polypeptide comprises a pfam09983 domain. In some embodiments, a JetD polypeptide comprises a DUF2220 domain. In some embodiments, a JetD polypeptide comprises a pfam11796 domain. In some embodiments, a JetD polypeptide comprises a DUF3323 domain. In some embodiments, a JetD polypeptide comprises a pfam09664 domain. In some embodiments, a JetD polypeptide comprises a DUF2399 domain. In some embodiments, a JetD polypeptide comprises a COG4924 domain. In some embodiments, a JetD polypeptide comprises a pfam11795 domain, or a DUF3322 domain, or a pfam09983 domain, or a DUF2220 domain, or a pfam11796 domain, or a DUF3323 domain, or a pfam09664 domain, or DUF2399 domain, or a COG4924 domain, or any combination thereof. In some embodiments, a JetD polypeptide comprises a pfam11795 domain and a DUF3322 domain. In some embodiments, a JetD polypeptide comprises a pfam09983 and a DUF2220 domain. In some embodiments, a JetD polypeptide comprises a pfam11796 domain and a DUF3323 domain. In some embodiments, a JetD polypeptide comprises a pfam09664 domain and DUF2399 domain. In some embodiments, a JetD polypeptide comprises a pfam11796 domain and a DUF3323 domain, and a pfam09664 domain, and a DUF2399 domain. In some embodiments, a JetD polypeptide comprises a pfam11795 domain and a DUF3322 domain, and a pfam09983 domain, and a DUF2220 domain. In some embodiments, a JetD polypeptide comprises a pfam11795 domain and a DUF3322 domain, and a pfam09983 domain, and a DUF2220 domain, and a COG4924 domain.

[1456] In some embodiments, a JetD polypeptide is encoded by a gene positioned within 5-60 genes of a gene encoding JetA, and/or JetB and/or JetC in a genome of a prokaryotic cell. In some embodiments, a JetD polypeptide is encoded by a gene positioned within 5 genes upstream (5′) or downstream (3′) to a gene encoding JetA, and/or JetB and/or JetC in a genome of a prokaryotic cell. In some embodiments, JetD polypeptide is encoded by a gene positioned within 5 genes upstream or downstream to a gene encoding JetA, and/or JetB and JetC in a genome of a prokaryotic cell.

[1457] In some embodiments, a JetD polypeptide is about 347 amino acids long (median gene size).

[1458] In some embodiments, the JetD polypeptide comprises an amino acid sequence having at least 80% homology to a sequence selected from the group consisting of the polypeptides referenced in Table 11, rows 2-3174, columns V and W. In some embodiments, the JetD polypeptide comprises an amino acid sequence having at least 80% homology to similar domain regions within a sequence selected from the group consisting of the polypeptides referenced in Table 11, rows 2-3174, columns V and W. In some embodiments, a JetD polypeptide homologue comprises a topoisomerase IV/VI activity. In some embodiments, the JetD polypeptide comprises an amino acid sequence having at least 80% identity to a sequence selected from the group consisting of the polypeptides referenced in Table 11, rows 2-3174, columns V and W. In some embodiments, the JetD polypeptide comprises an amino acid sequence having at least 80% identity to similar domain regions within a sequence selected from the group consisting of the polypeptides referenced in Table 11, rows 2-3174, columns V and W. In some embodiments, an JetD homolog comprises an amino acid sequence having at least 80% identity to a sequence selected from the group consisting of the polypeptides referenced in Table 11, rows 2-3174, columns V and W.

[1459] In some embodiments, a JetD polypeptide homolog comprises a topoisomerase IV/VI domain. In some embodiments, a JetD polypeptide homolog comprises a topoisomerase IV/VI structural domain. In some embodiments, a JetD polypeptide homolog comprises a topoisomerase IV/VI activity.

[1460] In some embodiments, the JetD polypeptide comprises an amino acid sequence having at least 80%, at least 85%, at least 90%, at least 95% homology to a sequence selected from the group consisting of the polypeptides referenced in Table 11, rows 2-3174, columns V and W. In some embodiments, the JetD polypeptide comprises an amino acid sequence having at least 80%, at least 85%, at least 90%, at least 95% identity to a sequence selected from the group consisting of the polypeptides referenced in Table 11, rows 2-3174, columns V and W. In some embodiments, the JetD polypeptide comprises an amino acid sequence selected from the group consisting of the polypeptides referenced in Table 11, rows 2-3174, columns V and W.

[1461] In some embodiments, the JetD polypeptide comprises an amino acid sequence encoded from a nucleic acid sequence having at least 80%, at least 85%, at least 90%, or at least 95% homology to a sequence selected from the group consisting of the polynucleotides referenced in Table 11, rows 2-3174, columns V and X. In some embodiments, the JetD polypeptide comprises an amino acid sequence encoded from a nucleic acid sequence having at least 80%, at least 85%, at least 90%, or at least 95% identity to a sequence selected from the group consisting of the polynucleotides referenced in Table 11, rows 2-3174, columns V and X. In some embodiments, the JetD polypeptide comprises an amino acid sequence encoded from a nucleic acid sequence selected from the group consisting of the polynucleotides referenced in Table 11, rows 2-3174, columns V and X.

[1462] In some embodiments, the jetD gene comprises a nucleic acid sequence having at least 80%, at least 85%, at least 90%, or at least 95% homology to a sequence selected from the group consisting of the polynucleotides referenced in Table 11, rows 2-3174, columns V and X. In some embodiments, a mksG gene homolog encodes a polypeptide comprising a topoisomerase IV/VI activity. In some embodiments, the jetD gene comprises a nucleic acid sequence having at least 80%, at least 85%, at least 90%, or at least 95% identity to a sequence selected from the group consisting of the polynucleotides referenced in Table 11, rows 2-3174, columns V and X. In some embodiments, the nucleic acid sequence of the jetD gene is selected from the group consisting of the polynucleotides referenced in Table 11, rows 2-3174, columns V and X.

[1463] A skilled artisan would appreciate that the terms a “functional portion of a Defense System X component” or “functional fragment of Defense System X component” or “functional portion of a Wadjet defense system component” or “functional fragment of Wadjet defense system component” refers to a functional portion of a Wadjet polynucleotide or polypeptide, as disclosed herein, which expression is sufficient to elicit an anti-plasmid transformation efficiency activity alone or in combination with the at least one of the other Wadjet polynucleotides or polypeptides disclosed herein or functional portions thereof.

[1464] The terms “JetA”, “JetB”, “JetC”, “JetD”, “JetAⁱⁱ”, “JetBⁱⁱ”, “JetCⁱⁱ”, “JetDⁱⁱ”, jetAⁱⁱⁱ”, “jetBⁱⁱⁱ”, “jetCⁱⁱⁱ” and “jetDⁱⁱⁱ’ also refer to functional homologs, which exhibit the desired activity (i.e., conferring decreased efficiency of plasmid transformation). Such homologs can be, for example, at least 80%, at least 81%, at least 82%, at least 83%, at least 84%, at least 85%, at least 86%, at least 87%, at least 88%, at least 89%, at least 90%, at least 91%, at least 92%, at least 93%, at least 94%, at least 95%, at least 96%, at least 97%, at least 98%, at least 99% or 100% identical or homologous to the polypeptide sequences referenced in Table 11 rows 2-3174 columns J and K, N and O, R and S and V and W, respectively, or 80%, at least 81%, at least 82%, at least 83%, at least 84%, at least 85%, at least 86%, at least 87%, at least 88%, at least 89%, at least 90%, at least 91%, at least 92%, at least 93%, at least 94%, at least 95%, at least 96%, at least 97%, at least 98%, at least 99% or 100% identical or homologous to the polynucleotide sequences referenced in Table 11 rows 2-3174 columns J and L, N and P, R and T and V and X. In some embodiments, such homologs comprise at least 80%, at least 81%, at least 82%, at least 83%, at least 84%, at least 85%, at least 86%, at least 87%, at least 88%, at least 89%, at least 90%, at least 91%, at least 92%, at least 93%, at least 94%, at least 95%, at least 96%, at least 97%, at least 98%, at least 99% or 100% homology or identity within similar domain regions of the polypeptide sequences referenced in Table 11 rows 2-3174 columns J and K, N and O, R and S and V and W, or 80%, at least 81%, at least 82%, at least 83%, at least 84%, at least 85%, at least 86%, at least 87%, at least 88%, at least 89%, at least 90%, at least 91%, at least 92%, at least 93%, at least 94%, at least 95%, at least 96%, at least 97%, at least 98%, at least 99% or 100% identity or homology within nucleotide sequences encoding similar domain regions to the polynucleotide sequences referenced in Table 11 rows 2-3174 columns J and L, N and P, R and T and V and X.

[1465] Table 11 presents embodiments of components of Defense System X (Xa, Xb, and Xc) that may be found in a diverse array of bacteria and archaea genomes (referenced in Table 18). Table 11 presents embodiments of nucleic acid sequences encoding gene cassettes of Defense System X (Xa, Xb, and Xc; referenced in Table 18).

[1466] Defense System Components, Nucleic Acid Sequences Thereof, and Amino Acid Sequences Thereof

[1467] Defense System components, nucleic acid sequences thereof, amino acid sequences thereof, and gene cassette nucleotide sequences thereof are presented below in Table 18.

TABLE 18
Defense Systems: Components and Gene Cassettes-
polypeptide and nucleotide sequences thereof

| | Com- | | |
|---|---|---|---|
| Defense System | ponent | Composition | Table References |
| Defense System Ia | ZorA | polypeptides | Table 8; Rows 2-1174; |
| ZORYA Type I | | | Column J “ZorA |
| | | | protein_accession” and |
| | | | Column K “PRT SEQ ID |
| | | | NO:” |
| Defense System Ia | ZorB | polypeptides | Table 8; Rows 2-1174; |
| ZORYA Type I | | | Column N “ZorB |
| | | | protein_accession” and |
| | | | Column O “PRT SEQ ID |
| | | | NO:” |
| Defense System Ia | ZorC | polypeptides | Table 8; Rows 2-1174; |
| ZORYA Type I | | | Column R “ZorC |
| | | | protein_accession” and |
| | | | Column S “PRT SEQ ID |
| | | | NO:” |
| Defense System Ia | ZorD | polypeptides | Table 8; Rows 2-1174; |
| ZORYA Type I | | | Column V “ZorD |
| | | | protein_accession” and |
| | | | Column W “PRT SEQ ID |
| | | | NO:” |
| Defense System Ia | zorA | poly- | Table 8; Rows 2-1174; |
| ZORYA Type I | | nucleotides | Column J “ZorA |
| | | | protein_accession” and |
| | | | Column L “DNA SEQ ID |
| | | | NO:” |
| Defense System Ia | zorB | poly- | Table 8; Rows 2-1174; |
| ZORYA Type I | | nucleotides | ColumnN “ZorB |
| | | | protein_accession” and |
| | | | Column P “DNA SEQ ID |
| | | | NO:” |
| Defense System Ia | zorC | poly- | Table 8; Rows 2-1174; |
| ZORYA Type I | | nucleotides | ColumnR “ZorC |
| | | | protein_accession” and |
| | | | Column T “DNA SEQ ID |
| | | | NO:” |
| Defense System Ia | zorD | poly- | Table 8; Rows 2-1174; |
| ZORYA Type I | | nucleotides | ColumnV “ZorD |
| | | | protein_accession” and |
| | | | Column X “DNA SEQ ID |
| | | | NO:” |
| Defense System Ia | Gene | poly- | Table 8; Rows 2-1174; |
| ZORYA Type I | Cassette | nucleotides | Column G |
| | | | “genomic_accession” with |
| | | | Start in Column AD |
| | | | “Genomic Start Point” and |
| | | | End in Column AE |
| | | | “Genomic End Point” |
| Defense System Ib | ZorA | polypeptides | Table 8; Rows 1175-1830; |
| ZORYA Type II | | | Column J “ZorA |
| | | | protein_accession” and |
| | | | Column K “PRT SEQ ID |
| | | | NO:” |
| Defense System Ib | ZorB | polypeptides | Table 8; Rows 1175-1830; |
| ZORYA Type I | | | ColumnN “ZorB |
| | | | protein_accession” and |
| | | | Column O “PRT SEQ ID |
| | | | NO:” |
| Defense System Ib | ZorE | polypeptides | Table 8; Rows 1175-1830; |
| ZORYA Type I | | | Column Z “ZorE |
| | | | protein_accession” and |
| | | | Column AA “PRT SEQ ID |
| | | | NO:” |
| Defense System Ib | zorA | poly- | Table 8; Rows 1175-1830; |
| ZORYA Type I | | nucleotides | Column J “ZorA |
| | | | protein_accession” and |
| | | | Column L “DNA SEQ ID |
| | | | NO:” |
| Defense System Ib | zorB | poly- | Table 8; Rows 1175-1830; |
| ZORYA Type I | | nucleotides | Column N “ZorB |
| | | | protein_accession” and |
| | | | Column P “DNA SEQ ID |
| | | | NO:” |
| Defense System Ib | zorE | poly- | Table 8; Rows 1175-1830; |
| ZORYA Type I | | nucleotides | ColumnZ “ZorE |
| | | | protein_accession” and |
| | | | Column AB “DNA SEQ ID |
| | | | NO:” |
| Defense System Ib | Gene | poly- | Table 8; Rows 1175-1830; |
| ZORYA Type I | Cassette | nucleotides | Column G |
| | | | “genomic_accession” with |
| | | | Start in Column AD |
| | | | “Genomic Start Point” and |
| | | | End in Column AE |
| | | | “Genomic End Point” |
| Defense System II | ThsA | polypeptides | Table 9; Rows 2-2100; |
| Thoeris | | | Column I “ThsA |
| | | | protein_accession” and |
| | | | Column J “PRT SEQ ID |
| | | | NO:” |
| Defense System II | ThsB | polypeptides | Table 9; Rows 2-2100; |
| Thoeris | | | Column M “ThsBⁱ |
| | | | protein_accession” and |
| | | | Column N “PRT SEQ ID |
| | | | NO:”, Column Q “ThsBⁱⁱ |
| | | | protein_accession” and |
| | | | Column R “PRT SEQ ID |
| | | | NO:”, Column U “ThsBⁱⁱⁱ |
| | | | protein_accession” and |
| | | | Column V “PRT SEQ ID |
| | | | NO:”, Column Y “ThsB^{iv} |
| | | | protein_accession” and |
| | | | Column Z “PRT SEQ ID |
| | | | NO:”, and Column AC |
| | | | “ThsB^{v} |
| | | | protein_accession” and |
| | | | Column AD “PRT SEQ ID |
| | | | NO:” |
| Defense System II | thsA | poly- | Table 9; Rows 2-2100; |
| Thoeris | | nucleotides | Column I “ThsA |
| | | | protein_accession” and |
| | | | Column K “DNA SEQ ID |
| | | | NO:” |
| Defense System II | thsB | poly- | Table 9; Rows 2-2100; |
| Thoeris | | nucleotides | Column M “ThsBⁱ |
| | | | protein_accession” and |
| | | | Column O “DNA SEQ ID |
| | | | NO:”, Column Q “ThsBⁱⁱ |
| | | | protein_accession” and |
| | | | Column S “DNA SEQ ID |
| | | | NO:”, Column U “ThsBⁱⁱⁱ |
| | | | protein_accession” and |
| | | | Column W “DNA SEQ ID |
| | | | NO:”, Column Y “ThsB^{iv} |
| | | | protein_accession” and |
| | | | Column AA “DNA SEQ ID |
| | | | NO:”, and Column AC |
| | | | “ThsB^{v} |
| | | | protein_accession” and |
| | | | Column AE “DNA SEQ ID |
| | | | NO:” |
| Defense System II | Gene | poly- | Table 9; Rows 2-2100; |
| Thoeris | Cassette | nucleotides | Column G |
| | | | “genomic_accession” with |
| | | | Start in Column AG |
| | | | “Genomic Start Point” and |
| | | | End in Column AH |
| | | | “Genomic End Point” |
| Defense System | DruA | polypeptides | Table 10; Rows 2-123; |
| IIIa Druantia | | | Column J “DruA |
| Type I | | | protein_accession” and |
| | | | Column K “PRT SEQ ID |
| | | | NO:” |
| Defense System | DruB | polypeptides | Table 10; Rows 2-123; |
| IIIa Druantia | | | Column N “DruB |
| Type I | | | protein_accession” and |
| | | | Column O “PRT SEQ ID |
| | | | NO:” |
| Defense System | DruC | polypeptides | Table 10; Rows 2-123; |
| IIIa Druantia | | | Column R “DruC |
| Type I | | | protein_accession” and |
| | | | Column S “PRT SEQ ID |
| | | | NO:” |
| Defense System | DruD | polypeptides | Table 10; Rows 2-123; |
| IIIa Druantia | | | Column V “DruD |
| Type I | | | protein_accession” and |
| | | | Column W “PRT SEQ ID |
| | | | NO:” |
| Defense System | DruE | polypeptides | Table 10; Rows 2-123; |
| IIIa Druantia | | | Column Z “DruE |
| Type I | | | protein_accession” and |
| | | | Column AA “PRT SEQ ID |
| | | | NO:” |
| Defense System | druA | poly- | Table 10; Rows 2-123; |
| IIIa Druantia | | nucleotides | Column J “DruA |
| Type I | | | protein_accession” and |
| | | | Column L “DNA SEQ ID |
| | | | NO:” |
| Defense System | druB | poly- | Table 10; Rows 2-123; |
| IIIa Druantia | | nucleotides | Column N “DruB |
| Type I | | | protein_accession” and |
| | | | Column P “DNA SEQ ID |
| | | | NO:” |
| Defense System | druC | poly- | Table 10; Rows 2-123; |
| IIIa Druantia | | nucleotides | Column R “DruC |
| Type I | | | protein_accession” and |
| | | | Column T “DNA SEQ ID |
| | | | NO:” |
| Defense System | druD | poly- | Table 10; Rows 2-123; |
| IIIa Druantia | | nucleotides | Column V “DruD |
| Type I | | | protein_accession” and |
| | | | Column X “DNA SEQ ID |
| | | | NO:” |
| Defense System | druE | poly- | Table 10; Rows 2-123; |
| IIIa Druantia | | nucleotides | Column Z “DruE |
| Type I | | | protein_accession” and |
| | | | Column AB “DNA SEQ ID |
| | | | NO:” |
| Defense System | Gene | poly- | Table 10; Rows 2-123; |
| IIIa Druantia | Cassette | nucleotides | Column G |
| Type I | | | “genomic_accession” with |
| | | | Start in Column AT |
| | | | “Genomic Start Point” and |
| | | | End in Column AU |
| | | | “Genomic End Point” |
| Defense System | DruM | polypeptides | Table 10; Rows 124-295; |
| IIIb Druantia | | | Column AD “DruM |
| Type II | | | protein_accession” and |
| | | | Column AE “PRT SEQ ID |
| | | | NO:” |
| Defense System | DruF | polypeptides | Table 10; Rows 124-295; |
| IIIb Druantia | | | Column AH “DruF |
| Type II | | | protein_accession” and |
| | | | Column AI “PRT SEQ ID |
| | | | NO:” |
| Defense System | DruG | polypeptides | Table 10; Rows 124-295; |
| IIIb Druantia | | | Column AL “DruG |
| Type II | | | protein_accession” and |
| | | | Column AM “PRT SEQ ID |
| | | | NO:” |
| Defense System | DruE | polypeptides | Table 10; Rows 124-295; |
| IIIb Druantia | | | Column Z “DruE |
| Type II | | | protein_accession” and |
| | | | Column AA “PRT SEQ ID |
| | | | NO:” |
| Defense System | druM | poly- | Table 10; Rows 124-295; |
| IIIb Druantia | | nucleotides | Column AD “DruM |
| Type II | | | protein_accession” and |
| | | | Column AF “DNA SEQ ID |
| | | | NO:” |
| Defense System | druF | poly- | Table 10; Rows 124-295; |
| IIIb Druantia | | nucleotides | Column AH “DruF |
| Type II | | | protein_accession” and |
| | | | Column AJ “DNA SEQ ID |
| | | | NO:” |
| Defense System | druG | poly- | Table 10; Rows 124-295; |
| IIIb Druantia | | nucleotides | Column AL “DruG |
| Type II | | | protein_accession” and |
| | | | Column AN “DNA SEQ ID |
| | | | NO:” |
| Defense System | druE | poly- | Table 10; Rows 124-295; |
| IIIb Druantia | | nucleotides | Column Z “DruE |
| Type II | | | protein_accession” and |
| | | | Column AB “DNA SEQ ID |
| | | | NO:” |
| Defense System | Gene | poly- | Table 10; Rows 124-295; |
| IIIb Druantia | Cassette | nucleotides | Column G |
| Type II | | | “genomic_accession” with |
| | | | Start in Column AT |
| | | | “Genomic Start Point” and |
| | | | End in Column AU |
| | | | “Genomic End Point” |
| Defense System | DruH | polypeptides | Table 10; Rows 296-1343; |
| IIIc Druantia | | | Column AP “DruH |
| Type III | | | protein_accession” and |
| | | | Column AQ “PRT SEQ ID |
| | | | NO:” |
| Defense System | DruE | polypeptides | Table 10; Rows 296-1343; |
| IIIc Druantia | | | Column Z “DruE |
| Type III | | | protein_accession” and |
| | | | Column AA “PRT SEQ ID |
| | | | NO:” |
| Defense System | druH | poly- | Table 10; Rows 296-1343; |
| IIIc Druantia | | nucleotides | Column AP “DruH |
| Type III | | | protein_accession” and |
| | | | Column AR “DNA SEQ ID |
| | | | NO:” |
| Defense System | druE | poly- | Table 10; Rows 296-1343; |
| IIIc Druantia | | nucleotides | Column Z “DruE |
| Type III | | | protein_accession” and |
| | | | Column AB “DNA SEQ ID |
| | | | NO:” |
| Defense System | Gene | poly- | Table 10; Rows 296-1343; |
| IIIc Druantia | Cassette | nucleotides | Column G |
| Type III | | | “genomic_accession” with |
| | | | Start in Column AT |
| | | | “Genomic Start Point” and |
| | | | End in Column AU |
| | | | “Genomic End Point” |
| Defense System IV | HamA | polypeptides | Table 12; Rows 2-1782; |
| Hachiman | | | Column H “HamA |
| | | | protein_accession” and |
| | | | Column I “PRT SEQ ID |
| | | | NO:” |
| Defense System | HamB | polypeptides | Table 12; Rows 2-1782; |
| IV Hachiman | | | Column L “HamB |
| | | | protein_accession” and |
| | | | Column M “PRT SEQ ID |
| | | | NO:” |
| Defense System | hamA | poly- | Table 12; Rows 2-1782; |
| IV Hachiman | | nucleotides | Column H “HamA |
| | | | protein_accession” and |
| | | | Column J “DNA SEQ ID |
| | | | NO:” |
| Defense System | hamB | poly- | Table 12; Rows 2-1782; |
| IV Hachiman | | nucleotides | Column L “HamB |
| | | | protein_accession” and |
| | | | Column N “DNA SEQ ID |
| | | | NO:” |
| Defense System | Gene | poly- | Table 12; Rows 2-1782; |
| IV Hachiman | Cassette | nucleotides | Column G |
| | | | “genomic_accession” with |
| | | | Start in Column P |
| | | | “Genomic Start Point” |
| | | | and End in Column Q |
| | | | “Genomic End Point” |
| Defense System V | SduA | polypeptides | Table 13; Rows 2-1247; |
| Shedu | | | Column H “SduA |
| | | | protein_accession” and |
| | | | Column I “PRT SEQ ID |
| | | | NO:” |
| Defense System V | sduA | poly- | Table 13; Rows 2-1247; |
| Shedu | | nucleotides | Column H “SduA |
| | | | protein_accession” and |
| | | | Column J “DNA SEQ ID |
| | | | NO:” |
| Defense System V | Gene | poly- | Table 13; Rows 2-1782; |
| Shedu | Cassette | nucleotides | Column G |
| | | | “genomic_accession” with |
| | | | Start in Column L |
| | | | “Genomic Start Point” |
| | | | and End in Column M |
| | | | “Genomic End Point” |
| Defense System | GajA | polypeptides | Table 14; Rows 2-4599; |
| VI Gabija | | | Column H “GajA |
| | | | protein_accession” and |
| | | | Column I “PRT SEQ ID |
| | | | NO:” |
| Defense System | GajB | polypeptides | Table 14; Rows 2-4599; |
| VI Gabija | | | Column L “GajB |
| | | | protein_accession” and |
| | | | Column M “PRT SEQ ID |
| | | | NO:” |
| Defense System | gajA | poly- | Table 14; Rows 2-4599; |
| VI Gabija | | nucleotides | Column H “GajA |
| | | | protein_accession” and |
| | | | Column J “DNA SEQ ID |
| | | | NO:” |
| Defense System | gajB | poly- | Table 14; Rows 2-4599; |
| VI Gabija | | nucleotides | Column L “GajB |
| | | | protein_accession” and |
| | | | Column N “DNA SEQ ID |
| | | | NO:” |
| Defense System | Gene | poly- | Table 14; Rows 2-4599; |
| VI Gabija | Cassette | nucleotides | Column G |
| | | | “genomic_accession” with |
| | | | Start in Column P |
| | | | “Genomic Start Point” |
| | | | and End in Column Q |
| | | | “Genomic End Point” |
| Defense System | PtuA | polypeptides | Table 15; Rows 2-2507; |
| VII Septu | | | Column H “PtuA |
| | | | protein_accession” and |
| | | | Column I “PRT SEQ ID |
| | | | NO:” |
| Defense System | PtuB | polypeptides | Table 15; Rows 2-2507; |
| VII Septu | | | Column L “PtuB |
| | | | protein_accession” and |
| | | | Column M “PRT SEQ ID |
| | | | NO:” |
| Defense System | ptuA | poly- | Table 15; Rows 2-2507; |
| VII Septu | | nucleotides | Column H “PtuA |
| | | | protein_accession” and |
| | | | Column J “DNA SEQ ID |
| | | | NO:” |
| Defense System | ptuB | poly- | Table 15; Rows 2-2507; |
| VII Septu | | nucleotides | Column L “PtuB |
| | | | protein_accession” and |
| | | | Column N “DNA SEQ ID |
| | | | NO:” |
| Defense System | Gene | poly- | Table 15; Rows 2-2507; |
| VII Septu | Cassette | nucleotides | Column G |
| | | | “genomic_accession” with |
| | | | Start in Column P |
| | | | “Genomic Start Point” |
| | | | and End in Column Q |
| | | | “Genomic End Point” |
| Defense System | LmuA | polypeptides | Table 16; Rows 2-698; |
| VIII Lamussa | | | Column H “LmuA |
| | | | protein_accession” and |
| | | | Column I “PRT SEQ ID |
| | | | NO:” |
| Defense System | LmuB | polypeptides | Table 16; Rows 2-698; |
| VIII Lamussa | | | Column L “LmuB |
| | | | protein_accession” and |
| | | | Column M “PRT SEQ ID |
| | | | NO:” |
| Defense System | lmuA | poly- | Table 16; Rows 2-698; |
| VIII Lamussa | | nucleotides | Column H “LmuA |
| | | | protein_accession” and |
| | | | Column J “DNA SEQ ID |
| | | | NO:” |
| Defense System | lmuB | poly- | Table 16; Rows 2-698; |
| VIII Lamussa | | nucleotides | ColumnL “LmuB |
| | | | protein_accession” and |
| | | | Column N “DNA SEQ ID |
| | | | NO:” |
| Defense System | Gene | poly- | Table 16; Rows 2-698; |
| VIII Lamussa | Cassette | nucleotides | Column G |
| | | | “genomic_accession” with |
| | | | Start in Column P |
| | | | “Genomic Start Point” |
| | | | and End in Column Q |
| | | | “Genomic End Point” |
| Defense System | KwaA | polypeptides | Table 17; Rows 2-935; |
| IX Kiwa | | | Column H “KwaA |
| | | | protein_accession” and |
| | | | Column I “PRT SEQ ID |
| | | | NO:” |
| Defense System | KwaB | polypeptides | Table 17; Rows 2-935; |
| IX Kiwa | | | Column L “KwaB |
| | | | protein_accession” and |
| | | | Column M “PRT SEQ ID |
| | | | NO:” |
| Defense System | kwaA | poly- | Table 17; Rows 2-935; |
| IX Kiwa | | nucleotides | Column H “KwaA |
| | | | protein_accession” and |
| | | | Column J “DNA SEQ ID |
| | | | NO:” |
| Defense System | kwaB | poly- | Table 17; Rows 2-935; |
| IX Kiwa | | nucleotides | Column L “KwaB |
| | | | protein_accession” and |
| | | | Column N “DNA SEQ ID |
| | | | NO:” |
| Defense System | Gene | poly- | Table 17; Rows 2-935; |
| IX Kiwa | Cassette | nucleotides | Column G |
| | | | “genomic_accession” with |
| | | | Start in Column P |
| | | | “Genomic Start Point” |
| | | | and End in Column Q |
| | | | “Genomic End Point” |
| Defense System | JetA | polypeptides | Table 11; Rows 2-2322; |
| Xa Wadjet type I | | | Column J “JetA |
| | | | protein_accession” and |
| | | | Column K “PRT SEQ ID |
| | | | NO:” |
| Defense System | JetB | polypeptides | Table 11; Rows 2-2322; |
| Xa Wadjet type I | | | Column N “JetB |
| | | | protein_accession” and |
| | | | Column O “PRT SEQ ID |
| | | | NO:” |
| Defense System | JetC | polypeptides | Table 11; Rows 2-2322; |
| Xa Wadjet type I | | | Column R “JetC |
| | | | protein_accession” and |
| | | | Column S “DNA SEQ ID |
| | | | NO:” |
| Defense System | JetD | polypeptides | Table 11; Rows 2-2322; |
| Xa Wadjet type I | | | Column V “JetD |
| | | | protein_accession” and |
| | | | Column W “PRT SEQ ID |
| | | | NO:” |
| Defense System | jetA | poly- | Table 11; Rows 2-2322; |
| Xa Wadjet type I | | nucleotides | Column J “JetA |
| | | | protein_accession” and |
| | | | Column L “DNA SEQ ID |
| | | | NO:” |
| Defense System | jetB | poly- | Table 11; Rows 2-2322; |
| Xa Wadjet type I | | nucleotides | Column N “JetB |
| | | | protein_accession” and |
| | | | Column P “DNA SEQ ID |
| | | | NO:” |
| Defense System | jetC | poly- | Table 11; Rows 2-2322; |
| Xa Wadjet type I | | nucleotides | Column R “JetC |
| | | | protein_accession” and |
| | | | Column T “DNA SEQ ID |
| | | | NO:” |
| Defense System | jetD | poly- | Table 11; Rows 2-2322; |
| Xa Wadjet type I | | nucleotides | Column V “JetD |
| | | | protein_accession” and |
| | | | Column X “DNA SEQ ID |
| | | | NO:” |
| Defense System | Gene | poly- | Table 11; Rows 2-2322; |
| Xa Wadjet type I | Cassette | nucleotides | Column G |
| | | | “genomic_accession” with |
| | | | Start in Column Z |
| | | | “Genomic Start Point” |
| | | | and End in Column AA |
| | | | “Genomic End Point” |
| Defense System | JetAⁱⁱ | polypeptides | Table 11; Rows 2323-2844; |
| Xb Wadjet type II | | | Column J “JetA |
| | | | protein_accession” and |
| | | | Column K “PRT SEQ ID |
| | | | NO:” |
| Defense System | JetBⁱⁱ | polypeptides | Table 11; Rows 2323-2844; |
| Xb Wadjet type II | | | Column N “JetB |
| | | | protein_accession” and |
| | | | Column O “DNA SEQ ID |
| | | | NO:” |
| Defense System | JetCⁱⁱ | polypeptides | Table 11; Rows 2323-2844; |
| Xb Wadjet type II | | | Column R “JetC |
| | | | protein_accession” and |
| | | | Column S “PRT SEQ ID |
| | | | NO:” |
| Defense System | JetDⁱⁱ | polypeptides | Table 11; Rows 2323-2844; |
| Xb Wadjet type II | | | Column V “JetD |
| | | | protein_accession” and |
| | | | Column W “PRT SEQ ID |
| | | | NO:” |
| Defense System | jetAⁱⁱ | poly- | Table 11; Rows 2323-2844; |
| Xb Wadjet type II | | nucleotides | Column J “JetA |
| | | | protein_accession” and |
| | | | Column L “DNA SEQ ID |
| | | | NO:” |
| Defense System | jetBⁱⁱ | poly- | Table 11; Rows 2323-2844; |
| Xb Wadjet type II | | nucleotides | Column N “JetB |
| | | | protein_accession” and |
| | | | Column P “DNA SEQ ID |
| | | | NO:” |
| Defense System | jetCⁱⁱ | poly- | Table 11; Rows 2323-2844; |
| Xb Wadjet type II | | nucleotides | Column R “JetC |
| | | | protein_accession” and |
| | | | Column T “DNA SEQ ID |
| | | | NO:” |
| Defense System | jetDⁱⁱ | poly- | Table 11; Rows 2323-2844; |
| Xb Wadjet type II | | nucleotides | Column V “JetD |
| | | | protein_accession” and |
| | | | Column X “DNA SEQ ID |
| | | | NO:” |
| Defense System | Gene | poly- | Table 11; Rows 2323-2844; |
| Xb Wadjet type II | Cassette | nucleotides | Column G |
| | | | “genomic_accession” with |
| | | | Start in Column Z |
| | | | “Genomic Start Point” |
| | | | and End in Column AA |
| | | | “Genomic End Point” |
| Defense System | JetAⁱⁱⁱ | polypeptides | Table 11; Rows 2845-3174; |
| Xc Wadjet type | | | Column J “JetA |
| III | | | protein_accession” and |
| | | | Column K “PRT SEQ ID |
| | | | NO:” |
| Defense System | JetBⁱⁱⁱ | polypeptides | Table 11; Rows 2845-3174; |
| Xc Wadjet type | | | Column N “JetB |
| III | | | protein_accession” and |
| | | | Column O “PRT SEQ ID |
| | | | NO:” |
| Defense System | JetCⁱⁱⁱ | polypeptides | Table 11; Rows 2845-3174; |
| Xc Wadjet type | | | Column R “JetC |
| III | | | protein_accession” and |
| | | | Column S “PRT SEQ ID |
| | | | NO:” |
| Defense System | JetDⁱⁱⁱ | polypeptides | Table 11; Rows 2845-3174; |
| Xc Wadjet type | | | Column V “JetD |
| III | | | protein_accession” and |
| | | | Column W “PRT SEQ ID |
| | | | NO:” |
| Defense System | jetAⁱⁱⁱ | poly- | Table 11; Rows 2845-3174; |
| Xc Wadjet type | | nucleotides | Column J “JetA |
| III | | | protein_accession” and |
| | | | Column L “DNA SEQ ID |
| | | | NO:” |
| Defense System | jetBⁱⁱⁱ | poly- | Table 11; Rows 2845-3174; |
| Xc Wadjet type | | nucleotides | Column N “JetB |
| III | | | protein_accession” and |
| | | | Column P “DNA SEQ ID |
| | | | NO:” |
| Defense System | jetCⁱⁱⁱ | poly- | Table 11; Rows 2845-3174; |
| Xc Wadjet type | | nucleotides | Column R “JetC |
| III | | | protein_accession” and |
| | | | Column T “DNA SEQ ID |
| | | | NO:” |
| Defense System | jetDⁱⁱⁱ | poly- | Table 11; Rows 2845-3174; |
| Xc Wadjet type | | nucleotides | Column V “JetD |
| III | | | protein_accession” and |
| | | | Column X “DNA SEQ ID |
| | | | NO:” |
| Defense System | Gene | poly- | Table 11; Rows 2845-3174; |
| Xc Wadjet type | Cassette | nucleotides | Column G |
| III | | | “genomic_accession” with |
| | | | Start in Column Z |
| | | | “Genomic Start Point” |
| | | | and End in Column AA |
| | | | “Genomic End Point” |

[1468] Table 18 lists embodiments of the components of each Defense System and embodiments gene cassettes encoding the Defense Systems. Provided are the Sequence Numbers comprising the polypeptide and polynucleotide sequences, or explicit Reference to the Accession numbers provided in Tables 8-17, respectively for each Defense System, from which the skilled artisan can access the polypeptide and polynucleotide sequences. While Table 18 highlights polypeptide components of defense systems and the genes sequences that encode them, in some embodiments, defense system components include non-coding RNA and/or regulatory nucleic acid sequences.

[1469] Using the Reference locations provided in Table 18 and the “protein accession” numbers provided in Tables 8-17, one can reach both the amino acid and the nucleotide sequences of a Defense System component. For example, to access the polypeptide (amino acid) sequence of a component, a skilled artisan would find the Defense System and component of interest in Table 18. Next, they would use the Reference information provided in Table 18 to identify the series of accession numbers that encompass the polypeptide sequence of the component. Following that, the skilled artisan would query the NCBI “Protein” database: https://www.ncbi.nlm.nih.gov/protein, and enter the accession number provided for a component, for example but not limited to “ABS66238.1” (Table 8, row 2, column J), which would send them to https://www.ncbi.nlm.nih.gov/protein/CEP95570.1, wherein the amino acid sequence of the component is disclosed on this page, as follows:

(SEQ ID NO: 1)
MTVLKGLGRCVLFWTITGIFGVLYWLLPVVDMSALWGGTARAFSGDFSTV
GTQPYAFALAFALFATAVGFASAFLILHVGPIGWRLRRLRLRIAGTGDME
GFARTYDATRALMERDRLISHAWKQFDTVLVHRPDERIIRSTARAHAFFN
LGMAREKYFGLKMMGALPGYFVGIGLLLTFAGLVLALNKAAMAVNSSDAA
GMQGATRELLQVATFKFATSIAGLGASIALSLLFRIYTILMEGFFIGFCE
TVEDRVRYLSAQQIAAESRDFAAEQTDQLKSMSADFFARMGQELTPGMSR
MFETALDKVMSPVTTSIDQAVHRLADSSQSGMSEMLTRFTDSVQNGAGAE
LRGLAETLRGMQGAMVGVQQGLTGSGEDFGRRMSDAAENLNRLVTDAGAR
LGEGTDQSRAVLMDAVTAMRETFEQANRKVDEGLGAAAGGASARLEEVMG
RVLGSLEAQVGGFRESLSGFQEKMAGQLDETRVRVSAAQAEATDAVAQAS
AQAARALQDGLADALVRINGEIERFVVAMRASEVTLAAQAKAMMDATDKS
RQVADAFSRTAQDVRAASVPLAQSGERIAGATEKLGEAAGRSVAVLDKSQ
EEARRLAQALTGHVSNLDQVWRSYSARFEAVDEALGKAFERLTRGTDEQQ
DRIATFVRDVDVTFKEAVDTLAGCIGGLKDNTEEMVEAVDDLKRALRVEA
AE.

[1470] Similarly, to access the nucleotide (nucleic acid) sequence of a component, a skilled artisan would find the Defense System and component of interest in Table 18. Next, they would use the Reference information provided in Table 18 to identify the series of accession numbers that encompass the nucleotide sequence of the component. Following that, the skilled artisan would query the NCBI “Identical Protein Groups” database https://www.ncbi.nlm.nih.gov/ipg, and enter the accession number provided for a component, for example but not limited to “ABS66238.1” (Table 8, row 2, column J), which would send them to https://www.ncbi.nlm.nih.gov/ipg/?term=ABS66238.1, wherein any of the links under “CDS Region in Nucleotide” leads to the nucleotide sequence:

### Origin

| (SEQ ID NO: 2) | |
|---|---|
| 1 | atgacggtct tgaagggttt ggggcgctgc gttctttttt ggacaatcat attcggcatc |
| 61 | ttcggcgtct tgtactggct ccttcctgtc gtcgacatga gcgcgctctg gggcgggacg |
| 121 | gcgcgcgcct tcagcggtga tttttccacc gtcggcaccc agccctatgc tttcgccctg |
| 181 | gccttcgccc tgttcgccac ggcggtcggc ttcgcctccg ctttcctcat cctgcatgtg |
| 241 | ggtccgatcg ggtggaggct gcggcgcctg cgattgcgta tcgcgggcac gggggacatg |
| 301 | gaaggcttcg ccagaaccta tgacgccacg cgcgcgctca tggagcgcga tcgactgatc |
| 361 | agccatgcgt ggaagcagtt cgacaccgtg ctcgttcatc ggccggatga acgcatcatc |
| 421 | cgcagcaccg cccgtgccca cgcctttttc aatctgggca tggcgcggga gaagtatttc |
| 481 | ggcctgaaga tgatgggcgc gctgccgggc tatttcgtcg gcatcggtct tctgctcacc |
| 541 | ttcgccggcc tcgtgctggc gctcaacaag gcggccatgg ccgtcaacag ctcggatgcc |
| 601 | gccggaatgc agggcgcgac gcgcgaactg cttcaggtgg cgaccttcaa gtttgccacc |
| 661 | tccatcgccg gccttggtgc ctccatcgcg ctctcgctgc tgttccgcat ctataccatc |
| 721 | ctgatggaag gcttcttcat cggcttctgc gagacggtgg aggaccgggt gcgctatctg |
| 781 | tcggcacagc agatcgcggc cgagagccgg gattttgccg ccgaacagac cgatcagctc |
| 841 | aagtcgatca acagcgccga cttcttcgcg cgcatggggc aggagctgac gccgggcatg |
| 901 | tcccgcatgt tcgagacggc gctcgacaag gtcatgtcgc cggtgaccac cagcatcgac |
| 961 | caggcggtcc ataggctcgc cgacagcagc cagagcggca tgtccgagat gctgacgcgc |
| 1021 | ttcaccgatt cggtgcagaa cggggccggg gccgagttgc gcgggctcgc cgagacgctc |
| 1081 | cggggcatgc agggtgccat ggtgggcgtg cagcaggggc tgaccgggtc cggcgaggat |
| 1141 | ttcggccggc gcatgtcgga tgccgcggaa aacctcaacc gcctcgtcac cgacgccggc |
| 1201 | gcacgcctgg gtgaaggcac ggaccagagc cgcgcggtcc tcatggatgc ggtcaccgcc |
| 1261 | atgcgggaga ccttcgagca agccaatcgc aaggtggacg agggtctcgg cgccgcggcg |
| 1321 | ggcggggctt cggcgcggct ggaggaggtc atggggcggg tgctcggcag cctcgaagcc |
| 1381 | caggtgggcg gctttcgcga gagcctgtcc ggcttccagg agaagatggc cggccagctc |
| 1441 | gatgagaccc gggtccgcgt ctccgccgcc caggcggagg cgaccgatgc cgtcgcccag |
| 1501 | gcctcggccc aggcggcgcg cgcgctccag gacgggcttg cggatgcgct cgtgcgcatc |
| 1561 | aacggcgaga tcgagcgttt cgtcgtcgcc atgcgggcca gcgaggtgac gctggcggcg |
| 1621 | caggccaagg cgatgatgga cgccaccgac aagtcgcgcc aggtggccga tgccttcagc |
| 1681 | cgcactgcgc aggatgtgcg cgcggctagc gtaccgctgg cccaatcggg cgagcgcatc |
| 1741 | gcgggggcga ccgagaagct cggcgaggcc gccggccggt cggtggcggt cctcgacaag |
| 1801 | agccaggagg aggcgcggcg gctggcccag gcgctgaccg gccatgtctc caacctcgat |
| 1861 | caggtctggc gcagctattc ggcccgcttc gaggcggtcg acgaggcgct gggcaaggcg |
| 1921 | ttcgagcgcc tgacgcgcgg aaccgacgag cagcaggacc ggatcgccac tttcgttcgc |
| 1981 | gacgtggacg tgaccttcaa ggaagcggtg gatacgctgg ccggctgcat cggcggcctg |
| 2041 | aaggacaata ccgaggagat ggtggaggcg gtggacgacc tgaaacgcgc gctgcgcgtc |
| 2101 | gaggccgcgg aatga. |

### Defense Systems & Combination of Defense Systems

[1472] Described above are non-limiting examples of defense systems, wherein each system comprises components that together make-up a defense system, wherein in some embodiments each component is encoded by a different gene. In some embodiments, the combination of components that make-up a Defense System, for example the components that make-up each of Defense Systems Ia-Xc disclosed above, may include components comprising nucleic acid sequences or amino acid sequences derived from different species (different donor species). In some embodiments, the combination of components that make-up a Defense System, for example the components that make-up each of Defense Systems Ia-Xc, may include homologs of the genes and/or polypeptides identified in donor species. In some embodiments, the combination of components that make-up a Defense System, for example the components that make-up each of Defense Systems Ia-Xc, differs from the combination of components found in donor species. In some embodiments, the components of a Defense System, for example the components that make-up each of Defense Systems Ia-Xc, comprises less than all the components found in donor species. In some embodiments, the components of a Defense System, for example the components that make-up each of Defense Systems Ia-Xc, comprises duplications of the components found in donor species, or multiple copies of one or more components found in a donor species. In some embodiments, the components of a Defense System, for example the components that make-up each of Defense Systems Ia-Xc, comprise functional portions of the components found in donor species, wherein a functional component comprise less than the full length of the components present in a donor species. In some embodiments, the order of components encoded on the nucleic acid sequence comprised within a construct comprising a Defense System, for example the order of the components the make-up each of Defense Systems Ia-Xc, differs from the order of the components found encoded on the nucleic acid sequences in donor species.

[1473] In some embodiments each Defense Systems Ia, Ib, II, III, IV, V, VI, VII, VIII, IX, Xa, Xb, and Xc comprising a nucleic acid construct comprising a nucleic acid sequence encoding the polypeptide components as disclosed herein, further comprises a regulatory element operably linked to said construct comprising a cis-acting regulatory element for directing expression of said nucleic acid sequence, or a transmissible element for directing transfer of said nucleic acid sequence from one cell to another, or a recombination element for integrating said nucleic acid sequence into a genome of a cell transfected with said construct, or an element providing episomal maintenance of said construct within a cell transfected with said construct, or any combination thereof.

[1474] In some embodiments, a construct further comprises a regulatory element operably linked to said construct comprising a cis-acting regulatory element for directing expression of said nucleic acid sequence. In some embodiment, the nucleic acid sequence of the regulatory element is from the same species as at least one component of the Defense System. In some embodiment, the nucleic acid sequence of the regulatory element is not from the same species as any of the components of the Defense System. In some embodiment, the nucleic acid sequence of the regulatory element is not from the donor species of the Defense System. In some embodiment, when a host cell comprises a Defense System, the nucleic acid sequence of the regulatory element is from the host species.

[1475] In some embodiments, cis-acting regulatory elements include those that direct constitutive expression of a nucleic acid sequence. In some embodiments, cis-acting regulatory elements comprise those that direct inducible expression of the nucleic acid sequence only under certain conditions.

[1476] According to some embodiments, the cis-acting regulatory element is heterologous to the genes encoding the components of a system. In some embodiments, the cis-acting regulatory element is heterologous to Defense System Ia genes zorA, zorB, zorC, and zorD. In some embodiments, the cis-acting regulatory element is heterologous to Defense System Ib genes zorA, zorB, and zorE. In some embodiments, the cis-acting regulatory element is heterologous to Defense System II genes thsA and thsB. In some embodiments, the cis-acting regulatory element is heterologous to Defense System IIIa genes druA, druB, druC, drub, and druE. In some embodiments, the cis-acting regulatory element is heterologous to Defense System IIIb genes druM, druF, druG, and druE. In some embodiments, the cis-acting regulatory element is heterologous to Defense System IIIc genes druH and druE. In some embodiments, the cis-acting regulatory element is heterologous to Defense System IV genes hamA and hamB. In some embodiments, the cis-acting regulatory element is heterologous to Defense System V component sduA. In some embodiments, the cis-acting regulatory element is heterologous to Defense System VI genes gajA and gajB. In some embodiments, the cis-acting regulatory element is heterologous to Defense System VII genes ptuA and ptuB. In some embodiments, the cis-acting regulatory element is heterologous to Defense System VIII genes lmuA and lmuB. In some embodiments, the cis-acting regulatory element is heterologous to Defense System IX genes kwaA and kwaB. In some embodiments, the cis-acting regulatory element is heterologous to Defense System Xa genes jetA, jetB, jetC, and jetD. In some embodiments, the cis-acting regulatory element is heterologous to Defense System Xb genes jetAⁱⁱ, jetBⁱⁱ, jetCⁱⁱ, and jetDⁱⁱ. In some embodiments, the cis-acting regulatory element is heterologous to Defense System Xc genes jetAⁱⁱⁱ, jetBⁱⁱⁱ, jetCⁱⁱⁱ, and jetDⁱⁱⁱ.

[1477] According to some embodiments, the nucleic acid construct includes a promoter sequence for directing transcription of the nucleic acid sequence in a host cell in a constitutive or inducible manner. In some embodiments, a promoter is a constitutive promoter. In some embodiments, a promoter is an inducible or regulatable promoter.

[1478] Constitutive promoters suitable for use with some embodiments of the Defense System constructs disclosed herein are promoter sequences which are active under most environmental conditions and most types of cells such as the cytomegalovirus (CMV) and Rous sarcoma virus (RSV). Inducible promoters suitable for use with some embodiments of Defense System constructs disclosed herein, include for example but not limited to the tetracycline-inducible promoter (Zabala M, et al., Cancer Res. 2004, 64(8): 2799-804) or pathogen-inducible promoters. Such promoters include those from pathogenesis-related proteins (PR proteins), which are induced following infection by a pathogen.

[1479] According to some embodiments, the promoter is bacterial nucleic acid (e.g., expression) construct.

[1480] A skilled artisan would appreciate that bacterial promoter encompasses any DNA sequence capable of binding bacterial RNA polymerase and initiating the downstream (3′) transcription of a coding sequence into mRNA. A promoter can have a transcription initiation region, which is usually placed proximal to the 5′ end of the coding sequence. This transcription initiation region typically includes an RNA polymerase binding site and a transcription initiation site. A bacterial promoter can also have a second domain called an operator, which can overlap an adjacent RNA polymerase binding site at which RNA synthesis begins. The operator permits negative regulated (inducible) transcription, as a gene repressor protein can bind the operator and thereby inhibit transcription of a specific gene. Constitutive expression can occur in the absence of negative regulatory elements, such as the operator. In addition, positive regulation can be achieved by a gene activator protein binding sequence, which, if present is usually proximal (5′) to the RNA polymerase binding sequence.

[1481] A non-limiting example of a gene activator protein is the catabolite activator protein (CAP), which helps initiate transcription of the lac operon in Escherichia coli (Raibaud et al. (1984) Annu. Rev. Genet. 18:173). Regulated expression can therefore be either positive or negative, thereby either enhancing or reducing transcription. Other examples of positive and negative regulatory elements are well known in the art. Various promoters that can be included in the protein expression system include, but are not limited to, a T7/LacO hybrid promoter, a trp promoter, a T7 promoter, a lac promoter, and a bacteriophage lambda promoter. Any suitable promoter can be used with the Defense systems disclosed herein, including the native promoter or a heterologous promoter. Heterologous promoters can be constitutively active or inducible. A non-limiting example of a heterologous promoter is given in U.S. Pat. No. 6,242,194 to Kullen and Klaenhammer.

[1482] Sequences encoding metabolic pathway enzymes provide particularly useful promoter sequences. Examples include promoter sequences derived from sugar metabolizing enzymes, such as galactose, lactose (lac) (Chang et al. (1987) Nature 198:1056), and maltose. Additional examples include promoter sequences derived from biosynthetic enzymes such as tryptophan (trp) (Goeddel et al. (1980) Nucleic Acids Res. 8:4057; Yelverton et al. (1981) Nucleic Acids Res. 9:731; U.S. Pat. No. 4,738,921; EPO Publication Nos. 36,776 and 121,775). The beta-lactamase (bla) promoter system (Weissmann, (1981) “The Cloning of Interferon and Other Mistakes,” in Interferon 3 (ed. I. Gresser); bacteriophage lambda PL (Shimatake et al. (1981) Nature 292:128); the arabinose-inducible araB promoter (U.S. Pat. No. 5,028,530); and T5 (U.S. Pat. No. 4,689,406) promoter systems also provide useful promoter sequences. See also Balbas (2001) Mol. Biotech. 19:251-267, where E. coli expression systems are discussed.

[1483] In addition, synthetic promoters that do not occur in nature also function as bacterial promoters. For example, transcription activation sequences of one bacterial or phage promoter can be joined with the operon sequences of another bacterial or phage promoter, creating a synthetic hybrid promoter (U.S. Pat. No. 4,551,433). For example, the tac (Amann et al. (1983) Gene 25:167; de Boer et al. (1983) Proc. Natl. Acad. Sci. 80:21) and trc (Brosius et al. (1985) J. Biol. Chem. 260:3539-3541) promoters are hybrid trp-lac promoters comprised of both trp promoter and lac operon sequences that are regulated by the lac repressor. The tac promoter has the additional feature of being an inducible regulatory sequence. Thus, for example, expression of a coding sequence operably linked to the tac promoter can be induced in a cell culture by adding isopropyl-1-thio-β-D-galactoside (IPTG). Furthermore, bacterial promoter can include naturally occurring promoters of non-bacterial origin that have the ability to bind bacterial RNA polymerase and initiate transcription. A naturally occurring promoter of non-bacterial origin can also be coupled with a compatible RNA polymerase to produce high levels of expression of some genes in prokaryotes. The phage T7 RNA polymerase/promoter system is an example of a coupled promoter system (Studier et al. (1986) J. Mol. Biol. 189:113; Tabor et al. (1985) Proc. Natl. Acad. Sci. 82:1074). In addition, a hybrid promoter can also be comprised of a phage promoter and an E. coli operator region (EPO Publication No. 267,851).

[1484] The nucleic acid construct can additionally contain a nucleic acid sequence encoding the repressor (or inducer) for that promoter. For example, an inducible construct can regulate transcription from the Lac operator (LacO) by expressing the nucleotide sequence encoding the Lad repressor protein. Other examples include the use of the lexA gene to regulate expression of pRecA, and the use of trpO to regulate ptrp. Alleles of such genes that increase the extent of repression (e.g., lacIq) or that modify the manner of induction (e.g., lambda CI857, rendering lambda pL thermo-inducible, or lambda CI+, rendering lambda pL chemo-inducible) can be employed.

[1485] In the construction of the construct, in some embodiments, the promoter is positioned approximately the same distance from the heterologous transcription start site as it is from the transcription start site in its natural setting. As is known in the art, however, some variation in this distance can be accommodated without loss of promoter function.

[1486] According to some embodiments, the nucleic acid construct includes a promoter sequence for directing transcription of the nucleic acid sequence in the cell in a constitutive or inducible manner. In some embodiments, the expression of a Defense System disclosed herein can be transient or consistent, episomal or integrated into the chromosome of a host cell. According to some embodiments, the expression is on a transmissible genetic element.

[1487] The nucleic acid construct of some embodiments of a Defense System disclosed herein may further include additional sequences which render this construct suitable for replication and integration in prokaryotes, eukaryotes, or preferably both (e.g., shuttle vectors).

[1488] In some embodiments, the construct comprises a recombination element for integrating the polynucleotide into a genome of a cell transfected with the construct.

[1489] A skilled artisan would appreciate that the term “recombination element” encompasses a nucleic acid sequence that allows the integration of the polynucleotide in the genome of a cell (e.g. bacteria) transfected with the construct.

[1490] In some embodiments, a construct may also contain a transcription and translation initiation sequence, transcription and translation terminator and a polyadenylation signal. By way of example, such constructs will typically include a 5′ LTR, a tRNA binding site, a packaging signal, an origin of second-strand DNA synthesis, and a 3′ LTR or a portion thereof.

[1491] In some embodiments, a construct further comprises a transmissible element for directing transfer of said nucleic acid sequence from one cell to another. In some embodiments, a Defense System Ia or the Defense System Ia component(s) is on a transmissible genetic element. In some embodiments, a Defense System Ib or the Defense System Ib component(s) is on a transmissible genetic element. In some embodiments, a Defense System IIIa or the Defense System IIIa component(s) is on a transmissible genetic element. In some embodiments, a Defense System IIIb or the Defense System IIIb component(s) is on a transmissible genetic element. In some embodiments, a Defense System IIIc or the Defense System IIIc component(s) is on a transmissible genetic element. In some embodiments, a Defense System IV or the Defense System IV component(s) is on a transmissible genetic element. In some embodiments, a Defense System V or the Defense System V component(s) is on a transmissible genetic element. In some embodiments, a Defense System VI or the Defense System VI component(s) is on a transmissible genetic element. In some embodiments, a Defense System VII or the Defense System VII component(s) is on a transmissible genetic element. In some embodiments, a Defense System VIII or the Defense System VIII component(s) is on a transmissible genetic element. In some embodiments, a Defense System IX or the Defense System IX component(s) is on a transmissible genetic element. In some embodiments, a Defense System Xa or the Defense System Xa component(s) is on a transmissible genetic element. In some embodiments, a Defense System Xb or the Defense System Xb component(s) is on a transmissible genetic element. In some embodiments, a Defense System Xc or the Defense System Xc component(s) is on a transmissible genetic element.

[1492] In some embodiments, a transmissible genetic element comprises the construct of a Defense System disclosed herein. In some embodiments, a transmissible genetic element comprises the construct of Defense System Ia, Ib, II, IIIa, IIIb, IIIc, IV, V, VI, VII, VIII, IX, Xa, Xb, or Xc. In some embodiments, a transmissible genetic element comprises the construct of Defense System Ia. In some embodiments, a transmissible genetic element comprises the construct of Defense System Ib. In some embodiments, a transmissible genetic element comprises the construct of Defense System II. In some embodiments, a transmissible genetic element comprises the construct of Defense System IIIa. In some embodiments, a transmissible genetic element comprises the construct of Defense System IIIb. In some embodiments, a transmissible genetic element comprises the construct of Defense System IIIc. In some embodiments, a transmissible genetic element comprises the construct of Defense System IV. In some embodiments, a transmissible genetic element comprises the construct of Defense System V. In some embodiments, a transmissible genetic element comprises the construct of Defense System VI. In some embodiments, a transmissible genetic element comprises the construct of Defense System VII. In some embodiments, a transmissible genetic element comprises the construct of Defense System VIII. In some embodiments, a transmissible genetic element comprises the construct of Defense System IX. In some embodiments, a transmissible genetic element comprises the construct of Defense System Xa. In some embodiments, a transmissible genetic element comprises the construct of Defense System Xb. In some embodiments, a transmissible genetic element comprises the construct of Defense System Xc.

[1493] A skilled artisan would appreciate that the term “transmissible element” or “transmissible genetic element”, which are interchangeably used, encompasses a polynucleotide that allows the transfer of the nucleic acid sequence from one cell to another, e.g. from one bacteria to another.

[1494] According to some embodiments, a transmissible genetic element comprises a conjugative genetic element or mobilizable genetic element. In some embodiments, a transmissible genetic element comprises a conjugative genetic element. In some embodiments, a transmissible genetic element comprises a mobilizable genetic element. The skilled artisan would appreciate that a “conjugative plasmid” encompasses a plasmid that is transferred from one cell (e.g. bacteria) to another during conjugation, and the term “mobilizable element” encompasses a transposon, which is a DNA sequence that can change its position within the genome.

[1495] In some embodiments, a nucleic acid construct disclosed herein, comprises an expression vector. In some embodiments, an “expression vector” or a “vector”, used interchangeably herein, comprises and expresses the Defense System components from a single or a plurality of constructs (i.e. construct). In some embodiments, expression comprises transient expression. In some embodiments, expression comprises constitutive expression. In some embodiments, expression is from an episomal nucleic acid sequence. In some embodiments, expression is from a nucleic acid sequence integrated into the chromosome of the cell. According to specific embodiments, the expression is on a transmissible genetic element.

[1496] According to some embodiments, a construct further comprises a recombination element for integrating the nucleic acid sequence into a genome of cell transfected with the construct. A skilled artisan would appreciate that the term “recombination element” encompasses a polynucleotide that allows the integration of the nucleic acid sequence in the genome of a cell (e.g. bacteria) transfected with the construct.

[1497] In addition, typical constructs may also, in certain embodiments, contain a transcription and translation initiation sequence, transcription and translation terminator and a polyadenylation signal. By way of example, such constructs will typically include a 5′ LTR, a tRNA binding site, a packaging signal, an origin of second-strand DNA synthesis, and a 3′ LTR or a portion thereof.

[1498] According to some embodiment, the nucleic acid construct comprises a plurality of cloning sites for ligating a nucleic acid sequence of a Defense System, such that it is under transcriptional regulation of the regulatory elements.

[1499] Selectable marker genes that ensure maintenance of a construct in a host cell can also be included in the construct. In some embodiments, selectable markers include those which confer resistance to drugs such as ampicillin, chloramphenicol, erythromycin, kanamycin (neomycin), and tetracycline (Davies et al. (1978) Annu. Rev. Microbiol. 32:469). Selectable markers can also allow a cell to grow on minimal medium, or in the presence of toxic metabolite and can include biosynthetic genes, such as those in the histidine, tryptophan, and leucine biosynthetic pathways.

[1500] Other than containing the necessary elements for the transcription and translation of the inserted coding sequence, the expression construct of some embodiments of Defense system can also include sequences engineered to enhance stability, production, purification, yield or toxicity of the expressed polypeptide. Where appropriate, the nucleic acid sequences may be optimized for increased expression in the transformed organism. For example, the nucleic acid sequences can be synthesized using preferred codons for improved expression.

[1501] Various methods known within the art can be used to introduce the construct of some embodiments of a Defense System disclosed herein into cells. Such methods are generally described in Sambrook et al., Molecular Cloning: A Laboratory Manual, Cold Springs Harbor Laboratory, New York (1989, 1992), in Ausubel et al., Current Protocols in Molecular Biology, John Wiley and Sons, Baltimore, Md. (1989), Chang et al., Somatic Gene Therapy, CRC Press, Ann Arbor, Mich. (1995), Vega et al., Gene Targeting, CRC Press, Ann Arbor Mich. (1995), Vectors: A Survey of Molecular Cloning Vectors and Their Uses, Butterworths, Boston Mass. (1988) and Gilboa et at. [Biotechniques 4 (6): 504-512, 1986] and include, for example, stable or transient transfection, natural or induced transformation, lipofection, electroporation and infection with recombinant viral vectors. In addition, see U.S. Pat. Nos. 5,464,764 and 5,487,992 for positive-negative selection methods.

[1502] Some methods of introducing a construct or constructs into bacterial cells include for example conventional transformation or transfection techniques, or by phage-mediated infection. A skilled artisan would appreciate that the terms “transformation”, “transduction”, “conjugation”, and “protoplast fusion” are intended to encompass a variety of art-recognized techniques for introducing foreign nucleic acid (e.g., DNA) into a cell, such as calcium chloride co-precipitation. A skilled artisan would appreciate that introduction of a construct or constructs into a bacterial cell, may in certain embodiments, result in expression of a polypeptide or polypeptides encoded by the construct or constructs.

[1503] Introduction of nucleic acids by phage infection offers several advantages over other methods such as transformation, since higher transfection efficiency can be obtained due to the infectious nature of phages. These methods are especially useful for rendering bacteria more sensitive to phage attack for antibiotics purposes as further described hereinbelow.

[1504] It will be appreciated that a Defense System polypeptide(s) can be introduced directly into the cell (e.g., bacterial cell) and not via recombinant expression to confer resistance. Thus, according to some embodiments, disclosed herein are isolated polypeptides of each of the Defense systems' components and functional fragments thereof as described herein. In some embodiments, a polypeptide component of a Defense System can be introduced directly into the cell (e.g., bacterial cell) and not via recombinant expression, to confer resistance. In some embodiments, at least two different polypeptide components of a Defense System can be introduced directly into the cell (e.g., bacterial cell) and not via recombinant expression, to confer resistance. In some embodiments, at least three different polypeptide components of a Defense System can be introduced directly into the cell (e.g., bacterial cell) and not via recombinant expression, to confer resistance. In some embodiments, at least four polypeptide components of a Defense System can be introduced directly into the cell (e.g., bacterial cell) and not via recombinant expression, to confer resistance. In some embodiments, at least five different polypeptide components of a Defense System can be introduced directly into the cell (e.g., bacterial cell) and not via recombinant expression, to confer resistance. In some embodiments, multiple polypeptide components of a Defense System can be introduced directly into the cell (e.g., bacterial cell) and not via recombinant expression, to confer resistance.

[1505] In some embodiments, a Defense System Ia polypeptides can be introduced directly into the cell (e.g., bacterial cell) and not via recombinant expression to confer resistance. In some embodiments, disclosed herein are isolated polypeptides of each of the Defense system Ia's components and functional fragments thereof as described herein. In some embodiments, a Defense System Ib polypeptides can be introduced directly into the cell (e.g., bacterial cell) and not via recombinant expression to confer resistance. In some embodiments, disclosed herein are isolated polypeptides of each of the Defense system Ib's components and functional fragments thereof as described herein. In some embodiments, Defense System II polypeptides can be introduced directly into the cell (e.g., bacterial cell) and not via recombinant expression to confer resistance. In some embodiments, disclosed herein are isolated polypeptides of each of the Defense system II's components and functional fragments thereof as described herein. In some embodiments, Defense System IIIa polypeptides can be introduced directly into the cell (e.g., bacterial cell) and not via recombinant expression to confer resistance. In some embodiments, disclosed herein are isolated polypeptides of each of the Defense system IIIa's components and functional fragments thereof as described herein. In some embodiments, Defense System IIIb polypeptides can be introduced directly into the cell (e.g., bacterial cell) and not via recombinant expression to confer resistance. In some embodiments, disclosed herein are isolated polypeptides of each of the Defense system IIIb's components and functional fragments thereof as described herein. In some embodiments, Defense System IIIc polypeptides can be introduced directly into the cell (e.g., bacterial cell) and not via recombinant expression to confer resistance. In some embodiments, disclosed herein are isolated polypeptides of each of the Defense system IIIc's components and functional fragments thereof as described herein. In some embodiments, Defense System IV polypeptides can be introduced directly into the cell (e.g., bacterial cell) and not via recombinant expression to confer resistance. In some embodiments, disclosed herein are isolated polypeptides of each of the Defense system IV components and functional fragments thereof as described herein. In some embodiments, Defense System V polypeptides can be introduced directly into the cell (e.g., bacterial cell) and not via recombinant expression to confer resistance. In some embodiments, disclosed herein are isolated polypeptides of each of the Defense System V components and functional fragments thereof as described herein. In some embodiments, Defense System VI polypeptides can be introduced directly into the cell (e.g., bacterial cell) and not via recombinant expression to confer resistance. In some embodiments, disclosed herein are isolated polypeptides of each of the Defense system VI's components and functional fragments thereof as described herein. In some embodiments, Defense System VII polypeptides can be introduced directly into the cell (e.g., bacterial cell) and not via recombinant expression to confer resistance. In some embodiments, disclosed herein are isolated polypeptides of each of the Defense system VII's components and functional fragments thereof as described herein. In some embodiments, Defense System VIII polypeptides can be introduced directly into the cell (e.g., bacterial cell) and not via recombinant expression to confer resistance. In some embodiments, disclosed herein are isolated polypeptides of each of the Defense system VIII's components and functional fragments thereof as described herein. In some embodiments, Defense System IX polypeptides can be introduced directly into the cell (e.g., bacterial cell) and not via recombinant expression to confer resistance. In some embodiments, disclosed herein are isolated polypeptides of each of the Defense system IX's components and functional fragments thereof as described herein. In some embodiments, a Defense System Xa polypeptides can be introduced directly into the cell (e.g., bacterial cell) and not via recombinant expression to confer resistance. In some embodiments, disclosed herein are isolated polypeptides of each of the Defense System Xa's components and functional fragments thereof as described herein. In some embodiments, a Defense System Xb polypeptides can be introduced directly into the cell (e.g., bacterial cell) and not via recombinant expression to confer resistance. In some embodiments, disclosed herein are isolated polypeptides of each of the Defense System Xb's components and functional fragments thereof as described herein. In some embodiments, a Defense System Xc polypeptides can be introduced directly into the cell (e.g., bacterial cell) and not via recombinant expression to confer resistance. In some embodiments, disclosed herein are isolated polypeptides of each of the Defense System Xc's components and functional fragments thereof as described herein.

[1506] In some embodiments, at least one Defense System component is on a transmissible genetic element. In some embodiments, more than one Defense System component, from the same Defense system, is on a transmissible genetic element. In some embodiments, two Defense System components, from the same Defense system, are on a transmissible genetic element. In some embodiments, three Defense System components, from the same Defense system, are on a transmissible genetic element. In some embodiments, four Defense System components, from the same Defense system, are on a transmissible genetic element. In some embodiments, five Defense System components, from the same Defense system, are on a transmissible genetic element. In some embodiments, all of the Defense System components from a single Defense system are on a transmissible genetic element. In some embodiments, the components are on the same transmissible genetic element. In some embodiments, the components are on different transmissible elements. In some embodiments, the order of the components on a transmissible genetic element is as found in a donor species. In some embodiments, the order of the components on a transmissible genetic element differs from the order found in a donor species.

[1507] In some embodiments, at least one Defense System Ia component is on a transmissible genetic element. In some embodiments, more than one Defense System Ia component, is on a transmissible genetic element. In some embodiments, two Defense System Ia components, are on a transmissible genetic element. In some embodiments, three Defense System Ia components, are on a transmissible genetic element. In some embodiments, four Defense System Ia components, are on a transmissible genetic element. In some embodiments, all of the Defense System Ia components are on a transmissible genetic element. In some embodiments, the nucleic acid construct of Defense System Ia is on a transmissible genetic element. In some embodiments, the components are on the same transmissible genetic element. In some embodiments, the components are on different transmissible elements. In some embodiments, the order of the components on a transmissible genetic element is as found in a donor species. In some embodiments, the order of the components on a transmissible genetic element differs from the order found in a donor species.

[1508] In some embodiments, at least one Defense System Ib component is on a transmissible genetic element. In some embodiments, more than one Defense System Ib component, is on a transmissible genetic element. In some embodiments, two Defense System Ib components, are on a transmissible genetic element. In some embodiments, three Defense System Ib components, are on a transmissible genetic element. In some embodiments, all of the Defense System Ib components are on a transmissible genetic element. In some embodiments, the nucleic acid construct of Defense System Ib is on a transmissible genetic element. In some embodiments, the components are on the same transmissible genetic element. In some embodiments, the components are on different transmissible elements. In some embodiments, the order of the components on a transmissible genetic element is as found in a donor species. In some embodiments, the order of the components on a transmissible genetic element differs from the order found in a donor species.

[1509] In some embodiments, at least one Defense System II component is on a transmissible genetic element. In some embodiments, more than one Defense System II component, is on a transmissible genetic element. In some embodiments, two Defense System II components, are on a transmissible genetic element. In some embodiments, all of the Defense System II components are on a transmissible genetic element. In some embodiments, the nucleic acid construct of Defense System II is on a transmissible genetic element. In some embodiments, the components are on the same transmissible genetic element. In some embodiments, the components are on different transmissible elements. In some embodiments, the order of the components on a transmissible genetic element is as found in a donor species. In some embodiments, the order of the components on a transmissible genetic element differs from the order found in a donor species.

[1510] In some embodiments, at least one Defense System IIIa component is on a transmissible genetic element. In some embodiments, more than one Defense System IIIa component, is on a transmissible genetic element. In some embodiments, two Defense System IIIa components, are on a transmissible genetic element. In some embodiments, three Defense System IIIa components, are on a transmissible genetic element. In some embodiments, four Defense System IIIa components, are on a transmissible genetic element. In some embodiments, five Defense System IIIa components, are on a transmissible genetic element. In some embodiments, all of the Defense System IIIa components are on a transmissible genetic element. In some embodiments, the nucleic acid construct of Defense System IIIa is on a transmissible genetic element. In some embodiments, the components are on the same transmissible genetic element. In some embodiments, the components are on different transmissible elements. In some embodiments, the order of the components on a transmissible genetic element is as found in a donor species. In some embodiments, the order of the components on a transmissible genetic element differs from the order found in a donor species.

[1511] In some embodiments, at least one Defense System IIIb component is on a transmissible genetic element. In some embodiments, more than one Defense System IIIb component, is on a transmissible genetic element. In some embodiments, two Defense System IIIb components, are on a transmissible genetic element. In some embodiments, three Defense System IIIb components, are on a transmissible genetic element. In some embodiments, four Defense System IIIb components, are on a transmissible genetic element. In some embodiments, five Defense System IIIb components, are on a transmissible genetic element. In some embodiments, all of the Defense System IIIb components are on a transmissible genetic element. In some embodiments, the nucleic acid construct of Defense System IIIb is on a transmissible genetic element. In some embodiments, the components are on the same transmissible genetic element. In some embodiments, the components are on different transmissible elements. In some embodiments, the order of the components on a transmissible genetic element is as found in a donor species. In some embodiments, the order of the components on a transmissible genetic element differs from the order found in a donor species.

[1512] In some embodiments, at least one Defense System IIIc component is on a transmissible genetic element. In some embodiments, more than one Defense System IIIc component, is on a transmissible genetic element. In some embodiments, two Defense System IIIc components, are on a transmissible genetic element. In some embodiments, three Defense System IIIc components, are on a transmissible genetic element. In some embodiments, four Defense System IIIc components, are on a transmissible genetic element. In some embodiments, five Defense System IIIc components, are on a transmissible genetic element. In some embodiments, all of the Defense System IIIc components are on a transmissible genetic element. In some embodiments, the nucleic acid construct of Defense System IIIc is on a transmissible genetic element. In some embodiments, the components are on the same transmissible genetic element. In some embodiments, the components are on different transmissible elements. In some embodiments, the order of the components on a transmissible genetic element is as found in a donor species. In some embodiments, the order of the components on a transmissible genetic element differs from the order found in a donor species.

[1513] In some embodiments, at least one Defense System IV component is on a transmissible genetic element. In some embodiments, more than one Defense System IV component, is on a transmissible genetic element. In some embodiments, two Defense System IV components, are on a transmissible genetic element. In some embodiments, all of the Defense System IV components are on a transmissible genetic element. In some embodiments, the nucleic acid construct of Defense System IV is on a transmissible genetic element. In some embodiments, the components are on the same transmissible genetic element. In some embodiments, the components are on different transmissible elements. In some embodiments, the order of the components on a transmissible genetic element is as found in a donor species. In some embodiments, the order of the components on a transmissible genetic element differs from the order found in a donor species.

[1514] In some embodiments, at least one Defense System V component is on a transmissible genetic element. In some embodiments, the nucleic acid construct of Defense System V is on a transmissible genetic element. In some embodiments, all of the Defense System V components are on a transmissible genetic element. In some embodiments, the components are on the same transmissible genetic element. In some embodiments, the components are on different transmissible elements. In some embodiments, the order of the components on a transmissible genetic element is as found in a donor species. In some embodiments, the order of the components on a transmissible genetic element differs from the order found in a donor species.

[1515] In some embodiments, at least one Defense System VI component is on a transmissible genetic element. In some embodiments, more than one Defense System VI component, is on a transmissible genetic element. In some embodiments, two Defense System VI components, are on a transmissible genetic element. In some embodiments, all of the Defense System VI components are on a transmissible genetic element. In some embodiments, the nucleic acid construct of Defense System VI is on a transmissible genetic element. In some embodiments, the components are on the same transmissible genetic element. In some embodiments, the components are on different transmissible elements. In some embodiments, the order of the components on a transmissible genetic element is as found in a donor species. In some embodiments, the order of the components on a transmissible genetic element differs from the order found in a donor species.

[1516] In some embodiments, at least one Defense System VII component is on a transmissible genetic element. In some embodiments, more than one Defense System VII component, is on a transmissible genetic element. In some embodiments, two Defense System VII components, are on a transmissible genetic element. In some embodiments, all of the Defense System VII components are on a transmissible genetic element. In some embodiments, the nucleic acid construct of Defense System VII is on a transmissible genetic element. In some embodiments, the components are on the same transmissible genetic element. In some embodiments, the components are on different transmissible elements. In some embodiments, the order of the components on a transmissible genetic element is as found in a donor species. In some embodiments, the order of the components on a transmissible genetic element differs from the order found in a donor species.

[1517] In some embodiments, at least one Defense System VIII component is on a transmissible genetic element. In some embodiments, more than one Defense System VIII component, is on a transmissible genetic element. In some embodiments, two Defense System VIII components, are on a transmissible genetic element. In some embodiments, all of the Defense System VIII components are on a transmissible genetic element. In some embodiments, the nucleic acid construct of Defense VIII is on a transmissible genetic element. In some embodiments, the components are on the same transmissible genetic element. In some embodiments, the components are on different transmissible elements. In some embodiments, the order of the components on a transmissible genetic element is as found in a donor species. In some embodiments, the order of the components on a transmissible genetic element differs from the order found in a donor species.

[1518] In some embodiments, at least one Defense System IX component is on a transmissible genetic element. In some embodiments, more than one Defense System IX component, is on a transmissible genetic element. In some embodiments, two Defense System IX components, are on a transmissible genetic element. In some embodiments, all of the Defense System IX components are on a transmissible genetic element. In some embodiments, the nucleic acid construct of Defense System IX is on a transmissible genetic element. In some embodiments, the components are on the same transmissible genetic element. In some embodiments, the components are on different transmissible elements. In some embodiments, the order of the components on a transmissible genetic element is as found in a donor species. In some embodiments, the order of the components on a transmissible genetic element differs from the order found in a donor species.

[1519] In some embodiments, at least one Defense System Xa component is on a transmissible genetic element. In some embodiments, more than one Defense System Xa component, is on a transmissible genetic element. In some embodiments, two Defense System Xa components, are on a transmissible genetic element. In some embodiments, three Defense System Xa components, are on a transmissible genetic element. In some embodiments, four Defense System Xa components, are on a transmissible genetic element. In some embodiments, all of the Defense System Xa components are on a transmissible genetic element. In some embodiments, the nucleic acid construct of Defense System Xa is on a transmissible genetic element. In some embodiments, the components are on the same transmissible genetic element. In some embodiments, the components are on different transmissible elements. In some embodiments, the order of the components on a transmissible genetic element is as found in a donor species. In some embodiments, the order of the components on a transmissible genetic element differs from the order found in a donor species.

[1520] In some embodiments, at least one Defense System Xb component is on a transmissible genetic element. In some embodiments, more than one Defense System Xb component, is on a transmissible genetic element. In some embodiments, two Defense System Xb components, are on a transmissible genetic element. In some embodiments, three Defense System Xb components, are on a transmissible genetic element. In some embodiments, four Defense System Xb components, are on a transmissible genetic element. In some embodiments, all of the Defense System Xb components are on a transmissible genetic element. In some embodiments, the nucleic acid construct of Defense System Xb is on a transmissible genetic element. In some embodiments, the components are on the same transmissible genetic element. In some embodiments, the components are on different transmissible elements. In some embodiments, the order of the components on a transmissible genetic element is as found in a donor species. In some embodiments, the order of the components on a transmissible genetic element differs from the order found in a donor species.

[1521] In some embodiments, at least one Defense System Xc component is on a transmissible genetic element. In some embodiments, more than one Defense System Xc component, is on a transmissible genetic element. In some embodiments, two Defense System Xc components, are on a transmissible genetic element. In some embodiments, three Defense System Xc components, are on a transmissible genetic element. In some embodiments, four Defense System Xc components, are on a transmissible genetic element. In some embodiments, all of the Defense System Xc components are on a transmissible genetic element. In some embodiments, the nucleic acid construct of Defense System Xc is on a transmissible genetic element. In some embodiments, the components are on the same transmissible genetic element. In some embodiments, the components are on different transmissible elements. In some embodiments, the order of the components on a transmissible genetic element is as found in a donor species. In some embodiments, the order of the components on a transmissible genetic element differs from the order found in a donor species.

[1522] In some embodiments, a construct disclosed herein, further comprises an element providing episomal maintenance of said construct within a cell transfected with said construct.

[1523] In some embodiments, a Defense System construct comprising a Defense System Ia, Ib, II, IIIa, IIIb, IIIc, IV, V, VI, VII, VIII, IX, Xa, Xb, or Xc further comprises a regulatory element operably linked to said construct comprising a cis-acting regulatory element for directing expression of said nucleic acid sequence. In some embodiments, a Defense System construct comprising a Defense System Ia, Ib, II, IIIa, IIIb, IIIc, IV, V, VI, VII, VIII, IX, Xa, Xb, or Xc further comprises a transmissible element for directing transfer of said nucleic acid sequence from one cell to another. In some embodiments, a Defense System construct comprising a Defense System Ia, Ib, II, IIIa, IIIb, IIIc, IV, V, VI, VII, VIII, IX, Xa, Xb, or Xc further comprises a recombination element for integrating said nucleic acid sequence into a genome of a cell transfected with said construct. In some embodiments, a Defense System construct comprising a Defense System Ia, Ib, II, IIIa, IIIb, IIIc, IV, V, VI, VII, VIII, IX, Xa, Xb, or Xc further comprises an element providing episomal maintenance of said construct within a cell transfected with said construct. In some embodiments, a Defense System construct comprising a Defense System Ia, Ib, II, IIIa, IIIb, IIIc, IV, V, VI, VII, VIII, IX, Xa, Xb, or Xc further comprises any combination of a regulatory element operably linked to said construct comprising a cis-acting regulatory element for directing expression of said nucleic acid sequence, or a transmissible element for directing transfer of said nucleic acid sequence from one cell to another, or a recombination element for integrating said nucleic acid sequence into a genome of a cell transfected with said construct, or an element providing episomal maintenance of said construct within a cell transfected with said construct, or any combination thereof.

[1524] In some embodiments, a defense system described herein comprises a combination of Defense Systems. In some embodiments, a defense system described herein comprises a combination of Defense Systems (Ia)-(Xc). In some embodiments, the combination of Defense Systems, for example but not limited to the combination of Defense Systems (Ia)-(Xc), provides advantageous properties including (1) resistance to a broader range of phages or (2) resistance to at least one phage and reduced transformation efficiency of plasmids or (3) both resistance to a broader range of phages and reduced transformation efficiency.

[1525] A skilled artisan would appreciate that the terms “anti-phage activity” or “resistant to infection by at least one phage” or “resistance to at least one phage” or “anti-phage defense” encompasses an activity provided by a Defense system to a host cell, for example but not limited to bacterial cell expressing a functional Defense System disclosed herein, wherein said bacterial cell then comprises an increased resistance to infection by at least one phage in comparison to bacteria of the same species under the same developmental stage (e.g. culture state) which does not express an endogenous functional Defense System. Resistance to infection, may be determined by for example but not limited to bacterial viability, phage lysogeny, phage genomic replication, or phage genomic degradation. The phage can be a lytic phage or a temperate (lysogenic) phage described herein. In some embodiments, the increase in resistance is at least 1.5 fold, at least 2 fold, at least 3 fold, at least 5 fold, at least 10 fold, or at least 20 fold as compared to same bacterial host in the absence of the functional Defense System.

[1526] In some embodiments, the increase in resistance is by at least 5%, by at least a 10%, at least 20%, at least 30%, at least 40%, at least 50%, at least 60%, at least 70%, at least 80%, at least 90% or more than 100% as compared to same host bacteria in the absence of the functional Defense System.

[1527] Assays for testing phage resistance are well known in the art and are further described hereinbelow.

[1528] A skilled artisan would appreciate that the terms “anti-plasmid activity” or “defense against plasmid transformation” or “reduced transformation by a plasmid” or “anti-plasmid defense” or “plasmid resistance” encompasses an activity provided by a Defense System to a host cell, for example but not limited to bacterial cell expressing a functional Defense System disclosed herein, wherein the bacterial cell then comprises a decreased efficiency of transformation by at least one plasmid in comparison to bacteria of the same species under the same developmental stage (e.g. culture state) which does not express a functional Defense System. Decreased efficiency of plasmid transformation, may be determined by for example but not limited to a transformation efficiency assay comparing bacteria comprising a Defense System with those not comprising the Defense System. The plasmid may be an episomal plasmid. In some embodiments, the decreased transformation efficiency is at least 1.5 fold, at least 2 fold, at least 3 fold, at least 5 fold, at least 10 fold, or at least 20 fold as compared to same bacterial host in the absence of the functional Defense System.

[1529] In some embodiments, the decreased transformation efficiency is by at least 5%, by at least a 10%, at least 20%, at least 30%, at least 40%, at least 50%, at least 60%, at least 70%, at least 80%, at least 90% or more than 100% as compared to same host bacteria in the absence of the functional Defense System.

[1530] A skilled artisan would appreciate that the term “donor species” may in certain embodiments, encompass the bacterial or archaeal species in which a Defense System was identified and sequenced. The skilled artisan would also appreciate that the term “host cell” may in certain embodiments, encompass bacterial or archaeal or eukaryotic cell in which a Defense System has been introduced. In some embodiments, the host cell does not endogenously comprise the Defense System introduced. In some embodiments, the host cell does not endogenously comprise a functional version of the Defense System introduced. In some embodiments, the host cell comprises the Defense System introduced but it is not functional in the host cell. In some embodiments, the host cell does not endogenously express the Defense System introduced. In some embodiments, the host cell does not endogenously express a functional version of the Defense System introduced.

[1531] Regardless of the method of introduction, in some embodiments provided herein are cells, for example but not limited to bacterial cells, which comprise a heterologous functional defense system, or components thereof. In some embodiments, the method of introduction is conjugation.

[1532] In some embodiments, the isolated cell is transformed or transfected with the described nucleic acid construct or nucleic acid construct Defense System, or a combination thereof.

[1533] In some embodiments, in some embodiments a combination of Defense Systems comprises a combination of the nucleic acid constructs comprising each Defense System. In some embodiments a combination of Defense systems comprises a combination of the nucleic acid constructs comprising a functional Defense System selected from Defense System Ia, Ib, II, IIIa, IIIb, IIIc, IV, V, VI, VII, VIII, IX, Xa, Xb, and Xc. In some embodiments two defense systems are combined. In some embodiments 2-17 defense systems are combined. In some embodiments 2-5 defense systems are combined. In some embodiments 2-10 defense systems are combined. In some embodiments 5-10 defense systems are combined. In some embodiments 10-17 defense systems are combined. In some embodiments, 2, 3, 4, 5, 6, 7, 8, 9, 10, 11, 12, 13, 14, 15, 16, 17 defense systems are combined. In some embodiments 2-40 defense systems are combined. In some embodiments, multiple copies of the same Defense System are combined. In some embodiments, the combination comprises all different Defense Systems. In some embodiments a combination of Defense systems comprises any combination of the nucleic acid constructs comprising a functional Defense System selected from Defense System Ia, Ib, II, IIIa, IIIb, IIIc, IV, V, VI, VII, VIII, IX, Xa, Xb, and Xc.

[1534] In some embodiments, a combination comprising a Defense System Ia comprises a combination of Defense System Ia with any combination of Defense Systems Ib, II, IIIa, IIIb, IIIc, IV, V, VI, VII, VIII, IX, Xa, Xb, and Xc. In some embodiments, a combination comprising a Defense System Ia comprises a combination of Defense System Ia with 1-16 defense systems selected from Defense Systems Ib, II, IIIa, IIIb, IIIc, IV, V, VI, VII, VIII, IX, Xa, Xb, and Xc. In some embodiments, a combination comprising a Defense System Ia comprises a combination of Defense System Ia with 1 defense system selected from Defense Systems Ib, II, IIIa, IIIb, IIIc, IV, V, VI, VII, VIII, IX, Xa, Xb, and Xc. In some embodiments, a combination comprising a Defense System Ia comprises a combination of Defense System Ia with 2 defense systems selected from Defense Systems Ib, II, IIIa, IIIb, IIIc, IV, V, VI, VII, VIII, IX, Xa, Xb, and Xc. In some embodiments, a combination comprising a Defense System Ia comprises a combination of Defense System Ia with 3 defense systems selected from Defense Systems Ib, II, IIIa, IIIb, IIIc, IV, V, VI, VII, VIII, IX, Xa, Xb, and Xc. In some embodiments, a combination comprising a Defense System Ia comprises a combination of Defense System Ia with 4 defense systems selected from Defense Systems Ib, II, IIIa, IIIb, IIIc, IV, V, VI, VII, VIII, IX, Xa, Xb, and Xc. In some embodiments, a combination comprising a Defense System Ia comprises a combination of Defense System Ia with 5 defense systems selected from Defense Systems Ib, II, IIIa, IIIb, IIIc, IV, V, VI, VII, VIII, IX, Xa, Xb, and Xc. In some embodiments, a combination comprising a Defense System Ia comprises a combination of Defense System Ia with 6 defense systems selected from Defense Systems Ib, II, IIIa, IIIb, IIIc, IV, V, VI, VII, VIII, IX, Xa, Xb, and Xc. In some embodiments, a combination comprising a Defense System Ia comprises a combination of Defense System Ia with 7 defense systems selected from Defense Systems Ib, II, IIIa, IIIb, IIIc, IV, V, VI, VII, VIII, IX, Xa, Xb, and Xc. In some embodiments, a combination comprising a Defense System Ia comprises a combination of Defense System Ia with 8 defense systems selected from Defense Systems Ib, II, IIIa, IIIb, IIIc, IV, V, VI, VII, VIII, IX, Xa, Xb, and Xc. In some embodiments, a combination comprising a Defense System Ia comprises a combination of Defense System Ia with 9 defense systems selected from Defense Systems Ib, II, IIIa, IIIb, IIIc, IV, V, VI, VII, VIII, IX, Xa, Xb, and Xc. In some embodiments, a combination comprising a Defense System Ia comprises a combination of Defense System Ia with 10 defense systems selected from Defense Systems Ib, II, IIIa, IIIb, IIIc, IV, V, VI, VII, VIII, IX, Xa, Xb, and Xc. In some embodiments, a combination comprising a Defense System Ia comprises a combination of Defense System Ia with 11 defense systems selected from Defense Systems Ib, II, IIIa, IIIb, IIIc, IV, V, VI, VII, VIII, IX, Xa, Xb, and Xc. In some embodiments, a combination comprising a Defense System Ia comprises a combination of Defense System Ia with 12 defense systems selected from Defense Systems Ib, II, IIIa, IIIb, IIIc, IV, V, VI, VII, VIII, IX, Xa, Xb, and Xc. In some embodiments, a combination comprising a Defense System Ia comprises a combination of Defense System Ia with 13 defense systems selected from Defense Systems Ib, II, IIIa, IIIb, IIIc, IV, V, VI, VII, VIII, IX, Xa, Xb, and Xc. In some embodiments, a combination comprising a Defense System Ia comprises a combination of Defense System Ia with 14 defense systems selected from Defense Systems Ib, II, IIIa, IIIb, IIIc, IV, V, VI, VII, VIII, IX, Xa, Xb, and Xc. In some embodiments, a combination comprising a Defense System Ia comprises a combination of Defense System Ia with 15 defense systems selected from Defense Systems Ib, II, IIIa, IIIb, IIIc, IV, V, VI, VII, VIII, IX, Xa, Xb, and Xc. In some embodiments, a combination comprising a Defense System Ia comprises a combination of Defense System Ia with 16 defense systems selected from Defense Systems Ib, II, IIIa, IIIb, IIIc, IV, V, VI, VII, VIII, IX, Xa, Xb, and Xc.

[1535] In some embodiments, a combination comprising a Defense System Ib comprises a combination of Defense System Ib with any combination of Defense Systems Ia, II, IIIa, IIIb, IIIc, IV, V, VI, VII, VIII, IX, Xa, Xb, and Xc. In some embodiments, a combination comprising a Defense System Ib comprises a combination of Defense System Ia with 1-16 defense systems selected from Defense Systems Ia, II, IIIa, IIIb, IIIc, IV, V, VI, VII, VIII, IX, Xa, Xb, and Xc. In some embodiments, a combination comprising a Defense System Ib comprises a combination of Defense System Ia with 1 defense system selected from Defense Systems Ia, II, IIIa, IIIb, IIIc, IV, V, VI, VII, VIII, IX, Xa, Xb, and Xc. In some embodiments, a combination comprising a Defense System Ib comprises a combination of Defense System Ib with 2 defense systems selected from Defense Systems Ia, II, IIIa, IIIb, IIIc, IV, V, VI, VII, VIII, IX, Xa, Xb, and Xc. In some embodiments, a combination comprising a Defense System Ib comprises a combination of Defense System Ib with 3 defense systems selected from Defense Systems Ia, II, IIIa, IIIb, IIIc, IV, V, VI, VII, VIII, IX, Xa, Xb, and Xc. In some embodiments, a combination comprising a Defense System Ib comprises a combination of Defense System Ib with 4 defense systems selected from Defense Systems Ia, II, IIIa, IIIb, IIIc, IV, V, VI, VII, VIII, IX, Xa, Xb, and Xc. In some embodiments, a combination comprising a Defense System Ib comprises a combination of Defense System Ib with 5 defense systems selected from Defense Systems Ia, II, IIIa, IIIb, IIIc, IV, V, VI, VII, VIII, IX, Xa, Xb, and Xc. In some embodiments, a combination comprising a Defense System Ib comprises a combination of Defense System Ib with 6 defense systems selected from Defense Systems Ia, II, IIIa, IIIb, IIIc, IV, V, VI, VII, VIII, IX, Xa, Xb, and Xc. In some embodiments, a combination comprising a Defense System Ib comprises a combination of Defense System Ib with 7 defense systems selected from Defense Systems Ia, II, IIIa, IIIb, IIIc, IV, V, VI, VII, VIII, IX, Xa, Xb, and Xc. In some embodiments, a combination comprising a Defense System Ib comprises a combination of Defense System Ib with 8 defense systems selected from Defense Systems Ia, II, IIIa, IIIb, IIIc, IV, V, VI, VII, VIII, IX, Xa, Xb, and Xc. In some embodiments, a combination comprising a Defense System Ib comprises a combination of Defense System Ib with 9 defense systems selected from Defense Systems Ia, II, IIIa, IIIb, IIIc, IV, V, VI, VII, VIII, IX, Xa, Xb, and Xc. In some embodiments, a combination comprising a Defense System Ib comprises a combination of Defense System Ib with 10 defense systems selected from Defense Systems Ia, II, IIIa, IIIb, IIIc, IV, V, VI, VII, VIII, IX, Xa, Xb, and Xc. In some embodiments, a combination comprising a Defense System Ib comprises a combination of Defense System Ib with 11 defense systems selected from Defense Systems Ia, II, IIIa, IIIb, IIIc, IV, V, VI, VII, VIII, IX, Xa, Xb, and Xc. In some embodiments, a combination comprising a Defense System Ib comprises a combination of Defense System Ib with 12 defense systems selected from Defense Systems Ia, II, IIIa, IIIb, IIIc, IV, V, VI, VII, VIII, IX, Xa, Xb, and Xc. In some embodiments, a combination comprising a Defense System Ib comprises a combination of Defense System Ib with 13 defense systems selected from Defense Systems Ia, II, IIIa, IIIb, IIIc, IV, V, VI, VII, VIII, IX, Xa, Xb, and Xc. In some embodiments, a combination comprising a Defense System Ib comprises a combination of Defense System Ib with 14 defense systems selected from Defense Systems Ia, II, IIIa, IIIb, IIIc, IV, V, VI, VII, VIII, IX, Xa, Xb, and Xc. In some embodiments, a combination comprising a Defense System Ib comprises a combination of Defense System Ib with 15 defense systems selected from Defense Systems Ia, II, IIIa, IIIb, IIIc, IV, V, VI, VII, VIII, IX, Xa, Xb, and Xc. In some embodiments, a combination comprising a Defense System Ib comprises a combination of Defense System Ib with 16 defense systems selected from Defense Systems Ia, II, IIIa, IIIb, IIIc, IV, V, VI, VII, VIII, IX, Xa, Xb, and Xc.

[1536] In some embodiments, a combination comprising a Defense System II comprises a combination of Defense System II with any combination of Defense Systems Ia, Ib, IIIa, IIIb, IIIc, IV, V, VI, VII, VIII, IX, Xa, Xb, and Xc. In some embodiments, a combination comprising a Defense System II comprises a combination of Defense System II with 1-16 defense systems selected from Defense Systems Ia, Ib, IIIa, IIIb, IIIc, IV, V, VI, VII, VIII, IX, Xa, Xb, and Xc. In some embodiments, a combination comprising a Defense System II comprises a combination of Defense System II with 1 defense system selected from Defense Systems Ia, Ib, IIIa, IIIb, IIIc, IV, V, VI, VII, VIII, IX, Xa, Xb, and Xc. In some embodiments, a combination comprising a Defense System II comprises a combination of Defense System II with 2 defense systems selected from Defense Systems Ia, Ib, IIIa, IIIb, IIIc, IV, V, VI, VII, VIII, IX, Xa, Xb, and Xc. In some embodiments, a combination comprising a Defense System II comprises a combination of Defense System II with 3 defense systems selected from Defense Systems Ia, Ib, IIIa, IIIb, IIIc, IV, V, VI, VII, VIII, IX, Xa, Xb, and Xc. In some embodiments, a combination comprising a Defense System II comprises a combination of Defense System II with 4 defense systems selected from Defense Systems Ia, Ib, IIIa, IIIb, IIIc, IV, V, VI, VII, VIII, IX, Xa, Xb, and Xc. In some embodiments, a combination comprising a Defense System II comprises a combination of Defense System II with 5 defense systems selected from Defense Systems Ia, Ib, IIIa, IIIb, IIIc, IV, V, VI, VII, VIII, IX, Xa, Xb, and Xc. In some embodiments, a combination comprising a Defense System II comprises a combination of Defense System II with 6 defense systems selected from Defense Systems Ia, Ib, IIIa, IIIb, IIIc, IV, V, VI, VII, VIII, IX, Xa, Xb, and Xc. In some embodiments, a combination comprising a Defense System II comprises a combination of Defense System II with 7 defense systems selected from Defense Systems Ia, Ib, IIIa, IIIb, IIIc, IV, V, VI, VII, VIII, IX, Xa, Xb, and Xc. In some embodiments, a combination comprising a Defense System II comprises a combination of Defense System II with 8 defense systems selected from Defense Systems Ia, Ib, IIIa, IIIb, IIIc, IV, V, VI, VII, VIII, IX, Xa, Xb, and Xc. In some embodiments, a combination comprising a Defense System II comprises a combination of Defense System II with 9 defense systems selected from Defense Systems Ia, Ib, IIIa, IIIb, IIIc, IV, V, VI, VII, VIII, IX, Xa, Xb, and Xc. In some embodiments, a combination comprising a Defense System II comprises a combination of Defense System II with 10 defense systems selected from Defense Systems Ia, Ib, IIIa, IIIb, IIIc, IV, V, VI, VII, VIII, IX, Xa, Xb, and Xc. In some embodiments, a combination comprising a Defense System II comprises a combination of Defense System II with 11 defense systems selected from Defense Systems Ia, Ib, IIIa, IIIb, IIIc, IV, V, VI, VII, VIII, IX, Xa, Xb, and Xc. In some embodiments, a combination comprising a Defense System II comprises a combination of Defense System II with 12 defense systems selected from Defense Systems Ia, Ib, IIIa, IIIb, IIIc, IV, V, VI, VII, VIII, IX, Xa, Xb, and Xc. In some embodiments, a combination comprising a Defense System II comprises a combination of Defense System II with 13 defense systems selected from Defense Systems Ia, Ib, IIIa, IIIb, IIIc, IV, V, VI, VII, VIII, IX, Xa, Xb, and Xc. In some embodiments, a combination comprising a Defense System II comprises a combination of Defense System II with 14 defense systems selected from Defense Systems Ia, Ib, IIIa, IIIb, IIIc, IV, V, VI, VII, VIII, IX, Xa, Xb, and Xc. In some embodiments, a combination comprising a Defense System II comprises a combination of Defense System II with 15 defense systems selected from Defense Systems Ia, Ib, IIIa, IIIb, IIIc, IV, V, VI, VII, VIII, IX, Xa, Xb, and Xc. In some embodiments, a combination comprising a Defense System II comprises a combination of Defense System II with 16 defense systems selected from Defense Systems Ia, Ib, IIIa, IIIb, IIIc, IV, V, VI, VII, VIII, IX, Xa, Xb, and Xc.

[1537] In some embodiments, a combination comprising a Defense System IIIa comprises a combination of Defense System IIIa with any combination of Defense Systems Ia, Ib, II, IIIb, IIIc, IV, V, VI, VII, VIII, IX, Xa, Xb, and Xc. In some embodiments, a combination comprising a Defense System IIIa comprises a combination of Defense System IIIa with 1-16 defense systems selected from Defense Systems Ia, Ib, II, IIIb, IIIc, IV, V, VI, VII, VIII, IX, Xa, Xb, and Xc. In some embodiments, a combination comprising a Defense System IIIa comprises a combination of Defense System IIIa with 1 defense system selected from Defense Systems Ia, Ib, II, IIIb, IIIc, IV, V, VI, VII, VIII, IX, Xa, Xb, and Xc. In some embodiments, a combination comprising a Defense System IIIa comprises a combination of Defense System IIIa with 2 defense systems selected from Defense Systems Ia, Ib, II, IIIb, IIIc, IV, V, VI, VII, VIII, IX, Xa, Xb, and Xc. In some embodiments, a combination comprising a Defense System IIIa comprises a combination of Defense System IIIa with 3 defense systems selected from Defense Systems Ia, Ib, II, IIIb, IIIc, IV, V, VI, VII, VIII, IX, Xa, Xb, and Xc. In some embodiments, a combination comprising a Defense System IIIa comprises a combination of Defense System IIIa with 4 defense systems selected from Defense Systems Ia, Ib, II, IIIb, IIIc, IV, V, VI, VII, VIII, IX, Xa, Xb, and Xc. In some embodiments, a combination comprising a Defense System IIIa comprises a combination of Defense System IIIa with 5 defense systems selected from Defense Systems Ia, Ib, II, IIIb, IIIc, IV, V, VI, VII, VIII, IX, Xa, Xb, and Xc. In some embodiments, a combination comprising a Defense System IIIa comprises a combination of Defense System IIIa with 6 defense systems selected from Defense Systems Ia, Ib, II, IIIb, IIIc, IV, V, VI, VII, VIII, IX, Xa, Xb, and Xc. In some embodiments, a combination comprising a Defense System IIIa comprises a combination of Defense System IIIa with 7 defense systems selected from Defense Systems Ia, Ib, II, IIIb, IIIc, IV, V, VI, VII, VIII, IX, Xa, Xb, and Xc. In some embodiments, a combination comprising a Defense System IIIa comprises a combination of Defense System IIIa with 8 defense systems selected from Defense Systems Ia, Ib, II, IIIb, IIIc, IV, V, VI, VII, VIII, IX, Xa, Xb, and Xc. In some embodiments, a combination comprising a Defense System IIIa comprises a combination of Defense System IIIa with 9 defense systems selected from Defense Systems Ia, Ib, II, IIIb, IIIc, IV, V, VI, VII, VIII, IX, Xa, Xb, and Xc. In some embodiments, a combination comprising a Defense System IIIa comprises a combination of Defense System IIIa with 10 defense systems selected from Defense Systems Ia, Ib, II, IIIb, IIIc, IV, V, VI, VII, VIII, IX, Xa, Xb, and Xc. In some embodiments, a combination comprising a Defense System IIIa comprises a combination of Defense System IIIa with 11 defense systems selected from Defense Systems Ia, Ib, II, IIIb, IIIc, IV, V, VI, VII, VIII, IX, Xa, Xb, and Xc. In some embodiments, a combination comprising a Defense System IIIa comprises a combination of Defense System IIIa with 12 defense systems selected from Defense Systems Ia, Ib, II, IIIb, IIIc, IV, V, VI, VII, VIII, IX, Xa, Xb, and Xc. In some embodiments, a combination comprising a Defense System IIIa comprises a combination of Defense System IIIa with 13 defense systems selected from Defense Systems Ia, Ib, II, IIIb, IIIc, IV, V, VI, VII, VIII, IX, Xa, Xb, and Xc. In some embodiments, a combination comprising a Defense System IIIa comprises a combination of Defense System IIIa with 14 defense systems selected from Defense Systems Ia, Ib, II, IIIb, IIIc, IV, V, VI, VII, VIII, IX, Xa, Xb, and Xc. In some embodiments, a combination comprising a Defense System IIIa comprises a combination of Defense System IIIa with 15 defense systems selected from Defense Systems Ia, Ib, II, IIIb, IIIc, IV, V, VI, VII, VIII, IX, Xa, Xb, and Xc. In some embodiments, a combination comprising a Defense System IIIa comprises a combination of Defense System IIIa with 16 defense systems selected from Defense Systems Ia, Ib, II, IIIb, IIIc, IV, V, VI, VII, VIII, IX, Xa, Xb, and Xc.

[1538] In some embodiments, a combination comprising a Defense System IIIb comprises a combination of Defense System IIIb with any combination of Defense Systems Ia, Ib, II, IIIa, IIIc, IV, V, VI, VII, VIII, IX, Xa, Xb, and Xc. In some embodiments, a combination comprising a Defense System IIIb comprises a combination of Defense System IIIb with 1-16 defense systems selected from Defense Systems Ia, Ib, II, IIIa, IIIc, IV, V, VI, VII, VIII, IX, Xa, Xb, and Xc. In some embodiments, a combination comprising a Defense System IIIb comprises a combination of Defense System IIIb with 1 defense system selected from Defense Systems Ia, Ib, II, IIIa, IIIc, IV, V, VI, VII, VIII, IX, Xa, Xb, and Xc. In some embodiments, a combination comprising a Defense System IIIb comprises a combination of Defense System IIIb with 2 defense systems selected from Defense Systems Ia, Ib, II, IIIa, IIIc, IV, V, VI, VII, VIII, IX, Xa, Xb, and Xc. In some embodiments, a combination comprising a Defense System IIIb comprises a combination of Defense System IIIb with 3 defense systems selected from Defense Systems Ia, Ib, II, IIIa, IIIc, IV, V, VI, VII, VIII, IX, Xa, Xb, and Xc. In some embodiments, a combination comprising a Defense System IIIb comprises a combination of Defense System IIIb with 4 defense systems selected from Defense Systems Ia, Ib, II, IIIa, IIIc, IV, V, VI, VII, VIII, IX, Xa, Xb, and Xc. In some embodiments, a combination comprising a Defense System IIIb comprises a combination of Defense System IIIb with 5 defense systems selected from Defense Systems Ia, Ib, II, IIIa, IIIc, IV, V, VI, VII, VIII, IX, Xa, Xb, and Xc. In some embodiments, a combination comprising a Defense System IIIb comprises a combination of Defense System IIIb with 6 defense systems selected from Defense Systems Ia, Ib, II, IIIa, IIIc, IV, V, VI, VII, VIII, IX, Xa, Xb, and Xc. In some embodiments, a combination comprising a Defense System IIIb comprises a combination of Defense System IIIb with 7 defense systems selected from Defense Systems Ia, Ib, II, IIIa, IIIc, IV, V, VI, VII, VIII, IX, Xa, Xb, and Xc. In some embodiments, a combination comprising a Defense System IIIb comprises a combination of Defense System IIIb with 8 defense systems selected from Defense Systems Ia, Ib, II, IIIa, IIIc, IV, V, VI, VII, VIII, IX, Xa, Xb, and Xc. In some embodiments, a combination comprising a Defense System IIIb comprises a combination of Defense System IIIb with 9 defense systems selected from Defense Systems Ia, Ib, II, IIIa, IIIc, IV, V, VI, VII, VIII, IX, Xa, Xb, and Xc. In some embodiments, a combination comprising a Defense System IIIb comprises a combination of Defense System IIIb with 10 defense systems selected from Defense Systems Ia, Ib, II, IIIa, IIIc, IV, V, VI, VII, VIII, IX, Xa, Xb, and Xc. In some embodiments, a combination comprising a Defense System IIIb comprises a combination of Defense System IIIb with 11 defense systems selected from Defense Systems Ia, Ib, II, IIIa, IIIc, IV, V, VI, VII, VIII, IX, Xa, Xb, and Xc. In some embodiments, a combination comprising a Defense System IIIb comprises a combination of Defense System IIIb with 12 defense systems selected from Defense Systems Ia, Ib, II, IIIa, IIIc, IV, V, VI, VII, VIII, IX, Xa, Xb, and Xc. In some embodiments, a combination comprising a Defense System IIIb comprises a combination of Defense System IIIb with 13 defense systems selected from Defense Systems Ia, Ib, II, IIIa, IIIc, IV, V, VI, VII, VIII, IX, Xa, Xb, and Xc. In some embodiments, a combination comprising a Defense System IIIb comprises a combination of Defense System IIIb with 14 defense systems selected from Defense Systems Ia, Ib, II, IIIa, IIIc, IV, V, VI, VII, VIII, IX, Xa, Xb, and Xc. In some embodiments, a combination comprising a Defense System IIIb comprises a combination of Defense System IIIb with 15 defense systems selected from Defense Systems Ia, Ib, II, IIIa, IIIc, IV, V, VI, VII, VIII, IX, Xa, Xb, and Xc. In some embodiments, a combination comprising a Defense System IIIb comprises a combination of Defense System IIIb with 16 defense systems selected from Defense Systems Ia, Ib, II, IIIa, IIIc, IV, V, VI, VII, VIII, IX, Xa, Xb, and Xc.

[1539] In some embodiments, a combination comprising a Defense System IIIc comprises a combination of Defense System IIIc with any combination of Defense Systems Ia, Ib, II, IIIa, IIIb, IV, V, VI, VII, VIII, IX, Xa, Xb, and Xc. In some embodiments, a combination comprising a Defense System IIIc comprises a combination of Defense System IIIc with 1-16 defense systems selected from Defense Systems Ia, Ib, II, IIIa, IIIb, IV, V, VI, VII, VIII, IX, Xa, Xb, and Xc. In some embodiments, a combination comprising a Defense System IIIc comprises a combination of Defense System IIIc with 1 defense system selected from Defense Systems Ia, Ib, II, IIIa, IIIb, IV, V, VI, VII, VIII, IX, Xa, Xb, and Xc. In some embodiments, a combination comprising a Defense System IIIc comprises a combination of Defense System IIIc with 2 defense systems selected from Defense Systems Ia, Ib, II, IIIa, IIIb, IV, V, VI, VII, VIII, IX, Xa, Xb, and Xc. In some embodiments, a combination comprising a Defense System IIIc comprises a combination of Defense System IIIc with 3 defense systems selected from Defense Systems Ia, Ib, II, IIIa, IIIb, IV, V, VI, VII, VIII, IX, Xa, Xb, and Xc. In some embodiments, a combination comprising a Defense System IIIc comprises a combination of Defense System IIIc with 4 defense systems selected from Defense Systems Ia, Ib, II, IIIa, IIIb, IV, V, VI, VII, VIII, IX, Xa, Xb, and Xc. In some embodiments, a combination comprising a Defense System IIIc comprises a combination of Defense System IIIc with 5 defense systems selected from Defense Systems Ia, Ib, II, IIIa, IIIb, IV, V, VI, VII, VIII, IX, Xa, Xb, and Xc. In some embodiments, a combination comprising a Defense System IIIc comprises a combination of Defense System IIIc with 6 defense systems selected from Defense Systems Ia, Ib, II, IIIa, IIIb, IV, V, VI, VII, VIII, IX, Xa, Xb, and Xc. In some embodiments, a combination comprising a Defense System IIIc comprises a combination of Defense System IIIc with 7 defense systems selected from Defense Systems Ia, Ib, II, IIIa, IIIb, IV, V, VI, VII, VIII, IX, Xa, Xb, and Xc. In some embodiments, a combination comprising a Defense System IIIc comprises a combination of Defense System IIIc with 8 defense systems selected from Defense Systems Ia, Ib, II, IIIa, IIIb, IV, V, VI, VII, VIII, IX, Xa, Xb, and Xc. In some embodiments, a combination comprising a Defense System IIIc comprises a combination of Defense System IIIc with 9 defense systems selected from Defense Systems Ia, Ib, II, IIIa, IIIb, IV, V, VI, VII, VIII, IX, Xa, Xb, and Xc. In some embodiments, a combination comprising a Defense System IIIc comprises a combination of Defense System IIIc with 10 defense systems selected from Defense Systems Ia, Ib, II, IIIa, IIIb, IV, V, VI, VII, VIII, IX, Xa, Xb, and Xc. In some embodiments, a combination comprising a Defense System IIIc comprises a combination of Defense System IIIc with 11 defense systems selected from Defense Systems Ia, Ib, II, IIIa, IIIb, IV, V, VI, VII, VIII, IX, Xa, Xb, and Xc. In some embodiments, a combination comprising a Defense System IIIc comprises a combination of Defense System IIIc with 12 defense systems selected from Defense Systems Ia, Ib, II, IIIa, IIIb, IV, V, VI, VII, VIII, IX, Xa, Xb, and Xc. In some embodiments, a combination comprising a Defense System IIIc comprises a combination of Defense System IIIc with 13 defense systems selected from Defense Systems Ia, Ib, II, IIIa, IIIb, IV, V, VI, VII, VIII, IX, Xa, Xb, and Xc. In some embodiments, a combination comprising a Defense System IIIc comprises a combination of Defense System IIIc with 14 defense systems selected from Defense Systems Ia, Ib, II, IIIa, IIIb, IV, V, VI, VII, VIII, IX, Xa, Xb, and Xc. In some embodiments, a combination comprising a Defense System IIIc comprises a combination of Defense System IIIc with 15 defense systems selected from Defense Systems Ia, Ib, II, IIIa, IIIb, IV, V, VI, VII, VIII, IX, Xa, Xb, and Xc. In some embodiments, a combination comprising a Defense System IIIc comprises a combination of Defense System IIIc with 16 defense systems selected from Defense Systems Ia, Ib, II, IIIa, IIIb, IV, V, VI, VII, VIII, IX, Xa, Xb, and Xc.

[1540] In some embodiments, a combination comprising a Defense System IV comprises a combination of Defense System IV with any combination of Defense Systems Ia, Ib, II, IIIa, IIIb, IIIc, V, VI, VII, VIII, IX, Xa, Xb, and Xc. In some embodiments, a combination comprising a Defense System IV comprises a combination of Defense System IV with 1-16 defense systems selected from Defense Systems Ia, Ib, II, IIIa, IIIb, IIIc, V, VI, VII, VIII, IX, Xa, Xb, and Xc. In some embodiments, a combination comprising a Defense System IV comprises a combination of Defense System IV with 1 defense system selected from Defense Systems Ia, Ib, II, IIIa, IIIb, IIIc, V, VI, VII, VIII, IX, Xa, Xb, and Xc. In some embodiments, a combination comprising a Defense System IV comprises a combination of Defense System IV with 2 defense systems selected from Defense Systems Ia, Ib, II, IIIa, IIIb, IIIc, V, VI, VII, VIII, IX, Xa, Xb, and Xc. In some embodiments, a combination comprising a Defense System IV comprises a combination of Defense System IV with 3 defense systems selected from Defense Systems Ia, Ib, II, IIIa, IIIb, IIIc, V, VI, VII, VIII, IX, Xa, Xb, and Xc. In some embodiments, a combination comprising a Defense System IV comprises a combination of Defense System IV with 4 defense systems selected from Defense Systems Ia, Ib, II, IIIa, IIIb, IIIc, V, VI, VII, VIII, IX, Xa, Xb, and Xc. In some embodiments, a combination comprising a Defense System IV comprises a combination of Defense System IV with 5 defense systems selected from Defense Systems Ia, Ib, II, IIIa, IIIb, IIIc, V, VI, VII, VIII, IX, Xa, Xb, and Xc. In some embodiments, a combination comprising a Defense System IV comprises a combination of Defense System IV with 6 defense systems selected from Defense Systems Ia, Ib, II, IIIa, IIIb, IIIc, V, VI, VII, VIII, IX, Xa, Xb, and Xc. In some embodiments, a combination comprising a Defense System IV comprises a combination of Defense System IV with 7 defense systems selected from Defense Systems Ia, Ib, II, IIIa, IIIb, IIIc, V, VI, VII, VIII, IX, Xa, Xb, and Xc. In some embodiments, a combination comprising a Defense System IV comprises a combination of Defense System IV with 8 defense systems selected from Defense Systems Ia, Ib, II, IIIa, IIIb, IIIc, V, VI, VII, VIII, IX, Xa, Xb, and Xc. In some embodiments, a combination comprising a Defense System IV comprises a combination of Defense System IV with 9 defense systems selected from Defense Systems Ia, Ib, II, IIIa, IIIb, IIIc, V, VI, VII, VIII, IX, Xa, Xb, and Xc. In some embodiments, a combination comprising a Defense System IV comprises a combination of Defense System IV with 10 defense systems selected from Defense Systems Ia, Ib, II, IIIa, IIIb, IIIc, V, VI, VII, VIII, IX, Xa, Xb, and Xc. In some embodiments, a combination comprising a Defense System IV comprises a combination of Defense System IV with 11 defense systems selected from Defense Systems Ia, Ib, II, IIIa, IIIb, IIIc, V, VI, VII, VIII, IX, Xa, Xb, and Xc. In some embodiments, a combination comprising a Defense System IV comprises a combination of Defense System IV with 12 defense systems selected from Defense Systems Ia, Ib, II, IIIa, IIIb, IIIc, V, VI, VII, VIII, IX, Xa, Xb, and Xc. In some embodiments, a combination comprising a Defense System IV comprises a combination of Defense System IV with 13 defense systems selected from Defense Systems Ia, Ib, II, IIIa, IIIb, IIIc, V, VI, VII, VIII, IX, Xa, Xb, and Xc. In some embodiments, a combination comprising a Defense System IV comprises a combination of Defense System IV with 14 defense systems selected from Defense Systems Ia, Ib, II, IIIa, IIIb, IIIc, V, VI, VII, VIII, IX, Xa, Xb, and Xc. In some embodiments, a combination comprising a Defense System IV comprises a combination of Defense System IV with 15 defense systems selected from Defense Systems Ia, Ib, II, IIIa, IIIb, IIIc, V, VI, VII, VIII, IX, Xa, Xb, and Xc. In some embodiments, a combination comprising a Defense System IV comprises a combination of Defense System IV with 16 defense systems selected from Defense Systems Ia, Ib, II, IIIa, IIIb, IIIc, V, VI, VII, VIII, IX, Xa, Xb, and Xc.

[1541] In some embodiments, a combination comprising a Defense System V comprises a combination of Defense System V with any combination of Defense Systems Ia, Ib, II, IIIa, IIIb, IIIc, IV, VI, VII, VIII, IX, Xa, Xb, and Xc. In some embodiments, a combination comprising a Defense System V comprises a combination of Defense System V with 1-16 defense systems selected from Defense Systems Ia, Ib, II, IIIa, IIIb, IIIc, IV, VI, VII, VIII, IX, Xa, Xb, and Xc. In some embodiments, a combination comprising a Defense System V comprises a combination of Defense System V with 1 defense system selected from Defense Systems Ia, Ib, II, IIIa, IIIb, IIIc, IV, VI, VII, VIII, IX, Xa, Xb, and Xc. In some embodiments, a combination comprising a Defense System V comprises a combination of Defense System V with 2 defense systems selected from Defense Systems Ia, Ib, II, IIIa, IIIb, IIIc, IV, VI, VII, VIII, IX, Xa, Xb, and Xc. In some embodiments, a combination comprising a Defense System V comprises a combination of Defense System V with 3 defense systems selected from Defense Systems Ia, Ib, II, IIIa, IIIb, IIIc, IV, VI, VII, VIII, IX, Xa, Xb, and Xc. In some embodiments, a combination comprising a Defense System V comprises a combination of Defense System V with 4 defense systems selected from Defense Systems Ia, Ib, II, IIIa, IIIb, IIIc, IV, VI, VII, VIII, IX, Xa, Xb, and Xc. In some embodiments, a combination comprising a Defense System V comprises a combination of Defense System V with 5 defense systems selected from Defense Systems Ia, Ib, II, IIIa, IIIb, IIIc, IV, VI, VII, VIII, IX, Xa, Xb, and Xc. In some embodiments, a combination comprising a Defense System V comprises a combination of Defense System V with 6 defense systems selected from Defense Systems Ia, Ib, II, IIIa, IIIb, IIIc, IV, VI, VII, VIII, IX, Xa, Xb, and Xc. In some embodiments, a combination comprising a Defense System V comprises a combination of Defense System V with 7 defense systems selected from Defense Systems Ia, Ib, II, IIIa, IIIb, IIIc, IV, VI, VII, VIII, IX, Xa, Xb, and Xc. In some embodiments, a combination comprising a Defense System V comprises a combination of Defense System V with 8 defense systems selected from Defense Systems Ia, Ib, II, IIIa, IIIb, IIIc, IV, VI, VII, VIII, IX, Xa, Xb, and Xc. In some embodiments, a combination comprising a Defense System V comprises a combination of Defense System V with 9 defense systems selected from Defense Systems Ia, Ib, II, IIIa, IIIb, IIIc, IV, VI, VII, VIII, IX, Xa, Xb, and Xc. In some embodiments, a combination comprising a Defense System V comprises a combination of Defense System V with 10 defense systems selected from Defense Systems Ia, Ib, II, IIIa, IIIb, IIIc, IV, VI, VII, VIII, IX, Xa, Xb, and Xc. In some embodiments, a combination comprising a Defense System V comprises a combination of Defense System V with 11 defense systems selected from Defense Systems Ia, Ib, II, IIIa, IIIb, IIIc, IV, VI, VII, VIII, IX, Xa, Xb, and Xc. In some embodiments, a combination comprising a Defense System V comprises a combination of Defense System V with 12 defense systems selected from Defense Systems Ia, Ib, II, IIIa, IIIb, IIIc, IV, VI, VII, VIII, IX, Xa, Xb, and Xc. In some embodiments, a combination comprising a Defense System V comprises a combination of Defense System V with 13 defense systems selected from Defense Systems Ia, Ib, II, IIIa, IIIb, IIIc, IV, VI, VII, VIII, IX, Xa, Xb, and Xc. In some embodiments, a combination comprising a Defense System V comprises a combination of Defense System V with 14 defense systems selected from Defense Systems Ia, Ib, II, IIIa, IIIb, IIIc, IV, VI, VII, VIII, IX, Xa, Xb, and Xc. In some embodiments, a combination comprising a Defense System V comprises a combination of Defense System V with 15 defense systems selected from Defense Systems Ia, Ib, II, IIIa, IIIb, IIIc, IV, VI, VII, VIII, IX, Xa, Xb, and Xc. In some embodiments, a combination comprising a Defense System V comprises a combination of Defense System V with 16 defense systems selected from Defense Systems Ia, Ib, II, IIIa, IIIb, IIIc, IV, VI, VII, VIII, IX, Xa, Xb, and Xc.

[1542] In some embodiments, a combination comprising a Defense System VI comprises a combination of Defense System VI with any combination of Defense Systems Ia, Ib, II, IIIa, IIIb, IIIc, IV, V, VII, VIII, IX, Xa, Xb, and Xc. In some embodiments, a combination comprising a Defense System VI comprises a combination of Defense System VI with 1-16 defense systems selected from Defense Systems Ia, Ib, II, IIIa, IIIb, IIIc, IV, V, VII, VIII, IX, Xa, Xb, and Xc. In some embodiments, a combination comprising a Defense System VI comprises a combination of Defense System VI with 1 defense system selected from Defense Systems Ia, Ib, II, IIIa, IIIb, IIIc, IV, V, VII, VIII, IX, Xa, Xb, and Xc. In some embodiments, a combination comprising a Defense System VI comprises a combination of Defense System VI with 2 defense systems selected from Defense Systems Ia, Ib, II, IIIa, IIIb, IIIc, IV, V, VII, VIII, IX, Xa, Xb, and Xc. In some embodiments, a combination comprising a Defense System VI comprises a combination of Defense System VI with 3 defense systems selected from Defense Systems Ia, Ib, II, IIIa, IIIb, IIIc, IV, V, VII, VIII, IX, Xa, Xb, and Xc. In some embodiments, a combination comprising a Defense System VI comprises a combination of Defense System VI with 4 defense systems selected from Defense Systems Ia, Ib, II, IIIa, IIIb, IIIc, IV, V, VII, VIII, IX, Xa, Xb, and Xc. In some embodiments, a combination comprising a Defense System VI comprises a combination of Defense System VI with 5 defense systems selected from Defense Systems Ia, Ib, II, IIIa, IIIb, IIIc, IV, V, VII, VIII, IX, Xa, Xb, and Xc. In some embodiments, a combination comprising a Defense System VI comprises a combination of Defense System VI with 6 defense systems selected from Defense Systems Ia, Ib, II, IIIa, IIIb, IIIc, IV, V, VII, VIII, IX, Xa, Xb, and Xc. In some embodiments, a combination comprising a Defense System VI comprises a combination of Defense System VI with 7 defense systems selected from Defense Systems Ia, Ib, II, IIIa, IIIb, IIIc, IV, V, VII, VIII, IX, Xa, Xb, and Xc. In some embodiments, a combination comprising a Defense System VI comprises a combination of Defense System VI with 8 defense systems selected from Defense Systems Ia, Ib, II, IIIa, IIIb, IIIc, IV, V, VII, VIII, IX, Xa, Xb, and Xc. In some embodiments, a combination comprising a Defense System VI comprises a combination of Defense System VI with 9 defense systems selected from Defense Systems Ia, Ib, II, IIIa, IIIb, IIIc, IV, V, VII, VIII, IX, Xa, Xb, and Xc. In some embodiments, a combination comprising a Defense System VI comprises a combination of Defense System VI with 10 defense systems selected from Defense Systems Ia, Ib, II, IIIa, IIIb, IIIc, IV, V, VII, VIII, IX, Xa, Xb, and Xc. In some embodiments, a combination comprising a Defense System VI comprises a combination of Defense System VI with 11 defense systems selected from Defense Systems Ia, Ib, II, IIIa, IIIb, IIIc, IV, V, VII, VIII, IX, Xa, Xb, and Xc. In some embodiments, a combination comprising a Defense System VI comprises a combination of Defense System VI with 12 defense systems selected from Defense Systems Ia, Ib, II, IIIa, IIIb, IIIc, IV, V, VII, VIII, IX, Xa, Xb, and Xc. In some embodiments, a combination comprising a Defense System VI comprises a combination of Defense System VI with 13 defense systems selected from Defense Systems Ia, Ib, II, IIIa, IIIb, IIIc, IV, V, VII, VIII, IX, Xa, Xb, and Xc. In some embodiments, a combination comprising a Defense System VI comprises a combination of Defense System VI with 14 defense systems selected from Defense Systems Ia, Ib, II, IIIa, IIIb, IIIc, IV, V, VII, VIII, IX, Xa, Xb, and Xc. In some embodiments, a combination comprising a Defense System VI comprises a combination of Defense System VI with 15 defense systems selected from Defense Systems Ia, Ib, II, IIIa, IIIb, IIIc, IV, V, VII, VIII, IX, Xa, Xb, and Xc. In some embodiments, a combination comprising a Defense System VI comprises a combination of Defense System VI with 16 defense systems selected from Defense Systems Ia, Ib, II, IIIa, IIIb, IIIc, IV, V, VII, VIII, IX, Xa, Xb, and Xc.

[1543] In some embodiments, a combination comprising a Defense System VII comprises a combination of Defense System VII with any combination of Defense Systems Ia, Ib, II, IIIa, IIIb, IIIc, IV, VI, V, VI, VIII, IX, Xa, Xb, and Xc. In some embodiments, a combination comprising a Defense System VII comprises a combination of Defense System VII with 1-16 defense systems selected from Defense Systems Ia, Ib, II, IIIa, IIIb, IIIc, IV, VI, V, VI, VIII, IX, Xa, Xb, and Xc. In some embodiments, a combination comprising a Defense System VII comprises a combination of Defense System VII with 1 defense system selected from Defense Systems Ia, Ib, II, IIIa, IIIb, IIIc, IV, VI, V, VI, VIII, IX, Xa, Xb, and Xc. In some embodiments, a combination comprising a Defense System VII comprises a combination of Defense System VII with 2 defense systems selected from Defense Systems Ia, Ib, II, IIIa, IIIb, IIIc, IV, VI, V, VI, VIII, IX, Xa, Xb, and Xc. In some embodiments, a combination comprising a Defense System VII comprises a combination of Defense System VII with 3 defense systems selected from Defense Systems Ia, Ib, II, IIIa, IIIb, IIIc, IV, VI, V, VI, VIII, IX, Xa, Xb, and Xc. In some embodiments, a combination comprising a Defense System VII comprises a combination of Defense System VII with 4 defense systems selected from Defense Systems Ia, Ib, II, IIIa, IIIb, IIIc, IV, VI, V, VI, VIII, IX, Xa, Xb, and Xc. In some embodiments, a combination comprising a Defense System VII comprises a combination of Defense System VII with 5 defense systems selected from Defense Systems Ia, Ib, II, IIIa, IIIb, IIIc, IV, VI, V, VI, VIII, IX, Xa, Xb, and Xc. In some embodiments, a combination comprising a Defense System VII comprises a combination of Defense System VII with 6 defense systems selected from Defense Systems Ia, Ib, II, IIIa, IIIb, IIIc, IV, VI, V, VI, VIII, IX, Xa, Xb, and Xc. In some embodiments, a combination comprising a Defense System VII comprises a combination of Defense System VII with 7 defense systems selected from Defense Systems Ia, Ib, II, IIIa, IIIb, IIIc, IV, VI, V, VI, VIII, IX, Xa, Xb, and Xc. In some embodiments, a combination comprising a Defense System VII comprises a combination of Defense System VII with 8 defense systems selected from Defense Systems Ia, Ib, II, IIIa, IIIb, IIIc, IV, VI, V, VI, VIII, IX, Xa, Xb, and Xc. In some embodiments, a combination comprising a Defense System VII comprises a combination of Defense System VII with 9 defense systems selected from Defense Systems Ia, Ib, II, IIIa, IIIb, IIIc, IV, VI, V, VI, VIII, IX, Xa, Xb, and Xc. In some embodiments, a combination comprising a Defense System VII comprises a combination of Defense System VII with 10 defense systems selected from Defense Systems Ia, Ib, II, IIIa, IIIb, IIIc, IV, VI, V, VI, VIII, IX, Xa, Xb, and Xc. In some embodiments, a combination comprising a Defense System VII comprises a combination of Defense System VII with 11 defense systems selected from Defense Systems Ia, Ib, II, IIIa, IIIb, IIIc, IV, VI, V, VI, VIII, IX, Xa, Xb, and Xc. In some embodiments, a combination comprising a Defense System VII comprises a combination of Defense System VII with 12 defense systems selected from Defense Systems Ia, Ib, II, IIIa, IIIb, IIIc, IV, VI, V, VI, VIII, IX, Xa, Xb, and Xc. In some embodiments, a combination comprising a Defense System VII comprises a combination of Defense System VII with 13 defense systems selected from Defense Systems Ia, Ib, II, IIIa, IIIb, IIIc, IV, VI, V, VI, VIII, IX, Xa, Xb, and Xc. In some embodiments, a combination comprising a Defense System VII comprises a combination of Defense System VII with 14 defense systems selected from Defense Systems Ia, Ib, II, IIIa, IIIb, IIIc, IV, VI, V, VI, VIII, IX, Xa, Xb, and Xc. In some embodiments, a combination comprising a Defense System VII comprises a combination of Defense System VII with 15 defense systems selected from Defense Systems Ia, Ib, II, IIIa, IIIb, IIIc, IV, VI, V, VI, VIII, IX, Xa, Xb, and Xc. In some embodiments, a combination comprising a Defense System VII comprises a combination of Defense System VII with 16 defense systems selected from Defense Systems Ia, Ib, II, IIIa, IIIb, IIIc, IV, VI, V, VI, VIII, IX, Xa, Xb, and Xc.

[1544] In some embodiments, a combination comprising a Defense System VIII comprises a combination of Defense System VIII with any combination of Defense Systems Ia, Ib, II, IIIa, IIIb, IIIc, IV, VI, V, VI, VII, IX, Xa, Xb, and Xc. In some embodiments, a combination comprising a Defense System VIII comprises a combination of Defense System VIII with 1-16 defense systems selected from Defense Systems Ia, Ib, II, IIIa, IIIb, IIIc, IV, VI, V, VI, VII, IX, Xa, Xb, and Xc. In some embodiments, a combination comprising a Defense System VIII comprises a combination of Defense System VIII with 1 defense system selected from Defense Systems Ia, Ib, II, IIIa, IIIb, IIIc, IV, VI, V, VI, VII, IX, Xa, Xb, and Xc. In some embodiments, a combination comprising a Defense System VIII comprises a combination of Defense System VIII with 2 defense systems selected from Defense Systems Ia, Ib, II, IIIa, IIIb, IIIc, IV, VI, V, VI, VII, IX, Xa, Xb, and Xc. In some embodiments, a combination comprising a Defense System VIII comprises a combination of Defense System VIII with 3 defense systems selected from Defense Systems Ia, Ib, II, IIIa, IIIb, IIIc, IV, VI, V, VI, VII, IX, Xa, Xb, and Xc. In some embodiments, a combination comprising a Defense System VIII comprises a combination of Defense System VIII with 4 defense systems selected from Defense Systems Ia, Ib, II, IIIa, IIIb, IIIc, IV, VI, V, VI, VII, IX, Xa, Xb, and Xc. In some embodiments, a combination comprising a Defense System VIII comprises a combination of Defense System VIII with 5 defense systems selected from Defense Systems Ia, Ib, II, IIIa, IIIb, IIIc, IV, VI, V, VI, VII, IX, Xa, Xb, and Xc. In some embodiments, a combination comprising a Defense System VIII comprises a combination of Defense System VIII with 6 defense systems selected from Defense Systems Ia, Ib, II, IIIa, IIIb, IIIc, IV, VI, V, VI, VII, IX, Xa, Xb, and Xc. In some embodiments, a combination comprising a Defense System VIII comprises a combination of Defense System VIII with 7 defense systems selected from Defense Systems Ia, Ib, II, IIIa, IIIb, IIIc, IV, VI, V, VI, VII, IX, Xa, Xb, and Xc. In some embodiments, a combination comprising a Defense System VIII comprises a combination of Defense System VIII with 8 defense systems selected from Defense Systems Ia, Ib, II, IIIa, IIIb, IIIc, IV, VI, V, VI, VII, IX, Xa, Xb, and Xc. In some embodiments, a combination comprising a Defense System VIII comprises a combination of Defense System VIII with 9 defense systems selected from Defense Systems Ia, Ib, II, IIIa, IIIb, IIIc, IV, VI, V, VI, VII, IX, Xa, Xb, and Xc. In some embodiments, a combination comprising a Defense System VIII comprises a combination of Defense System VIII with 10 defense systems selected from Defense Systems Ia, Ib, II, IIIa, IIIb, IIIc, IV, VI, V, VI, VII, IX, Xa, Xb, and Xc. In some embodiments, a combination comprising a Defense System VIII comprises a combination of Defense System VIII with 11 defense systems selected from Defense Systems Ia, Ib, II, IIIa, IIIb, IIIc, IV, VI, V, VI, VII, IX, Xa, Xb, and Xc. In some embodiments, a combination comprising a Defense System VIII comprises a combination of Defense System VIII with 12 defense systems selected from Defense Systems Ia, Ib, II, IIIa, IIIb, IIIc, IV, VI, V, VI, VII, IX, Xa, Xb, and Xc. In some embodiments, a combination comprising a Defense System VIII comprises a combination of Defense System VIII with 13 defense systems selected from Defense Systems Ia, Ib, II, IIIa, IIIb, IIIc, IV, VI, V, VI, VII, IX, Xa, Xb, and Xc. In some embodiments, a combination comprising a Defense System VIII comprises a combination of Defense System VIII with 14 defense systems selected from Defense Systems Ia, Ib, II, IIIa, IIIb, IIIc, IV, VI, V, VI, VII, IX, Xa, Xb, and Xc. In some embodiments, a combination comprising a Defense System VIII comprises a combination of Defense System VIII with 15 defense systems selected from Defense Systems Ia, Ib, II, IIIa, IIIb, IIIc, IV, VI, V, VI, VII, IX, Xa, Xb, and Xc. In some embodiments, a combination comprising a Defense System VIII comprises a combination of Defense System VIII with 16 defense systems selected from Defense Systems Ia, Ib, II, IIIa, IIIb, IIIc, IV, VI, V, VI, VII, IX, Xa, Xb, and Xc.

[1545] In some embodiments, a combination comprising a Defense System IX comprises a combination of Defense System IX with any combination of Defense Systems Ia, Ib, II, IIIa, IIIb, IIIc, IV, VI, V, VI, VII, VIII, Xa, Xb, and Xc. In some embodiments, a combination comprising a Defense System IX comprises a combination of Defense System IX with 1-16 defense systems selected from Defense Systems Ia, Ib, II, IIIa, IIIb, IIIc, IV, VI, V, VI, VII, VIII, Xa, Xb, and Xc. In some embodiments, a combination comprising a Defense System IX comprises a combination of Defense System IX with 1 defense system selected from Defense Systems Ia, Ib, II, IIIa, IIIb, IIIc, IV, VI, V, VI, VII, VIII, Xa, Xb, and Xc. In some embodiments, a combination comprising a Defense System IX comprises a combination of Defense System IX with 2 defense systems selected from Defense Systems Ia, Ib, II, IIIa, IIIb, IIIc, IV, VI, V, VI, VII, VIII, Xa, Xb, and Xc. In some embodiments, a combination comprising a Defense System IX comprises a combination of Defense System IX with 3 defense systems selected from Defense Systems Ia, Ib, II, IIIa, IIIb, IIIc, IV, VI, V, VI, VII, VIII, Xa, Xb, and Xc. In some embodiments, a combination comprising a Defense System IX comprises a combination of Defense System IX with 4 defense systems selected from Defense Systems Ia, Ib, II, IIIa, IIIb, IIIc, IV, VI, V, VI, VII, VIII, Xa, Xb, and Xc. In some embodiments, a combination comprising a Defense System IX comprises a combination of Defense System IX with 5 defense systems selected from Defense Systems Ia, Ib, II, IIIa, IIIb, IIIc, IV, VI, V, VI, VII, VIII, Xa, Xb, and Xc. In some embodiments, a combination comprising a Defense System IX comprises a combination of Defense System IX with 6 defense systems selected from Defense Systems Ia, Ib, II, IIIa, IIIb, IIIc, IV, VI, V, VI, VII, VIII, Xa, Xb, and Xc. In some embodiments, a combination comprising a Defense System IX comprises a combination of Defense System IX with 7 defense systems selected from Defense Systems Ia, Ib, II, IIIa, IIIb, IIIc, IV, VI, V, VI, VII, VIII, Xa, Xb, and Xc. In some embodiments, a combination comprising a Defense System IX comprises a combination of Defense System IX with 8 defense systems selected from Defense Systems Ia, Ib, II, IIIa, IIIb, IIIc, IV, VI, V, VI, VII, VIII, Xa, Xb, and Xc. In some embodiments, a combination comprising a Defense System IX comprises a combination of Defense System IX with 9 defense systems selected from Defense Systems Ia, Ib, II, IIIa, IIIb, IIIc, IV, VI, V, VI, VII, VIII, Xa, Xb, and Xc. In some embodiments, a combination comprising a Defense System IX comprises a combination of Defense System IX with 10 defense systems selected from Defense Systems Ia, Ib, II, IIIa, IIIb, IIIc, IV, VI, V, VI, VII, VIII, Xa, Xb, and Xc. In some embodiments, a combination comprising a Defense System IX comprises a combination of Defense System IX with 11 defense systems selected from Defense Systems Ia, Ib, II, IIIa, IIIb, IIIc, IV, VI, V, VI, VII, VIII, Xa, Xb, and Xc. In some embodiments, a combination comprising a Defense System IX comprises a combination of Defense System IX with 12 defense systems selected from Defense Systems Ia, Ib, II, IIIa, IIIb, IIIc, IV, VI, V, VI, VII, VIII, Xa, Xb, and Xc. In some embodiments, a combination comprising a Defense System IX comprises a combination of Defense System IX with 13 defense systems selected from Defense Systems Ia, Ib, II, IIIa, IIIb, IIIc, IV, VI, V, VI, VII, VIII, Xa, Xb, and Xc. In some embodiments, a combination comprising a Defense System IX comprises a combination of Defense System IX with 14 defense systems selected from Defense Systems Ia, Ib, II, IIIa, IIIb, IIIc, IV, VI, V, VI, VII, VIII, Xa, Xb, and Xc. In some embodiments, a combination comprising a Defense System IX comprises a combination of Defense System IX with 15 defense systems selected from Defense Systems Ia, Ib, II, IIIa, IIIb, IIIc, IV, VI, V, VI, VII, VIII, Xa, Xb, and Xc. In some embodiments, a combination comprising a Defense System IX comprises a combination of Defense System IX with 16 defense systems selected from Defense Systems Ia, Ib, II, IIIa, IIIb, IIIc, IV, VI, V, VI, VII, VIII, Xa, Xb, and Xc.

[1546] In some embodiments, a combination comprising a Defense System Xb comprises a combination of Defense System Xb with any combination of Defense Systems Ia, Ib, II, IIIa, IIIb, IIIc, IV, VI, V, VI, VII, VIII, IX, Xa, and Xc. In some embodiments, a combination comprising a Defense System Xb comprises a combination of Defense System Xb with 1-16 defense systems selected from Defense Systems Ia, Ib, II, IIIa, IIIb, IIIc, IV, VI, V, VI, VII, VIII, IX, Xa, and Xc. In some embodiments, a combination comprising a Defense System Xb comprises a combination of Defense System Xb with 1 defense system selected from Defense Systems Ia, Ib, II, IIIa, IIIb, IIIc, IV, VI, V, VI, VII, VIII, IX, Xa, and Xc. In some embodiments, a combination comprising a Defense System Xb comprises a combination of Defense System Xb with 2 defense systems selected from Defense Systems Ia, Ib, II, IIIa, IIIb, IIIc, IV, VI, V, VI, VII, VIII, IX, Xa, and Xc. In some embodiments, a combination comprising a Defense System Xb comprises a combination of Defense System Xb with 3 defense systems selected from Defense Systems Ia, Ib, II, IIIa, IIIb, IIIc, IV, VI, V, VI, VII, VIII, IX, Xa, and Xc. In some embodiments, a combination comprising a Defense System Xb comprises a combination of Defense System Xb with 4 defense systems selected from Defense Systems Ia, Ib, II, IIIa, IIIb, IIIc, IV, VI, V, VI, VII, VIII, IX, Xa, and Xc. In some embodiments, a combination comprising a Defense System Xb comprises a combination of Defense System Xb with 5 defense systems selected from Defense Systems Ia, Ib, II, IIIa, IIIb, IIIc, IV, VI, V, VI, VII, VIII, IX, Xa, and Xc. In some embodiments, a combination comprising a Defense System Xb comprises a combination of Defense System Xb with 6 defense systems selected from Defense Systems Ia, Ib, II, IIIa, IIIb, IIIc, IV, VI, V, VI, VII, VIII, IX, Xa, and Xc. In some embodiments, a combination comprising a Defense System Xb comprises a combination of Defense System Xb with 7 defense systems selected from Defense Systems Ia, Ib, II, IIIa, IIIb, IIIc, IV, VI, V, VI, VII, VIII, IX, Xa, and Xc. In some embodiments, a combination comprising a Defense System Xb comprises a combination of Defense System Xb with 8 defense systems selected from Defense Systems Ia, Ib, II, IIIa, IIIb, IIIc, IV, VI, V, VI, VII, VIII, IX, Xa, and Xc. In some embodiments, a combination comprising a Defense System Xb comprises a combination of Defense System Xb with 9 defense systems selected from Defense Systems Ia, Ib, II, IIIa, IIIb, IIIc, IV, VI, V, VI, VII, VIII, IX, Xa, and Xc. In some embodiments, a combination comprising a Defense System Xb comprises a combination of Defense System Xb with 10 defense systems selected from Defense Systems Ia, Ib, II, IIIa, IIIb, IIIc, IV, VI, V, VI, VII, VIII, IX, Xa, and Xc. In some embodiments, a combination comprising a Defense System Xb comprises a combination of Defense System Xb with 11 defense systems selected from Defense Systems Ia, Ib, II, IIIa, IIIb, IIIc, IV, VI, V, VI, VII, VIII, IX, Xa, and Xc. In some embodiments, a combination comprising a Defense System Xb comprises a combination of Defense System Xb with 12 defense systems selected from Defense Systems Ia, Ib, II, IIIa, IIIb, IIIc, IV, VI, V, VI, VII, VIII, IX, Xa, and Xc. In some embodiments, a combination comprising a Defense System Xb comprises a combination of Defense System Xb with 13 defense systems selected from Defense Systems Ia, Ib, II, IIIa, IIIb, IIIc, IV, VI, V, VI, VII, VIII, IX, Xa, and Xc. In some embodiments, a combination comprising a Defense System Xb comprises a combination of Defense System Xb with 14 defense systems selected from Defense Systems Ia, Ib, II, IIIa, IIIb, IIIc, IV, VI, V, VI, VII, VIII, IX, Xa, and Xc. In some embodiments, a combination comprising a Defense System Xb comprises a combination of Defense System Xb with 15 defense systems selected from Defense Systems Ia, Ib, II, IIIa, IIIb, IIIc, IV, VI, V, VI, VII, VIII, IX, Xa, and Xc. In some embodiments, a combination comprising a Defense System Xb comprises a combination of Defense System Xb with 16 defense systems selected from Defense Systems Ia, Ib, II, IIIa, IIIb, IIIc, IV, VI, V, VI, VII, VIII, IX, Xa, and Xc.

[1547] In some embodiments, a combination comprising a Defense System Xc comprises a combination of Defense System Xc with any combination of Defense Systems Ia, Ib, II, IIIa, IIIb, IIIc, IV, VI, V, VI, VII, VIII, IX, Xa, and Xb. In some embodiments, a combination comprising a Defense System Xc comprises a combination of Defense System Xc with 1-16 defense systems selected from Defense Systems Ia, Ib, II, IIIa, IIIb, IIIc, IV, VI, V, VI, VII, VIII, IX, Xa, and Xb. In some embodiments, a combination comprising a Defense System Xc comprises a combination of Defense System Xc with 1 defense system selected from Defense Systems Ia, Ib, II, IIIa, IIIb, IIIc, IV, VI, V, VI, VII, VIII, IX, Xa, and Xb. In some embodiments, a combination comprising a Defense System Xc comprises a combination of Defense System Xc with 2 defense systems selected from Defense Systems Ia, Ib, II, IIIa, IIIb, IIIc, IV, VI, V, VI, VII, VIII, IX, Xa, and Xb. In some embodiments, a combination comprising a Defense System Xc comprises a combination of Defense System Xc with 3 defense systems selected from Defense Systems Ia, Ib, II, IIIa, IIIb, IIIc, IV, VI, V, VI, VII, VIII, IX, Xa, and Xb. In some embodiments, a combination comprising a Defense System Xc comprises a combination of Defense System Xc with 4 defense systems selected from Defense Systems Ia, Ib, II, IIIa, IIIb, IIIc, IV, VI, V, VI, VII, VIII, IX, Xa, and Xb. In some embodiments, a combination comprising a Defense System Xc comprises a combination of Defense System Xc with 5 defense systems selected from Defense Systems Ia, Ib, II, IIIa, IIIb, IIIc, IV, VI, V, VI, VII, VIII, IX, Xa, and Xb. In some embodiments, a combination comprising a Defense System Xc comprises a combination of Defense System Xc with 6 defense systems selected from Defense Systems Ia, Ib, II, IIIa, IIIb, IIIc, IV, VI, V, VI, VII, VIII, IX, Xa, and Xb. In some embodiments, a combination comprising a Defense System Xc comprises a combination of Defense System Xc with 7 defense systems selected from Defense Systems Ia, Ib, II, IIIa, IIIb, IIIc, IV, VI, V, VI, VII, VIII, IX, Xa, and Xb. In some embodiments, a combination comprising a Defense System Xc comprises a combination of Defense System Xc with 8 defense systems selected from Defense Systems Ia, Ib, II, IIIa, IIIb, IIIc, IV, VI, V, VI, VII, VIII, IX, Xa, and Xb. In some embodiments, a combination comprising a Defense System Xc comprises a combination of Defense System Xc with 9 defense systems selected from Defense Systems Ia, Ib, II, IIIa, IIIb, IIIc, IV, VI, V, VI, VII, VIII, IX, Xa, and Xb. In some embodiments, a combination comprising a Defense System Xc comprises a combination of Defense System Xc with 10 defense systems selected from Defense Systems Ia, Ib, II, IIIa, IIIb, IIIc, IV, VI, V, VI, VII, VIII, IX, Xa, and Xb. In some embodiments, a combination comprising a Defense System Xc comprises a combination of Defense System Xc with 11 defense systems selected from Defense Systems Ia, Ib, II, IIIa, IIIb, IIIc, IV, VI, V, VI, VII, VIII, IX, Xa, and Xb. In some embodiments, a combination comprising a Defense System Xc comprises a combination of Defense System Xc with 12 defense systems selected from Defense Systems Ia, Ib, II, IIIa, IIIb, IIIc, IV, VI, V, VI, VII, VIII, IX, Xa, and Xb. In some embodiments, a combination comprising a Defense System Xc comprises a combination of Defense System Xc with 13 defense systems selected from Defense Systems Ia, Ib, II, IIIa, IIIb, IIIc, IV, VI, V, VI, VII, VIII, IX, Xa, and Xb. In some embodiments, a combination comprising a Defense System Xc comprises a combination of Defense System Xc with 14 defense systems selected from Defense Systems Ia, Ib, II, IIIa, IIIb, IIIc, IV, VI, V, VI, VII, VIII, IX, Xa, and Xb. In some embodiments, a combination comprising a Defense System Xc comprises a combination of Defense System Xc with 15 defense systems selected from Defense Systems Ia, Ib, II, IIIa, IIIb, IIIc, IV, VI, V, VI, VII, VIII, IX, Xa, and Xb. In some embodiments, a combination comprising a Defense System Xc comprises a combination of Defense System Xc with 16 defense systems selected from Defense Systems Ia, Ib, II, IIIa, IIIb, IIIc, IV, VI, V, VI, VII, VIII, IX, Xa, and Xb.

[1548] In some embodiments, a combination of Defense Systems disclosed herein above, does not naturally occur in nature. In some embodiments, a combination of Defense Systems disclosed herein above, does not naturally occur in a host cell. In some embodiments, a combination of Defense Systems disclosed herein above, does not naturally occur in bacterial cell. In some embodiments, a combination of Defense Systems disclosed herein above, does not naturally occur in an archaeal cell. In some embodiments, a combination of Defense Systems disclosed herein above, does not naturally occur in a eukaryotic cell. In some embodiments, a combination of Defense Systems disclosed herein above, does not naturally occur in a species disclosed in Tables 6-19C. In some embodiments, a combination of Defense Systems disclosed herein above, does not naturally occur in a host cell.

[1549] In some embodiments, a combination of Defense Systems disclosed herein above, is not expressed together in nature. In some embodiments, a combination of Defense Systems disclosed herein above, is not naturally expressed in a host cell. In some embodiments, a combination of Defense Systems disclosed herein above, is not naturally expressed in bacterial cell. In some embodiments, a combination of Defense Systems disclosed herein above, is not naturally expressed in an archaeal cell. In some embodiments, a combination of Defense Systems disclosed herein above, is not naturally expressed in a eukaryotic cell. In some embodiments, a combination of Defense Systems disclosed herein above, is not naturally expressed in a species disclosed in Tables 6-17.

[1550] In some embodiments, a combination of functional Defense Systems disclosed herein above, does not naturally occur in nature. In some embodiments, a combination of functional Defense Systems disclosed herein above, does not naturally occur in a host cell. In some embodiments, a combination of functional Defense Systems disclosed herein above, does not naturally occur in bacterial cell. In some embodiments, a combination of functional Defense Systems disclosed herein above, does not naturally occur in an archaeal cell. In some embodiments, a combination of functional Defense Systems disclosed herein above, does not naturally occur in a eukaryotic cell. In some embodiments, a combination of functional Defense Systems disclosed herein above, does not naturally occur in a species disclosed in Tables 6-19C. In some embodiments, a combination of functional Defense Systems disclosed herein above, does not naturally occur in a host cell.

[1551] In some embodiments, a cell comprising a combination of Defense Systems disclosed herein above, does not naturally occur in nature. In some embodiments, a cell comprising a combination of functional Defense Systems disclosed herein above, does not naturally occur in nature.

[1552] In some embodiments, a nucleic acid constructs, comprised in a Defense System Ia, Ib, II, IIIa, IIIb, IIIc, IV, V, VI, VII, VIII, IX, Xa, Xb, or Xc, encodes a polycistronic mRNA comprising said nucleic acid sequences. In some embodiments, a nucleic acid constructs, comprised in a Defense System Ia, Ib, II, IIIa, IIIb, IIIc, IV, V, VI, VII, VIII, IX, Xa, Xb, or Xc, encodes a polycistronic mRNA comprising said nucleic acid sequences encoding said polypeptides. In some embodiments, a nucleic acid constructs, comprised in a Defense System Ia, Ib, II, IIIa, IIIb, IIIc, IV, V, VI, VII, VIII, IX, Xa, Xb, or Xc, encodes a polycistronic mRNA comprising said nucleic acid sequences encoding components or functional portions thereof, of a Defense System.

[1553] Various construct schemes can be utilized to express few genes from a single nucleic acid construct. In some embodiments, the construct encodes a polycistronic mRNA comprising the nucleic acid sequences. In some embodiments, the nucleic acid sequences can be co-transcribed as a polycistronic message from a single promoter sequence of the nucleic acid construct. To enable co-translation of all the genes from a single polycistronic message, the different nucleic acid sequence segments can be transcriptionally fused via linker sequence including an internal ribosome entry site (IRES) sequence, which enables the translation of the nucleic acid sequence segment downstream of the IRES sequence. In this case, a transcribed polycistronic RNA molecule including the coding sequences of different combinations of the nucleic acid sequences, for example as disclosed herein, will be translated from both the capped 5′ end and the internal IRES sequence of the polycistronic RNA molecule.

[1554] In some embodiments, each two nucleic acid sequence segments can be translationally fused via protease recognition site cleavable by a protease expressed by the cell to be transformed with the nucleic acid construct. In this case, a chimeric polypeptide translated will be cleaved by the cell expressed protease.

[1555] In some embodiments, the nucleic acid construct can include at least two Cis acting regulatory elements each being for separately expressing a distinct nucleic acid sequence. These at least two Cis acting regulatory elements can be identical or distinct.

[1556] In some embodiments, disclosed herein is an isolated polypeptide comprising an amino acid sequence comprising one component of a Defense System disclosed herein. In some embodiments, disclosed herein is an isolated polypeptide comprising an amino acid sequence comprising two components of a Defense System disclosed herein. In some embodiments, disclosed herein is an isolated polypeptide comprising an amino acid sequence comprising three components of a Defense System disclosed herein. In some embodiments, disclosed herein is an isolated polypeptide comprising an amino acid sequence comprising four components of a Defense System disclosed herein. In some embodiments, disclosed herein is an isolated polypeptide comprising an amino acid sequence comprising five components of a Defense System disclosed herein.

[1557] In some embodiments, disclosed herein is an isolated polypeptide comprising an amino acid sequence comprising one component of a Defense System Ia or a Defense System Ib, said component selected from the group consisting of a ZorA polypeptide, a ZorB polypeptide, a ZorC polypeptide, a ZorD polypeptide, and a ZorE polypeptide. In some embodiments, is an isolated polypeptide comprising an amino acid sequence comprising two components of a Defense System Ia or a Defense System Ib, said component selected from the group consisting of a ZorA polypeptide, a ZorB polypeptide, a ZorC polypeptide, a ZorD polypeptide, and a ZorE polypeptide. In some embodiments, is an isolated polypeptide comprising an amino acid sequence comprising three components of a Defense System Ia or a Defense System Ib, said component selected from the group consisting of a ZorA polypeptide, a ZorB polypeptide, a ZorC polypeptide, a ZorD polypeptide, and a ZorE polypeptide. In some embodiments, is an isolated polypeptide comprising an amino acid sequence comprising four components of a Defense System Ia or a Defense System Ib, said component selected from the group consisting of a ZorA polypeptide, a ZorB polypeptide, a ZorC polypeptide, a ZorD polypeptide, and a ZorE polypeptide. In some embodiments, is an isolated polypeptide comprising an amino acid sequence comprising greater than four components of a Defense System Ia or a Defense System Ib, said component selected from the group consisting of a ZorA polypeptide, a ZorB polypeptide, a ZorC polypeptide, a ZorD polypeptide, and a ZorE polypeptide.

[1558] In some embodiments, disclosed herein is an isolated polypeptide comprising an amino acid sequence comprising one component of a Defense System II, said component selected from the group consisting of a ThsA polypeptide and a ThsB polypeptide. In some embodiments, is an isolated polypeptide comprising an amino acid sequence comprising two components of a Defense System II, said component selected from the group consisting of a ThsA polypeptide and a ThsB polypeptide. In some embodiments, is an isolated polypeptide comprising an amino acid sequence comprising more than two components of a Defense System II, said component selected from the group consisting of a ThsA polypeptide and a ThsB polypeptide.

[1559] In some embodiments, disclosed herein is an isolated polypeptide comprising an amino acid sequence comprising one component of a Defense System IIIa, said component selected from the group consisting of a DruA polypeptide, a DruB polypeptide, a DruC polypeptide, a DruD polypeptide, a DruE polypeptide. In some embodiments, is an isolated polypeptide comprising an amino acid sequence comprising two components of a Defense System IIIa, said component selected from the group consisting of a DruA polypeptide, a DruB polypeptide, a DruC polypeptide, a DruD polypeptide, a DruE polypeptide. In some embodiments, is an isolated polypeptide comprising an amino acid sequence comprising three components of a Defense System IIIa, said component selected from the group consisting of a DruA polypeptide, a DruB polypeptide, a DruC polypeptide, a DruD polypeptide, a DruE polypeptide. In some embodiments, is an isolated polypeptide comprising an amino acid sequence comprising four components of a Defense System IIIa, said component selected from the group consisting of a DruA polypeptide, a DruB polypeptide, a DruC polypeptide, a DruD polypeptide, a DruE polypeptide. In some embodiments, is an isolated polypeptide comprising an amino acid sequence comprising five components of a Defense System IIIa, said component selected from the group consisting of a DruA polypeptide, a DruB polypeptide, a DruC polypeptide, a DruD polypeptide, a DruE polypeptide. In some embodiments, is an isolated polypeptide comprising an amino acid sequence comprising more than five components of a Defense System IIIa, said component selected from the group consisting of a DruA polypeptide, a DruB polypeptide, a DruC polypeptide, a DruD polypeptide.

[1560] In some embodiments, disclosed herein is an isolated polypeptide comprising an amino acid sequence comprising one component of a Defense System IIIb, said component selected from the group consisting of a DruM polypeptide, a DruF polypeptide, a DruG polypeptide, a DruE polypeptide. In some embodiments, is an isolated polypeptide comprising an amino acid sequence comprising two components of a Defense System IIIb, said component selected from the group consisting of a DruM polypeptide, a DruF polypeptide, a DruG polypeptide, a DruE polypeptide. In some embodiments, is an isolated polypeptide comprising an amino acid sequence comprising three components of a Defense System IIIb, said component selected from the group consisting of a DruM polypeptide, a DruF polypeptide, a DruG polypeptide, a DruE polypeptide. In some embodiments, is an isolated polypeptide comprising an amino acid sequence comprising four components of a Defense System IIIb, said component selected from the group consisting of a DruM polypeptide, a DruF polypeptide, a DruG polypeptide, a DruE polypeptide. In some embodiments, is an isolated polypeptide comprising an amino acid sequence comprising five components of a Defense System IIIb, said component selected from the group consisting of a DruM polypeptide, a DruF polypeptide, a DruG polypeptide, a DruE polypeptide. In some embodiments, is an isolated polypeptide comprising an amino acid sequence comprising more than five components of a Defense System IIIb, said component selected from the group consisting of a DruM polypeptide, a DruF polypeptide, a DruG polypeptide, a DruE polypeptide.

[1561] In some embodiments, disclosed herein is an isolated polypeptide comprising an amino acid sequence comprising one component of a Defense System IIIc, said component selected from the group consisting of a DruH polypeptide a DruE polypeptide. In some embodiments, is an isolated polypeptide comprising an amino acid sequence comprising two components of a Defense System IIIc, said component selected from the group consisting of a DruH polypeptide a DruE polypeptide. In some embodiments, is an isolated polypeptide comprising an amino acid sequence comprising three components of a Defense System IIIc, said component selected from the group consisting of a DruH polypeptide a DruE polypeptide. In some embodiments, is an isolated polypeptide comprising an amino acid sequence comprising four components of a Defense System IIIc, said component selected from the group consisting of a DruH polypeptide a DruE polypeptide. In some embodiments, is an isolated polypeptide comprising an amino acid sequence comprising five components of a Defense System IIIc, said component selected from the group consisting of a DruH polypeptide a DruE polypeptide. In some embodiments, is an isolated polypeptide comprising an amino acid sequence comprising more than five components of a Defense System IIIc, said component selected from the group consisting of a DruH polypeptide a DruE polypeptide.

[1562] In some embodiments, disclosed herein is an isolated polypeptide comprising an amino acid sequence comprising one component of a Defense System IV, said component selected from the group consisting of a HamA polypeptide and a HamB polypeptide. In some embodiments, is an isolated polypeptide comprising an amino acid sequence comprising two components of a Defense System IV, said component selected from the group consisting of a HamA polypeptide and a HamB polypeptide. In some embodiments, is an isolated polypeptide comprising an amino acid sequence comprising more than two components of a Defense System IV, said component selected from the group consisting of a HamA polypeptide and a HamB polypeptide.

[1563] In some embodiments, disclosed herein is an isolated polypeptide comprising an amino acid sequence comprising one component of a Defense System V, said component selected from the group consisting of a SduA polypeptide. In some embodiments, is an isolated polypeptide comprising an amino acid sequence comprising more than one component of a Defense System V, said component selected from the group consisting of a SduA polypeptide.

[1564] In some embodiments, disclosed herein is an isolated polypeptide comprising an amino acid sequence comprising one component of a Defense System VI, said component selected from the group consisting of a GajA polypeptide and a GajB polypeptide. In some embodiments, is an isolated polypeptide comprising an amino acid sequence comprising two components of a Defense System VI, said component selected from the group consisting of a GajA polypeptide and a GajB polypeptide. In some embodiments, is an isolated polypeptide comprising an amino acid sequence comprising more than two components of a Defense System VI, said component selected from the group consisting of a GajA polypeptide and a GajB polypeptide.

[1565] In some embodiments, disclosed herein is an isolated polypeptide comprising an amino acid sequence comprising one component of a Defense System VII, said component selected from the group consisting of a PtuA polypeptide and a PtuB polypeptide. In some embodiments, is an isolated polypeptide comprising an amino acid sequence comprising two components of a Defense System VII, said component selected from the group consisting of a PtuA polypeptide and a PtuB polypeptide. In some embodiments, is an isolated polypeptide comprising an amino acid sequence comprising more than two components of a Defense System VII, said component selected from the group consisting of a PtuA polypeptide and a PtuB polypeptide.

[1566] In some embodiments, disclosed herein is an isolated polypeptide comprising an amino acid sequence comprising one component of a Defense System VIII, said component selected from the group consisting of a LmuA polypeptide and a LmuB polypeptide. In some embodiments, is an isolated polypeptide comprising an amino acid sequence comprising two components of a Defense System VIII, said component selected from the group consisting of a LmuA polypeptide and a LmuB polypeptide. In some embodiments, is an isolated polypeptide comprising an amino acid sequence comprising more than two components of a Defense System VIII, said component selected from the group consisting of a LmuA polypeptide and a LmuB polypeptide.

[1567] In some embodiments, disclosed herein is an isolated polypeptide comprising an amino acid sequence comprising one component of a Defense System IX, said component selected from the group consisting of a KwaA polypeptide and a KwaB polypeptide. In some embodiments, is an isolated polypeptide comprising an amino acid sequence comprising two components of a Defense System IX, said component selected from the group consisting of a KwaA polypeptide and a KwaB polypeptide. In some embodiments, is an isolated polypeptide comprising an amino acid sequence comprising more than two components of a Defense System IX, said component selected from the group consisting of a KwaA polypeptide and a KwaB polypeptide.

[1568] In some embodiments, disclosed herein is an isolated polypeptide comprising an amino acid sequence comprising one component of a Defense System Xa or a Defense System Xb or a Defense System Xc, said component selected from the group consisting of a JetA polypeptide, a JetB polypeptide, a JetC polypeptide, and a JetD polypeptide, and variants thereof. In some embodiments, is an isolated polypeptide comprising an amino acid sequence comprising two components of a Defense System Xa or a Defense System Xb or a Defense System Xc, said component selected from the group consisting of a JetA polypeptide, a JetB polypeptide, a JetC polypeptide, and a JetD polypeptide, and variants thereof. In some embodiments, is an isolated polypeptide comprising an amino acid sequence comprising three components of a Defense System Xa or a Defense System Xb or a Defense System Xc, said component selected from the group consisting of a JetA polypeptide, a JetB polypeptide, a JetC polypeptide, and a JetD polypeptide, and variants thereof. In some embodiments, is an isolated polypeptide comprising an amino acid sequence comprising four components of a Defense System Xa or a Defense System Xb or a Defense System Xc, said component selected from the group consisting of a JetA polypeptide, a JetB polypeptide, a JetC polypeptide, and a JetD polypeptide, and variants thereof. In some embodiments, is an isolated polypeptide comprising an amino acid sequence comprising more than four components of a Defense System Xa or a Defense System Xb or a Defense System Xc, said component selected from the group consisting of a JetA polypeptide, a JetB polypeptide, a JetC polypeptide, and a JetD polypeptide, and variants thereof.

[1569] In some embodiments, the isolated polypeptide comprising an amino acid sequence of a Defense System has an anti-phage activity. In some embodiments, the isolated polypeptide comprising an amino acid sequence of a Defense System has an anti-plasmid activity. In some embodiments, the isolated polypeptide comprising an amino acid sequence of a Defense System has an anti-phage activity and an anti-plasmid activity. In some embodiments, the anti-phage activity is against at least one phage. In some embodiments, the anti-phage activity is against more than one phage.

[1570] In some embodiments, any one of said constructs disclosed herein, comprises multiple nucleic acid sequences, each sequence encoding at least one of said polypeptides. In some embodiments, any one of said constructs disclosed herein, comprises multiple nucleic acid sequences, each sequence encoding at least a functional portion of one of said polypeptides. In some embodiments, any one of said constructs disclosed herein, comprises multiple nucleic acid sequences, each sequence encoding at least one component of a Defense System. In some embodiments, any one of said constructs disclosed herein, comprises multiple nucleic acid sequences, each sequence encoding at least one functional component of a Defense System. In some embodiments, any one of said constructs disclosed herein, comprises multiple nucleic acid sequences, each sequence encoding at least one functional portion of a component of a Defense System.

[1571] As used herein, the terms designating a polypeptide, for example the terms “ZorA”, “ZorB”, “ZorC”, “ZorD”, “ZorE”, “ThsA”, “ThsB”, “DruA”, “DruB”, “DruC”, “DruD”, “DruE”, DruM”, “DruF”, “DruG”, “DruH”, “HamA”, “HamB”, “SduA”, “GajA”, “GajB”, “PtuA”, “PtuB”, “LmuA”, “LmuB”, “KwaA”, “KwaB”, “JetA”, “JetB”, “JetC”, “JetD”, “JetAⁱⁱ”, “JetBⁱⁱ”, “JetCⁱⁱ”, “JetDⁱⁱ”, “JetAiⁱⁱ”, “JetBⁱⁱⁱ”, “JetCⁱⁱⁱ”, and “JetDⁱⁱⁱ”, in some embodiments comprise full length polypeptides, respectively. In some embodiments, the terms designating a polypeptide, for example the terms “ZorA”, “ZorB”, “ZorC”, “ZorD”, “ZorE”, “ThsA”, “ThsB”, “DruA”, “DruB”, “DruC”, “DruD”, “DruE”, DruM”, “DruF”, “DruG”, “DruH”, “HamA”, “HamB”, “SduA”, “GajA”, “GajB”, “PtuA”, “PtuB”, “LmuA”, “LmuB”, “KwaA”, “KwaB”, “JetA”, “JetB”, “JetC”, “JetD”, “JetAⁱⁱ”, “JetBⁱⁱ” “JetCⁱⁱ” “JetDⁱⁱ”, “JetAiⁱⁱ”, “JetBⁱⁱⁱ”, “JetCⁱⁱⁱ”, and “JetDⁱⁱⁱ”, comprise a fragment of the full length polypeptide, wherein the fragment maintains the activity as disclosed herein.

[1572] Similarly, the terms designating a gene, for example the terms “zorA”, “zorB”, “zorC”, “zorD”, “zorE”, “thsA”, “thsB”, “druA”, “druB”, “druC”, “druD”, “druE”, “druM”, “druF”, “druG”, “druH”, “hamA”, “hamB”, “sduA”, “gajA”, “gajB”, “ptuA”, “ptuB”, “lmuA”, “lmuB”, “kwaA”, “kwaB”, “jetA”, “jetB”, “jetC”, “jetD”, “jetAⁱⁱ”, “jetBⁱⁱ”, “jetCⁱⁱ”, “jetDⁱ”, “jetAⁱⁱⁱ”, “jetBⁱⁱⁱ”, “jetCⁱⁱⁱ”, and “jetDⁱⁱⁱ”, in some embodiments comprise a full length gene, respectively. In some embodiments, the terms designating a gene, for example the terms “zorA”, “zorB”, “zorC”, “zorD”, “zorE”, “thsA”, “thsB”, “druA”, “druB”, “druC”, “druD”, “druE”, “druM”, “druF”, “druG”, “druH”, “hamA”, “hamB”, “sduA”, “gajA”, “gajB”, “ptuA”, “ptuB”, “lmuA”, “lmuB”, “kwaA”, “kwaB”, “jetA”, “jetB”, “jetC”, “jetD”, “jetAⁱⁱ”, “jetBⁱⁱ”, “jetCⁱⁱ”, “jetDⁱⁱ”, “jetAⁱⁱⁱ”, “jetBⁱⁱⁱ”, “jetCⁱⁱⁱ”, and “jetDⁱⁱⁱ”, comprise a fragment of the full length gene, wherein the fragment encodes a polypeptide, respectively, comprising the activity as disclosed herein.

[1573] In some embodiments, a construct comprising the nucleic acid sequence encoding the ZorA polypeptide, the ZorB polypeptide, the ZorC polypeptide, and the ZorD polypeptide, comprises a nucleic acid sequence having at least 80% homology with the sequence referenced in Table 8 rows 2-1174 columns G, AD, and AE or the sequence set forth in SEQ ID NO: 14, or comprises nucleic acid sequences having at least 80% homology to at least one of each of the sequences referenced in Table 8 rows 2-1830 columns J and L (encoding ZorA polypeptide), in Table 8 rows 2-1830 columns N and P (encoding ZorB polypeptide), in Table 8 rows 2-1174 columns R and T (encoding ZorC polypeptide), and in Table 8 rows 2-1174 columns V and X (encoding ZorD polypeptide).

[1574] In some embodiments, a construct comprising the nucleic acid sequence encoding the ZorA polypeptide, the ZorB polypeptide, and the ZorE polypeptide comprises a nucleic acid sequence having at least 80% homology to the sequence referenced in Table 8 rows 1175-1830 columns G, AD and AE, or the sequence set forth in SEQ ID NO: 15, or comprises nucleic acid sequences having at least 80% homology to the sequences referenced in Table 8 rows 2-1830 columns J and L (encoding ZorA polypeptide), in Table 8 rows 2-1830 columns N and P (encoding ZorB polypeptide), and in Table 8 rows 1175-1830 columns Z and AB (encoding ZorE polypeptide).

[1575] In some embodiments, a construct comprising the nucleic acid sequence encoding the ThsA polypeptide and the ThsB polypeptide comprises a nucleic acid sequence having at least 80% homology with the sequence referenced in Table 9 rows 2-2100 columns G, AG and AH, or the sequence set forth in SEQ ID NO: 10 or SEQ ID NO: 11, or comprises nucleic acid sequences having at least 80% homology to at least one of each of the sequences referenced in Table 9 rows 2-2100 columns I and K (encoding ThsA polypeptide) and the sequences referenced in Table 9 rows 2-2100 columns M and O, Q and S, U and W, Y and AA, and AC and AE (encoding ThsB polypeptide).

[1576] In some embodiments, a construct comprising the nucleic acid sequence encoding the DruA polypeptide, the DruB polypeptide, the DruC polypeptide, the DruD polypeptide, and the DruE polypeptide comprises a nucleic acid sequence having at least 80% homology with the sequences referenced in Table 10 rows 2-123 columns G, AT, and AU or the sequence set forth in SEQ ID NO: 16, or comprises nucleic acid sequences having at least 80% homology to at least one of each of the sequences referenced in Table 10 rows 2-123 columns J and L (encoding DruA polypeptide), referenced in Table 10 rows 2-123 columns N and P (encoding DruB polypeptide), referenced in Table 10 rows 2-123 columns R and T (encoding DruC polypeptide), referenced in Table 10 rows 2-123 columns V and X (encoding DruD polypeptide), and referenced in Table 10 rows 2-1343 columns Z and AB (encoding DruE polypeptide).

[1577] In some embodiments, a construct comprising the nucleic acid sequence encoding the DruM polypeptide, the DruF polypeptide, the DruG polypeptide, and the DruE polypeptide, comprises a nucleic acid sequence having at least 80% homology with the sequence referenced in Table 10 rows 124-295 columns G, AT, and AU, or comprises nucleic acid sequences having at least 80% homology to at least one of each of the sequences referenced in Table 10 rows 124-295 columns AD and AF (encoding DruM polypeptide), referenced in Table 10 rows 124-295 columns AH and AJ (encoding DruF polypeptide), referenced in Table 10 rows 124-295 columns AL and AN (encoding DruG polypeptide), and referenced in Table 10 rows 2-1343 columns Z and AB (encoding DruE polypeptide).

[1578] In some embodiments, a construct comprising the nucleic acid sequence encoding the DruH polypeptide and the DruE polypeptide, comprises a nucleic acid sequence having at least 80% homology with the sequence referenced in Table 10 rows 296-1343 columns G, AT, and AU, or comprises nucleic acid sequences having at least 80% homology to at least one of each of the sequences referenced in Table 10 rows 296-1343 columns AP and AR (encoding DruH polypeptide) and referenced in Table 10 rows 2-1343 columns Z and AB (encoding DruE polypeptide).

[1579] In some embodiments, a construct comprising the nucleic acid sequence encoding the HamA polypeptide and the HamB polypeptide comprises a nucleic acid sequence having at least 80% homology with the sequences referenced in Table 12 rows 2-1782 columns G, P, and Q or the sequence set forth in SEQ ID NO: 4, or comprises nucleic acid sequences having at least 80% homology to at least one of each of the sequences referenced in Table 12 rows 2-1782 column H and J (encoding HamA polypeptide) and referenced in Table 12 rows 2-1782 column L and N (encoding HamB polypeptide).

[1580] In some embodiments, a construct comprising the nucleic acid sequence encoding the SduA polypeptide comprises a nucleic acid sequence having at least 80% homology with the sequences referenced in Table 13 rows 2-1247 columns H and J or columns G, L, and M, or the sequences set forth in SEQ ID NO: 9.

[1581] In some embodiments, a construct comprising the nucleic acid sequence encoding the GajA polypeptide and the GajB polypeptide comprises a nucleic acid sequence having at least 80% homology with the sequences referenced in Table 14 rows 2-4599 columns G, P, and Q, or the sequence set forth in SEQ ID NO: 5 or SEQ ID NO: 6, or comprises nucleic acid sequences having at least 80% homology to at least one of each of sequences referenced in Table 14 rows 2-45-99 columns H and K (encoding GajA polypeptide) and referenced in Table 14 rows 2-45-99 columns L and N (encoding GajB polypeptide).

[1582] In some embodiments, a construct comprising the nucleic acid sequence encoding the PtuA polypeptide and the PtuB polypeptide comprises a nucleic acid sequence having at least 80% homology with the sequences referenced in Table 15 rows 2-2507 columns G, P and Q or the sequence set forth in SEQ ID NO: 12 or SEQ ID NO: 13, or comprises nucleic acid sequences having at least 80% homology to at least one of each of the sequences referenced in Table 15 rows 2-2507 columns H and J (encoding PtuA polypeptide) and referenced in Table 15 rows 2-2507 columns L and N (encoding PtuB polypeptide).

[1583] In some embodiments, a construct comprising the nucleic acid sequence encoding the LmuA polypeptide and the LmuB polypeptide comprises a nucleic acid sequence having at least 80% homology with the sequences referenced in Table 16 rows 2-698 columns G, P, and Q, or the sequence set forth in SEQ ID NO: 7 or SEQ ID NO: 8, or comprises nucleic acid sequences having at least 80% homology to at least one of each of the sequences referenced in Table 16 rows 2-698 column H (encoding LmuA polypeptide) and sequences referenced in Table 16 rows 2-698 column J (encoding LmuB polypeptide).

[1584] In some embodiments, a construct comprising the nucleic acid sequence encoding the KwaA polypeptide and the KwaB polypeptide comprises a nucleic acid sequence having at least 80% homology with the sequences referenced in Table 17 rows 2-935 columns G, P, and Q, or the sequence set forth in SEQ ID NO: 3, or comprises nucleic acid sequences having at least 80% homology to at least one of each of the sequences referenced in Table 17 rows 2-935 columns H and J (encoding KwaA polypeptide) and referenced in Table 17 rows 2-935 columns L and N (encoding KwaB polypeptide).

[1585] In some embodiments, a construct comprising the nucleic acid sequence encoding the JetA polypeptide, the JetB polypeptide, the JetC polypeptide, and the JetD comprises a nucleic acid sequence having at least 80% homology with the sequences referenced in Table 11 rows 2-2322 columns G, Z, and AA, or the sequence set forth in SEQ ID NO: 17, or comprises nucleic acid sequences having at least 80% homology to at least one of each of the sequences referenced in Table 11 rows 2-2322 columns J and L (encoding JetA polypeptide), referenced in Table 11 rows 2-2322 columns N and P (encoding JetB polypeptide), referenced in Table 11 rows 2-2322 columns R and T (encoding JetC polypeptide) and referenced in Table 11 rows 2-2322 columns V and X (encoding JetD polypeptide);

[1586] In some embodiments, a construct comprising the nucleic acid sequence encoding the JetAⁱⁱ polypeptide, the JetBⁱⁱ polypeptide, the JetCⁱⁱ polypeptide, and the JetDⁱⁱ comprises a nucleic acid sequence having at least 80% homology with the sequences referenced in Table 11 rows 2323-2844 columns G, Z, and AA, or the sequence set forth in SEQ ID NO: 18 or comprises nucleic acid sequences having at least 80% homology to at least one of each of the sequences referenced in Table 11 rows 2323-2844 columns J and L (encoding JetAⁱⁱ polypeptide), referenced in Table 11 rows 2323-2844 columns N and P (encoding JetBⁱⁱ polypeptide), referenced in Table 11 rows 2323-2844 columns R and T (encoding JetCⁱⁱ polypeptide) and referenced in Table 11 rows 2323-2844 columns V and X (encoding JetDⁱⁱ polypeptide);

[1587] In some embodiments, a construct comprising the nucleic acid sequence encoding the JetAⁱⁱⁱ polypeptide, the JetBⁱⁱⁱ polypeptide, the JetCⁱⁱⁱ polypeptide, and the JetDⁱⁱⁱ comprises a nucleic acid sequence having at least 80% homology with the sequences set forth in Table 11 rows 2845-3174 columns G, Z, and AA, or the sequence set forth in SEQ ID NO: 19 or comprises nucleic acid sequences having at least 80% homology to at least one of each of the sequences referenced in Table 11 rows 2845-3174 columns J and L (encoding JetAⁱⁱⁱ polypeptide), referenced in Table 11 rows 2845-3174 columns N and P (encoding JetBⁱⁱⁱ polypeptide), referenced in Table 11 rows 2845-3174 columns R and T (encoding JetC ill polypeptide) and referenced in Table 11 rows 2845-3174 columns V and X (encoding JetDⁱⁱⁱ polypeptide).

[1588] In some embodiments, a construct comprising a nucleic acid sequence comprises multiple copies of a nucleic acid sequence encoding a component of the Defense System. In some embodiments, a construct comprising a nucleic acid sequence comprises multiple copies of a nucleic acid sequence encoding two components of the Defense System. In some embodiments, a construct comprising a nucleic acid sequence comprises multiple copies of a nucleic acid sequence encoding three components of the Defense System. In some embodiments, a construct comprising a nucleic acid sequence comprises multiple copies of a nucleic acid sequence encoding four components of the Defense System. In some embodiments, a construct comprising a nucleic acid sequence comprises multiple copies of a nucleic acid sequence encoding five components of the Defense System. In some embodiments, a construct comprising a nucleic acid sequence comprises multiple copies of a nucleic acid sequence encoding more than components of the Defense System. In some embodiments, multiple copies comprise more than one copy. In some embodiments, multiple copies comprise 2 copies. In some embodiments, multiple copies comprise 2-10 copies. In some embodiments, multiple copies comprise 3 copies, 4 copies, 5 copies, 6 copies, 7 copies, 8 copies, 9 copies, or 10 copies.

[1589] In some embodiments, a Defense System disclosed herein provides a host cell with resistance to a foreign nucleic acid invasion. In some embodiments, a Defense System disclosed herein provides a bacterial cell with resistance to a foreign nucleic acid invasion. In some embodiments, a Defense System disclosed herein provides a bacterial cell with protection to foreign nucleic acid invasion.

[1590] In some embodiments, a method disclosed herein protects a host cell from foreign nucleic acid invasion, said method comprising a step of introducing into the host cell at least one defense system described herein. In some embodiments, a method disclosed herein protects a host cell from foreign nucleic acid invasion, said method comprising a step of introducing into the host cell at least one function defense system described herein. In some embodiments, a method disclosed herein protects a bacterial cell from foreign nucleic acid invasion, said method comprising a step of introducing into the bacterial cell at least one defense system described herein. In some embodiments, a method disclosed herein protects a bacterial cell from foreign nucleic acid invasion, said method comprising a step of introducing into the bacterial cell at least one function defense system described herein.

[1591] In some embodiments, protecting a host cell from foreign nucleic acid invasion comprises protecting from phage infection, protecting from plasmid transformation, or protection from conjugative element entry, or any combination thereof. In some embodiments, protecting a bacterial cell from foreign nucleic acid invasion comprises protecting from phage infection, protecting from plasmid transformation, or protection from conjugative element entry, or any combination thereof. In some embodiments, protection from phage infection comprises protection from at least one phage infection.

[1592] In some embodiments, a nucleic acid construct comprising any one of the defense systems described herein or any combination thereof, provides a host cell with resistance to foreign nucleic acid invasion. In some embodiments, a nucleic acid construct comprising any one of the defense systems described herein or any combination thereof, provides protection from foreign nucleic acid invasion to a host cells.

[1593] In some embodiments, a nucleic acid construct comprising any one of the defense systems described herein or any combination thereof, provides a bacterial cell with resistance to foreign nucleic acid invasion. In some embodiments, a nucleic acid construct comprising any one of the defense systems described herein or any combination thereof, provides protection from foreign nucleic acid invasion to a bacterial cells.

[1594] In some embodiments, a Defense System disclosed herein provides a host cell with resistance to at least one phage. In some embodiments, a Defense System disclosed herein provides a host cell with resistance to a plasmid. In some embodiments, a Defense System disclosed herein provides a host cell with resistance to a combination of at least one phage and a plasmid.

[1595] In some embodiments, a Defense System selected from a Defense System Ia, Ib, II, IIIa, IIIb, IIIc, IV, V, VI, VII, VIII, IX, Xa, Xb, and Xc, provides a host cell with resistance to at least one phage. In some embodiments, a Defense selected from a Defense System Ia, Ib, II, IIIa, IIIb, IIIc, IV, V, VI, VII, VIII, IX, Xa, Xb, and Xc, provides a host cell with resistance to a plasmid. In some embodiments, a Defense System selected from a Defense System Ia, Ib, II, IIIa, IIIb, IIIc, IV, V, VI, VII, VIII, IX, Xa, Xb, and Xc, provides a host cell with resistance to a combination of at least one phage and a plasmid.

[1596] In some embodiments, a defense system comprising a combination of Defense Systems selected from Defense Systems Ia, Ib, II, IIIa, IIIb, IIIc, IV, V, VI, VII, VIII, IX, Xa, Xb, and Xc, provides a host cell with resistance to at least one phage. In some embodiments, a defense system comprising a combination of Defense Systems selected from Defense Systems Ia, Ib, II, IIIa, IIIb, IIIc, IV, V, VI, VII, VIII, IX, Xa, Xb, and Xc, provides a host cell with resistance to a plasmid. In some embodiments, a defense system comprising a combination of Defense Systems selected from Defense Systems Ia, Ib, II, IIIa, IIIb, IIIc, IV, V, VI, VII, VIII, IX, Xa, Xb, and Xc, provides a host cell with resistance to a combination of at least one phage and a plasmid.

[1597] In some embodiments, resistance is to at least one phage. In some embodiments, resistance to at least one phage comprises resistance to more than one phage. In some embodiments, resistance is to phage comprises resistance to phages from different families (See for example FIGS. 3B and 3C, and FIG. 5D).

[1598] A skilled artisan would appreciate that the term “phage” or “bacteriophage” refers to a virus that selectively infects one or more bacterial species. Many phages are specific to a particular genus or species or strain of bacteria. In some embodiments, a phage or a bacteriophage selectively infects one or more archaeal species. Many phages are specific to a particular genus or species or strain of archaea.

[1599] In some embodiments, the phage genome can be ssDNA, dsDNA, ssRNA, or dsRNA. In some embodiments, the phage genome is linear. In some embodiments, the phage genome is circular. In some embodiments, the phage is virulent to bacteria. In some embodiments, the phage is virulent to archaea. In some embodiments, the phage is virulent to bacteria and archaea.

[1600] In some embodiments, the phage is a lytic phage. In some embodiments, the phage is temperate (also referred to as lysogenic). In some embodiments, the phage is a lytic phage selected from the group consisting of Nf, SP82G and SPO1. In some embodiments, the phage is Nf. In some embodiments, the phage is SPO1. In some embodiments, the phage is a temperate phage selected from the group consisting of phi3T and phi105. In some embodiments, the phage is phi3T.

[1601] In some embodiments, phage as disclosed herein include, but are not limited to, phages that belong to any of the following virus families: Caudavirales, Corticoviridae, Cystoviridae, Inoviridae, Leviviridae, Microviridae, Myoviridae, Podoviridae, Siphoviridae, or Tectiviridae. In some embodiments, the phage is a podovirus, a myovirus or a siphovirus phage. In some embodiments, the phage is a T7 or a lambda-vir phage. In some embodiments, a phage comprises phage that infect bacteria that are pathogenic to plants and/or animals (including humans).

[1602] In some embodiments, the resistance of a host cell comprising a defense system against a phage is improved as compared to a host cell of the same species, which does not include a defense system disclosed herein.

[1603] Assays for testing phage resistance are well known in the art. Thus, for example, the lysogenic activity of a phage can be assessed by PCR or DNA sequencing. The DNA replication activity of a phage can be assessed e.g. by DNA sequencing or Southern blot analysis.

[1604] The lytic activity of a phage can be assessed e.g. by optical density, plaque assay or living dye indicators. The lytic activity of a phage can be measured indirectly by following the decrease in optical density of the bacterial cultures owing to lysis. This method involves introduction of phage into a fluid bacterial culture medium. After a period of incubation, the phage lyses the bacteria in the broth culture resulting in a clearing of the fluid medium resulting in decrease in optical density.

[1605] Another method, known as the plaque assay, introduces phage into a few milliliters of soft agar along with some bacterial host cells. This soft agar mixture is laid over a hard agar base (seeded-agar overlay). The phage adsorbs onto the host bacterial cells, infect and lyse the cells, and then begin the process anew with other bacterial cells in the vicinity. After 6-24 hours, zones of clearing on the plate, known as plaques, are observable within the lawn of bacterial growth on the plate. Each plaque represents a single infective phage particle in the original sample.

[1606] Yet another method is the one-step phage growth curve which allows determining the production of progeny virions by cells as a function of time after infection. The assay is based on the fact that cells in the culture are infected simultaneously with a low number of phages so that no cell can be infected with more than one phage. At various time intervals, samples are removed for a plaque assay allowing quantitative determination of the number of phages present in the medium.

[1607] Other methods use for example redox chemistry, employing cell respiration as a universal reporter. During active growth of bacteria, cellular respiration reduces a dye (e.g., tetrazolium dye) and produces a color change that can be measured in an automated fashion. On the other hand, successful phage infection and subsequent growth of the phage in its host bacterium results in reduced bacterial growth and respiration and a concomitant reduction in color.

[1608] Thus, nucleic acid sequences encoding a Defense System component(s) or functional fragments thereof, and the polypeptides and nucleic acid constructs disclosed herein can be used in conferring phage resistance thereby protecting bacteria from phage infection.

[1609] In some embodiments, “conferring phage resistance” refers to the level of phage infection and/or multiplication in the e.g. bacteria containing a functional Defense System as disclosed herein, that does not cause a deleterious effect to the bacteria e.g., growth arrest or death.

[1610] In some embodiments, the phage has about 10-10,000 times lower efficiency of plaquing on bacteria containing a functional Defense System. In some embodiments, the phage has about 100-100,000 times lower efficiency of plaquing on bacteria containing a functional Defense System ([EOP]=10⁻²), about 1000 times lower EOP (EOP=10⁻³), 10,000 times lower EOP (EOP=10⁻⁴), or 100,000 times lower EOP (EOP=10⁻⁵). In some embodiments, the level of phage multiplication in a culture is measured after about 6-14 hours incubation of the culture, e.g., after about 12 hours, after about 9 hours, after about 8 hours after about 7 hours, or after about 6 hours.

[1611] In some embodiments, the phage has about 100-100,000 times lower efficiency of plaquing on bacteria containing a functional Defense System Ia ([EOP]=10⁻²), about 1000 times lower EOP (EOP=10⁻³), 10,000 times lower EOP (EOP=10⁻⁴), or 100,000 times lower EOP (EOP=10⁻⁵). In some embodiments, the level of phage multiplication in a culture is measured after about 6-14 hours incubation of the culture, e.g., after about 12 hours, after about 9 hours, after about 8 hours after about 7 hours, or after about 6 hours.

[1612] In some embodiments, the phage has about 100-100,000 times lower efficiency of plaquing on bacteria containing a functional Defense System Ia ([EOP]=10⁻²), about 1000 times lower EOP (EOP=10⁻³), 10,000 times lower EOP (EOP=10⁻⁴), or 100,000 times lower EOP (EOP=10⁻⁵). In some embodiments, the level of phage multiplication in a culture is measured after about 6-14 hours incubation of the culture, e.g., after about 12 hours, after about 9 hours, after about 8 hours after about 7 hours, or after about 6 hours.

[1613] In some embodiments, the phage has about 100-100,000 times lower efficiency of plaquing on bacteria containing a functional Defense System Ia ([EOP]=10⁻²), about 1000 times lower EOP (EOP=10⁻³), 10,000 times lower EOP (EOP=10⁻⁴), or 100,000 times lower EOP (EOP=10⁻⁵). In some embodiments, the level of phage multiplication in a culture is measured after about 6-14 hours incubation of the culture, e.g., after about 12 hours, after about 9 hours, after about 8 hours after about 7 hours, or after about 6 hours.

[1614] In some embodiments, the phage has about 100-100,000 times lower efficiency of plaquing on bacteria containing a functional Defense System Ib ([EOP]=10⁻²), about 1000 times lower EOP (EOP=10⁻³), 10,000 times lower EOP (EOP=10⁻⁴), or 100,000 times lower EOP (EOP=10⁻⁵). In some embodiments, the level of phage multiplication in a culture is measured after about 6-14 hours incubation of the culture, e.g., after about 12 hours, after about 9 hours, after about 8 hours after about 7 hours, or after about 6 hours.

[1615] In some embodiments, the phage has about 100-100,000 times lower efficiency of plaquing on bacteria containing a functional Defense System II ([EOP]=10⁻²), about 1000 times lower EOP (EOP=10⁻³), 10,000 times lower EOP (EOP=10⁻⁴), or 100,000 times lower EOP (EOP=10⁻⁵). In some embodiments, the level of phage multiplication in a culture is measured after about 6-14 hours incubation of the culture, e.g., after about 12 hours, after about 9 hours, after about 8 hours after about 7 hours, or after about 6 hours.

[1616] In some embodiments, the phage has about 100-100,000 times lower efficiency of plaquing on bacteria containing a functional Defense System III (Type I, Type II, and Type III) ([EOP]=10⁻²), about 1000 times lower EOP (EOP=10⁻³), 10,000 times lower EOP (EOP=10⁻⁴), or 100,000 times lower EOP (EOP=10⁻⁵). In some embodiments, the level of phage multiplication in a culture is measured after about 6-14 hours incubation of the culture, e.g., after about 12 hours, after about 9 hours, after about 8 hours after about 7 hours, or after about 6 hours.

[1617] In some embodiments, the phage has about 100-100,000 times lower efficiency of plaquing on bacteria containing a functional Defense System IV ([EOP]=10⁻²), about 1000 times lower EOP (EOP=10⁻³), 10,000 times lower EOP (EOP=10⁻⁴), or 100,000 times lower EOP (EOP=10⁻⁵). In some embodiments, the level of phage multiplication in a culture is measured after about 6-14 hours incubation of the culture, e.g., after about 12 hours, after about 9 hours, after about 8 hours after about 7 hours, or after about 6 hours.

[1618] In some embodiments, the phage has about 100-100,000 times lower efficiency of plaquing on bacteria containing a functional Defense System V ([EOP]=10⁻²), about 1000 times lower EOP (EOP=10⁻³), 10,000 times lower EOP (EOP=10⁻⁴), or 100,000 times lower EOP (EOP=10⁻⁵). In some embodiments, the level of phage multiplication in a culture is measured after about 6-14 hours incubation of the culture, e.g., after about 12 hours, after about 9 hours, after about 8 hours after about 7 hours, or after about 6 hours.

[1619] In some embodiments, the phage has about 100-100,000 times lower efficiency of plaquing on bacteria containing a functional Defense System VI ([EOP]=10⁻²), about 1000 times lower EOP (EOP=10⁻³), 10,000 times lower EOP (EOP=10⁻⁴), or 100,000 times lower EOP (EOP=10⁻⁵). In some embodiments, the level of phage multiplication in a culture is measured after about 6-14 hours incubation of the culture, e.g., after about 12 hours, after about 9 hours, after about 8 hours after about 7 hours, or after about 6 hours.

[1620] In some embodiments, the phage has about 100-100,000 times lower efficiency of plaquing on bacteria containing a functional Defense System VII ([EOP]=10⁻²), about 1000 times lower EOP (EOP=10⁻³), 10,000 times lower EOP (EOP=10⁻⁴), or 100,000 times lower EOP (EOP=10⁻⁵). In some embodiments, the level of phage multiplication in a culture is measured after about 6-14 hours incubation of the culture, e.g., after about 12 hours, after about 9 hours, after about 8 hours after about 7 hours, or after about 6 hours.

[1621] In some embodiments, the phage has about 100-100,000 times lower efficiency of plaquing on bacteria containing a functional Defense System VIII ([EOP]=10⁻²), about 1000 times lower EOP (EOP=10⁻³), 10,000 times lower EOP (EOP=10⁻⁴), or 100,000 times lower EOP (EOP=10⁻⁵). In some embodiments, the level of phage multiplication in a culture is measured after about 6-14 hours incubation of the culture, e.g., after about 12 hours, after about 9 hours, after about 8 hours after about 7 hours, or after about 6 hours.

[1622] In some embodiments, the phage has about 100-100,000 times lower efficiency of plaquing on bacteria containing a functional Defense System IX ([EOP]=10⁻²), about 1000 times lower EOP (EOP=10⁻³), 10,000 times lower EOP (EOP=10⁻⁴), or 100,000 times lower EOP (EOP=10⁻⁵). In some embodiments, the level of phage multiplication in a culture is measured after about 6-14 hours incubation of the culture, e.g., after about 12 hours, after about 9 hours, after about 8 hours after about 7 hours, or after about 6 hours.

[1623] In some embodiments, the phage has about 100-100,000 times lower efficiency of plaquing on bacteria containing a functional Defense System Xa ([EOP]=10⁻²), about 1000 times lower EOP (EOP=10⁻³), 10,000 times lower EOP (EOP=10⁻⁴), or 100,000 times lower EOP (EOP=10⁻⁵). In some embodiments, the level of phage multiplication in a culture is measured after about 6-14 hours incubation of the culture, e.g., after about 12 hours, after about 9 hours, after about 8 hours after about 7 hours, or after about 6 hours.

[1624] In some embodiments, the phage has about 100-100,000 times lower efficiency of plaquing on bacteria containing a functional Defense System Xb ([EOP]=10⁻²), about 1000 times lower EOP (EOP=10⁻³), 10,000 times lower EOP (EOP=10⁻⁴), or 100,000 times lower EOP (EOP=10⁻⁵). In some embodiments, the level of phage multiplication in a culture is measured after about 6-14 hours incubation of the culture, e.g., after about 12 hours, after about 9 hours, after about 8 hours after about 7 hours, or after about 6 hours.

[1625] In some embodiments, the phage has about 100-100,000 times lower efficiency of plaquing on bacteria containing a functional Defense System Xc ([EOP]=10⁻²), about 1000 times lower EOP (EOP=10⁻³), 10,000 times lower EOP (EOP=10⁻⁴), or 100,000 times lower EOP (EOP=10⁻⁵). In some embodiments, the level of phage multiplication in a culture is measured after about 6-14 hours incubation of the culture, e.g., after about 12 hours, after about 9 hours, after about 8 hours after about 7 hours, or after about 6 hours.

[1626] In some embodiments, the phage has about 100-100,000 times lower efficiency of plaquing on bacteria containing a combination of functional Defense Systems ([EOP]=10⁻²), about 1000 times lower EOP (EOP=10⁻³), 10,000 times lower EOP (EOP=10⁻⁴), or 100,000 times lower EOP (EOP=10⁻⁵). In some embodiments, the level of phage multiplication in a culture is measured after about 6-14 hours incubation of the culture, e.g., after about 12 hours, after about 9 hours, after about 8 hours after about 7 hours, or after about 6 hours. In some embodiments, the combination of Defense Systems comprises any combination of Defense Systems Ia, Ib, II, IIIa, IIIb, IIIc, IV, V, VI, VII, VIII, IX, Xa, Xb, and Xc as described herein.

[1627] In some embodiments, a Defense System provides resistance is to a plasmid. In some embodiments, the resistance of a host cell comprising a defense system against a phage is improved as compared to a host cell of the same species, which does not include a defense system disclosed herein. In some embodiments, a plasmid comprises an episomal plasmid. In some embodiments, a plasmid comprises an integrative plasmid. In some embodiments, resistance to a plasmid comprises decrease transformation efficiency of the plasmid. In some embodiments, resistance to a plasmid comprises decrease transformation efficiency of the episomal plasmid.

[1628] In some embodiments, a nucleic acid sequences encoding a Defense System component(s) or functional fragments thereof, and the polypeptides and nucleic acid constructs disclosed herein can be used in protecting bacteria from conjugative elements. In some embodiments, disclosed herein is a method of protecting bacteria from conjugative elements, the method comprising the step of introducing into the bacteria a defense system selected from Defense Systems Ia-Xc, or a combination thereof. In some embodiments, disclosed herein is a method of protecting bacteria from conjugative elements, the method comprising the step of introducing into the bacteria a functional defense system selected from Defense Systems Ia-Xc, or a combination thereof. In some embodiments, disclosed herein is a method of protecting bacteria from conjugative elements, the method comprising the step of introducing into the bacteria at least one component of a defense systems selected from Defense Systems Ia-Xc, or a combination thereof.

[1629] A skilled artisan would appreciate that a method protecting bacteria from conjugative elements, would in some embodiments, encompass a reduction in the horizontal gene transfer between bacteria. The steps of conjugation known in the art comprise an initial step of cell-to-cell contact during mating pair formation, followed by a transfer of gene(s)/genetic elements in three steps. The DNA is nicked at the origin of transfer, wherein the nicking enzyme binds covalently to one of the DNA strands. The nucleoprotein filament is then coupled to the type 4 secretion system (T4SS) and transferred to the recipient cell. Finally, the element is replicated in the original and novel hosts leading to double stranded DNA molecules in each cell. (Cury et al. (2017) Nucleic Acids Res. September 6; 45(15): 8943-8956).

[1630] In some embodiments, a method of protecting bacteria from conjugative elements inhibits or reduces cell-to-cell contact or mating pair formation. In some embodiments, a method of protecting bacteria from conjugative elements inhibits or reduces nicking of the DNA strand. In some embodiments, a method of protecting bacteria from conjugative elements inhibits or reduces transfer of the DNA into the recipient cell. In some embodiments, a method of protecting bacteria from conjugative elements inhibits or reduces replication of the element in the novel host comprising a defense system described herein, a combination thereof, of at least one element thereof. In some embodiments, the conjugative element comprises a plasmid. In some embodiments, the conjugative element comprises a transposon.

[1631] In some embodiments, there is provided an article of manufacture or a kit identified for providing bacterial resistance, or plasmid transformation, or bacterial resistance and plasmid transformation to a microbial cell, for example but not limited to bacteria, comprising a defense system disclosed herein. In some embodiments, the article of manufacture or kit is for use producing bacteria resistant to at least one phage, wherein the bacteria do not naturally comprise the defense system. In some embodiments, the article of manufacture or kit is for use producing bacteria resistant to plasmid transformation, wherein the bacteria do not naturally comprise the defense system. In some embodiments, the article of manufacture or kit is for use producing bacteria resistant to at least one phage and resistant to plasmid transformation, wherein the bacteria do not naturally comprise the defense system.

[1632] In some embodiments, the defense system comprises at least 2 Defense Systems, wherein the bacteria do not naturally comprise the at least 2 Defense Systems. In some embodiments, the defense system comprises any of Defense Systems Ia-Xc or a combination thereof, wherein the bacteria do not naturally comprise the Defense System or combination of systems. In some embodiments, the defense system comprises a combination of Defense systems selected from Defense Systems Ia-Xc, wherein the bacteria do not naturally comprise the combination of Defense Systems present in the article of manufacture or the kit.

[1633] In some embodiments, a Defense System described herein is packaged in a container. In some embodiments, different Defense Systems are packaged in separate containers. In some embodiments, different Defense Systems are packaged in the same containers. In some embodiments, 2, 3, 4, 5, 6, 7, 8, 9, 10, 11, 12, 13, 14, or 15 different Defense Systems are packaged in the same containers. In some embodiments, the different Defense Systems are in a co-formulation. In some embodiments, different Defense Systems are packaged in transportable containers.

[1634] In some embodiments, a container comprising a Defense Systems described herein comprises lyophilized components of said Defense System. In some embodiments, a container comprising at least two Defense Systems described herein comprises lyophilized components of said Defense Systems. In some embodiments, a container comprising at least 2, 3, 4, 5, 6, 7, 8, 9, 10, 11, 12, 13, 14, or 15 Defense Systems described herein comprises lyophilized components of said Defense Systems. In some embodiments, Defense Systems components are co-formulated and lyophilized and stored in a container.

[1635] In some embodiments, a container comprising a Defense Systems described herein comprises spray-dried components of said Defense System. In some embodiments, a container comprising at least two Defense Systems described herein comprises spray-dried components of said Defense Systems. In some embodiments, a container comprising at least 2, 3, 4, 5, 6, 7, 8, 9, 10, 11, 12, 13, 14, or 15 Defense Systems described herein comprises spray-dried components of said Defense Systems. In some embodiments, Defense Systems components are co-formulated and spray-dried and stored in a container.

[1636] In some embodiments, a container comprising a Defense Systems described herein comprises components of said Defense System in a liquid formulation. In some embodiments, a container comprising at least two Defense Systems described herein comprises components of said Defense Systems in a liquid formulation. In some embodiments, a container comprising at least 2, 3, 4, 5, 6, 7, 8, 9, 10, 11, 12, 13, 14, or 15 Defense Systems described herein comprises components of said Defense Systems in a liquid formulation. In some embodiments, Defense Systems components are co-formulated and stored in a container in a liquid formulation.

[1637] In some embodiments, a Defense system stored in a container comprises a full complement of components. In some embodiments, a Defense system stored in a container comprises less than a full complement of components. In some embodiments, a Defense system stored in a container comprises at least one component of the Defense system. In some embodiments, a Defense system stored in a container comprises at least 1, 2, 3, 4, or 5 component of the Defense system. In some embodiments, a Defense system stored in a container comprises between about 1-10 component of the Defense system. In some embodiments, a Defense system stored in a container comprises more than components of the Defense system. In some embodiments, a Defense system stored in a container comprises different numbers of components of different Defense systems. For example but not limited to, in some embodiments a container comprises a full complement of components of one Defense System and less than a full complement of components of another Defense system.

### Methods of Use of a Defense System or Combinations Thereof

[1638] Defense systems have been described in detail above, as has the combination of Defense Systems each comprising a nucleic acid construct. In some embodiments, methods of use a defense system disclosed herein comprises use of a single Defense System comprising a nucleic acid construct, selected from Defense Systems Ia, Ib, II, IIIa, IIIa, IIIa, IV, V, VI, VII, VIII, IX, Xa, Xb, and Xc. In some embodiments, methods of use of a defense system comprises use of a combination of Defense Systems comprising nucleic acid constructs selected from Defense systems Ia, Ib, II, IIIa, IIIa, IIIa, IV, V, VI, VII, VIII, IX, Xa, Xb, and Xc, as disclosed herein.

[1639] Methods of use of a defense system described herein include but are not limited to, methods of protecting bacteria from phage infection, methods of protecting bacteria from plasmid transformation, methods of protecting bacteria from conjugative elements, methods of protecting bacteria from any combination of phage infection, conjugative elements, and plasmid transformation, methods of producing bacteria resistant to phage infection; methods of producing bacteria resistant to plasmids; methods of producing bacteria protected from conjugative elements, methods of producing bacteria resistant to phage infection, conjugative elements, or plasmids, or any combination thereof; and methods of making a food, a food additive, a feed, a nutritional supplement, a probiotic supplement, a personal care product, a health care product, and/or a veterinary product.

[1640] In some embodiments, a method of use described herein comprises a method of protecting a host cell from foreign nucleic acid invasion. A method of use described herein comprises a method of protecting a bacterial cell from foreign nucleic acid invasion.

[1641] In some embodiments, a method of protecting a host cell from foreign nucleic acid invasion comprises introducing into the host cells at least one defense system described herein. In some embodiments, a method of protecting a host cell from foreign nucleic acid invasion comprises introducing into the host cells a combination of defense systems described herein. In some embodiments, a method of protecting a host cell from foreign nucleic acid invasion comprises introducing into the host cells at least 1, 2, 3, 4, 5, 6, 7, 8, 9, 10, 11, 12, 13, 14, or 15 defense system described herein.

[1642] In some embodiments, a method of protecting a host cell from foreign nucleic acid invasion comprises introducing into the host cells at least one functional defense system described herein. In some embodiments, a method of protecting a host cell from foreign nucleic acid invasion comprises introducing into the host cells a combination of functional defense systems described herein. In some embodiments, a method of protecting a host cell from foreign nucleic acid invasion comprises introducing into the host cells at least 1, 2, 3, 4, 5, 6, 7, 8, 9, 10, 11, 12, 13, 14, or 15 functional defense system described herein. In some embodiments, a method of protecting a host cell from foreign nucleic acid invasion comprises introducing into the host cells at least 1, 2, 3, 4, 5, 6, 7, 8, 9, 10, 11, 12, 13, 14, or 15 functional and non-functional defense system described herein.

[1643] In some embodiments, a method of protecting a bacterial cell from foreign nucleic acid invasion comprises introducing into the bacterial cells at least one defense system described herein. In some embodiments, a method of protecting a bacterial cell from foreign nucleic acid invasion comprises introducing into the bacterial cells a combination of defense systems described herein. In some embodiments, a method of protecting a bacterial cell from foreign nucleic acid invasion comprises introducing into the bacterial cells at least 1, 2, 3, 4, 5, 6, 7, 8, 9, 10, 11, 12, 13, 14, or 15 defense system described herein.

[1644] In some embodiments, a method of protecting a bacterial cell from foreign nucleic acid invasion comprises introducing into the bacterial cells at least one functional defense system described herein. In some embodiments, a method of protecting a bacterial cell from foreign nucleic acid invasion comprises introducing into the bacterial cells a combination of functional defense systems described herein. In some embodiments, a method of protecting a bacterial cell from foreign nucleic acid invasion comprises introducing into the bacterial cells at least 1, 2, 3, 4, 5, 6, 7, 8, 9, 10, 11, 12, 13, 14, or 15 functional defense system described herein. In some embodiments, a method of protecting a bacterial cell from foreign nucleic acid invasion comprises introducing into the bacterial cells at least 1, 2, 3, 4, 5, 6, 7, 8, 9, 10, 11, 12, 13, 14, or 15 functional and non-functional defense system described herein.

[1645] In some embodiments, a method of protecting a host cell from foreign nucleic acid invasion comprises protecting said host cell from phage infection. In some embodiments, a method of protecting a host cell from foreign nucleic acid invasion comprises protecting said host cell from at least one phage infection. In some embodiments, a method of protecting a host cell from foreign nucleic acid invasion comprises protecting said host cell from more than one phage infection. In some embodiments, a method of protecting a host cell from foreign nucleic acid invasion comprises protecting said host cell from plasmid transformation. In some embodiments, a method of protecting a host cell from foreign nucleic acid invasion comprises protecting said host cell from at least one plasmid transformation. In some embodiments, a method of protecting a host cell from foreign nucleic acid invasion comprises protecting said host cell from more than one plasmid transformation. In some embodiments, a method of protecting a host cell from foreign nucleic acid invasion comprises protecting said host cell from entry of conjugative elements. In some embodiments, a method of protecting a host cell from foreign nucleic acid invasion comprises protecting said host cell from entry of at least one conjugative element. In some embodiments, a method of protecting a host cell from foreign nucleic acid invasion comprises protecting said host cell from entry of more than one conjugative elements. In some embodiments, a method of protecting a host cell from foreign nucleic acid invasion comprises protecting said host cell from any combination of phage infection, plasmid transformation, and entry of conjugative elements.

[1646] In some embodiments, a method of protecting a bacterial cell from foreign nucleic acid invasion comprises protecting said bacterial cell from phage infection. In some embodiments, a method of protecting a bacterial cell from foreign nucleic acid invasion comprises protecting said bacterial cell from at least one phage infection. In some embodiments, a method of protecting a bacterial cell from foreign nucleic acid invasion comprises protecting said bacterial cell from more than one phage infection. In some embodiments, a method of protecting a bacterial cell from foreign nucleic acid invasion comprises protecting said bacterial cell from plasmid transformation. In some embodiments, a method of protecting a bacterial cell from foreign nucleic acid invasion comprises protecting said bacterial cell from at least one plasmid transformation. In some embodiments, a method of protecting a bacterial cell from foreign nucleic acid invasion comprises protecting said bacterial cell from more than one plasmid transformation. In some embodiments, a method of protecting a bacterial cell from foreign nucleic acid invasion comprises protecting said bacterial cell from entry of conjugative elements. In some embodiments, a method of protecting a bacterial cell from foreign nucleic acid invasion comprises protecting said bacterial cell from entry of at least one conjugative element. In some embodiments, a method of protecting a bacterial cell from foreign nucleic acid invasion comprises protecting said bacterial cell from entry of more than one conjugative elements. In some embodiments, a method of protecting a bacterial cell from foreign nucleic acid invasion comprises protecting said bacterial cell from any combination of phage infection, plasmid transformation, and entry of conjugative elements.

[1647] In some embodiments, a method disclosed herein comprises the use of a defense system described herein, for protecting bacteria from phage infection. In some embodiments, a method disclosed herein comprises a method of protecting bacteria from plasmid transformation. In some embodiments, a method disclosed herein comprises a method of protecting bacteria from conjugative elements. In some embodiments, a method disclosed herein comprises a method of protecting bacteria from phage infection, and/or conjugative elements, and/or plasmid transformation. In some embodiments, a method disclosed herein comprises a method of producing bacteria resistant to phage infection. In some embodiments, a method disclosed herein comprises a method of producing bacteria resistant to plasmids. In some embodiments, a method disclosed herein comprises a method of producing bacteria resistant to conjugative elements. In some embodiments, a method disclosed herein comprises a method of producing bacteria resistant to phage infection, and/o conjugative elements, and/or plasmids.

[1648] In some embodiments, a method disclosed herein comprises a method of making a food. In some embodiments, a method disclosed herein comprises a method of making a food additive. In some embodiments, a method disclosed herein comprises a method of making a feed. In some embodiments, a method disclosed herein comprises a method of making a nutritional supplement. In some embodiments, a method disclosed herein comprises a method of making a probiotic supplement. In some embodiments, a method disclosed herein comprises a method of making a personal care product. In some embodiments, a method disclosed herein comprises a method of making a health care product. In some embodiments, a method disclosed herein comprises a method of making a veterinary product.

[1649] In some embodiments, disclosed herein is a method of protecting bacteria from phage infection, said method comprising the step of introducing into bacteria a defense system comprising at least one of a Defense System Ia, a Defense System Ib, a Defense System II, a Defense System IIIa, a Defense System IIIb, a Defense System IIIc, a Defense System IV, a Defense System V, a Defense System VI, a Defense System VII, a Defense System VIII, a Defense System IX, a Defense System Xa, a Defense System Xb, or a Defense System Xc, wherein each nucleic acid construct of each Defense System Ia-Xc further comprises a regulatory element operably linked to said construct comprising a cis-acting regulatory element for directing expression of said nucleic acid sequence, or a transmissible element for directing transfer of said nucleic acid sequence from one cell to another, or a recombination element for integrating said nucleic acid sequence into a genome of a cell transfected with said construct, or an element providing episomal maintenance of said construct within a cell transfected with said construct, or any combination thereof; wherein said method results in the bacteria being resistant to at least one phage, or being resistant to a plasmid, or being resistant to at least one phage and a plasmid.

[1650] In some embodiments, disclosed herein is a method of protecting bacteria from plasmid transformation, said method comprising the step of introducing into bacteria a defense system comprising at least one of a Defense System Ia, a Defense System Ib, a Defense System II, a Defense System IIIa, a Defense System IIIb, a Defense System IIIc, a Defense System IV, a Defense System V, a Defense System VI, a Defense System VII, a Defense System VIII, a Defense System IX, a Defense System Xa, a Defense System Xb, or a Defense System Xc, wherein each nucleic acid construct of each Defense System Ia-Xc further comprises a regulatory element operably linked to said construct comprising a cis-acting regulatory element for directing expression of said nucleic acid sequence, or a transmissible element for directing transfer of said nucleic acid sequence from one cell to another, or a recombination element for integrating said nucleic acid sequence into a genome of a cell transfected with said construct, or an element providing episomal maintenance of said construct within a cell transfected with said construct, or any combination thereof; wherein said method results in the bacteria being resistant to at least one phage, or being resistant to a plasmid, or being resistant to at least one phage and a plasmid.

[1651] In some embodiments, disclosed herein is a method of protecting bacteria from conjugative elements, said method comprising the step of introducing into bacteria a defense system comprising at least one of a Defense System Ia, a Defense System Ib, a Defense System II, a Defense System IIIa, a Defense System IIIb, a Defense System IIIc, a Defense System IV, a Defense System V, a Defense System VI, a Defense System VII, a Defense System VIII, a Defense System IX, a Defense System Xa, a Defense System Xb, or a Defense System Xc, wherein each nucleic acid construct of each Defense System Ia-Xc further comprises a regulatory element operably linked to said construct comprising a cis-acting regulatory element for directing expression of said nucleic acid sequence, or a transmissible element for directing transfer of said nucleic acid sequence from one cell to another, or a recombination element for integrating said nucleic acid sequence into a genome of a cell transfected with said construct, or an element providing episomal maintenance of said construct within a cell transfected with said construct, or any combination thereof; wherein said method results in the bacteria being resistant to at least one conjugative elements.

[1652] In some embodiments, disclosed herein is a method of protecting bacteria from any combination of phage infection, conjugative elements, and plasmid transformation, said method comprising the step of introducing into bacteria a defense system comprising at least one of a Defense System Ia, a Defense System Ib, a Defense System II, a Defense System IIIa, a Defense System IIIb, a Defense System IIIc, a Defense System IV, a Defense System V, a Defense System VI, a Defense System VII, a Defense System VIII, a Defense System IX, a Defense System Xa, a Defense System Xb, or a Defense System Xc, wherein each nucleic acid construct of each Defense System Ia-Xc further comprises a regulatory element operably linked to said construct comprising a cis-acting regulatory element for directing expression of said nucleic acid sequence, or a transmissible element for directing transfer of said nucleic acid sequence from one cell to another, or a recombination element for integrating said nucleic acid sequence into a genome of a cell transfected with said construct, or an element providing episomal maintenance of said construct within a cell transfected with said construct, or any combination thereof; wherein said method results in the bacteria being resistant to at least one phage, or being resistant to a plasmid, or being resistant to a conjugative element, or being resistant to a combination of at least one phage, a conjugative element, and a plasmid.

[1653] In some embodiments, disclosed herein is a method of producing bacteria resistant to phage infection, said method comprising the step of introducing into bacteria a defense system comprising at least one of a Defense System Ia, a Defense System Ib, a Defense System II, a Defense System IIIa, a Defense System IIIb, a Defense System IIIc, a Defense System IV, a Defense System V, a Defense System VI, a Defense System VII, a Defense System VIII, a Defense System IX, a Defense System Xa, a Defense System Xb, or a Defense System Xc, wherein each nucleic acid construct of each Defense System Ia-Xc further comprises a regulatory element operably linked to said construct comprising a cis-acting regulatory element for directing expression of said nucleic acid sequence, or a transmissible element for directing transfer of said nucleic acid sequence from one cell to another, or a recombination element for integrating said nucleic acid sequence into a genome of a cell transfected with said construct, or an element providing episomal maintenance of said construct within a cell transfected with said construct, or any combination thereof; wherein said method produces bacteria resistant to at least one phage.

[1654] In some embodiments, disclosed herein is a method of producing bacteria resistant to plasmid transformation, said method comprising the step of introducing into bacteria a defense system comprising at least one of a Defense System Ia, a Defense System Ib, a Defense System II, a Defense System IIIa, a Defense System IIIb, a Defense System IIIc, a Defense System IV, a Defense System V, a Defense System VI, a Defense System VII, a Defense System VIII, a Defense System IX, a Defense System Xa, a Defense System Xb, or a Defense System Xc, wherein each nucleic acid construct of each Defense System Ia-Xc further comprises a regulatory element operably linked to said construct comprising a cis-acting regulatory element for directing expression of said nucleic acid sequence, or a transmissible element for directing transfer of said nucleic acid sequence from one cell to another, or a recombination element for integrating said nucleic acid sequence into a genome of a cell transfected with said construct, or an element providing episomal maintenance of said construct within a cell transfected with said construct, or any combination thereof; wherein said method produces bacteria resistant to a plasmid transformation.

[1655] In some embodiments, disclosed herein is a method of producing bacteria resistant to conjugative elements, said method comprising the step of introducing into bacteria a defense system comprising at least one of a Defense System Ia, a Defense System Ib, a Defense System II, a Defense System IIIa, a Defense System IIIb, a Defense System IIIc, a Defense System IV, a Defense System V, a Defense System VI, a Defense System VII, a Defense System VIII, a Defense System IX, a Defense System Xa, a Defense System Xb, or a Defense System Xc, wherein each nucleic acid construct of each Defense System Ia-Xc further comprises a regulatory element operably linked to said construct comprising a cis-acting regulatory element for directing expression of said nucleic acid sequence, or a transmissible element for directing transfer of said nucleic acid sequence from one cell to another, or a recombination element for integrating said nucleic acid sequence into a genome of a cell transfected with said construct, or an element providing episomal maintenance of said construct within a cell transfected with said construct, or any combination thereof; wherein said method produces bacteria resistant to conjugative elements.

[1656] In some embodiments, disclosed herein is a method of producing bacteria resistant to any combination of phage infection, conjugative elements, and plasmid transformation, said method comprising the step of introducing into bacteria a defense system comprising at least one of a Defense System Ia, a Defense System Ib, a Defense System II, a Defense System IIIa, a Defense System IIIb, a Defense System IIIc, a Defense System IV, a Defense System V, a Defense System VI, a Defense System VII, a Defense System VIII, a Defense System IX, a Defense System Xa, a Defense System Xb, or a Defense System Xc, wherein each nucleic acid construct of each Defense System Ia-Xc further comprises a regulatory element operably linked to said construct comprising a cis-acting regulatory element for directing expression of said nucleic acid sequence, or a transmissible element for directing transfer of said nucleic acid sequence from one cell to another, or a recombination element for integrating said nucleic acid sequence into a genome of a cell transfected with said construct, or an element providing episomal maintenance of said construct within a cell transfected with said construct, or any combination thereof; wherein said method produces bacteria resistant to any combination of phage infection, conjugative elements, and plasmid transformation.

[1657] In some embodiments, the defense system used in a method disclosed herein comprises one of a Defense System Ia, a Defense System Ib, a Defense System II, a Defense System IIIa, a Defense System IIIb, a Defense System IIIc, a Defense System IV, a Defense System V, a Defense System VI, a Defense System VII, a Defense System VIII, a Defense System IX, a Defense System Xa, a Defense System Xb, and a Defense System Xc. In some embodiments, the defense system used in a method disclosed herein comprises a combination of Defense Systems selected from a Defense System Ia, a Defense System Ib, a Defense System II, a Defense System IIIa, a Defense System IIIb, a Defense System IIIc, a Defense System IV, a Defense System V, a Defense System VI, a Defense System VII, a Defense System VIII, a Defense System IX, a Defense System Xa, a Defense System Xb, and a Defense System Xc. In some embodiments, the defense system used in a method disclosed herein comprises between 2-5 Defense Systems selected from a Defense System Ia, a Defense System Ib, a Defense System II, a Defense System III, a Defense System IV, a Defense System V, a Defense System VI, a Defense System VII, a Defense System VIII, a Defense System IX, a Defense System Xa, a Defense System Xb, and a Defense System Xc. In some embodiments, the defense system used in a method disclosed herein comprises between 2-10 Defense Systems selected from a Defense System Ia, a Defense System Ib, a Defense System II, a Defense System IIIa, a Defense System IIIb, a Defense System IIIc, a Defense System IV, a Defense System V, a Defense System VI, a Defense System VII, a Defense System VIII, a Defense System IX, a Defense System Xa, a Defense System Xb, and a Defense System Xc. In some embodiments, the defense system used in a method disclosed herein comprises between 10-20 Defense Systems selected from a Defense System Ia, a Defense System Ib, a Defense System II, a Defense System IIIa, a Defense System IIIb, a Defense System IIIc, a Defense System IV, a Defense System V, a Defense System VI, a Defense System VII, a Defense System VIII, a Defense System IX, a Defense System Xa, a Defense System Xb, and a Defense System Xc.

[1658] In some embodiments, the defense system used in a method disclosed herein comprises a combination of Defense Systems, as described in detail herein, selected from a Defense System Ia, a Defense System Ib, a Defense System II, a Defense System IIIa, a Defense System IIIb, a Defense System IIIc, a Defense System IV, a Defense System V, a Defense System VI, a Defense System VII, a Defense System VIII, a Defense System IX, a Defense System Xa, a Defense System Xb, and a Defense System Xc.

[1659] In some embodiments, disclosed herein is a method of protecting bacteria from phage infection, said method comprising the step of introducing into bacteria a defense systems comprising a combination of Defense Systems, said combination comprising any combination of a Defense System Ia, a Defense System Ib, a Defense System II, a Defense System IIIa, a Defense System IIIb, a Defense System IIIc, a Defense System IV, a Defense System V, a Defense System VI, a Defense System VII, a Defense System VIII, a Defense System IX, a Defense System Xa, a Defense System Xb, or a Defense System Xc, wherein each nucleic acid construct of each Defense System Ia-Xc further comprises a regulatory element operably linked to said construct comprising a cis-acting regulatory element for directing expression of said nucleic acid sequence, or a transmissible element for directing transfer of said nucleic acid sequence from one cell to another, or a recombination element for integrating said nucleic acid sequence into a genome of a cell transfected with said construct, or an element providing episomal maintenance of said construct within a cell transfected with said construct, or any combination thereof; wherein said method results in the bacteria being resistant to at least one phage.

[1660] In some embodiments, disclosed herein is a method of protecting bacteria from plasmid transformation, said method comprising the step of introducing into bacteria a defense systems comprising a combination of Defense Systems, said combination comprising any combination of a Defense System Ia, a Defense System Ib, a Defense System II, a Defense System IIIa, a Defense System IIIb, a Defense System IIIc, a Defense System IV, a Defense System V, a Defense System VI, a Defense System VII, a Defense System VIII, a Defense System IX, a Defense System Xa, a Defense System Xb, or a Defense System Xc, wherein each nucleic acid construct of each Defense System Ia-Xc further comprises a regulatory element operably linked to said construct comprising a cis-acting regulatory element for directing expression of said nucleic acid sequence, or a transmissible element for directing transfer of said nucleic acid sequence from one cell to another, or a recombination element for integrating said nucleic acid sequence into a genome of a cell transfected with said construct, or an element providing episomal maintenance of said construct within a cell transfected with said construct, or any combination thereof; wherein said method results in the bacteria being resistant to a plasmid transformation.

[1661] In some embodiments, disclosed herein is a method of protecting bacteria from conjugative elements, said method comprising the step of introducing into bacteria a defense systems comprising a combination of Defense Systems, said combination comprising any combination of a Defense System Ia, a Defense System Ib, a Defense System II, a Defense System IIIa, a Defense System IIIb, a Defense System IIIc, a Defense System IV, a Defense System V, a Defense System VI, a Defense System VII, a Defense System VIII, a Defense System IX, a Defense System Xa, a Defense System Xb, or a Defense System Xc, wherein each nucleic acid construct of each Defense System Ia-Xc further comprises a regulatory element operably linked to said construct comprising a cis-acting regulatory element for directing expression of said nucleic acid sequence, or a transmissible element for directing transfer of said nucleic acid sequence from one cell to another, or a recombination element for integrating said nucleic acid sequence into a genome of a cell transfected with said construct, or an element providing episomal maintenance of said construct within a cell transfected with said construct, or any combination thereof; wherein said method results in the bacteria being resistant to conjugative elements.

[1662] In some embodiments, disclosed herein is a method of protecting bacteria from any combination of phage infection, conjugative elements, and plasmid transformation, said method comprising the step of introducing into bacteria a defense systems comprising a combination of Defense Systems, said combination comprising any combination of a Defense System Ia, a Defense System Ib, a Defense System II, a Defense System IIIa, a Defense System IIIb, a Defense System IIIc, a Defense System IV, a Defense System V, a Defense System VI, a Defense System VII, a Defense System VIII, a Defense System IX, a Defense System Xa, a Defense System Xb, or a Defense System Xc, wherein each nucleic acid construct of each Defense System Ia-Xc further comprises a regulatory element operably linked to said construct comprising a cis-acting regulatory element for directing expression of said nucleic acid sequence, or a transmissible element for directing transfer of said nucleic acid sequence from one cell to another, or a recombination element for integrating said nucleic acid sequence into a genome of a cell transfected with said construct, or an element providing episomal maintenance of said construct within a cell transfected with said construct, or any combination thereof; wherein said method results in the bacteria being resistant to any combination of phage infection, conjugative elements, and plasmid transformation.

[1663] In some embodiments, a method of protecting bacteria from phage infection produces bacteria resistant to phage infection. In some embodiments, the method of protecting bacteria from plasmid transformation produces bacteria having reduced transformation efficiency of a plasmid. In some embodiments, the method of protecting bacteria from conjugative elements produces bacteria resistant to horizontal gene transfer. In some embodiments, the method of protecting bacteria from phage infection, and/or conjugative elements, and/or plasmid transformation, produces bacteria resistant to phage infection, resistant to horizontal gene transfer, and having reduced transformation efficiency of a plasmid.

[1664] In some embodiments, a method of protecting bacteria from phage infection produces bacteria resistant to at least one phage. In some embodiments, a method of protecting bacteria from plasmid transformation produces bacteria resistant to plasmid transformation. In some embodiments, a method of protecting bacteria from phage infection and plasmid transformation produces bacteria resistant to at least one phage and resistant to entry of a plasmid.

[1665] In some embodiments, provided herein is a method of protecting bacteria from phage infection, the method comprising introducing into the bacteria a defense system having an anti-phage activity, the system comprising at least one component selected from the group consisting of the components of the defense system, thereby protecting the bacteria from phage infection. In some embodiments, a method of protecting bacteria from phage infection comprises introducing into the bacteria a defense system comprising a Defense System selected from a Defense System Ia, Ib, II, IIIa, IIIb, IIIc, IV, V, VI, VII, VIII, IX, Xa, Xb, and Xc, wherein said defense system comprises an anti-phage activity, the system comprising at least one component of said Defense System Ia, Ib, II, IIIa, IIIb, IIIc, IV, V, VI, VII, VIII, IX, Xa, Xb, or Xc, said at least one component selected from the group consisting of the components of the Defense Systems Ia, Ib, II, IIIa, IIIb, IIIc, IV, V, VI, VII, VIII, IX, Xa, Xb, or Xc, respectively, thereby protecting the bacteria from phage infection. In some embodiments, a method of protecting bacteria from phage infection comprises introducing into the bacteria a defense system comprising a combination of Defense Systems selected from Defense System Ia, Ib, II, IIIa, IIIb, IIIc, IV, V, VI, VII, VIII, IX, Xa, Xb, and Xc, wherein said defense system comprises an anti-phage activity, the system comprising at least one component of each of said Defense Systems in combination, said at least one component selected from the group consisting of the components of the Defense Systems Ia, Ib, II, IIIa, IIIb, IIIc, IV, V, VI, VII, VIII, IX, Xa, Xb, or Xc, respectively, thereby protecting the bacteria from phage infection.

[1666] In some embodiments, an at least one component comprises the components of a Defense System Ia, Ib, II, IIIa, IIIb, IIIc, IV, V, VI, VII, VIII, IX, Xa, Xb, or Xc, required for a functional Defense System, wherein said function comprises an anti-phage activity. In some embodiments, an at least one component comprises the components of the cassette of genes making up a Defense System Ia, Ib, II, IIIa, IIIb, IIIc, IV, V, VI, VII, VIII, IX, Xa, Xb, or Xc. In some embodiments, an at least one component comprises two components of a Defense System Ia, Ib, II, IIIa, IIIb, IIIc, IV, V, VI, VII, VIII, IX, Xa, Xb, or Xc. In some embodiments, an at least one component comprises three components of a Defense System Ia, Ib, II, IIIa, IIIb, IIIc, IV, V, VI, VII, VIII, IX, Xa, Xb, or Xc. In some embodiments, an at least one component comprises four components of a Defense System Ia, Ib, II, IIIa, IIIb, IIIc, IV, V, VI, VII, VIII, IX, Xa, Xb, or Xc. In some embodiments, an at least one component comprises five components of a Defense System Ia, Ib, II, IIIa, IIIb, IIIc, IV, V, VI, VII, VIII, IX, Xa, Xb, or Xc. In some embodiments, a component comprises the full-length component. In some embodiments, a component comprises a functional portion of the component. In some embodiments, a component comprises a component homolog.

[1667] In some embodiments, provided herein is a method of protecting bacteria from plasmid transformation, the method comprising introducing into the bacteria a defense system having an anti-plasmid activity, the system comprising at least one component selected from the group consisting of the components of the defense system, thereby protecting the bacteria from plasmid transformation. In some embodiments, a method of protecting bacteria from plasmid transformation comprises introducing into the bacteria a defense system comprising a Defense System selected from a Defense System Ia, Ib, II, IIIa, IIIb, IIIc, IV, V, VI, VII, VIII, IX, Xa, Xb, and Xc, wherein said defense system comprises an anti-plasmid activity, the system comprising at least one component of said Defense System Ia, Ib, II, IIIa, IIIb, IIIc, IV, V, VI, VII, VIII, IX, Xa, Xb, or Xc, said at least one component selected from the group consisting of the components of the Defense Systems Ia, Ib, II, IIIa, IIIb, IIIc, IV, V, VI, VII, VIII, IX, Xa, Xb, or Xc, respectively, thereby protecting the bacteria from plasmid transformation. In some embodiments, a method of protecting bacteria from plasmid transformation comprises introducing into the bacteria a defense system comprising a combination of Defense Systems selected from Defense System Ia, Ib, II, IIIa, IIIb, IIIc, IV, V, VI, VII, VIII, IX, Xa, Xb, and Xc, wherein said defense system comprises an anti-plasmid activity, the system comprising at least one component of each of said Defense Systems in combination, said at least one component selected from the group consisting of the components of the Defense Systems Ia, Ib, II, IIIa, IIIb, IIIc, IV, V, VI, VII, VIII, IX, Xa, Xb, or Xc, respectively, thereby protecting the bacteria from plasmid transformation.

[1668] In some embodiments, an at least one component comprises the components of a Defense System Ia, Ib, II, IIIa, IIIb, IIIc, IV, V, VI, VII, VIII, IX, Xa, Xb, or Xc, required for a functional Defense System, wherein said function comprises an anti-plasmid activity. In some embodiments, an at least one component comprises the components of the cassette of genes making up a Defense System Ia, Ib, II, IIIa, IIIb, IIIc, IV, V, VI, VII, VIII, IX, Xa, Xb, or Xc. In some embodiments, an at least one component comprises two components of a Defense System Ia, Ib, II, IIIa, IIIb, IIIc, IV, V, VI, VII, VIII, IX, Xa, Xb, or Xc. In some embodiments, an at least one component comprises three components of a Defense System Ia, Ib, II, IIIa, IIIb, IIIc, IV, V, VI, VII, VIII, IX, Xa, Xb, or Xc. In some embodiments, an at least one component comprises four components of a Defense System Ia, Ib, II, IIIa, IIIb, IIIc, IV, V, VI, VII, VIII, IX, Xa, Xb, or Xc. In some embodiments, an at least one component comprises five components of a Defense System Ia, Ib, II, IIIa, IIIb, IIIc, IV, V, VI, VII, VIII, IX, Xa, Xb, or Xc. In some embodiments, a component comprises the full-length component. In some embodiments, a component comprises a functional portion of the component. In some embodiments, a component comprises a component homolog.

[1669] In some embodiments, provided herein is a method of protecting bacteria from conjugative elements, the method comprising introducing into the bacteria a defense system having an anti-conjugation activity, the system comprising at least one component selected from the group consisting of the components of the defense system, thereby protecting the bacteria from conjugation. In some embodiments, a method of protecting bacteria from conjugative elements comprises introducing into the bacteria a defense system comprising a Defense System selected from a Defense System Ia, Ib, II, IIIa, IIIb, IIIc, IV, V, VI, VII, VIII, IX, Xa, Xb, and Xc, wherein said defense system comprises an anti-conjugation activity, the system comprising at least one component of said Defense System Ia, Ib, II, IIIa, IIIb, IIIc, IV, V, VI, VII, VIII, IX, Xa, Xb, or Xc, said at least one component selected from the group consisting of the components of the Defense Systems Ia, Ib, II, IIIa, IIIb, IIIc, IV, V, VI, VII, VIII, IX, Xa, Xb, or Xc, respectively, thereby protecting the bacteria from conjugation. In some embodiments, a method of protecting bacteria from conjugative elements comprises introducing into the bacteria a defense system comprising a combination of Defense Systems selected from Defense System Ia, Ib, II, IIIa, IIIb, IIIc, IV, V, VI, VII, VIII, IX, Xa, Xb, and Xc, wherein said defense system comprises an anti-conjugation activity, the system comprising at least one component of each of said Defense Systems in combination, said at least one component selected from the group consisting of the components of the Defense Systems Ia, Ib, II, IIIa, IIIb, IIIc, IV, V, VI, VII, VIII, IX, Xa, Xb, or Xc, respectively, thereby protecting the bacteria from conjugation.

[1670] In some embodiments, an at least one component comprises the components of a Defense System Ia, Ib, II, IIIa, IIIb, IIIc, IV, V, VI, VII, VIII, IX, Xa, Xb, or Xc, required for a functional Defense System, wherein said function comprises an anti-conjugation activity. In some embodiments, an at least one component comprises the components of the cassette of genes making up a Defense System Ia, Ib, II, IIIa, IIIb, IIIc, IV, V, VI, VII, VIII, IX, Xa, Xb, or Xc. In some embodiments, an at least one component comprises two components of a Defense System Ia, Ib, II, IIIa, IIIb, IIIc, IV, V, VI, VII, VIII, IX, Xa, Xb, or Xc. In some embodiments, an at least one component comprises three components of a Defense System Ia, Ib, II, IIIa, IIIb, IIIc, IV, V, VI, VII, VIII, IX, Xa, Xb, or Xc. In some embodiments, an at least one component comprises four components of a Defense System Ia, Ib, II, IIIa, IIIb, IIIc, IV, V, VI, VII, VIII, IX, Xa, Xb, or Xc. In some embodiments, an at least one component comprises five components of a Defense System Ia, Ib, II, IIIa, IIIb, IIIc, IV, V, VI, VII, VIII, IX, Xa, Xb, or Xc. In some embodiments, a component comprises the full-length component. In some embodiments, a component comprises a functional portion of the component. In some embodiments, a component comprises a component homolog.

[1671] In some embodiments, provided herein is a method of protecting bacteria from any combination of phage infection, conjugative elements, and plasmid transformation, the method comprising introducing into the bacteria a defense system having an anti-phage, anti-conjugation, and/or anti-plasmid activity, the system comprising at least one component selected from the group consisting of the components of the defense system, thereby protecting the bacteria from phage infection, conjugative elements, and plasmid transformation. In some embodiments, a method of protecting bacteria from phage infection, conjugative elements, and plasmid transformation comprises introducing into the bacteria a defense system comprising a Defense System selected from a Defense System Ia, Ib, II, IIIa, IIIb, IIIc, IV, V, VI, VII, VIII, IX, Xa, Xb, and Xc, wherein said defense system comprises an anti-phage, anti-conjugation, and/or anti-plasmid activity, the system comprising at least one component of said Defense System Ia, Ib, II, IIIa, IIIb, IIIc, IV, V, VI, VII, VIII, IX, Xa, Xb, or Xc, said at least one component selected from the group consisting of the components of the Defense Systems Ia, Ib, II, IIIa, IIIb, IIIc, IV, V, VI, VII, VIII, IX, Xa, Xb, or Xc, respectively, thereby protecting the bacteria from phage infection, conjugative elements, and/or plasmid transformation. In some embodiments, a method of protecting bacteria from phage infection, conjugative elements, and plasmid transformation comprises introducing into the bacteria a defense system comprising a combination of Defense Systems selected from Defense System Ia, Ib, II, IIIa, IIIb, IIIc, IV, V, VI, VII, VIII, IX, Xa, Xb, and Xc, wherein said defense system comprises an anti-phage, anti-conjugation, and anti-plasmid activity, the system comprising at least one component of each of said Defense Systems in combination, said at least one component selected from the group consisting of the components of the Defense Systems Ia, Ib, II, IIIa, IIIb, IIIc, IV, V, VI, VII, VIII, IX, Xa, Xb, or Xc, respectively, thereby protecting the bacteria from phage infection, bacterial conjugation, and/or plasmid transformation.

[1672] In some embodiments, an at least one component comprises the components of a Defense System Ia, Ib, II, IIIa, IIIb, IIIc, IV, V, VI, VII, VIII, IX, Xa, Xb, or Xc, required for a functional Defense System, wherein said function comprises an anti-phage, anti-conjugation, and/or anti-plasmid activity. In some embodiments, an at least one component comprises the components of the cassette of genes making up a Defense System Ia, Ib, II, IIIa, IIIb, IIIc, IV, V, VI, VII, VIII, IX, Xa, Xb, or Xc. In some embodiments, an at least one component comprises two components of a Defense System Ia, Ib, II, IIIa, IIIb, IIIc, IV, V, VI, VII, VIII, IX, Xa, Xb, or Xc. In some embodiments, an at least one component comprises three components of a Defense System Ia, Ib, II, IIIa, IIIb, IIIc, IV, V, VI, VII, VIII, IX, Xa, Xb, or Xc. In some embodiments, an at least one component comprises four components of a Defense System Ia, Ib, II, IIIa, IIIb, IIIc, IV, V, VI, VII, VIII, IX, Xa, Xb, or Xc. In some embodiments, an at least one component comprises five components of a Defense System Ia, Ib, II, IIIa, IIIb, IIIc, IV, V, VI, VII, VIII, IX, Xa, Xb, or Xc. In some embodiments, a component comprises the full-length component. In some embodiments, a component comprises a functional portion of the component. In some embodiments, a component comprises a component homolog.

[1673] The components of Defense Systems Ia, Ib, II, IIIa, IIIb, IIIc, IV, V, VI, VII, VIII, IX, Xa, Xb, and Xc have been described in detail above, as has the combination of these Defense systems. Methods of protecting bacteria comprising introducing into the bacteria a defense system comprising at least one components of a Defense System selected from Defense Systems Ia, Ib, II, IIIa, IIIb, IIIc, IV, V, VI, VII, VIII, IX, Xa, Xb, and Xc, or a combination of Defense Systems thereof, comprises use of the components of the Defense Systems as described in detail above, and in Tables 6-18. The detailed description of the Defense Systems and components thereof, and combinations thereof, as described above, are incorporated in full in the method of use of protecting bacteria described herein. Briefly, a non-limiting description of Defense Systems and their components includes Defense Systems Ia, Ib, II, IIIa, IIIb, IIIc, IV, V, VI, VII, VIII, IX, Xa, Xb, and Xc and components thereof, including but are not limited to methods of protecting bacteria comprising introducing into the bacteria a defense system comprising at least one components of a Defense System selected from Defense Systems Ia, Ib, II, IIIa, IIIb, IIIc, IV, V, VI, VII, VIII, IX, Xa, Xb, and Xc, or a combination of Defense Systems thereof, wherein in some embodiments:

[1674] a Defense System Ia comprises a nucleic acid construct comprising a nucleic acid sequence encoding a ZorA polypeptide comprising a pfam01618 domain, a ZorB polypeptide comprising a pfam13677 domain or a pfam00691 domain or a combination thereof, a ZorC polypeptide comprising a pfam15611 domain, and a ZorD polypeptide comprising a pfam00176 domain or a pfam00271 domain or a combination thereof;

[1675] a Defense System Ib comprises a nucleic acid construct comprising a nucleic acid sequence encoding a ZorA polypeptide comprising a pfam01618 domain, a ZorB polypeptide comprising a pfam13677 domain or a pfam00691 domain or a combination thereof, and a ZorE polypeptide comprising a pfam01844 domain or a COG3183 domain or a combination thereof;

[1676] a Defense System II comprises a nucleic acid construct comprising a nucleic acid sequence encoding a ThsA polypeptide comprising a pfam13289 domain or a pfam14519 domain or a combination thereof, and a KwaB polypeptide comprising a pfam13676 domain or a pfam08937 domain or a pfam08357 domain, or a combination thereof;

[1677] a Defense System IIIa comprises a nucleic acid construct comprising a nucleic acid sequence encoding a DruA polypeptide comprising a DUF4338 domain or a pfam14236 domain or a combination thereof, a DruB polypeptide, a DruC polypeptide, a DruD polypeptide, and a DruE polypeptide comprising a pfam00270 domain or a pfam00271 domain or a pfam09369 domain or a DUF1998 domain or any combination thereof;

[1678] a Defense System IIIa comprises a nucleic acid construct comprising a nucleic acid sequence encoding a DruA polypeptide comprising a DUF4338 domain or a pfam14236 domain or a combination thereof, a DruB polypeptide, a DruC polypeptide, a DruD polypeptide, and a DruE polypeptide comprising a pfam00270 domain or a pfam00271 domain or a pfam09369 domain or a DUF1998 domain or any combination thereof, said DruB polypeptide encoded by a gene positioned within 5 genes of a gene encoding DruA, DruD, and or DruE, and said DruC polypeptide encoded by a gene positioned within 5 genes of a gene encoding DruA, DruD, and or DruE;

[1679] a Defense System IIIb comprises a nucleic acid construct comprising a nucleic acid sequence encoding a DruM polypeptide comprising a pfam00145 domain or a COG0270 or a combination thereof, a DruF polypeptide, a DruG polypeptide, and a DruE polypeptide comprising a pfam00270 domain or a pfam00271 domain or a pfam09369 domain or a DUF1998 domain or any combination thereof;

[1680] a Defense System IIIb comprises a nucleic acid construct comprising a nucleic acid sequence encoding a DruM polypeptide comprising a pfam00145 domain or a COG0270 or a combination thereof, a DruF polypeptide, a DruG polypeptide, and a DruE polypeptide comprising a pfam00270 domain or a pfam00271 domain or a pfam09369 domain or a DUF1998 domain or any combination thereof, said DruF polypeptide encoded by a gene positioned within 5 genes of a gene encoding DruM and or DruE, and said DruG polypeptide encoded by a gene positioned within 5 genes of a gene encoding DruM and or DruE;

[1681] a Defense System IIIc comprises a nucleic acid construct comprising a nucleic acid sequence encoding a DruH polypeptide and a DruE polypeptide comprising a pfam00270 domain or a pfam00271 domain or a pfam09369 domain or a DUF1998 domain or any combination thereof;

[1682] a Defense System IIIc comprises a nucleic acid construct comprising a nucleic acid sequence encoding a DruH polypeptide and a DruE polypeptide comprising a pfam00270 domain or a pfam00271 domain or a pfam09369 domain or a DUF1998 domain or any combination thereof, said DruH polypeptide encoded by a gene positioned within 5 genes of a gene encoding DruE;

[1683] a Defense System IV comprises a nucleic acid construct comprising a nucleic acid sequence encoding a HamA polypeptide comprising a pfam08878 domain or a DUF1837 domain or a combination thereof, and a HamB polypeptide comprising COG1204 domain or a pfam00270 domain or a pfam00271 domain or any combination thereof;

[1684] a Defense System V comprises a nucleic acid construct comprising a nucleic acid sequence encoding a SduA polypeptide comprising a pfam14082 domain or a pfam01939 domain or a combination thereof;

[1685] a Defense System VI comprises a nucleic acid construct comprising a nucleic acid sequence encoding a GajA polypeptide comprising a pfam13175 domain or a COG3593 domain or a combination thereof, and a GajB polypeptide comprising a pfam04257 domain or a pfam00580 domain or a pfam13361 domain or a combination thereof;

[1686] a Defense System VII comprises a nucleic acid construct comprising a nucleic acid sequence encoding a PtuA polypeptide comprising a pfam13304 domain or a pfam02463 domain or a combination thereof, and a PtuB polypeptide comprising pfam13395 domain or a pfam 01844 domain or a combination thereof;

[1687] a Defense System VIII comprises a nucleic acid construct comprising a nucleic acid sequence encoding a LmuA polypeptide comprising a pfam14130 domain or a DUF4297 domain or a combination thereof, and a LmuB polypeptide comprising a pfam02463 domain;

[1688] a Defense System IX comprises a nucleic acid construct comprising a nucleic acid sequence encoding a KwaA polypeptide and a KwaB polypeptide comprising a pfam16162 domain or a DUF4868 domain or a combination thereof;

[1689] a Defense System IX comprises a nucleic acid construct comprising a nucleic acid sequence encoding a KwaA polypeptide and a KwaB polypeptide comprising a pfam16162 domain or a DUF4868 domain or a combination thereof, said KwaA polypeptide encoded by a gene positioned within 5 genes of a gene encoding KwaB;

[1690] a Defense System Xa comprises a nucleic acid construct comprising a nucleic acid sequence encoding a JetA polypeptide comprising a pfam11855 domain or a DUF3375 domain or any combination thereof, a JetB polypeptide comprising a pfam13835 domain or a DUF4194 domain or any combination thereof, a JetC polypeptide comprising a pfam13555 domain or a pfam13558 domain or a COG4913 domain or a combination thereof, and a JetD polypeptide comprising a pfam11795 domain or a DUF3322 domain or a pfam09983 domain or a DUF2220 domain or a COG4924 domain or any combination thereof;

[1691] a Defense System Xb comprises a nucleic acid construct comprising a nucleic acid sequence encoding a JetAⁱⁱ polypeptide comprising a pfam09660 domain or a DUF2397 domain or any combination thereof, a JetBⁱⁱ polypeptide comprising a pfam09661 domain or a DUF2398 domain or any combination thereof, a JetCⁱⁱ polypeptide comprising a pfam13558 domain, and a JetDⁱⁱ polypeptide comprising a pfam11796 domain or a DUF3323 domain or a pfam09664 domain or a DUF2399 domain or any combination thereof;

[1692] a Defense System Xc comprises a nucleic acid construct comprising a nucleic acid sequence encoding a JetAⁱⁱⁱ polypeptide, a JetBⁱⁱⁱ polypeptide, a JetCⁱⁱⁱ polypeptide comprising a COG1196 domain, a JetDⁱⁱⁱ polypeptide comprising a pfam09983 domain or a pfam09664 domain, or a DUF2220 domain, or a DUF2399 domain, or a combination thereof; or

[1693] a Defense System Xc comprises a nucleic acid construct comprising a nucleic acid sequence encoding a JetAⁱⁱⁱ polypeptide, a JetBⁱⁱⁱ polypeptide, a JetCⁱⁱⁱ polypeptide comprising a COG1196 domain, a JetDⁱⁱⁱ polypeptide comprising a pfam09983 domain or a pfam09664 domain, or a DUF2220 domain, or a DUF2399 domain, or a combination thereof, said JetAⁱⁱⁱ polypeptide and a JetBⁱⁱⁱ polypeptide each encoded by a gene positioned within 5 genes of a gene encoding JetCⁱⁱⁱ polypeptide or a JetDⁱⁱⁱ polypeptide;

[1694] wherein each nucleic acid construct of each Defense System Ia-Xc further comprises a regulatory element operably linked to said construct comprising a cis-acting regulatory element for directing expression of said nucleic acid sequence, or a transmissible element for directing transfer of said nucleic acid sequence from one cell to another, or a recombination element for integrating said nucleic acid sequence into a genome of a cell transfected with said construct, or an element providing episomal maintenance of said construct within a cell transfected with said construct, or any combination thereof; wherein said method results in protecting bacteria comprising the bacteria being resistant to at least one phage, or the bacteria having reduced efficacy of plasmid transformation, or a combination thereof.

[1695] In some embodiments, the bacteria do not express an endogenous version of the defense system being introduced. In some embodiments, the bacteria do not express a functional endogenous version of the defense system being introduced.

[1696] In some embodiments, the bacteria do not express an endogenous version of the Defense System Ia. In some embodiments, the bacteria do not express a functional endogenous version of the Defense System Ia. In some embodiments, the bacteria do not express an endogenous version of the Defense System Ib. In some embodiments, the bacteria do not express a functional endogenous version of the Defense System Ib. In some embodiments, the bacteria do not express an endogenous version of the Defense System II. In some embodiments, the bacteria do not express a functional endogenous version of the Defense System II. In some embodiments, the bacteria do not express an endogenous version of the Defense System IIIa. In some embodiments, the bacteria do not express a functional endogenous version of the Defense System IIIa. In some embodiments, the bacteria do not express an endogenous version of the Defense System IIIb. In some embodiments, the bacteria do not express a functional endogenous version of the Defense System IIIb. In some embodiments, the bacteria do not express an endogenous version of the Defense System IIIc. In some embodiments, the bacteria do not express a functional endogenous version of the Defense System IIIc. In some embodiments, the bacteria do not express an endogenous version of the Defense System IV. In some embodiments, the bacteria do not express a functional endogenous version of the Defense System IV. In some embodiments, the bacteria do not express an endogenous version of the Defense System V. In some embodiments, the bacteria do not express a functional endogenous version of the Defense System V. In some embodiments, the bacteria do not express an endogenous version of the Defense System VI. In some embodiments, the bacteria do not express a functional endogenous version of the Defense System VI. In some embodiments, the bacteria do not express an endogenous version of the Defense System VII. In some embodiments, the bacteria do not express a functional endogenous version of the Defense System VII. In some embodiments, the bacteria do not express an endogenous version of the Defense System VIII. In some embodiments, the bacteria do not express a functional endogenous version of the Defense System VIII. In some embodiments, the bacteria do not express an endogenous version of the Defense System IX. In some embodiments, the bacteria do not express a functional endogenous version of the Defense System IX. In some embodiments, the bacteria do not express an endogenous version of the Defense System Xa. In some embodiments, the bacteria do not express a functional endogenous version of the Defense System Xa. In some embodiments, the bacteria do not express an endogenous version of the Defense System Xb. In some embodiments, the bacteria do not express a functional endogenous version of the Defense System Xb. In some embodiments, the bacteria do not express an endogenous version of the Defense System Xc. In some embodiments, the bacteria do not express a functional endogenous version of the Defense System Xc.

[1697] In some embodiments, the bacteria do not express an endogenous version of the combination of Defense Systems selected from combinations disclosed herein above, of any of Defense Systems Ia-Xc. In some embodiments, the bacteria do not express a functional endogenous version of the combination of Defense Systems selected from combinations disclosed herein above, of any of Defense Systems Ia-Xc.

[1698] A skilled artisan would appreciate that various modalities may be used to introduce or express a defense system comprising a Defense System Ia-Xc or a combination thereof, or the components of a Defense System Ia-Xc, in the bacteria.

[1699] In some embodiments, the method is effected by expressing in the bacteria, an isolated nucleic acid sequence(s), nucleic acid construct or construct or alternatively introducing the component polypeptides of a Defense System or a combination of Defense Systems, as described herein, to confer protection. In some embodiments, protection comprises an anti-phage activity. In some embodiments, protection comprises an anti-plasmid activity. In some embodiments, protection comprises a combination of an anti-phage activity and an anti-plasmid activity. Alternatively, or additionally, the defense system comprising a Defense System or a combination of Defense Systems, is introduced into the bacteria via transmissible genetic element in a process of bacterial conjugation.

[1700] In some embodiments, there is provided a method of protecting bacteria from phage infection, or plasmid transformation, or phage infection and plasmid transformation, the method comprising introducing into the bacteria a defense system having an anti-phage activity, or an anti-plasmid activity, or an anti-phage activity and an anti-plasmid activity, wherein said bacteria is a first bacteria and said introducing into said bacteria said defense system comprising a Defense System selected from Defense Systems Ia-Xc or a combination of Defense Systems selected from Defense Systems Ia-Xc, comprises contacting said first bacteria with a second bacteria expressing said defense system comprising a Defense System selected from Defense Systems Ia-Xc or a combination of Defense Systems selected from Defense Systems Ia-Xc on a transmissible genetic element.

[1701] In some embodiments, a transmissible genetic element comprises a defense system comprising a Defense System selected from Defense Systems Ia-Xc or a combination of Defense Systems selected from Defense Systems Ia-Xc, as described herein in detail above. In some embodiments, the transmissible genetic element comprises a conjugative genetic element or a mobilized genetic element. In some embodiments, a transmissible genetic element comprises a plasmid or a transposon.

[1702] A skilled artisan would appreciate that the phrase “bacterial conjugation” encompasses a direct transfer of genetic material between bacterial cells by cell-to-cell contact or by bridge-like connection between the cells. During conjugation the donor bacterium provides a transmissible genetic element, typically a plasmid or a transposon. The transfer of the transmissible genetic element takes advantage of the complementary nature of double stranded DNA. Thus, one strand of the transmissible genetic element is transferred, and the other remains in the original bacteria. Both strands have the complementary stranded added so that each bacterium ends up with a complete transmissible element.

[1703] According to some embodiments, contacting a first bacteria with second bacteria comprise the step of incubating the bacterial cell (e.g., first bacteria) with a substance or cell (e.g., second bacteria) such that the substance or a substance contained in the cell affects the bacterial cell resistance to phage infection, or to plasmid transformation, or to phage infection and plasmid transformation.

[1704] In some embodiments, the first bacteria and the second bacteria are non-identical.

[1705] In some embodiments, the first bacteria do not express an endogenous defense system comprising a Defense System selected from Defense Systems Ia-Xc or a combination of Defense Systems selected from Defense Systems Ia-Xc. In some embodiments, the first bacteria do not express an endogenous functional defense system comprising a Defense System selected from Defense Systems Ia-Xc or a combination of Defense Systems selected from Defense Systems Ia-Xc.

[1706] In some embodiments, the first bacteria is a commercially valuable bacteria such as those used for fermentation as described above. Thus, following the above teachings, in some embodiments, there is provided isolated bacteria comprising a nucleic acid sequence encoding a defense system comprising a Defense System selected from Defense Systems Ia-Xc or a combination of Defense Systems selected from Defense Systems Ia-Xc, said system having an anti-phage activity and a transmissible genetic element expressing the defense system comprising a Defense System selected from Defense Systems Ia-Xc or a combination of Defense Systems selected from Defense Systems Ia-Xc, wherein the isolated bacteria does not express an endogenous functional defense system comprising a Defense System selected from Defense Systems Ia-Xc or a combination of Defense Systems selected from Defense Systems Ia-Xc.

[1707] In some embodiments, the first bacteria is a commercially valuable bacteria such as those used for fermentation as described above. Thus, following the above teachings, in some embodiments, there is provided isolated bacteria comprising a nucleic acid sequence encoding a defense system comprising a Defense System selected from Defense Systems Ia-Xc or a combination of Defense Systems selected from Defense Systems Ia-Xc, said system having an anti-plasmid activity and a transmissible genetic element expressing the defense system comprising a Defense System selected from Defense Systems Ia-Xc or a combination of Defense Systems selected from Defense Systems Ia-Xc, wherein the isolated bacteria does not express an endogenous functional defense system comprising a Defense System selected from Defense Systems Ia-Xc or a combination of Defense Systems selected from Defense Systems Ia-Xc.

[1708] In some embodiments, the first bacteria is a commercially valuable bacteria such as those used for fermentation as described above. Thus, following the above teachings, in some embodiments, there is provided isolated bacteria comprising a nucleic acid sequence encoding a defense system comprising a Defense System selected from Defense Systems Ia-Xc or a combination of Defense Systems selected from Defense Systems Ia-Xc, said system having an anti-phage activity and anti-plasmid activity, and a transmissible genetic element expressing the defense system comprising a Defense System selected from Defense Systems Ia-Xc or a combination of Defense Systems selected from Defense Systems Ia-Xc, wherein the isolated bacteria does not express an endogenous functional defense system comprising a Defense System selected from Defense Systems Ia-Xc or a combination of Defense Systems selected from Defense Systems Ia-Xc.

[1709] In some embodiments, a cell comprises a host cell. In some embodiments, a host cell comprises bacteria. In some embodiments, a cell comprises bacteria. In some embodiments, a host cell comprises a microbial cell. In some embodiments, a cell comprises a microbial cell. In some embodiments, the cell is an isolated cell. In some embodiments, bacteria are isolated bacteria. In some embodiments, a cell comprises isolated microbial cells. In some embodiments, the cell is a microbial cell such as bacteria, e.g., Gram-positive or Gram-negative bacteria. In some embodiments, the bacteria comprise Gram-negative bacteria or Negativicutes that stain negative in Gram stain. In some embodiments, a host cell comprises gram-positive bacteria, gram-negative bacteria, or archaea.

[1710] In some embodiments, Gram-negative bacteria comprise Acinetobacter calcoaceticus, Actinobacillus actinomycetemcomitans, Aeromonas hydrophila, Alcaligenes xylosoxidans, Bacteroides, Bacteroides fragilis, Bartonella bacilliformis, Bordetella spp., Borrelia burgdorferi, Branhamella catarrhalis, Brucella spp., Campylobacter spp., Chalmydia pneumoniae, Chlamydia psittaci, Chlamydia trachomatis, Chromobacterium violaceum, Citrobacter spp., Eikenella corrodens, Enterobacter aerogenes, Escherichia coli, Flavobacterium meningosepticum, Fusobacterium spp., Haemophilus influenzae, Haemophilus spp., Helicobacter pylori, Klebsiella spp., Legionella spp., Leptospira spp., Moraxella catarrhalis, Morganella morganii, Mycoplasma pneumoniae, Neisseria gonorrhoeae, Neisseria meningitidis, Pasteurella multocida, Plesiomonas shigelloides, Prevotella spp., Proteus spp., Providencia rettgeri, Pseudomonas aeruginosa, Pseudomonas spp., Rickettsia prowazekii, Rickettsia rickettsii, Rochalimaea spp., Salmonella spp., Salmonella typhi, Serratia marcescens, Shigella spp., Treponema carateum, Treponema pallidum, Treponema pallidum endemicum, Treponema pertenue, Veillonella spp., Vibrio cholerae, Vibrio vulnificus, Yersinia enterocolitica, Yersinia pestis.

[1711] In some embodiments, the bacteria comprise gammaproteobacteria (e.g. Escherichia coli, pseudomonas, vibrio and klebsiella) or Firmicutes (belonging to class Negativicutes that stain negative in Gram stain).

[1712] In some embodiments, Gram-positive bacteria comprise Actinomyces spp., Bacillus anthracis, Bifidobacterium spp., Clostridium botulinum, Clostridium perfringens, Clostridium spp., Clostridium tetani, Corynebacterium diphtheriae, Corynebacterium jeikeium, Enterococcus faecalis, Enterococcus faecium, Erysipelothrix rhusiopathiae, Eubacterium spp., Gardnerella vaginalis, Gemella morbillorum, Leuconostoc spp., Mycobacterium abcessus, Mycobacterium avium complex, Mycobacterium chelonae, Mycobacterium fortuitum, Mycobacterium haemophilium, Mycobacterium kansasii, Mycobacterium leprae, Mycobacterium marinum, Mycobacterium scrofulaceum, Mycobacterium smegmatis, Mycobacterium terrae, Mycobacterium tuberculosis, Mycobacterium ulcerans, Nocardia spp., Peptococcus niger, Peptostreptococcus spp., Proprionibacterium spp., Staphylococcus aureus, Staphylococcus auricularis, Staphylococcus capitis, Staphylococcus cohnii, Staphylococcus epidermidis, Staphylococcus haemolyticus, Staphylococcus hominis, Staphylococcus lugdanensis, Staphylococcus saccharolyticus, Staphylococcus saprophyticus, Staphylococcus schleiferi, Staphylococcus similans, Staphylococcus warneri, Staphylococcus xylosus, Streptococcus agalactiae (group B streptococcus), Streptococcus anginosus, Streptococcus bovis, Streptococcus canis, Streptococcus equi, Streptococcus milleri, Streptococcus mitior, Streptococcus mutans, Streptococcus pneumoniae, Streptococcus pyogenes (group A streptococcus), Streptococcus salivarius, Streptococcus sanguis.

[1713] In some embodiments the bacteria is a species selected from the group consisting of Escherichia, Shigella, Salmonella, Erwinia, Yersinia, Bacillus, Vibrio, Legionella, Pseudomonas, Neisseria, Bordetella, Helicobacter, Listeria, Agrobacterium, Staphylococcus, Streptococcus, Enterococcus, Clostridium, Corynebacterium, Mycobacterium, Treponema, Borrelia, Francisella, Brucella, Campylobacter, Klebsiella, Frankia, Bartonella, Rickettsia, Shewanella, Serratia, Enterobacter, Proteus, Providencia, Brochothrix, and Brevibacterium.

[1714] In some embodiments, there is provided herein a cell (e.g., bacteria) expressing at least one component of a defense system. In some embodiments, the cell is genetically modified. In some embodiments, the cell comprises an isolated cell. The components of defense systems comprising a Defense System Ia-Xc and combinations thereof, have been described in detail above. In some embodiments, polypeptide components of these systems include but are not limited to ZorA, ZorB, ZorC, ZorD, ZorE (Defense System Ia and Ib); ThsA and ThsB (Defense System II); DruA, DruB, DruC, DruD, DruE, DruH, DruM, DruG, DruF (Defense Systems IIIa, IIIb, IIIc); HamA and HamB (Defense System IV); SduA (Defense System V); GajA and GajB (Defense System VI); PtuA and PtuB (Defense System VII); LmuA and LmuB (Defense System VIII); KwaA and KwaB (Defense System IX); and JetA, JetB, JetC, and JetD, and variants thereof (Defense Systems Xa, Xb, Xc). In some embodiments, polynucleotide (e.g., gene) components, include but are not limited to zorA, zorB, zorC, zorD, zorE (Defense Systems Ia, Ib); thsA and thsB (Defense System II); druA, druB, druC, druD, druE, druF, druG, druH, druM (Defense Systems IIIa, IIIb, IIIc); hamA and hamB (Defense System IV); sduA (Defense System V); gajA and gajB (Defense System VI); ptuA and ptuB (Defense System VII); lmuA and lmuB (Defense System VIII); kwaA and kwaB (Defense System IX); and jetA, jetB, jetC, and jetD and variants thereof (Defense Systems Xa, Xb, Xc).

[1715] In some embodiments, a cell is genetically modified to express at least 2, at least 3, or at least 4 of the components of an anti-nucleic acid defense system comprising a Defense System of Ia-Xc, or a combination thereof. In some embodiments, the cell is genetically modified to express a functional anti-nucleic acid defense system. In some embodiments, the cell is genetically modified to express the components necessary for a functional anti-nucleic acid defense system. In some embodiments, the cell is genetically modified to expression any combination of components of a Defense System Ia, any combination of components of a Defense System Ib, any combination of components of a Defense System II, any combination of components of a Defense System IIIa, any combination of components of a Defense System IIIb, any combination of components of a Defense System IIIc, any combination of components of a Defense System IV, any combination of components of a Defense System V, any combination of components of a Defense System VI, any combination of components of a Defense System VII, any combination of components of a Defense System VIII, any combination of components of a Defense System IX, any combination of components of a Defense System Xa, any combination of components of a Defense System Xb, or any combination of components of a Defense System Xc. In some embodiments, a cell is genetically modified to express all of the components of a Defense System.

[1716] In some embodiments, a cell is genetically modified to express at least 2, 3, 4, or 5 components of a Defense System or combination of Defense systems, as described herein. In some embodiments, a cell is genetically modified to express at least 2, 3, 4, or 5 functional components of a Defense System or combination of Defense systems, as described herein, wherein the cell comprises the anti-phage, or anti-plasmid, or anti-phage and anti-plasmid resistance provide by each of the functional Defense Systems.

[1717] In some embodiments, a cell that has been genetically modified to express a defense system comprising a Defense System of Ia-Xc or a combination thereof, has an anti-phage activity. In some embodiments, a cell that has been genetically modified to express a defense system comprising a Defense System of Ia-Xc or a combination thereof, has an anti-plasmid activity. In some embodiments, a cell that has been genetically modified to express a defense system comprising a Defense System of Ia-Xc or a combination thereof, has an anti-phage activity and an anti-plasmid activity.

[1718] In some embodiments, a cell (e.g., bacterial cell) does not express an endogenous defense system comprising any one of Defense Systems Ia-Xc, or any combination thereof. In some embodiments, the cell expressing a defense system described herein (e.g., bacterial cell expressing a Defense System of Ia-Xc, or any combination thereof) does not endogenously express the defense system comprising any one of a the Defense Systems of Ia-Xc, or any combination thereof.

[1719] In some embodiments, the cell expressing a defense system (e.g., bacterial cell) is resistant to infection by at least one phage. In some embodiments the cell is resistant to at least one lytic phage. In some embodiments, the cell is resistant to at least one temperate (also referred as lysogenic) phage. In some embodiments, the cell is resistant to phage lysogeny. In some embodiments, the cell is resistant to phage DNA replication. In some embodiments, the cell is resistant to plasmid transformation. In some embodiments, the cell is resistant to infection by at least one phage and is resistant to plasmid transformation.

[1720] Phage contamination is now considered to be a main cause of slow fermentation or complete starter failure. The lack of bacteria which survive adequately can result in milk products which do not have a desirable taste. Thus, a goal of scientists working to produce better milk products lies in providing bacteria which have all the characteristics associated with production of a good flavor and which are able to resist infection by phages.

[1721] In some embodiments, the bacteria may be useful in the manufacture of dairy and fermentation processing such as, but not limited to, milk-derived products, such as cheeses, yogurt, fermented milk products, sour milks, and buttermilk. In some embodiments, the bacteria are useful as a part of the starter culture in the manufacture of dairy and fermentation processing. In some embodiments, the starter culture is a food grade starter culture.

[1722] A bacterium traditionally used in the production of milk products is S. thermophilus. It is particularly employed in the production of yogurt, mozzarella and Swiss type cheeses. One problem with S. thermophilus is that it is extremely sensitive to phage infection.

[1723] In some embodiments, the bacteria are lactic acid bacteria. A skilled artisan would appreciate that the term “lactic acid bacteria” encompasses Gram positive, microaerophillic or anaerobic bacteria which ferment sugar with the production of acids including lactic acid as the predominantly produced acid, acetic acid, formic acid and propionic acid.

[1724] In some embodiments, bacteria used in methods disclosed herein, are selected from a species selected from the group of the industrially most useful lactic acid bacteria comprising Lactococcus species, Streptococcus species, Lactobacillus species, Leuconostoc species, Oenococcus species, Pediococcus species, Bifidobacterium species, and Propionibacterium species. In some embodiments, bacteria protected in a method of protecting bacteria from phage infection comprises bacteria selected from a Lactococcus species, a Streptococcus species, a Lactobacillus species, a Leuconostoc species, a Oenococcus species, a Pediococcus species, a Bifidobacterium, and a Propionibacterium species. In some embodiments a method of protecting bacteria from phage infection comprises protecting a Lactococcus species of bacteria. In some embodiments a method of protecting bacteria from phage infection comprises protecting a Streptococcus species of bacteria. In some embodiments a method of protecting bacteria from phage infection comprises protecting a Lactobacillus species of bacteria. In some embodiments a method of protecting bacteria from phage infection comprises protecting a Leuconostoc species of bacteria. In some embodiments a method of protecting bacteria from phage infection comprises protecting a Oenococcus species of bacteria. In some embodiments a method of protecting bacteria from phage infection comprises protecting a Pediococcus species of bacteria. In some embodiments a method of protecting bacteria from phage infection comprises protecting a Bifidobacterium of bacteria. In some embodiments a method of protecting bacteria from phage infection comprises protecting a Propionibacterium species of bacteria.

[1725] In some embodiments, bacteria protected in a method of protecting bacteria from plasmid transformation comprises bacteria selected from a Lactococcus species, a Streptococcus species, a Lactobacillus species, a Leuconostoc species, a Oenococcus species, a Pediococcus species, a Bifidobacterium species, and a Propionibacterium species. In some embodiments, bacteria protected in a method of protecting bacteria from plasmid transformation comprises bacteria selected from a Lactococcus species, a Streptococcus species, a Lactobacillus species, a Leuconostoc species, a Oenococcus species, a Pediococcus species, a Bifidobacterium, and a Propionibacterium species. In some embodiments a method of protecting bacteria from plasmid transformation comprises protecting a Lactococcus species of bacteria. In some embodiments a method of protecting bacteria from plasmid transformation comprises protecting a Streptococcus species of bacteria. In some embodiments a method of protecting bacteria from plasmid transformation comprises protecting a Lactobacillus species of bacteria. In some embodiments a method of protecting bacteria from plasmid transformation comprises protecting a Leuconostoc species of bacteria. In some embodiments a method of protecting bacteria from plasmid transformation comprises protecting a Oenococcus species of bacteria. In some embodiments a method of protecting bacteria from plasmid transformation comprises protecting a Pediococcus species of bacteria. In some embodiments a method of protecting bacteria from plasmid transformation comprises protecting a Bifidobacterium of bacteria. In some embodiments a method of protecting bacteria from plasmid transformation comprises protecting a Propionibacterium species of bacteria.

[1726] In some embodiments, bacteria protected in a method of protecting bacteria from phage infection and plasmid transformation comprises bacteria selected from a Lactococcus species, a Streptococcus species, a Lactobacillus species, a Leuconostoc species, a Oenococcus species, a Pediococcus species, a Bifidobacterium species, and a Propionibacterium species. In some embodiments, bacteria protected in a method of protecting bacteria from phage infection and plasmid transformation comprises bacteria selected from a Lactococcus species, a Streptococcus species, a Lactobacillus species, a Leuconostoc species, a Oenococcus species, a Pediococcus species, a Bifidobacterium, and a Propionibacterium species. In some embodiments a method of protecting bacteria from phage infection and plasmid transformation comprises protecting a Lactococcus species of bacteria. In some embodiments a method of protecting bacteria from phage infection and plasmid transformation comprises protecting a Streptococcus species of bacteria. In some embodiments a method of protecting bacteria from phage infection and plasmid transformation comprises protecting a Lactobacillus species of bacteria. In some embodiments a method of protecting bacteria from phage infection and plasmid transformation comprises protecting a Leuconostoc species of bacteria. In some embodiments a method of protecting bacteria from phage infection and plasmid transformation comprises protecting a Oenococcus species of bacteria. In some embodiments a method of protecting bacteria from phage infection and plasmid transformation comprises protecting a Pediococcus species of bacteria. In some embodiments a method of protecting bacteria from phage infection and plasmid transformation comprises protecting a Bifidobacterium of bacteria. In some embodiments a method of protecting bacteria from phage infection and plasmid transformation comprises protecting a Propionibacterium species of bacteria.

[1727] In some embodiments, a host cell comprises a defense system comprising a Defense System selected from Defense Systems Ia-Xc or a combination of Defense Systems selected from Defense Systems Ia-Xc. In some embodiments, a cell comprises a defense system comprising a Defense System selected from Defense Systems Ia-Xc or a combination of Defense Systems selected from Defense Systems Ia-Xc. In some embodiments, bacteria comprise a defense system comprising a Defense System selected from Defense Systems Ia-Xc or a combination of Defense Systems selected from Defense Systems Ia-Xc.

[1728] In some embodiments, a cell comprises a transmissible genetic element comprising a defense system comprising a Defense System selected from Defense Systems Ia-Xc or a combination of Defense Systems selected from Defense Systems Ia-Xc. In some embodiments, bacteria comprise a transmissible genetic element comprising a defense system comprising a Defense System selected from Defense Systems Ia-Xc or a combination of Defense Systems selected from Defense Systems Ia-Xc.

[1729] In some embodiments, an expression vector comprises a defense system comprising a Defense System selected from Defense Systems Ia-Xc or a combination of Defense Systems selected from Defense Systems Ia-Xc. In some embodiments, a cell comprises an expression vector comprising a defense system comprising a Defense System selected from Defense Systems Ia-Xc or a combination of Defense Systems selected from Defense Systems Ia-Xc. In some embodiments, bacteria comprise an expression vector comprising a defense system comprising a Defense System selected from Defense Systems Ia-Xc or a combination of Defense Systems selected from Defense Systems Ia-Xc. In some embodiments, an expression vector comprises multiple vectors each comprising a construct comprising a Defense System selected from Ia-Xc. In some embodiments, an expression vector comprises multiple vectors each encoding a polypeptide component or functional portion of a polypeptide component of a Defense System Ia-Xc construct.

[1730] In some embodiments, a cell comprising a defense system comprising a Defense System selected from Defense Systems Ia-Xc or a combination of Defense Systems selected from Defense Systems Ia-Xc, as disclosed herein, is resistant to at least one phage. In some embodiments, a cell comprising a defense system comprising a Defense System selected from Defense Systems Ia-Xc or a combination of Defense Systems selected from Defense Systems Ia-Xc, as disclosed herein, is resistant to plasmid transformation. In some embodiments, a cell comprising a defense system comprising a Defense System selected from Defense Systems Ia-Xc or a combination of Defense Systems selected from Defense Systems Ia-Xc, as disclosed herein, is resistant to at least one phage and is resistant to plasmid transformation.

[1731] In some embodiments, a cell comprising a transmissible element comprising a defense system comprising a Defense System selected from Defense Systems Ia-Xc or a combination of Defense Systems selected from Defense Systems Ia-Xc, as disclosed herein, is resistant to at least one phage. In some embodiments, a cell comprising a transmissible element comprising a defense system comprising a Defense System selected from Defense Systems Ia-Xc or a combination of Defense Systems selected from Defense Systems Ia-Xc, as disclosed herein, is resistant to plasmid transformation. In some embodiments, a cell comprising a transmissible element comprising a defense system comprising a Defense System selected from Defense Systems Ia-Xc or a combination of Defense Systems selected from Defense Systems Ia-Xc, as disclosed herein, is resistant to at least one phage and is resistant to plasmid transformation.

[1732] In some embodiments, a cell comprising an expression vector comprising a defense system comprising a Defense System selected from Defense Systems Ia-Xc or a combination of Defense Systems selected from Defense Systems Ia-Xc, as disclosed herein, is resistant to at least one phage. In some embodiments, a cell comprising an expression vector comprising a defense system comprising a Defense System selected from Defense Systems Ia-Xc or a combination of Defense Systems selected from Defense Systems Ia-Xc, as disclosed herein, is resistant to plasmid transformation. In some embodiments, a cell comprising an expression vector comprising a defense system comprising a Defense System selected from Defense Systems Ia-Xc or a combination of Defense Systems selected from Defense Systems Ia-Xc, as disclosed herein, is resistant to at least one phage and is resistant to plasmid transformation.

[1733] Cultures, and starter cultures, in particular are used extensively in the food industry in the manufacture of fermented products including milk products (e.g., yogurt, buttermilk, and cheese), meat products, bakery products, wine, and vegetable products. The preparation of cultures is labor intensive, occupying much space and equipment, and there is a considerable risk of contamination with spoilage bacteria and/or phages during the propagation steps. The failure of bacterial cultures due to phage infection and multiplication is a major problem with the industrial use of bacterial cultures. There are many different types of phages and new strains continue to emerge. Indeed, despite advances in culture development, there is a continuing need to improve cultures for use in industry.

[1734] In some embodiments, there is provided a method of preparing a food, the method comprising adding to the food at least one defense system, said defense system comprising a Defense System selected from Defense Systems Ia-Xc or a combination of Defense Systems selected from Defense Systems Ia-Xc, thereby preparing the food. In some embodiments, a food comprises an alcoholic beverage.

[1735] In some embodiments, an alcoholic beverage comprises a wine or a sake. In some embodiments, provided herein is a method of preparing an alcoholic beverage, the method comprising adding to the alcoholic beverage at least on defense system comprising a Defense System selected from Defense Systems Ia-Xc or a combination of Defense Systems selected from Defense Systems Ia-Xc, thereby preparing the alcoholic beverage. In some embodiments, provided herein is a method of preparing a wine, the method comprising adding to the wine at least on defense system comprising a Defense System selected from Defense Systems Ia-Xc or a combination of Defense Systems selected from Defense Systems Ia-Xc, thereby preparing the wine. In some embodiments, provided herein is a method of preparing a sake, the method comprising adding to the sake at least on defense system comprising a Defense System selected from Defense Systems Ia-Xc or a combination of Defense Systems selected from Defense Systems Ia-Xc, thereby preparing the sake.

[1736] In some embodiments, a food comprises a dairy product. In some embodiments, a dairy product comprises a milk product, a sour milk, a buttermilk, a milk, a cheese, a yogurt, viili, yakult, or casein. In some embodiments, a food comprises natto.

[1737] In some embodiments, provided herein is a method of preparing a dairy product, the method comprising adding to the dairy product at least on defense system comprising a Defense System selected from Defense Systems Ia-Xc or a combination of Defense Systems selected from Defense Systems Ia-Xc, thereby preparing the dairy product. In some embodiments, provided herein is a method of preparing a milk product, the method comprising adding to the milk product at least on defense system comprising a Defense System selected from Defense Systems Ia-Xc or a combination of Defense Systems selected from Defense Systems Ia-Xc, thereby preparing the milk product. In some embodiments, provided herein is a method of preparing milk, the method comprising adding to the milk at least on defense system comprising a Defense System selected from Defense Systems Ia-Xc or a combination of Defense Systems selected from Defense Systems Ia-Xc, thereby preparing the milk. In some embodiments, provided herein is a method of preparing a sour milk, the method comprising adding to the sour milk at least on defense system comprising a Defense System selected from Defense Systems Ia-Xc or a combination of Defense Systems selected from Defense Systems Ia-Xc, thereby preparing the sour milk. In some embodiments, provided herein is a method of preparing a butter milk, the method comprising adding to the butter milk at least on defense system comprising a Defense System selected from Defense Systems Ia-Xc or a combination of Defense Systems selected from Defense Systems Ia-Xc, thereby preparing the butter milk. In some embodiments, provided herein is a method of preparing a cheese, the method comprising adding to the cheese at least on defense system comprising a Defense System selected from Defense Systems Ia-Xc or a combination of Defense Systems selected from Defense Systems Ia-Xc, thereby preparing the cheese. In some embodiments, provided herein is a method of preparing a yogurt the method comprising adding to the yogurt at least on defense system comprising a Defense System selected from Defense Systems Ia-Xc or a combination of Defense Systems selected from Defense Systems Ia-Xc, thereby preparing the yogurt. In some embodiments, provided herein is a method of preparing a viili the method comprising adding to the viili at least on defense system comprising a Defense System selected from Defense Systems Ia-Xc or a combination of Defense Systems selected from Defense Systems Ia-Xc, thereby preparing the viili. In some embodiments, provided herein is a method of preparing a yakult the method comprising adding to the yakult at least on defense system comprising a Defense System selected from Defense Systems Ia-Xc or a combination of Defense Systems selected from Defense Systems Ia-Xc, thereby preparing the yakult. In some embodiments, provided herein is a method of preparing a casein, the method comprising adding to the casein at least on defense system comprising a Defense System selected from Defense Systems Ia-Xc or a combination of Defense Systems selected from Defense Systems Ia-Xc, thereby preparing the casein.

[1738] In some embodiments, provided herein is a method of preparing a natto, the method comprising adding to the natto at least on defense system comprising a Defense System selected from Defense Systems Ia-Xc or a combination of Defense Systems selected from Defense Systems Ia-Xc, thereby preparing the natto.

[1739] In some embodiments, there is provided a method of preparing a food additive, the method comprising adding to the food additive, at least one defense system components, said defense system comprising a Defense System selected from Defense Systems Ia-Xc or a combination of Defense Systems selected from Defense Systems Ia-Xc, thereby preparing the food additive.

[1740] In some embodiments, there is provided a method of preparing a feed, the method comprising adding to the feed at least one defense system components, said defense system comprising a Defense System selected from Defense Systems Ia-Xc or a combination of Defense Systems selected from Defense Systems Ia-Xc, thereby preparing the feed.

[1741] In some embodiments, there is provided a method of preparing a nutritional supplement, the method comprising adding to the nutritional supplement at least one defense system components, said defense system comprising a Defense System selected from Defense Systems Ia-Xc or a combination of Defense Systems selected from Defense Systems Ia-Xc, thereby preparing the nutritional supplement.

[1742] In some embodiments, there is provided a method of preparing a probiotic supplement, the method comprising adding to the probiotic supplement, said defense system comprising a Defense System selected from Defense Systems Ia-Xc or a combination of Defense Systems selected from Defense Systems Ia-Xc, thereby preparing the probiotic supplement.

[1743] In some embodiments, there is provided a method of preparing a health care product, the method comprising adding to the health care product at least one defense system components, said defense system comprising a Defense System selected from Defense Systems Ia-Xc or a combination of Defense Systems selected from Defense Systems Ia-Xc, thereby preparing the health care product. In some embodiments, a health care product comprises an antibiotic.

[1744] In some embodiments, there is provided a method of preparing an antibiotic, the method comprising adding to the antibiotic, said defense system comprising a Defense System selected from Defense Systems Ia-Xc or a combination of Defense Systems selected from Defense Systems Ia-Xc, thereby preparing the antibiotic. In some embodiments, an antibiotic comprises a polymyxin, a colistin, or a bacitracin.

[1745] In some embodiments, there is provided a method of preparing a polymyxin, the method comprising adding to the polymyxin, said defense system comprising a Defense System selected from Defense Systems Ia-Xc or a combination of Defense Systems selected from Defense Systems Ia-Xc, thereby preparing the polymyxin. In some embodiments, there is provided a method of preparing colistin, the method comprising adding to the colistin, said defense system comprising a Defense System selected from Defense Systems Ia-Xc or a combination of Defense Systems selected from Defense Systems Ia-Xc, thereby preparing the colistin. In some embodiments, there is provided a method of preparing a bacitracin, the method comprising adding to the bacitracin, said defense system comprising a Defense System selected from Defense Systems Ia-Xc or a combination of Defense Systems selected from Defense Systems Ia-Xc, thereby preparing the bacitracin.

[1746] In some embodiments, there is provided a method of preparing a personal care product, the method comprising adding to the personal care product at least one defense system components, said defense system comprising a Defense System selected from Defense Systems Ia-Xc or a combination of Defense Systems selected from Defense Systems Ia-Xc, thereby preparing the personal care product.

[1747] In some embodiments, there is provided a method of preparing a veterinary product, the method comprising adding to the veterinary product at least one defense system components, said defense system comprising a Defense System selected from Defense Systems Ia-Xc or a combination of Defense Systems selected from Defense Systems Ia-Xc, thereby preparing veterinary product.

[1748] In some embodiments, there is provided a method of preparing a L-glutamine, the method comprising adding to the L-glutamine at least one defense system components, said defense system comprising a Defense System selected from Defense Systems Ia-Xc or a combination of Defense Systems selected from Defense Systems Ia-Xc, thereby preparing L-glutamine.

[1749] In some embodiments, there is provided a method of preparing acetone, the method comprising adding to the acetone at least one defense system components, said defense system comprising a Defense System selected from Defense Systems Ia-Xc or a combination of Defense Systems selected from Defense Systems Ia-Xc, thereby preparing acetone.

[1750] In some embodiments, there is provided a method of preparing butanol, the method comprising adding to the butanol at least one defense system components, said defense system comprising a Defense System selected from Defense Systems Ia-Xc or a combination of Defense Systems selected from Defense Systems Ia-Xc, thereby preparing butanol.

[1751] Thus, following the above teachings, in some embodiments, there is provided a food, food additive, feed, nutritional supplement, probiotic supplement, personal care product, health care product and veterinary product comprising at least one components of a defense system, said defense system comprising a Defense System selected from Defense Systems Ia-Xc or a combination of Defense Systems selected from Defense Systems Ia-Xc, as described in details herein. In some embodiments, a food, food additive, feed, nutritional supplement, probiotic supplement, personal care product, health care product and veterinary product comprises at least one functional component of a defense system, said defense system comprising a Defense System selected from Defense Systems Ia-Xc or a combination of Defense Systems selected from Defense Systems Ia-Xc, as described in detail herein. In some embodiments, there is provided a food, food additive, feed, nutritional supplement, probiotic supplement, personal care product, health care product and veterinary product comprising a functional defense system, said defense system comprising a functional Defense System selected from Defense Systems Ia-Xc or a combination of functional Defense Systems selected from Defense Systems Ia-Xc, as described in detail herein.

[1752] In some embodiments, there is provided a starter culture comprising at least one components of a defense system, said defense system comprising a Defense System selected from Defense Systems Ia-Xc or a combination of Defense Systems selected from Defense Systems Ia-Xc, as described in detail herein. In some embodiments, a started culture comprises at least one functional component of a defense system, said defense system comprising a Defense System selected from Defense Systems Ia-Xc or a combination of Defense Systems selected from Defense Systems Ia-Xc, as described in detail herein. In some embodiments, there is provided a starter culture comprising a functional defense system, said defense system comprising a functional Defense System selected from Defense Systems Ia-Xc or a combination of functional Defense Systems selected from Defense Systems Ia-Xc, as described in detail herein.

[1753] In some embodiments, there is provided a food comprising at least one components of a defense system, said defense system comprising a Defense System selected from Defense Systems Ia-Xc or a combination of Defense Systems selected from Defense Systems Ia-Xc, as described in detail herein. In some embodiments, a food comprises at least one functional component of a defense system, said defense system comprising a Defense System selected from Defense Systems Ia-Xc or a combination of Defense Systems selected from Defense Systems Ia-Xc, as described in detail herein. In some embodiments, there is provided a food comprising a functional defense system, said defense system comprising a functional Defense System selected from Defense Systems Ia-Xc or a combination of functional Defense Systems selected from Defense Systems Ia-Xc, as described in detail herein.

[1754] In some embodiments, a food comprises a dairy product. In some embodiments, a food comprises an alcoholic beverage. In some embodiments, a food comprises a natto.

[1755] In some embodiments, there is provided a dairy product comprising at least one components of a defense system, said defense system comprising a Defense System selected from Defense Systems Ia-Xc or a combination of Defense Systems selected from Defense Systems Ia-Xc, as described in detail herein. In some embodiments, a dairy product comprises at least one functional component of a defense system, said defense system comprising a Defense System selected from Defense Systems Ia-Xc or a combination of Defense Systems selected from Defense Systems Ia-Xc, as described in detail herein. In some embodiments, there is provided a dairy product comprising a functional defense system, said defense system comprising a functional Defense System selected from Defense Systems Ia-Xc or a combination of functional Defense Systems selected from Defense Systems Ia-Xc, as described in detail herein.

[1756] In some embodiments, there is provided a milk comprising at least one components of a defense system, said defense system comprising a Defense System selected from Defense Systems Ia-Xc or a combination of Defense Systems selected from Defense Systems Ia-Xc, as described in detail herein. In some embodiments, a milk comprises at least one functional component of a defense system, said defense system comprising a Defense System selected from Defense Systems Ia-Xc or a combination of Defense Systems selected from Defense Systems Ia-Xc, as described in detail herein. In some embodiments, there is provided a milk comprising a functional defense system, said defense system comprising a functional Defense System selected from Defense Systems Ia-Xc or a combination of functional Defense Systems selected from Defense Systems Ia-Xc, as described in detail herein.

[1757] In some embodiments, there is provided a milk product comprising at least one components of a defense system, said defense system comprising a Defense System selected from Defense Systems Ia-Xc or a combination of Defense Systems selected from Defense Systems Ia-Xc, as described in detail herein. In some embodiments, a milk product comprises at least one functional component of a defense system, said defense system comprising a Defense System selected from Defense Systems Ia-Xc or a combination of Defense Systems selected from Defense Systems Ia-Xc, as described in detail herein. In some embodiments, there is provided a milk product comprising a functional defense system, said defense system comprising a functional Defense System selected from Defense Systems Ia-Xc or a combination of functional Defense Systems selected from Defense Systems Ia-Xc, as described in detail herein.

[1758] In some embodiments, there is provided a sour milk comprising at least one components of a defense system, said defense system comprising a Defense System selected from Defense Systems Ia-Xc or a combination of Defense Systems selected from Defense Systems Ia-Xc, as described in detail herein. In some embodiments, a sour milk comprises at least one functional component of a defense system, said defense system comprising a Defense System selected from Defense Systems Ia-Xc or a combination of Defense Systems selected from Defense Systems Ia-Xc, as described in detail herein. In some embodiments, there is provided a sour milk comprising a functional defense system, said defense system comprising a functional Defense System selected from Defense Systems Ia-Xc or a combination of functional Defense Systems selected from Defense Systems Ia-Xc, as described in detail herein.

[1759] In some embodiments, there is provided a butter milk comprising at least one components of a defense system, said defense system comprising a Defense System selected from Defense Systems Ia-Xc or a combination of Defense Systems selected from Defense Systems Ia-Xc, as described in detail herein. In some embodiments, a butter milk comprises at least one functional component of a defense system, said defense system comprising a Defense System selected from Defense Systems Ia-Xc or a combination of Defense Systems selected from Defense Systems Ia-Xc, as described in detail herein. In some embodiments, there is provided a butter milk comprising a functional defense system, said defense system comprising a functional Defense System selected from Defense Systems Ia-Xc or a combination of functional Defense Systems selected from Defense Systems Ia-Xc, as described in detail herein.

[1760] In some embodiments, there is provided a cheese comprising at least one components of a defense system, said defense system comprising a Defense System selected from Defense Systems Ia-Xc or a combination of Defense Systems selected from Defense Systems Ia-Xc, as described in detail herein. In some embodiments, a cheese comprises at least one functional component of a defense system, said defense system comprising a Defense System selected from Defense Systems Ia-Xc or a combination of Defense Systems selected from Defense Systems Ia-Xc, as described in detail herein. In some embodiments, there is provided a cheese comprising a functional defense system, said defense system comprising a functional Defense System selected from Defense Systems Ia-Xc or a combination of functional Defense Systems selected from Defense Systems Ia-Xc, as described in detail herein.

[1761] In some embodiments, there is provided a yogurt comprising at least one components of a defense system, said defense system comprising a Defense System selected from Defense Systems Ia-Xc or a combination of Defense Systems selected from Defense Systems Ia-Xc, as described in detail herein. In some embodiments, a yogurt comprises at least one functional component of a defense system, said defense system comprising a Defense System selected from Defense Systems Ia-Xc or a combination of Defense Systems selected from Defense Systems Ia-Xc, as described in detail herein. In some embodiments, there is provided a yogurt comprising a functional defense system, said defense system comprising a functional Defense System selected from Defense Systems Ia-Xc or a combination of functional Defense Systems selected from Defense Systems Ia-Xc, as described in detail herein.

[1762] In some embodiments, there is provided a viili comprising at least one components of a defense system, said defense system comprising a Defense System selected from Defense Systems Ia-Xc or a combination of Defense Systems selected from Defense Systems Ia-Xc, as described in detail herein. In some embodiments, a viili comprises at least one functional component of a defense system, said defense system comprising a Defense System selected from Defense Systems Ia-Xc or a combination of Defense Systems selected from Defense Systems Ia-Xc, as described in detail herein. In some embodiments, there is provided a viili comprising a functional defense system, said defense system comprising a functional Defense System selected from Defense Systems Ia-Xc or a combination of functional Defense Systems selected from Defense Systems Ia-Xc, as described in detail herein.

[1763] In some embodiments, there is provided a yakult comprising at least one components of a defense system, said defense system comprising a Defense System selected from Defense Systems Ia-Xc or a combination of Defense Systems selected from Defense Systems Ia-Xc, as described in detail herein. In some embodiments, a yakult comprises at least one functional component of a defense system, said defense system comprising a Defense System selected from Defense Systems Ia-Xc or a combination of Defense Systems selected from Defense Systems Ia-Xc, as described in detail herein. In some embodiments, there is provided a yakult comprising a functional defense system, said defense system comprising a functional Defense System selected from Defense Systems Ia-Xc or a combination of functional Defense Systems selected from Defense Systems Ia-Xc, as described in detail herein.

[1764] In some embodiments, there is provided a casein comprising at least one components of a defense system, said defense system comprising a Defense System selected from Defense Systems Ia-Xc or a combination of Defense Systems selected from Defense Systems Ia-Xc, as described in detail herein. In some embodiments, a casein comprises at least one functional component of a defense system, said defense system comprising a Defense System selected from Defense Systems Ia-Xc or a combination of Defense Systems selected from Defense Systems Ia-Xc, as described in detail herein. In some embodiments, there is provided a casein comprising a functional defense system, said defense system comprising a functional Defense System selected from Defense Systems Ia-Xc or a combination of functional Defense Systems selected from Defense Systems Ia-Xc, as described in detail herein.

[1765] In some embodiments, there is provided an alcoholic beverage comprising at least one components of a defense system, said defense system comprising a Defense System selected from Defense Systems Ia-Xc or a combination of Defense Systems selected from Defense Systems Ia-Xc, as described in detail herein. In some embodiments, an alcoholic beverage comprises at least one functional component of a defense system, said defense system comprising a Defense System selected from Defense Systems Ia-Xc or a combination of Defense Systems selected from Defense Systems Ia-Xc, as described in detail herein. In some embodiments, there is provided an alcoholic beverage comprising a functional defense system, said defense system comprising a functional Defense System selected from Defense Systems Ia-Xc or a combination of functional Defense Systems selected from Defense Systems Ia-Xc, as described in detail herein. In some embodiments, an alcoholic beverage comprises a wine or a sake. In some embodiments, there is provided a wine comprising at least one components of a defense system, said defense system comprising a Defense System selected from Defense Systems Ia-Xc or a combination of Defense Systems selected from Defense Systems Ia-Xc, as described in detail herein. In some embodiments, a wine comprises at least one functional component of a defense system, said defense system comprising a Defense System selected from Defense Systems Ia-Xc or a combination of Defense Systems selected from Defense Systems Ia-Xc, as described in detail herein. In some embodiments, there is provided a wine comprising a functional defense system, said defense system comprising a functional Defense System selected from Defense Systems Ia-Xc or a combination of functional Defense Systems selected from Defense Systems Ia-Xc, as described in detail herein. In some embodiments, there is provided a sake comprising at least one components of a defense system, said defense system comprising a Defense System selected from Defense Systems Ia-Xc or a combination of Defense Systems selected from Defense Systems Ia-Xc, as described in detail herein. In some embodiments, a sake comprises at least one functional component of a defense system, said defense system comprising a Defense System selected from Defense Systems Ia-Xc or a combination of Defense Systems selected from Defense Systems Ia-Xc, as described in detail herein. In some embodiments, there is provided a sake comprising a functional defense system, said defense system comprising a functional Defense System selected from Defense Systems Ia-Xc or a combination of functional Defense Systems selected from Defense Systems Ia-Xc, as described in detail herein.

[1766] In some embodiments, there is provided a natto comprising at least one components of a defense system, said defense system comprising a Defense System selected from Defense Systems Ia-Xc or a combination of Defense Systems selected from Defense Systems Ia-Xc, as described in detail herein. In some embodiments, a natto comprises at least one functional component of a defense system, said defense system comprising a Defense System selected from Defense Systems Ia-Xc or a combination of Defense Systems selected from Defense Systems Ia-Xc, as described in detail herein. In some embodiments, there is provided a natto comprising a functional defense system, said defense system comprising a functional Defense System selected from Defense Systems Ia-Xc or a combination of functional Defense Systems selected from Defense Systems Ia-Xc, as described in detail herein.

[1767] In some embodiments, there is provided a food additive comprising at least one components of a defense system, said defense system comprising a Defense System selected from Defense Systems Ia-Xc or a combination of Defense Systems selected from Defense Systems Ia-Xc, as described in detail herein. In some embodiments, a food additive comprises at least one functional component of a defense system, said defense system comprising a Defense System selected from Defense Systems Ia-Xc or a combination of Defense Systems selected from Defense Systems Ia-Xc, as described in detail herein. In some embodiments, there is provided a food additive comprising a functional defense system, said defense system comprising a functional Defense System selected from Defense Systems Ia-Xc or a combination of functional Defense Systems selected from Defense Systems Ia-Xc, as described in detail herein.

[1768] In some embodiments, there is provided feed comprising at least one components of a defense system, said defense system comprising a Defense System selected from Defense Systems Ia-Xc or a combination of Defense Systems selected from Defense Systems Ia-Xc, as described in detail herein. In some embodiments, feed comprises at least one functional component of a defense system, said defense system comprising a Defense System selected from Defense Systems Ia-Xc or a combination of Defense Systems selected from Defense Systems Ia-Xc, as described in detail herein. In some embodiments, there is provided feed comprising a functional defense system, said defense system comprising a functional Defense System selected from Defense Systems Ia-Xc or a combination of functional Defense Systems selected from Defense Systems Ia-Xc, as described in detail herein.

[1769] In some embodiments, there is provided a nutritional supplement comprising at least one components of a defense system, said defense system comprising a Defense System selected from Defense Systems Ia-Xc or a combination of Defense Systems selected from Defense Systems Ia-Xc, as described in detail herein. In some embodiments, a nutritional supplement comprises at least one functional component of a defense system, said defense system comprising a Defense System selected from Defense Systems Ia-Xc or a combination of Defense Systems selected from Defense Systems Ia-Xc, as described in detail herein. In some embodiments, there is provided a nutritional supplement comprising a functional defense system, said defense system comprising a functional Defense System selected from Defense Systems Ia-Xc or a combination of functional Defense Systems selected from Defense Systems Ia-Xc, as described in detail herein.

[1770] In some embodiments, there is provided a probiotic supplement comprising at least one components of a defense system, said defense system comprising a Defense System selected from Defense Systems Ia-Xc or a combination of Defense Systems selected from Defense Systems Ia-Xc, as described in detail herein. In some embodiments, a probiotic supplement comprises at least one functional component of a defense system, said defense system comprising a Defense System selected from Defense Systems Ia-Xc or a combination of Defense Systems selected from Defense Systems Ia-Xc, as described in detail herein. In some embodiments, there is provided a probiotic supplement comprising a functional defense system, said defense system comprising a functional Defense System selected from Defense Systems Ia-Xc or a combination of functional Defense Systems selected from Defense Systems Ia-Xc, as described in detail herein.

[1771] In some embodiments, there is provided a health care product comprising at least one components of a defense system, said defense system comprising a Defense System selected from Defense Systems Ia-Xc or a combination of Defense Systems selected from Defense Systems Ia-Xc, as described in detail herein. In some embodiments, a health care product comprises at least one functional component of a defense system, said defense system comprising a Defense System selected from Defense Systems Ia-Xc or a combination of Defense Systems selected from Defense Systems Ia-Xc, as described in detail herein. In some embodiments, there is provided a health care product comprising a functional defense system, said defense system comprising a functional Defense System selected from Defense Systems Ia-Xc or a combination of functional Defense Systems selected from Defense Systems Ia-Xc, as described in detail herein.

[1772] In some embodiments, a health care product comprises an antibiotic. In some embodiments, there is provided an antibiotic comprising at least one components of a defense system, said defense system comprising a Defense System selected from Defense Systems Ia-Xc or a combination of Defense Systems selected from Defense Systems Ia-Xc, as described in detail herein. In some embodiments, an antibiotic comprises at least one functional component of a defense system, said defense system comprising a Defense System selected from Defense Systems Ia-Xc or a combination of Defense Systems selected from Defense Systems Ia-Xc, as described in detail herein. In some embodiments, there is provided an antibiotic comprising a functional defense system, said defense system comprising a functional Defense System selected from Defense Systems Ia-Xc or a combination of functional Defense Systems selected from Defense Systems Ia-Xc, as described in detail herein.

[1773] In some embodiments, an antibiotic comprises a polymyxin, a colistin, or a bacitracin. In some embodiments, there is provided a polymyxin comprising at least one components of a defense system, said defense system comprising a Defense System selected from Defense Systems Ia-Xc or a combination of Defense Systems selected from Defense Systems Ia-Xc, as described in detail herein. In some embodiments, a polymyxin comprises at least one functional component of a defense system, said defense system comprising a Defense System selected from Defense Systems Ia-Xc or a combination of Defense Systems selected from Defense Systems Ia-Xc, as described in detail herein. In some embodiments, there is provided a polymyxin comprising a functional defense system, said defense system comprising a functional Defense System selected from Defense Systems Ia-Xc or a combination of functional Defense Systems selected from Defense Systems Ia-Xc, as described in detail herein.

[1774] In some embodiments, there is provided a colistin comprising at least one components of a defense system, said defense system comprising a Defense System selected from Defense Systems Ia-Xc or a combination of Defense Systems selected from Defense Systems Ia-Xc, as described in detail herein. In some embodiments, a colistin comprises at least one functional component of a defense system, said defense system comprising a Defense System selected from Defense Systems Ia-Xc or a combination of Defense Systems selected from Defense Systems Ia-Xc, as described in detail herein. In some embodiments, there is provided a colistin comprising a functional defense system, said defense system comprising a functional Defense System selected from Defense Systems Ia-Xc or a combination of functional Defense Systems selected from Defense Systems Ia-Xc, as described in detail herein.

[1775] In some embodiments, there is provided a bacitracin comprising at least one components of a defense system, said defense system comprising a Defense System selected from Defense Systems Ia-Xc or a combination of Defense Systems selected from Defense Systems Ia-Xc, as described in detail herein. In some embodiments, a bacitracin comprises at least one functional component of a defense system, said defense system comprising a Defense System selected from Defense Systems Ia-Xc or a combination of Defense Systems selected from Defense Systems Ia-Xc, as described in detail herein. In some embodiments, there is provided a bacitracin comprising a functional defense system, said defense system comprising a functional Defense System selected from Defense Systems Ia-Xc or a combination of functional Defense Systems selected from Defense Systems Ia-Xc, as described in detail herein.

[1776] In some embodiments, there is provided a personal care product comprising at least one components of a defense system, said defense system comprising a Defense System selected from Defense Systems Ia-Xc or a combination of Defense Systems selected from Defense Systems Ia-Xc, as described in detail herein. In some embodiments, a personal care product comprises at least one functional component of a defense system, said defense system comprising a Defense System selected from Defense Systems Ia-Xc or a combination of Defense Systems selected from Defense Systems Ia-Xc, as described in detail herein. In some embodiments, there is provided a personal care product comprising a functional defense system, said defense system comprising a functional Defense System selected from Defense Systems Ia-Xc or a combination of functional Defense Systems selected from Defense Systems Ia-Xc, as described in detail herein.

[1777] In some embodiments, there is provided a veterinary product comprising at least one components of a defense system, said defense system comprising a Defense System selected from Defense Systems Ia-Xc or a combination of Defense Systems selected from Defense Systems Ia-Xc, as described in detail herein. In some embodiments, a veterinary product comprises at least one functional component of a defense system, said defense system comprising a Defense System selected from Defense Systems Ia-Xc or a combination of Defense Systems selected from Defense Systems Ia-Xc, as described in detail herein. In some embodiments, there is provided a veterinary product comprising a functional defense system, said defense system comprising a functional Defense System selected from Defense Systems Ia-Xc or a combination of functional Defense Systems selected from Defense Systems Ia-Xc, as described in detail herein.

[1778] In some embodiments, there is provided a L-glutamine comprising at least one components of a defense system, said defense system comprising a Defense System selected from Defense Systems Ia-Xc or a combination of Defense Systems selected from Defense Systems Ia-Xc, as described in detail herein. In some embodiments, a L-glutamine comprises at least one functional component of a defense system, said defense system comprising a Defense System selected from Defense Systems Ia-Xc or a combination of Defense Systems selected from Defense Systems Ia-Xc, as described in detail herein. In some embodiments, there is provided a L-glutamine comprising a functional defense system, said defense system comprising a functional Defense System selected from Defense Systems Ia-Xc or a combination of functional Defense Systems selected from Defense Systems Ia-Xc, as described in detail herein.

[1779] In some embodiments, there is provided an acetone comprising at least one components of a defense system, said defense system comprising a Defense System selected from Defense Systems Ia-Xc or a combination of Defense Systems selected from Defense Systems Ia-Xc, as described in detail herein. In some embodiments, an acetone comprises at least one functional component of a defense system, said defense system comprising a Defense System selected from Defense Systems Ia-Xc or a combination of Defense Systems selected from Defense Systems Ia-Xc, as described in detail herein. In some embodiments, there is provided an acetone comprising a functional defense system, said defense system comprising a functional Defense System selected from Defense Systems Ia-Xc or a combination of functional Defense Systems selected from Defense Systems Ia-Xc, as described in detail herein.

[1780] In some embodiments, there is provided butanol comprising at least one components of a defense system, said defense system comprising a Defense System selected from Defense Systems Ia-Xc or a combination of Defense Systems selected from Defense Systems Ia-Xc, as described in detail herein. In some embodiments, a butanol comprises at least one functional component of a defense system, said defense system comprising a Defense System selected from Defense Systems Ia-Xc or a combination of Defense Systems selected from Defense Systems Ia-Xc, as described in detail herein. In some embodiments, there is provided a butanol comprising a functional defense system, said defense system comprising a functional Defense System selected from Defense Systems Ia-Xc or a combination of functional Defense Systems selected from Defense Systems Ia-Xc, as described in detail herein.

[1781] In some embodiments, the nucleic acid construct of the Defense Systems Ia-Xb comprises a regulatory element operably linked to said construct comprising a cis-acting regulatory element for directing expression of said nucleic acid sequence, or a transmissible element for directing transfer of said nucleic acid sequence from one cell to another, or a recombination element for integrating said nucleic acid sequence into a genome of a cell transfected with said construct, or an element providing episomal maintenance of said construct within a cell transfected with said construct, or any combination thereof.

[1782] In some embodiments, a method of preparing a food, food additive, feed, nutritional supplement, probiotic supplement, personal care product, health care product and veterinary product, comprises adding to the food, food additive, feed, nutritional supplement, probiotic supplement, personal care product, health care product and veterinary product at least one component selected from the group consisting of the components of the defense system, thereby preparing a food, food additive, feed, nutritional supplement, probiotic supplement, personal care product, health care product and veterinary product. In some embodiments, a method of preparing a food, food additive, feed, nutritional supplement, probiotic supplement, personal care product, health care product and veterinary product comprises introducing into the bacteria a defense system comprising a Defense System selected from a Defense System Ia, Ib, II, IIIa, IIIb, IIIc, IV, V, VI, VII, VIII, IX, Xa, Xb, and Xc, wherein said defense system comprises an anti-phage activity, or an anti-plasmid activity, or an anti-phage and an anti-plasmid activity, the system comprising at least one component of said Defense System Ia, Ib, II, IIIa, IIIb, IIIc, IV, V, VI, VII, VIII, IX, Xa, Xb, or Xc, said at least one component selected from the group consisting of the components of the Defense Systems Ia, Ib, II, IIIa, IIIb, IIIc, IV, V, VI, VII, VIII, IX, Xa, Xb, or Xc, respectively, thereby preparing the food, food additive, feed, nutritional supplement, probiotic supplement, personal care product, health care product and veterinary product.

[1783] In some embodiments, a method of preparing a food, food additive, feed, nutritional supplement, probiotic supplement, personal care product, health care product and veterinary product comprises introducing into the bacteria a defense system comprising a combination of Defense Systems selected from Defense System Ia, Ib, II, IIIa, IIIb, IIIc, IV, V, VI, VII, VIII, IX, Xa, Xb, and Xc, wherein said defense system comprises an anti-phage activity, an anti-plasmid activity, or an anti-phage and an anti-plasmid activity, the system comprising at least one component of each of said Defense Systems in a combination, said at least one component selected from the group consisting of the components of the Defense Systems Ia, Ib, II, IIIa, IIIb, IIIc, IV, V, VI, VII, VIII, IX, Xa, Xb, or Xc, respectively, thereby preparing a food, food additive, feed, nutritional supplement, probiotic supplement, personal care product, health care product and veterinary product.

[1784] In some embodiments, an at least one component comprises the components of a Defense System Ia, Ib, II, IIIa, IIIb, IIIc, IV, V, VI, VII, VIII, IX, Xa, Xb, or Xc, required for a functional Defense System, wherein said function comprises an anti-phage activity, an anti-plasmid activity, or an anti-phage and an anti-plasmid activity. In some embodiments, an at least one component comprises the components of the cassette of genes making up a Defense System Ia, Ib, II, IIIa, IIIb, IIIc, IV, V, VI, VII, VIII, IX, Xa, Xb, or Xc. In some embodiments, an at least one component comprises two components of a Defense System Ia, Ib, II, IIIa, IIIb, IIIc, IV, V, VI, VII, VIII, IX, Xa, Xb, or Xc. In some embodiments, an at least one component comprises three components of a Defense System Ia, Ib, II, IIIa, IIIb, IIIc, IV, V, VI, VII, VIII, IX, Xa, Xb, or Xc. In some embodiments, an at least one component comprises four components of a Defense System Ia, Ib, II, IIIa, IIIb, IIIc, IV, V, VI, VII, VIII, IX, Xa, Xb, or Xc. In some embodiments, an at least one component comprises five components of a Defense System Ia, Ib, II, IIIa, IIIb, IIIc, IV, V, VI, VII, VIII, IX, Xa, Xb, or Xc. In some embodiments, a component comprises the full-length component. In some embodiments, a component comprises a functional portion of the component. In some embodiments, a component comprises a component homolog. Defense System components, nucleic acid sequences thereof, and amino acid sequences thereof are presented herein in Table 18.

[1785] In some embodiments, for a method of use disclosed herein, the at least one defense system component is comprised in cell (e.g. bacteria) genetically modified to express the component.

[1786] In some embodiments, there is provided a method of preparing a food, food additive, feed, nutritional supplement, probiotic supplement, personal care product, health care product and veterinary product, the method comprising adding to the food, food additive, feed, nutritional supplement, probiotic supplement, personal care product, health care product and veterinary product a cell comprising a defense system disclosed herein, thereby preparing the food, food additive, feed, nutritional supplement, probiotic supplement, personal care product, health care product and veterinary product. In some embodiments, said use comprises use of an isolated cell comprising a defense system disclosed herein.

[1787] In some embodiments, there is provided a food, food additive, feed, nutritional supplement, probiotic supplement, personal care product, health care product and veterinary product comprising the cell comprising a defense system disclosed herein.

[1788] In some embodiments, there is provided a method of preparing a food, food additive, feed, nutritional supplement, probiotic supplement, personal care product, health care product and veterinary product comprising adding to the food, food additive, feed, nutritional supplement, probiotic supplement, personal care product, health care product and veterinary product bacteria which expresses on a transmissible genetic element at least one component of a defense system disclosed herein, wherein said defense system comprising a Defense System selected from Defense Systems Ia-Xc or a combination of Defense Systems selected from Defense Systems Ia-Xc, as described in detail herein, thereby preparing the food, food additive, feed, nutritional supplement, probiotic supplement, personal care product, health care product and veterinary product.

[1789] In some embodiments, an at least one component comprises the components of a Defense System Ia, Ib, II, IIIa, IIIb, IIIc, IV, V, VI, VII, VIII, IX, Xa, Xb, or Xc, required for a functional Defense System, wherein said function comprises an anti-phage activity, an anti-plasmid activity, or an anti-phage and an anti-plasmid activity. In some embodiments, an at least one component comprises the components of the cassette of genes making up a Defense System Ia, Ib, II, IIIa, IIIb, IIIc, IV, V, VI, VII, VIII, IX, Xa, Xb, or Xc. In some embodiments, an at least one component comprises two components of a Defense System Ia, Ib, II, IIIa, IIIb, IIIc, IV, V, VI, VII, VIII, IX, Xa, Xb, or Xc. In some embodiments, an at least one component comprises three components of a Defense System Ia, Ib, II, IIIa, IIIb, IIIc, IV, V, VI, VII, VIII, IX, Xa, Xb, or Xc. In some embodiments, an at least one component comprises four components of a Defense System Ia, Ib, II, IIIa, IIIb, IIIc, IV, V, VI, VII, VIII, IX, Xa, Xb, or Xc. In some embodiments, an at least one component comprises five components of a Defense System Ia, Ib, II, IIIa, IIIb, IIIc, IV, V, VI, VII, VIII, IX, Xa, Xb, or Xc. In some embodiments, a component comprises the full-length component. In some embodiments, a component comprises a functional portion of the component. In some embodiments, a component comprises a component homolog. Defense System components, nucleic acid sequences thereof, and amino acid sequences thereof are presented herein in Table 18.

[1790] In some embodiments, there is provided a food, food additive, feed, nutritional supplement, probiotic supplement, personal care product, health care product and veterinary product comprising bacteria which expresses on a transmissible genetic element at least one component of a defense system comprising a Defense System selected from Defense Systems Ia-Xc or a combination of Defense Systems selected from Defense Systems Ia-Xc.

[1791] In some embodiments, an at least one component comprises the components of a Defense System Ia, Ib, II, IIIa, IIIb, IIIc, IV, V, VI, VII, VIII, IX, Xa, Xb, or Xc, required for a functional Defense System, wherein said function comprises an anti-phage activity, an anti-plasmid activity, or an anti-phage and an anti-plasmid activity. In some embodiments, an at least one component comprises the components of the cassette of genes making up a Defense System Ia, Ib, II, IIIa, IIIb, IIIc, IV, V, VI, VII, VIII, IX, Xa, Xb, or Xc. In some embodiments, an at least one component comprises two components of a Defense System Ia, Ib, II, IIIa, IIIb, IIIc, IV, V, VI, VII, VIII, IX, Xa, Xb, or Xc. In some embodiments, an at least one component comprises three components of a Defense System Ia, Ib, II, IIIa, IIIb, IIIc, IV, V, VI, VII, VIII, IX, Xa, Xb, or Xc. In some embodiments, an at least one component comprises four components of a Defense System Ia, Ib, II, IIIa, IIIb, IIIc, IV, V, VI, VII, VIII, IX, Xa, Xb, or Xc. In some embodiments, an at least one component comprises five components of a Defense System Ia, Ib, II, IIIa, IIIb, IIIc, IV, V, VI, VII, VIII, IX, Xa, Xb, or Xc. In some embodiments, a component comprises the full-length component. In some embodiments, a component comprises a functional portion of the component. In some embodiments, a component comprises a component homolog. Defense System components, nucleic acid sequences thereof, and amino acid sequences thereof are presented herein in Table 18.

[1792] In some embodiments, a food or feed disclosed herein, comprises a dairy product. In some embodiments, a food additive comprises an additive to be added to a dairy product or to an ingredient used to prepare a dairy product.

[1793] The preparation of starter cultures of such bacteria, and methods of fermenting substrates, particularly food substrates such as milk, can be carried out in accordance with known techniques, including but not limited to those described in Mayra-Makinen and Bigret (1993) Lactic Acid Bacteria; Salminen and vonWright eds. Marcel Dekker, Inc. New York. 65-96; Sandine (1996) Dairy Starter Cultures Cogan and Accolas eds. VCH Publishers, New York. 191-206; Gilliland (1985) Bacterial Starter Cultures for Food. CRC Press, Boca Raton, Fla.

[1794] The term “fermenting” refers to the energy-yielding, metabolic breakdown of organic compounds by microorganisms that generally proceeds under anaerobic conditions and with the evolution of gas.

[1795] Products produced by fermentation which have been known to experience phage infection, and the corresponding infected fermentation bacteria, include cheddar and cottage cheese (Lactococcus lactis subsp. lactis, Lactococcus lactis subsp. cremoris), yogurt (Lactobacillus delbrueckii subsp. bulgaricus, Streptococcus thermophilus), Swiss cheese (S. thermophilus, Lactobacillus lactis, Lactobacillus helveticus), blue cheese (Leuconostoc cremoris), Italian cheese (L. bulgaricus, S. thermophilus), viili (Lactococcus lactis subsp. cremoris, Lactococcus lactis subsp. lactis biovar diacetylactis, Leuconostoc cremoris), yakult (Lactobacillus casei), casein (Lactococcus lactis subsp. cremoris), natto (Bacillus subtilis var. natto), wine (Leuconostoc oenos), sake (Leuconostoc mesenteroides), polymyxin (Bacillus polymyxa), colistin (Bacillus colistrium), bacitracin (Bacillus licheniformis), L-glutamic acid (Brevibacterium lactofermentum, Microbacterium ammoniaphilum), and acetone and butanol (Clostridium acetobutylicum, Clostridium saccharoperbutylacetonicum).

[1796] In some embodiments, provided herein are bacteria resistant to phage infection, said bacteria including but not limited to Lactococcus lactis subsp. lactis, Lactococcus lactis subsp. cremoris Lactobacillus delbrueckii subsp. bulgaricus, Streptococcus thermophilus, S. thermophilus, Lactobacillus lactis, Lactobacillus helveticus, Leuconostoc cremoris, L. bulgaricus, S. thermophilus, Lactococcus lactis subsp. cremoris, Lactococcus lactis subsp. lactis biovar diacetylactis, Leuconostoc cremoris, Lactobacillus casei, Lactococcus lactis subsp. cremoris, Bacillus subtilis var. natto, Leuconostoc oenos, Leuconostoc mesenteroides, polymyxin Bacillus polymyxa, Bacillus colistrium, Bacillus licheniformis, L-Brevibacterium lactofermentum, Microbacterium ammoniaphilum, and acetone and butanol Clostridium acetobutylicum, Clostridium saccharoperbutylacetonicum.

[1797] In some embodiments, provided here are starter cultures comprising bacteria resistant to phage infection, said bacteria including but not limited to Lactococcus lactis subsp. lactis, Lactococcus lactis subsp. cremoris Lactobacillus delbrueckii subsp. bulgaricus, Streptococcus thermophilus, S. thermophilus, Lactobacillus lactis, Lactobacillus helveticus, Leuconostoc cremoris, L. bulgaricus, S. thermophilus, Lactococcus lactis subsp. cremoris, Lactococcus lactis subsp. lactis biovar diacetylactis, Leuconostoc cremoris, Lactobacillus casei, Lactococcus lactis subsp. cremoris, Bacillus subtilis var. natto, Leuconostoc oenos, Leuconostoc mesenteroides, polymyxin Bacillus polymyxa, Bacillus colistrium, Bacillus licheniformis, L-Brevibacterium lactofermentum, Microbacterium ammoniaphilum, and acetone and butanol Clostridium acetobutylicum, Clostridium saccharoperbutylacetonicum.

[1798] In some embodiments, a method of protecting a bacteria from phage infection, comprises protecting bacteria selected from Lactococcus lactis subsp. lactis, Lactococcus lactis subsp. cremoris Lactobacillus delbrueckii subsp. bulgaricus, Streptococcus thermophilus, S. thermophilus, Lactobacillus lactis, Lactobacillus helveticus, Leuconostoc cremoris, L. bulgaricus, S. thermophilus, Lactococcus lactis subsp. cremoris, Lactococcus lactis subsp. lactis biovar diacetylactis, Leuconostoc cremoris, Lactobacillus casei, Lactococcus lactis subsp. cremoris, Bacillus subtilis var. natto, Leuconostoc oenos, Leuconostoc mesenteroides, polymyxin Bacillus polymyxa, Bacillus colistrium, Bacillus licheniformis, L-Brevibacterium lactofermentum, Microbacterium ammoniaphilum, and acetone and butanol Clostridium acetobutylicum, and Clostridium saccharoperbutylacetonicum.

[1799] In some embodiments, a method of protecting a bacteria from plasmid transformation, comprises protecting bacteria selected from Lactococcus lactis subsp. lactis, Lactococcus lactis subsp. cremoris Lactobacillus delbrueckii subsp. bulgaricus, Streptococcus thermophilus, S. thermophilus, Lactobacillus lactis, Lactobacillus helveticus, Leuconostoc cremoris, L. bulgaricus, S. thermophilus, Lactococcus lactis subsp. cremoris, Lactococcus lactis subsp. lactis biovar diacetylactis, Leuconostoc cremoris, Lactobacillus casei, Lactococcus lactis subsp. cremoris, Bacillus subtilis var. natto, Leuconostoc oenos, Leuconostoc mesenteroides, polymyxin Bacillus polymyxa, Bacillus colistrium, Bacillus licheniformis, L-Brevibacterium lactofermentum, Microbacterium ammoniaphilum, and acetone and butanol Clostridium acetobutylicum, and Clostridium saccharoperbutylacetonicum.

[1800] In some embodiments, a method of protecting a bacteria from phage infection and plasmid transformation, comprises protecting bacteria selected from Lactococcus lactis subsp. lactis, Lactococcus lactis subsp. cremoris Lactobacillus delbrueckii subsp. bulgaricus, Streptococcus thermophilus, S. thermophilus, Lactobacillus lactis, Lactobacillus helveticus, Leuconostoc cremoris, L. bulgaricus, S. thermophilus, Lactococcus lactis subsp. cremoris, Lactococcus lactis subsp. lactis biovar diacetylactis, Leuconostoc cremoris, Lactobacillus casei, Lactococcus lactis subsp. cremoris, Bacillus subtilis var. natto, Leuconostoc oenos, Leuconostoc mesenteroides, polymyxin Bacillus polymyxa, Bacillus colistrium, Bacillus licheniformis, L-Brevibacterium lactofermentum, Microbacterium ammoniaphilum, and acetone and butanol Clostridium acetobutylicum, and Clostridium saccharoperbutylacetonicum.

[1801] In some embodiments, a cell comprising a defense system described herein, comprises a Lactococcus lactis subsp. Lactis cell, a Lactococcus lactis subsp. cremoris cell, a Lactobacillus delbrueckii subsp. bulgaricus cell, a Streptococcus thermophilus cell, a S. thermophilus cell, a Lactobacillus lactis cell, a Lactobacillus helveticus cell, a Leuconostoc cremoris cell, a L. bulgaricus cell, a S. thermophilus cell, a Lactococcus lactis subsp. cremoris cell, a Lactococcus lactis subsp. lactis biovar diacetylactis cell, a Leuconostoc cremoris cell, a Lactobacillus case cell, a, Lactococcus lactis subsp. cremoris cell, a Bacillus subtilis var. natto cell, a Leuconostoc oenos cell, a Leuconostoc mesenteroides cell, a polymyxin Bacillus polymyxa cell, a Bacillus colistrium cell, a Bacillus licheniformis cell, a L-Brevibacterium lactofermentum cell, a Microbacterium ammoniaphilum cell, a Clostridium acetobutylicum cell, and a Clostridium saccharoperbutylacetonicum cell

[1802] As exemplified herein below in Examples 1-8, transformation of bacteria with a defense system confers either phage resistance or plasmid resistance to the bacteria. For example, but not limited to the results presented in FIGS. 3B, 3C, 3D, 3E, 5D, and 7C. These results suggest that the use of anti-defense system as a method to induce phage sensitivity.

[1803] In some embodiments, addition of nucleic acid sequences to the genome of a bacteria provides phage resistance. In some embodiments, addition of a nucleic acid construct, as disclosed herein, to the genome of a bacteria provides phage resistance. In some embodiments, addition of a nucleic acid construct, as disclosed herein, to the genome of a bacteria comprising Lactococcus lactis subsp. lactis, Lactococcus lactis subsp. cremoris Lactobacillus delbrueckii subsp. bulgaricus, Streptococcus thermophilus, S. thermophilus, Lactobacillus lactis, Lactobacillus helveticus, Leuconostoc cremoris, L. bulgaricus, S. thermophilus, Lactococcus lactis subsp. cremoris, Lactococcus lactis subsp. lactis biovar diacetylactis, Leuconostoc cremoris, Lactobacillus casei, Lactococcus lactis subsp. cremoris, Bacillus subtilis var. natto, Leuconostoc oenos, Leuconostoc mesenteroides, polymyxin Bacillus polymyxa, Bacillus colistrium, Bacillus licheniformis, L-Brevibacterium lactofermentum, Microbacterium ammoniaphilum, and acetone and butanol Clostridium acetobutylicum, Clostridium saccharoperbutylacetonicum, provides phage resistance to the bacteria.

[1804] As used herein, “inducing phage sensitivity” refers to an increase of at least 5% in bacterial susceptibility towards a phage, as compared to same in the absence of the defense system agent, as may be manifested e.g. in growth arrest, death or prevention of lysogeny. According to a specific embodiment, the increase is in at least 10%, 20%, 30%, 40% or even higher say, 50%, 60%, 70%, 80%, 90% or more than 100%.

### Methods of Identifying Defense Systems

[1805] Disclosed herein, in some embodiments is a computational approach to identify new defense systems localized in the vicinity of annotated defense systems.

[1806] In some embodiments, there is provided a method for identifying a defense system in a prokaryotic cell, comprising the steps of:
[1807] (a) selecting, in-silico, a gene located in close proximity to a known defense-related gene family present in a plurality of prokaryotic genomes;
[1808] (b) analyzing, in-silico, the DNA upstream and downstream of said gene; and
[1809] (c) identifying, in-silico, a cassette of genes within the upstream and downstream DNA analyzed in step (b) comprising said gene of step (a), wherein said cassette of genes has conserved synteny in said plurality of prokaryotic genomes.

[1810] In some embodiments, a method for identifying a defense system comprises the steps of:
[1811] (a) in-silico selecting a gene in location proximity to an annotated defense system of a plurality of prokaryotic genomes; and
[1812] (b) in-silico selecting a cassette of genes comprising said gene with conserved synteny in said plurality of prokaryotic genomes.

[1813] In some embodiments, the defense system comprises an anti-phage defense system. In some embodiments, the defense system comprises an anti-plasmid defense system. In some embodiments, the defense system comprises an anti-phage defense system and an anti-plasmid defense system.

[1814] In some embodiments, a gene in location proximity comprises a gene positioned within less than 10 genes upstream (5′) or 10 genes downstream (3′) to the annotated defense system. In some embodiments, the location proximity is positioned within 10 genes upstream or downstream to said annotated defense system in said prokaryotic genome.

[1815] Annotated defense systems are disclosed in scientific papers and databases known to the skilled in the art (see e.g. Makarova et al. J Bacteriol. 2011 November; 193(21): 6039-6056; Swarts et al. Nature (2014) 507, 258-261; and Goldfarb et al. EMBO J. (2015) 34, 169-83]. Non-limiting examples of annotated defense systems that can be used with some embodiments of the methods for identifying defense systems include, but are not limited to surface modifications to prevent adsorption of phages, restriction-modification (RIM) systems, infection (Abi) mechanisms, the CRISPR/Cas adaptive defense system, the prokaryotic argonaute and the BREX system.

[1816] In some embodiments, the annotated defense system is selected from the group consisting of a restriction-modification (R/M) system, an infection (Abi) system, a CRISPR/Cas adaptive defense system, a prokaryotic argonaute and a BREX system.

[1817] In some embodiments, the plurality comprises at least 2. In some embodiments, the plurality comprises at least 5, at least 10, at least 20, at least 50, at least 100 or at least 500.

[1818] A skilled artisan would appreciate that the term “conserved synteny” encompasses a conserved gene order in the genomes of different species.

[1819] In some embodiments, the method for identifying a defense system further comprises a step of validating a defensive effect of the selected (identified) cassette of genes.

[1820] Validating a defensive effect may be effected in any method known in the art.

[1821] In some embodiments, validating the defensive effect is effected by genetically modifying a prokaryotic cell to express the selected cassette of genes and subjecting the prokaryotic cell to phage infection or plasmid transformation, wherein a decrease in phage or plasmid sensitivity below a predetermined threshold as compared to a prokaryotic cell of the same origin not genetically modified to express the selected cassette of genes is indicative of a defensive effect.

[1822] In some embodiments, validating the defensive effect is effected by contacting a prokaryotic cell with an agent capable of downregulating expression and/or activity of at least one gene of the selected cassette of genes in a prokaryotic cell and subjecting the prokaryotic cell to phage infection or plasmid transformation, wherein an increase in phage or plasmid sensitivity above a predetermined threshold as compared to a prokaryotic cell of the same origin not contacted with the agent is indicative of a defensive effect.

[1823] In some embodiments, the decrease/increase below or above a predetermined threshold is statistically significant.

[1824] In some embodiments, the predetermined threshold is at least at least 1.5 fold, at least 2 fold, at least 3 fold, at least 5 fold, at least 10 fold, or at least 20 fold. In some embodiments, the predetermined threshold is at least 2%, at least 5%, at least 10%, at least 20%, at least 30%, at least 40%, at least 50%, at least 60%, at least 70%, at least 80%, at least 90%, e.g., 100%, at least 200%, at least 300%, at least 400%, at least 500%, at least 600%.

[1825] A non-limiting example of a method of identifying a defense system, which can be used according to embodiments disclosed herein, is described at least in the Materials and Methods hereinbelow, Example 1, Example 2, and in FIG. 1, which is to be understood as forming an integral part of the present section.

[1826] Once selected, the identified cassette of genes comprising said gene with conserved synteny in said plurality of prokaryotic genomes can be cloned or synthesized.

[1827] The gene(s) can be ligated into expression constructs and used in a variety of applications e.g., for conferring phage resistance in for example, but not limited to the food, feed, medical and veterinary industries.

[1828] In some embodiments, an identified cassette of gene confers phage resistance to a starter culture. In some embodiments, an identified cassette of gene confers phage resistance to a food product. In some embodiments, a food product comprises a dairy product, an alcoholic beverage, or a natto. In some embodiments, an identified cassette of gene confers phage resistance to a dairy product. In some embodiments, an identified cassette of gene confers phage resistance to an alcoholic beverage. In some embodiments, an identified cassette of gene confers phage resistance to a natto.

[1829] In some embodiments, an identified cassette of gene confers phage resistance to a milk product. In some embodiments, an identified cassette of gene confers phage resistance to milk. In some embodiments, an identified cassette of gene confers phage resistance to a sour milk. In some embodiments, an identified cassette of gene confers phage resistance to a milk butter milk. In some embodiments, an identified cassette of gene confers phage resistance to a cheese. In some embodiments, an identified cassette of gene confers phage resistance to a yogurt. In some embodiments, an identified cassette of gene confers phage resistance to a viili. In some embodiments, an identified cassette of gene confers phage resistance to yakult. In some embodiments, an identified cassette of gene confers phage resistance to a casein. In some embodiments, an identified cassette of gene confers phage resistance to a wine. In some embodiments, an identified cassette of gene confers phage resistance to a sake. In some embodiments, an identified cassette of gene confers phage resistance to a food additive. In some embodiments, an identified cassette of gene confers phage resistance to a feed. In some embodiments, an identified cassette of gene confers phage resistance to a nutritional supplement. In some embodiments, an identified cassette of gene confers phage resistance to a probiotic supplement. In some embodiments, an identified cassette of gene confers phage resistance to a health care product. In some embodiments, an identified cassette of gene confers phage resistance to an antibiotic. In some embodiments, an identified cassette of gene confers phage resistance to polymyxin. In some embodiments, an identified cassette of gene confers phage resistance to a colistin. In some embodiments, an identified cassette of gene confers phage resistance to a bacitracin. In some embodiments, an identified cassette of gene confers phage resistance to a personal care product. In some embodiments, an identified cassette of gene confers phage resistance to a veterinary product.

### Antagonists of Defense Systems and Methods of Use Thereof

[1830] In some embodiments, there is provided an antagonist of a defense system disclosed herein, an “anti-defense system agent”. A skilled artisan would appreciate that the terms “anti-defense system agent” and “anti-Defense System agent” and “agent” may in some embodiments, be used interchangeably having all the same elements and qualities. In some embodiments, an anti-defense system agent may antagonize more than one Defense System function. In some embodiments, an anti-defense system agent may antagonize more than one Defense System function, selected from Defense systems Ia-Xc. In some embodiments, an anti-Defense System agent may antagonize more than one Defense System. In some embodiments, an anti-Defense System agent may antagonize more than one Defense System selected from Defense systems Ia-Xc.

[1831] In some embodiments, an anti-Defense System agent is capable of down regulating expression and/or activity of at least one Defense System component. In some embodiments, an anti-Defense System agent is capable of down regulating expression and/or activity of at least one Defense System component, wherein said Defense System is selected from Defense Systems Ia-Xc.

[1832] In some embodiments, the anti-defense system agent is directed against a defense system component comprising an enzyme activity, for example but not limited to a HamB polypeptide, a SduA polypeptide, a GajA polypeptide, a GajB polypeptide, a PtuA polypeptide, a PtuB polypeptide, a LmuB polypeptide, a ZorD polypeptide, a ZorE polypeptide, a DruE polypeptide, a DruM polypeptide, or a JetC polypeptide. For example, the anti-defense agent may interfere with the expression of an active defense system component or, for example in its DNA methyltransferase function, helicase function, exonuclease function, or endonuclease function. For example, in some embodiments, a methylase activity may be inhibited by the use of common inhibitors of such an enzyme e.g., 5-Azacytidine, Decitabine Zebularine, RG108, Hydralazine hydrochloride, and Psammaplin A.

[1833] In some embodiments, an at least one component comprises a component selected from Defense Systems Ia, Ib, II, IIIa, IIIb, IIIc, IV, V, VI, VII, VIII, IX, Xa, Xb, and Xc. In some embodiments, a component comprises a functional component. In some embodiments, a component comprises an essential component. In some embodiments, a component comprises the full-length component. In some embodiments, a component comprises a functional portion of the component.

[1834] The components of defense systems comprising a Defense System Ia-Xc and combinations thereof, have been described in detail above. In some embodiments, polypeptide components of these systems include but are not limited to ZorA, ZorB, ZorC, ZorD, ZorE (Defense System Ia and Ib); ThsA and ThsB (Defense System II); DruA, DruB, DruC, DruD, DruE, DruH, DruM, DruG, DruF (Defense Systems IIIa, IIIb, IIIc); HamA and HamB (Defense System IV); SduA (Defense System V); GajA and GajB (Defense System VI); PtuA and PtuB (Defense System VII); LmuA and LmuB (Defense System VIII); KwaA and KwaB (Defense System IX); and JetA, JetB, JetC, and JetD, and variants thereof (Defense Systems Xa, Xb, Xc). In some embodiments, polynucleotide (e.g., gene) components, include but are not limited to zorA, zorB, zorC, zorD, zorE (Defense Systems Ia, Ib); thsA and thsB (Defense System II); druA, druB, druC, drub, druE, druF, druG, druH, druM (Defense Systems IIIa, IIIb, IIIc); hamA and hamB (Defense System IV); sduA (Defense System V); gajA and gajB (Defense System VI); ptuA and ptuB (Defense System VII); lmuA and lmuB (Defense System VIII); kwaA and kwaB (Defense System IX); and jetA, jetB, jetC, and jetD and variants thereof (Defense Systems Xa, Xb, Xc). In some embodiments, a component comprises a component homolog. Defense System components, nucleic acid sequences thereof, and amino acid sequences thereof are presented herein in Table 18.

[1835] In some embodiments, a Defense System described herein comprises at least two different polypeptide components. The polypeptide components of the Defense Systems described herein, and the nucleic acids encoding them are described in detail above, and in Tables 8-18. In some embodiments, a Defense System described herein comprises at least three different polypeptide components. In some embodiments, a Defense System described herein comprises at least four different polypeptide components. In some embodiments, a Defense System described herein comprises at least five different polypeptide components. In some embodiments, a Defense System described herein comprises multiple polypeptide components, wherein the components comprise different polypeptides. In some embodiments, a Defense System described herein comprises multiple polypeptide components, wherein the components comprise different polypeptides and duplications of a same polypeptide. In some embodiments, components comprising duplication of a same polypeptide comprise homologues of that polypeptide.

[1836] In some embodiments, a Defense System comprising at least two different polypeptide components provides a functional defense activity (protection from foreign nucleic acid) for a cell. In some embodiments, a Defense System described herein comprises at least three different polypeptide components provides a functional defense activity (protection from foreign nucleic acid) for a cell. In some embodiments, a Defense System described herein comprises at least four different polypeptide components provides a functional defense activity (protection from foreign nucleic acid) for a cell. In some embodiments, a Defense System described herein comprises at least five different polypeptide components provides a functional defense activity (protection from foreign nucleic acid) for a cell. In some embodiments, a Defense System described herein comprises multiple polypeptide components, wherein the components comprise different polypeptides, and wherein the Defense System provides a functional defense activity (protection from foreign nucleic acid) for a cell. In some embodiments, a Defense System described herein comprises multiple polypeptide components, wherein the components comprise different polypeptides and duplications of a same polypeptide, wherein said Defense System provides a functional defense activity (protection from foreign nucleic acid) for a cell. In some embodiments, components comprising duplication of a same polypeptide comprise homologues of that polypeptide.

[1837] In some embodiments, an agent is capable of down regulating expression and/or activity of at least two components of a defense system. In some embodiments, an agent is capable of down regulating at least one components of at least two different Defense Systems. In some embodiments, an agent is capable of down regulating expression and/or activity of at least two components of a Defense System. In some embodiments, an agent is capable of down regulating at least two components of the same Defense System. In some embodiments, an agent is capable of down regulating expression and/or activity of at least two components of a Defense System selected from the components of Defense Systems Ia-Xc.

[1838] In some embodiments, an agent is capable of down regulating expression and/or activity of 1-40 components of a defense system. In some embodiments, an agent is capable of down regulating expression and/or activity of 1-4 components of a defense system. In some embodiments, an agent is capable of down regulating expression and/or activity of 1-5 components of a defense system. In some embodiments, an agent is capable of down regulating expression and/or activity of 1-10 components of a defense system. In some embodiments, an agent is capable of down regulating expression and/or activity of 10-20 components of a defense system. In some embodiments, an agent is capable of down regulating expression and/or activity of 20-30 components of a defense system. In some embodiments, an agent is capable of down regulating expression and/or activity of 30-40 components of a defense system. In some embodiments, an agent is capable of down regulating expression and/or activity of 1, 2, 3, 4, 5, 6, 7, 8, 9, 10, 11, 12, 13, 14, 15, 16, 17, 18, 19, 20, 21, 22, 23, 24, 25, 26, 27, 28, 29, 30, 31, 32, 33, 34, 35, 36, 37, 38, 39, 40, 41, 42, or 43 components of a defense system. In some embodiments, an agent is capable of down regulating at least one components of at least two different Defense Systems. In some embodiments, an agent is capable of down regulating expression and/or activity of at least two components of a Defense System. In some embodiments, an agent is capable of down regulating at least two components of the same Defense System. In some embodiments, an agent is capable of down regulating expression and/or activity of at least two components of a Defense System selected from the components of Defense Systems Ia-Xc.

[1839] A skilled artisan would recognize that the phrase “anti-Defense agent” encompasses an agent capable of specifically inhibiting the expression of a target Defense System gene (at the DNA or RNA level) or alternatively specifically impairing the functionality of the target Defense System protein. In some embodiments, an agent is capable of specifically inhibiting the expression of a target Defense System component (at the DNA or RNA level) or alternatively specifically impairing the functionality of the target Defense System component polypeptide.

[1840] In some embodiments, the anti-Defense system agent is directed against one of the Defense System components. In some embodiments, the anti-Defense System agent is directed against multiple components of a Defense System. In some embodiments, the anti-Defense System agent is directed against at least 2 components of a Defense System. In some embodiments, the anti-Defense System agent is directed against at least 3 components of a Defense System. In some embodiments, the anti-Defense System agent is directed against at least 4 components of a Defense System. In some embodiments, the anti-Defense System agent is directed against at least 5 components of a Defense System.

[1841] In some embodiments, the anti-Defense system agent is directed against any of the components disclosed in Table 18. In some embodiments, the anti-Defense system agent is directed against any combination of the components disclosed in Table 18. In some embodiments, the combination of components may be from a same Defense System selected from Defense Systems Ia-Xc. In some embodiments, the combination of components may be from different Defense Systems selected from Defense Systems Ia-Xc. In some embodiments, the combination of components may be from the same and different Defense Systems selected from Defense Systems Ia-Xc.

[1842] In some embodiments, the agent is directed against all of the components of a single Defense System. In some embodiments, the agent is directed against all of the essential components of a single Defense System. In some embodiments, the agent is directed against all of the components of a single Defense System selected from Defense Systems Ia-Xc. In some embodiments, the agent is directed against all of the essential components of a single Defense System, selected from Defense Systems Ia-Xc.

[1843] Down regulation of a Defense System can be effected on the genomic and/or the transcript level using a variety of molecules that interfere with transcription and/or translation (e.g., RNA silencing agents), or on the protein level using e.g., aptamers, small molecules and inhibitory peptides, antagonists, enzymes that cleave the polypeptide and the like.

[1844] In some embodiments the anti-Defense System agent is selected from the group consisting of a nucleic acid suitable for silencing expression, aptamers, small molecules and inhibitory peptides.

[1845] A skilled artisan would appreciate that the phrase “nucleic acid suitable for silencing expression” refers to regulatory mechanisms mediated by nucleic acid molecules, which result in the inhibition or “silencing” of the expression of a corresponding protein-coding gene.

[1846] Methods for qualifying efficacy and detecting inhibition or “silencing” of the expression of a corresponding protein-coding gene are well known in the art and include, but are not limited to, DNA sequencing, electrophoresis, an enzyme-based mismatch detection assay and hybridization assay such as PCR, RT-PCR, RNase protection, in-situ hybridization, primer extension, Southern blot, Northern Blot and dot blot analysis. Inhibition or “silencing” of the expression of a specific protein-coding gene can also be determined at the protein level using e.g. chromatography, electrophoretic methods, immunodetection assays such as ELISA and Western blot analysis or immunohistochemistry. In addition, one ordinarily skilled in the art can readily design a knock-in/knock-out construct including positive and/or negative selection markers for efficiently selecting transformed cells that e.g. underwent a homologous recombination event with the construct.

[1847] In some embodiments, downregulation can be achieved by DNA silencing.

[1848] Methods of introducing nucleic acid alterations to a gene of interest are well known in the art [see for example Menke D. Genesis (2013) 51: 618; Capecchi, Science (1989) 244:1288-1292; Santiago et al. Proc Natl Acad Sci USA (2008) 105:5809-5814; International Patent Application Nos. WO 2014085593, WO 2009071334 and WO 2011146121; U.S. Pat. Nos. 8,771,945, 8,586,526, 6,774,279 and UP Patent Application Publication Nos. 20030232410, 20050026157, US20060014264; the contents of which are incorporated by reference in their entireties] and include targeted homologous recombination, site specific recombinases, PB transposases and genome editing by engineered nucleases.

[1849] Non-limiting examples of DNA silencing agents that can be used In some embodiments include: the “Hit and run” or “in-out” strategy; the “double-replacement” or “tag and exchange” strategy; site-specific recombinases such as, but not limited to, cre recombinase and Flp recombinase; genome editing using engineered endonucleases such as, but not limited to, meganucleases, Zinc finger nucleases (ZFNs), transcription-activator like effector nucleases (TALENs) and CRISPR/Cas system; transposases; and genome editing using recombinant adeno-associated virus (rAAV) platform.

[1850] It will be appreciated that the agent can be a mutagen that causes random mutations and the cells exhibiting downregulation of the expression level and/or activity of a component or components of a Defense System disclosed herein, for example but not limited to the components and Defense Systems disclosed in Table 18. The mutagens may be, but are not limited to, genetic, chemical or radiation agents.

[1851] Downregulation can also be achieved by RNA silencing.

[1852] In certain embodiments, the RNA silencing agent is capable of preventing complete processing (e.g., the full translation and/or expression) of an mRNA molecule through a post-transcriptional silencing mechanism. RNA silencing agents include non-coding RNA molecules, for example RNA duplexes comprising paired strands, as well as precursor RNAs from which such small non-coding RNAs can be generated. Exemplary RNA silencing agents include dsRNAs such as siRNAs, miRNAs and shRNAs.

[1853] In some embodiments, the RNA silencing agent is capable of inducing RNA interference. In some embodiments, the RNA silencing agent is capable of mediating translational repression.

[1854] In some embodiments, the RNA silencing agent is specific to the target RNA of a component of a Defense System disclosed herein, and does not cross inhibit or silence other targets or a splice variant which exhibits 99% or less global homology to the target gene, e.g., less than 98%, 97%, 96%, 95%, 94%, 93%, 92%, 91%, 90%, 89%, 88%, 87%, 86%, 85%, 84%, 83%, 82%, 81% global homology to the target gene; as determined by PCR, Western blot, Immunohistochemistry and/or flow cytometry.

[1855] Non-limiting examples of RNA silencing agents that can be used in some embodiments include but are not limited to antisense, DsRNA, siRNA, shRNA, miRNA and miRNA mimics.

[1856] Numerous methods are known in the art for gene silencing particularly in prokaryotes; examples include but are not limited to U.S. Patent Application 20040053289 which teaches the use of si hybrids to down-regulate prokaryotic genes, and U.S. Patent Application PCT/US09/69258 which teaches the use of CRISPR to downregulate prokaryotic genes.

[1857] In some embodiments, the inhibition can be carried out at the protein level which interferes with protein activity, such as by the use of aptamers. Various methods are known in the art which can be used to design protein specific aptamers. The skilled artisan can employ SELEX (Systematic Evolution of Ligands by Exponential Enrichment) for efficient selection as described in Stoltenburg R, Reinemann C, and Strehlitz B (Biomolecular engineering (2007) 24(4):381-403).

[1858] In some embodiments, a small molecule, peptides or antibodies can be used which interfere with the Defense System component(s) protein function (e.g., catalytic or interaction).

[1859] In some embodiments, an anti-Defense agent comprises any molecule which binds to and/or cleaves a Defense System component gene or component polypeptide. Such molecules can be, for example, a small molecule, antagonists, or inhibitory peptide.

[1860] It will be appreciated that a non-functional analogue of at least a catalytic or binding portion of a Defense System polypeptide component can be also used as an anti-Defense System agent.

[1861] In some embodiments, there is provided a method of inducing phage sensitivity in bacteria, the method comprising introducing the agent disclosed herein into bacteria, which expresses a defense system having an anti-phage activity, said system comprising at least one component selected from the group consisting of said component polypeptides of said Defense System, thereby inducing sensitivity of the bacteria to phage infection.

[1862] In some embodiments, there is provided a method of killing bacteria, the method comprising introducing into bacteria, which expresses a defense system having an anti-phage activity, as described herein, an anti-defense system agent capable of down regulating expression and/or activity of a component polypeptide of the defense system, thereby killing the bacteria.

[1863] In another embodiment, there is provided an isolated anti-defense system agent capable of down regulating expression and/or activity of at least two defense system components. In some embodiments, the bacteria express the at least one Defense System component for which the anti-Defense System agent is directed against.

[1864] In some embodiments, the method further comprises infecting said bacteria with a phage.

[1865] Specifically, introducing an anti-Defense System agent is effected such that the positioning of the anti-Defense System agent is in direct or indirect contact with the bacterial cell. In some embodiments, both applying the anti-Defense System agent or agents disclosed herein to a desirable surface and/or directly to the bacterial cells. In some embodiments, the surface is comprised in a biological tissue, such as for example, mammalian tissues e.g. the skin.

[1866] It will be appreciated that the bacteria may be comprised inside a particular organism, (e.g. intracellularly or extracellularly) for example inside a mammalian body or inside a plant. In this case, the introducing may be effected by administering the anti-Defense System agent per se or by transfecting the cells of the organism with the anti-Defense System agents.

[1867] In some embodiments, introducing with an anti-Defense System agent is effected in-vivo. In some embodiments, introducing with an anti-Defense System agent is effected ex-vivo. In some embodiments, introducing with an anti-Defense System agent is effected in-vitro.

[1868] In some embodiments, there is provided isolated bacteria generated by introducing into bacteria an anti-Defense System agent as described above. In some embodiments, there is provided isolated bacteria generated by introducing into the bacteria an anti-Defense System agent in-vitro or ex-vivo.

[1869] Thus, following the above teachings there is provided isolated bacteria comprising the anti-Defense System agent.

[1870] According to some embodiments, a Defense System or an anti-Defense System agent is provided in a formulation suitable for cell penetration that enhances intracellular delivery of the system or the agent.

[1871] Any suitable penetrating agent for enhancing penetration of a Defense System or its components or an anti-Defense System agent to cell (e.g., bacteria) may be used, as known by those of skill in the art. Examples include but are not limited to:

[1872] Phages—Phages offer several advantages including lateral infection, higher efficiency of transformation, and targeting to, and propagation in, specific bacteria.

[1873] Cell-Penetrating Peptides (CPPs)—CPPs, for example TAT (transcription activator from HIV-1) are short peptides (≤40 amino acids), with the ability to gain access to the interior of almost any cell. They are highly cationic and usually rich in arginine and lysine amino acids. They have the exceptional property of carrying into the cells a wide variety of covalently and noncovalently conjugated cargoes such as proteins, oligonucleotides, and even 200 nm liposomes. Protocols for producing CPPs-cargos conjugates and for infecting cells with such conjugates can be found, for example L. Theodore et al. [The Journal of Neuroscience, (1995) 15(11): 7158-7167], Fawell S, et al. [Proc Natl Acad Sci USA, (1994) 91:664-668], and Jing Bian et al. [Circulation Research. (2007) 100: 1626-1633].

[1874] The expression level and/or activity level of the Defense System components expressed in the cells of some embodiments can be determined using methods known in the arts, e.g. but not limited to selectable marker gene, Northern blot analysis, PCR analysis, DNA sequencing, RNA sequencing, Western blot analysis or Immunohistochemistry.

[1875] In some embodiments, there is provided a method of treating bacterial infection in a subject in need thereof, the method comprising administering to the subject a therapeutically effective amount of the anti-Defense System agent, thereby treating the bacterial infection in the subject. In some embodiments, there is provided the agent, for use in the treatment of bacterial infection in a subject in need thereof.

[1876] A skilled artisan would appreciate that the term “treating” encompasses in some embodiments, curing, reversing, attenuating, alleviating, minimizing, suppressing or halting the deleterious effects of a pathogen infection. Those of skill in the art will understand that various methodologies and assays can be used to assess the development of the pathology, and similarly, various methodologies and assays may be used to assess the reversal, attenuation, alleviation or suppression of the pathology.

[1877] In some embodiments, a “subject in need thereof” includes but is not limited to mammals. In some embodiments, the subject comprises a human being of any gender and at any age which suffer from pathogen infection.

[1878] The anti-Defense System agent may be used alone or together with additional antimicrobial agents (e.g. phage therapy, antibiotic and/or additional anti-microbial peptides).

[1879] In some embodiments, a method disclosed herein further comprises administering to the subject a phage therapy and/or an antibiotic. In some embodiments, the uses further comprise a phage therapy and/or an antibiotic.

[1880] In some embodiments, antibiotics include, but are not limited to aminoglycoside antibiotics, cephalosporins, quinolone antibiotics, macrolide antibiotics, penicillin, sulfonamides, tetracyclines and carbapenems. It will be appreciated that since the agents disclosed herein, enhance the anti-bacterial effect of the antibiotic, doses of the antibiotic may be lower (e.g. 20% lower, 30% lower, 40% lower, 50% lower, 60% lower, 70% lower, 80% lower or even 90% lower) than those currently in use.

[1881] In the context of manufacturing of food products and especially fermented products in the food industry, an anti-Defense System agent can be used to eliminate spoilage bacteria or the end product from traces of used bacteria.

[1882] Thus, in some embodiments, there is provided a method of preparing a food, food additive, feed, nutritional supplement, probiotic supplement, personal care product, health care product and veterinary product, the method comprising adding to the food, food additive, feed, nutritional supplement, probiotic supplement, personal care product, health care product and veterinary product the anti-Defense System agent, thereby preparing the food, food additive, feed, nutritional supplement, probiotic supplement, personal care product, health care product and veterinary product.

[1883] Following the above teachings there is provided a food, food additive, feed, nutritional supplement, probiotic supplement, personal care product, health care product and veterinary product comprising the anti-Defense System agent.

[1884] The nucleic acid sequences, constructs, transmissible elements, polypeptides and cells comprising the Defense System components or the anti-Defense System agent of some embodiments, can be administered to a starter culture, a fermentation vat or an organism per se, or in a composition where it is mixed with suitable carriers or excipients.

[1885] The phrase “pharmaceutical composition” as used herein refers to a preparation of one or more of the active ingredients described herein with other chemical components such as physiologically suitable carriers and excipients. The purpose of a pharmaceutical composition is to facilitate administration of a compound to an organism.

[1886] Hereinafter, the phrases “physiologically acceptable carrier” and “pharmaceutically acceptable carrier” which may be interchangeably used refer to a carrier or a diluent that does not cause significant irritation to an organism and does not abrogate the biological activity and properties of the administered compound. An adjuvant is included under these phrases.

[1887] Herein, the term “excipient” refers to an inert substance added to a pharmaceutical composition to further facilitate administration of an active ingredient. Examples, without limitation, of excipients include calcium carbonate, calcium phosphate, various sugars and types of starch, cellulose derivatives, gelatin, vegetable oils, and polyethylene glycols.

[1888] As used herein the term “active ingredient” refers to any one of the component polypeptides or polynucleotides of a Defense System, an anti-Defense System agent, or cells generated according to the methods disclosed herein, accountable for the biological effect.

[1889] Techniques for formulation and administration of drugs may be found in the latest edition of “Remington's Pharmaceutical Sciences,” Mack Publishing Co., Easton, Pa., which is herein fully incorporated by reference and are further described herein below.

[1890] It will be appreciated that the polypeptides, polynucleotides, nucleic acid construct(s) or other agents can be provided to the individual with additional active agents to achieve an improved therapeutic effect as compared to treatment with each agent by itself.

[1891] In some embodiments, additional agents include phage therapy and antibiotics (e.g. rifampicin, chloramphenicol and spectinomycin).

[1892] In some embodiments, the composition further comprises a phage.

[1893] Suitable routes of administration may, for example, include oral, rectal, transmucosal, especially transnasal, intestinal or parenteral delivery, including intramuscular, subcutaneous and intramedullary injections as well as intrathecal, direct intraventricular, intracardiac, e.g., into the right or left ventricular cavity, into the common coronary artery, intravenous, intraperitoneal, intranasal, or intraocular injections.

[1894] Conventional approaches for drug delivery to the central nervous system (CNS) include: neurosurgical strategies (e.g., intracerebral injection or intracerebroventricular infusion); molecular manipulation of the agent (e.g., production of a chimeric fusion protein that comprises a transport peptide that has an affinity for an endothelial cell surface molecule in combination with an agent that is itself incapable of crossing the BBB) in an attempt to exploit one of the endogenous transport pathways of the BBB; pharmacological strategies designed to increase the lipid solubility of an agent (e.g., conjugation of water-soluble agents to lipid or cholesterol carriers); and the transitory disruption of the integrity of the BBB by hyperosmotic disruption (resulting from the infusion of a mannitol solution into the carotid artery or the use of a biologically active agent such as an angiotensin peptide). However, each of these strategies has limitations, such as the inherent risks associated with an invasive surgical procedure, a size limitation imposed by a limitation inherent in the endogenous transport systems, potentially undesirable biological side effects associated with the systemic administration of a chimeric molecule comprised of a carrier motif that could be active outside of the CNS, and the possible risk of brain damage within regions of the brain where the BBB is disrupted, which renders it a suboptimal delivery method.

[1895] Alternately, one may administer the pharmaceutical composition in a local rather than systemic manner, for example, via injection of the pharmaceutical composition directly into a tissue region of a patient.

[1896] Pharmaceutical compositions may be manufactured by processes well known in the art, e.g., by means of conventional mixing, dissolving, granulating, dragee-making, levigating, emulsifying, encapsulating, entrapping or lyophilizing processes.

[1897] Pharmaceutical compositions for use in accordance with the disclosure herein, may be formulated in conventional manner using one or more physiologically acceptable carriers comprising excipients and auxiliaries, which facilitate processing of the active ingredients into preparations which, can be used pharmaceutically. Proper formulation is dependent upon the route of administration chosen.

[1898] For injection, the active ingredients may be formulated in aqueous solutions, preferably in physiologically compatible buffers such as Hank's solution, Ringer's solution, or physiological salt buffer. For transmucosal administration, penetrants appropriate to the barrier to be permeated are used in the formulation. Such penetrants are generally known in the art.

[1899] For oral administration, the compounds can be formulated readily by combining the active compounds with pharmaceutically acceptable carriers well known in the art. Such carriers enable the compounds to be formulated as tablets, pills, dragees, capsules, liquids, gels, syrups, slurries, suspensions, and the like, for oral ingestion by a patient. Pharmacological preparations for oral use can be made using a solid excipient, optionally grinding the resulting mixture, and processing the mixture of granules, after adding suitable auxiliaries if desired, to obtain tablets or dragee cores. Suitable excipients are, in particular, fillers such as sugars, including lactose, sucrose, mannitol, or sorbitol; cellulose preparations such as, for example, maize starch, wheat starch, rice starch, potato starch, gelatin, gum tragacanth, methyl cellulose, hydroxypropylmethyl-cellulose, sodium carbomethylcellulose; and/or physiologically acceptable polymers such as polyvinylpyrrolidone (PVP). If desired, disintegrating agents may be added, such as cross-linked polyvinyl pyrrolidone, agar, or alginic acid or a salt thereof such as sodium alginate.

[1900] Dragee cores are provided with suitable coatings. For this purpose, concentrated sugar solutions may be used which may optionally contain gum arabic, talc, polyvinyl pyrrolidone, carbopol gel, polyethylene glycol, titanium dioxide, lacquer solutions and suitable organic solvents or solvent mixtures. Dyestuffs or pigments may be added to the tablets or dragee coatings for identification or to characterize different combinations of active compound doses.

[1901] Pharmaceutical compositions, which can be used orally, include push-fit capsules made of gelatin as well as soft, sealed capsules made of gelatin and a plasticizer, such as glycerol or sorbitol. The push-fit capsules may contain the active ingredients in admixture with filler such as lactose, binders such as starches, lubricants such as talc or magnesium stearate and, optionally, stabilizers. In soft capsules, the active ingredients may be dissolved or suspended in suitable liquids, such as fatty oils, liquid paraffin, or liquid polyethylene glycols. In addition, stabilizers may be added. All formulations for oral administration should be in dosages suitable for the chosen route of administration.

[1902] For buccal administration, the compositions may take the form of tablets or lozenges formulated in conventional manner.

[1903] For administration by nasal inhalation, the active ingredients for use according to the disclosure herein are conveniently delivered in the form of an aerosol spray presentation from a pressurized pack or a nebulizer with the use of a suitable propellant, e.g., dichlorodifluoromethane, trichlorofluoromethane, dichloro-tetrafluoroethane or carbon dioxide. In the case of a pressurized aerosol, the dosage unit may be determined by providing a valve to deliver a metered amount. Capsules and cartridges of, e.g., gelatin for use in a dispenser may be formulated containing a powder mix of the compound and a suitable powder base such as lactose or starch.

[1904] The preparations described herein may be formulated for parenteral administration, e.g., by bolus injection or continuous infusion. Formulations for injection may be presented in unit dosage form, e.g., in ampoules or in multidose containers with optionally, an added preservative. The compositions may be suspensions, solutions or emulsions in oily or aqueous vehicles, and may contain formulatory agents such as suspending, stabilizing and/or dispersing agents.

[1905] Pharmaceutical compositions for parenteral administration include aqueous solutions of the active preparation in water-soluble form. Additionally, suspensions of the active ingredients may be prepared as appropriate oily or water based injection suspensions. Suitable lipophilic solvents or vehicles include fatty oils such as sesame oil, or synthetic fatty acids esters such as ethyl oleate, triglycerides or liposomes. Aqueous injection suspensions may contain substances, which increase the viscosity of the suspension, such as sodium carboxymethyl cellulose, sorbitol or dextran. Optionally, the suspension may also contain suitable stabilizers or agents which increase the solubility of the active ingredients to allow for the preparation of highly concentrated solutions.

[1906] Alternatively, the active ingredient may be in powder form for constitution with a suitable vehicle, e.g., sterile, pyrogen-free water based solution, before use.

[1907] The preparation may also be formulated in rectal compositions such as suppositories or retention enemas, using, e.g., conventional suppository bases such as cocoa butter or other glycerides.

[1908] The preparation may also be formulated as a topical composition, such as a spray, a cream, a mouthwash, a wipe, a foam, a soap, an oil, a solution, a lotion, an ointment, a paste, a gel and a patch.

[1909] Pharmaceutical compositions suitable for use in context include compositions wherein the active ingredients are contained in an amount effective to achieve the intended purpose. More specifically, a therapeutically effective amount means an amount of active ingredients effective to prevent, alleviate or ameliorate symptoms of disease (e.g., bacterial infection) or prolong the survival of the subject being treated.

[1910] Determination of a therapeutically effective amount is well within the capability of those skilled in the art.

[1911] For any preparation used in the methods disclosed herein, the therapeutically effective amount or dose can be estimated initially from in vitro assays. For example, a dose can be formulated in animal models and such information can be used to more accurately determine useful doses in humans.

[1912] Toxicity and therapeutic efficacy of the active ingredients described herein can be determined by standard pharmaceutical procedures in vitro, in cell cultures or experimental animals. The data obtained from these in vitro and cell culture assays and animal studies can be used in formulating a range of dosage for use in human. The dosage may vary depending upon the dosage form employed and the route of administration utilized. The exact formulation, route of administration and dosage can be chosen by the individual physician in view of the patient's condition. [See e.g., Fingl, et al., (1975) “The Pharmacological Basis of Therapeutics”, Ch. 1 p. 1].

[1913] Depending on the severity and responsiveness of the condition to be treated, dosing can be of a single or a plurality of administrations, with course of treatment lasting from several days to several weeks or until cure is effected or diminution of the disease state is achieved.

[1914] The amount of a composition to be administered will, of course, be dependent on e.g. the subject being treated, the severity of the affliction, the manner of administration, the judgment of the prescribing physician, etc.

[1915] Compositions of some embodiments, may, if desired, be presented in a pack or dispenser device, such as an FDA approved kit, which may contain one or more unit dosage forms containing the active ingredient. The pack may, for example, comprise metal or plastic foil, such as a blister pack. The pack or dispenser device may be accompanied by instructions for administration. The pack or dispenser may also be accommodated by a notice associated with the container in a form prescribed by a governmental agency regulating the manufacture, use or sale of pharmaceuticals, which notice is reflective of approval by the agency of the form of the compositions or human or veterinary administration. Such notice, for example, may be of labeling approved by the U.S. Food and Drug Administration for prescription drugs or of an approved product insert. Compositions comprising a preparation formulated in a compatible pharmaceutical carrier may also be prepared, placed in an appropriate container, and labeled for treatment of an indicated condition, as is further detailed above.

[1916] In some embodiments, there is provided an article of manufacture or a kit identified for treating bacterial infection comprising the anti-Defense System agent; and a phage and/or an antibiotic. In some embodiments, the anti-Defense System agent and the phage and/or the antibiotic are packaged in separate containers. In some embodiments, the anti-Defense System agent and the phage and/or the antibiotic are in co-formulation.

[1917] In some embodiments, there is provided a method of screening for identifying phage useful for infecting bacteria, the method comprising:

[1918] (a) contacting a phage with bacteria expressing a Defense System; and

[1919] (b) determining deleterious effects induced in said bacteria, wherein an increase in deleterious effects of said bacteria in the presence of said phage compared to deleterious effects in the absence of said phage is indicative of a phage useful for infecting said bacteria.

[1920] In some embodiments, the method comprising further isolating the phage, characterizing it in terms of sequencing and compatibility with phages species and the ability to infect different bacterial species.

### Use of a Defense System or Components Thereof, for Gene Editing

[1921] In some embodiments, disclosed herein is a method of gene editing, the method comprising contacting a nucleic acid sequence with a defense system component, as described herein, wherein said contact edits a gene sequence within the nucleic acid. In some embodiments, said editing comprises deleting a gene, deleting a portion of a gene, deleting upstream regulatory sequences of a gene, deleting downstream regulatory sequences of a gene, deleting upstream and downstream regulatory sequences of a gene, repairing a gene sequence, replacing a gene, replacing a part of a gene, replacing an upstream sequence of a gene, replacing a downstream sequence of a gene, replacing an upstream and a downstream sequence of a gene, modifying a gene sequence, modifying a sequence upstream of a gene, modifying a sequence downstream of a gene, modifying a sequence upstream and downstream of a gene, or a combination thereof.

[1922] In some embodiments, use of a defense system component, as described herein, for gene editing provides greater precision in editing a nucleotide sequence. In some embodiments, gene editing provides greater precision of cutting the nucleotide sequence at a cleavage site. In some embodiments, gene editing comprising cutting the nucleic acid sequence at a specific cleavage site. In some embodiments, gene editing comprising cutting the nucleic acid sequence based on the modification of nucleotides within the nucleic acid. In some embodiments, gene editing comprising inhibition of cutting the nucleic acid sequence based on the modification of nucleotides within the nucleic acid. In some embodiments, cleavage comprises cleavage of the phosphodiester bond within a nucleotide sequence. In some embodiments, cleavage is ATP dependent.

[1923] In some embodiments, use of a defense system component, as described herein, for gene editing provides separation of two annealed nucleic acid strands. In some embodiments, gene editing comprises separation of double stranded DNA. In some embodiments, gene editing comprises separation of double stranded RNA. In some embodiments, gene editing comprises separation of a double stranded RNA-DNA hybrid. In some embodiments, separation uses energy derived from ATP hydrolysis. In some embodiments, separation of a double stranded sequence is based on the specific sequence of the double stranded sequence. In some embodiments, separation of a double stranded sequence is based on the methylation pattern within the double stranded sequence. In some embodiments, separation of a double stranded sequence is based on the modification pattern within the double stranded sequence.

[1924] In some embodiments, use of a defense system component, as described herein, for gene editing provides unwinding of a double stranded nucleic acid sequence one base at a time. In some embodiments, unwinding is of a double stranded DNA. In some embodiments, unwinding is of a double stranded RNA. In some embodiments, unwinding is of a hybrid double stranded RNA-DNA. In some embodiments, unwinding uses energy derived from ATP hydrolysis. In some embodiments, unwinding of a double stranded sequence is based on the specific sequence of the double stranded sequence. In some embodiments, unwinding of a double stranded sequence is based on the methylation pattern within the double stranded sequence. In some embodiments, unwinding of a double stranded sequence is based on the modification pattern within the double stranded sequence.

[1925] In some embodiments, use of a defense system component, as described herein, for gene editing provides cleaving nucleotides one at a time from the end of a polynucleotide chain. In some embodiments, the polynucleotide change comprises DNA. In some embodiments, the polynucleotide chain comprises RNA. In some embodiments, the polynucleotide chain comprises a hybrid RNA-DNA construct. In some embodiments, cleavage is based on the specific sequence of the double stranded sequence. In some embodiments, cleavage is based on the methylation pattern within the double stranded sequence. In some embodiments, cleavage is based on the modification pattern within the double stranded sequence.

[1926] In some embodiments, use of a defense system component, as described herein, for gene editing provides overwinding or underwinding of DNA. In some embodiments, the overwinding or underwinding comprises cleavage of the phosphate backbone of one of the DNA strands. In some embodiments, the overwinding or underwinding comprises cleavage of the phosphagen backbone of both of the DNA strands. In some embodiments, overwinding or underwinding is based on the specific sequence of the double stranded sequence. In some embodiments, overwinding or underwinding is based on the methylation pattern within the double stranded sequence. In some embodiments, overwinding or underwinding is based on the modification pattern within the double stranded sequence.

[1927] In some embodiments, modifications comprise methylation and acetylation. In some embodiments, methylation comprises methylation of adenine bases. In some embodiments, methylation comprises methylation of cytosine bases.

[1928] In some embodiments, gene editing comprises cutting the nucleic acid sequence based on the methylation pattern of the nucleic acid. In some embodiments, gene editing comprising cutting the nucleic acid sequence based on the lack of methylation of the nucleic acid. In some embodiments, gene editing comprises inhibition of cutting the nucleic acid sequence based on the methylation pattern of the nucleic acid. In some embodiments, gene editing comprising inhibition of cutting the nucleic acid sequence based on the lack of methylation of the nucleic acid.

[1929] A skilled artisan would appreciate that the terms “cutting” and “cleaving” may be used interchangeably in some embodiments, having all the qualities and meanings.

[1930] In some embodiments, cutting a nucleic acid sequence comprises cleavage of a single stranded nucleic acid. In some embodiments, cutting a nucleic acid sequence comprises cleavage of a double stranded nucleic acid. In some embodiments, cutting a nucleic acid sequence comprises cleavage of a DNA molecule. In some embodiments, cutting a nucleic acid sequence comprises cleavage of an RNA molecule.

[1931] In some embodiments, cutting a nucleic acid sequence comprises recognizing a specific nucleotide sequence. In some embodiments, cutting a nucleic acid sequence comprises recognizing a specific pattern of methylation of a nucleotide sequence. In some embodiments, editing comprising inhibiting cleavage of a nucleic acid sequence, wherein said inhibition of cleavage comprises recognizing a specific pattern of methylation of the nucleotide sequence.

[1932] In some embodiments, the nucleotide sequence being edited is comprised in a cell. In some embodiments, the nucleotide sequence being edited is not comprised within a cell. In some embodiments, editing of a nucleotide sequence within a cell, comprises genetically engineering the cell.

[1933] In some embodiments, genetic engineering of a cell comprises deleting a gene, deleting a portion of a gene, deleting upstream regulatory sequences of a gene, deleting downstream regulatory sequences of a gene, deleting upstream and downstream regulatory sequences of a gene, repairing a gene sequence, replacing a gene, replacing a part of a gene, replacing an upstream sequence of a gene, replacing a downstream sequence of a gene, replacing an upstream and a downstream sequence of a gene, modifying a gene sequence, modifying a sequence upstream of a gene, modifying a sequence downstream of a gene, modifying a sequence upstream and downstream of a gene, or a combination thereof, within the cell.

[1934] In some embodiments, a cell comprises a eukaryotic cell. In some embodiments, a cell comprises a prokaryotic cell. In some embodiments, a cell comprises a plant cell. In some embodiments, a cell comprises a yeast cell. In some embodiments, a cell comprises a protozoa cell.

[1935] In some embodiments, genetic engineering of a cell provides cells useful in treating a disease.

[1936] In some embodiments, genetic engineering of a plant cell provides for improved plant growth. In some embodiments, genetic engineering of a plant cell provides for improved plant growth under adverse conditions, including but not limited to extreme heat, extreme cold, drought, high salt content, lack of nutrients, or any combination thereof. In some embodiments, genetic engineering of a plant cell provides for higher crop yield. In some embodiments, genetic engineering of a plant cell provides for higher crop yield under adverse conditions, including but not limited to extreme heat, extreme cold, drought, high salt content, lack of nutrients, or any combination thereof.

[1937] In some embodiments, gene editing provides improved identification and validation of therapeutic agents. In some embodiments, gene editing provides improved development and production of animal models of human disease. In some embodiments, uses of gene editing leading to improvements comprises performing the work in a shorter amount of time and with more precision.

[1938] In some embodiments, a method of gene editing a nucleic acid sequence comprises contacting the nucleic acid sequence with a component of a defense system as described herein, thereby editing the nucleic acid sequence. In some embodiments, a method of cutting a nucleic acid sequence comprises contacting the nucleic acid sequence with a component of a defense system as described herein, thereby cutting the nucleic acid sequence.

[1939] Components of defense systems have been described in detail here (Tables 7-17 and 18).

[1940] In some embodiments, a method of editing a nucleic acid sequence comprises contacting the nucleic acid sequence with a component of a Defense System Ia, said component comprising a ZorA polypeptide, a ZorB polypeptide, a ZorC polypeptide, or a ZorD polypeptide, thereby editing the nucleic acid sequence.

[1941] In some embodiments, a method of editing a nucleic acid sequence comprises contacting the nucleic acid sequence with a component of a Defense System Ib, said component comprising a ZorA polypeptide, a ZorB polypeptide, or a ZorD polypeptide, thereby editing the nucleic acid sequence.

[1942] In some embodiments, a method of editing a nucleic acid sequence comprises contacting the nucleic acid sequence with a component of a Defense System II, said component comprising a ThsA polypeptide or a ThsB polypeptide, thereby editing the nucleic acid sequence.

[1943] In some embodiments, a method of editing a nucleic acid sequence comprises contacting the nucleic acid sequence with a component of a Defense System IIIa, said component comprising a DruA polypeptide, a DruB polypeptide, a DruC polypeptide, a DruD polypeptide, or a DruE polypeptide, thereby editing the nucleic acid sequence.

[1944] In some embodiments, a method of editing a nucleic acid sequence comprises contacting the nucleic acid sequence with a component of a Defense System IIIb, said component comprising a DruM polypeptide, a DruF polypeptide, a DruG polypeptide, or a DruE polypeptide, thereby editing the nucleic acid sequence.

[1945] In some embodiments, a method of editing a nucleic acid sequence comprises contacting the nucleic acid sequence with a component of a Defense System IIIc, said component comprising a DruH polypeptide, or a DruE polypeptide, thereby editing the nucleic acid sequence.

[1946] In some embodiments, a method of editing a nucleic acid sequence comprises contacting the nucleic acid sequence with a component of a Defense System IV, said component comprising a HamA polypeptide or a HamB polypeptide, thereby editing the nucleic acid sequence.

[1947] In some embodiments, a method of editing a nucleic acid sequence comprises contacting the nucleic acid sequence with a component of a Defense System V, said component comprising a SduA polypeptide, thereby editing the nucleic acid sequence.

[1948] In some embodiments, a method of editing a nucleic acid sequence comprises contacting the nucleic acid sequence with a component of a Defense System VI, said component comprising a GajA polypeptide or a GajB polypeptide, thereby editing the nucleic acid sequence.

[1949] In some embodiments, a method of editing a nucleic acid sequence comprises contacting the nucleic acid sequence with a component of a Defense System VII, said component comprising a PtuA polypeptide or a PtuB polypeptide, thereby editing the nucleic acid sequence.

[1950] In some embodiments, a method of editing a nucleic acid sequence comprises contacting the nucleic acid sequence with a component of a Defense System VIII, said component comprising a LmuA polypeptide or a LmuB polypeptide, thereby editing the nucleic acid sequence.

[1951] In some embodiments, a method of editing a nucleic acid sequence comprises contacting the nucleic acid sequence with a component of a Defense System IX, said component comprising a KwaA polypeptide or a KwaB polypeptide, thereby editing the nucleic acid sequence.

[1952] In some embodiments, a method of editing a nucleic acid sequence comprises contacting the nucleic acid sequence with a component of a Defense System Xa, said component comprising a JetA polypeptide, a JetB polypeptide, a JetC polypeptide, or a JetD polypeptide, thereby editing the nucleic acid sequence.

[1953] In some embodiments, a method of editing a nucleic acid sequence comprises contacting the nucleic acid sequence with a component of a Defense System Xb, said component comprising a JetAⁱⁱ polypeptide, a JetBⁱⁱ polypeptide, a JetCⁱⁱ polypeptide, or a JetDⁱⁱ polypeptide, thereby editing the nucleic acid sequence.

[1954] In some embodiments, a method of editing a nucleic acid sequence comprises contacting the nucleic acid sequence with a component of a Defense System Xc, said component comprising a JetAⁱⁱⁱ polypeptide, a JetBⁱⁱⁱ polypeptide, a JetCⁱⁱⁱ polypeptide, or a JetDⁱⁱ polypeptide, thereby editing the nucleic acid sequence.

[1955] In some embodiments, a method of editing a nucleic acid sequence comprises editing said sequence within a cell. One skilled in the art would appreciate that a method of editing a nucleic acid sequence within a cell comprises in some embodiments, expressing a component of a defense system in the cell. Genes encoding the components of defense systems described herein, have been described in detail (Tables 7-17 and 18).

[1956] In some embodiments, contacting the nucleic acid sequence with the defense system component can be performed by any in vitro conditions including for example, adding a defense system polypeptide to a naked nucleic acid sequence, adding a defense system polypeptide to a cell expressing the nucleic acid sequence, or introducing a defense system gene nucleotide sequence into a cell and expressing the gene sequence, such that the defense system component is in or comes into direct contact with the nucleic acid sequence to be edited.

[1957] The contacting may be effected with at least 1, at least 2, at least 3, or at least 4 defense system components.

[1958] In some embodiments, the contacting is effected with a ZorA, ZorB, ZorC, or ZorD polypeptide, or any combination thereof. In some embodiments, the contacting is effected with a ZorA, ZorB, or ZorE polypeptide, or any combination thereof. In some embodiments, the contacting is effected with a ThsA or a ThsB polypeptide, or any combination thereof. In some embodiments, the contacting is effected with a DruA, DruB, DruC, DruD, or DruE polypeptide, or any combination thereof. In some embodiments, the contacting is effected with a DruM, DruF, DruG, or DruE polypeptide, or any combination thereof. In some embodiments, the contacting is effected with a DruH or a DruE polypeptide, or any combination thereof. In some embodiments, the contacting is effected with a HamA or a HamB polypeptide, or any combination thereof. In some embodiments, the contacting is affected with a SduA polypeptide, or any combination thereof. In some embodiments, the contacting is effected with a GajA or a GajB polypeptide, or any combination thereof. In some embodiments, the contacting is effected with a PtuA or a PtuB polypeptide, or any combination thereof. In some embodiments, the contacting is affected with a Lmu or a LmuB polypeptide, or any combination thereof. In some embodiments, the contacting is effected with a KwaA or a KwaB polypeptide, or any combination thereof. In some embodiments, the contacting is effected with a JetA, JetB, JetC, or JetD polypeptide, or any combination thereof. In some embodiments, the contacting is effected with a JetAⁱⁱ, JetBⁱⁱ, JetCⁱⁱ, or JetDⁱⁱ polypeptide, or any combination thereof. In some embodiments, the contacting is effected with a JetAⁱⁱⁱ, JetBⁱⁱⁱ, JetCⁱⁱⁱ, or JetDⁱⁱⁱ polypeptide, or any combination thereof.

[1959] In some embodiments, the nucleic acid sequence being edited is comprised in a cell. In some embodiments, the nucleic acid sequence being edited is comprised in a cell that is not expressing an endogenous defense system or components thereof. In some embodiments, the nucleic acid sequence being edited is comprised in a cell that is not expressing an endogenous functional defense system or components thereof.

[1960] In some embodiments, the nucleic acid sequence being edited is not comprised in a cell expressing an endogenous defense system or components thereof. In some embodiments, the nucleic acid sequence being edited is not comprised in a cell expressing an endogenous functional defense system or components thereof.

[1961] In some embodiments, wherein the nucleic acid being edited is comprised in a cell expressing a component polypeptide of a defense system, the method further comprises introducing into the cell an agent capable of downregulating expression and/or activity of the expressed component polypeptide.

[1962] In some embodiments, a method of editing a nucleic acid sequence within a cell comprises expressing a component of a Defense System Ia within said cell, said component comprising a ZorA polypeptide, a ZorB polypeptide, a ZorC polypeptide, or a ZorD polypeptide, thereby editing the nucleic acid sequence.

[1963] In some embodiments, a method of editing a nucleic acid sequence within a cell comprises expressing a component of a Defense System Ib within said cell, said component comprising a ZorA polypeptide, a ZorB polypeptide, or a ZorD polypeptide, thereby editing the nucleic acid sequence.

[1964] In some embodiments, a method of editing a nucleic acid sequence within a cell comprises expressing a component of a Defense System II within said cell, said component comprising a ThsA polypeptide or a ThsB polypeptide, thereby editing the nucleic acid sequence.

[1965] In some embodiments, a method of editing a nucleic acid sequence within a cell comprises expressing a component of a Defense System IIIa within said cell, said component comprising a DruA polypeptide, a DruB polypeptide, a DruC polypeptide, a DruD polypeptide, or a DruE polypeptide, thereby editing the nucleic acid sequence.

[1966] In some embodiments, a method of editing a nucleic acid sequence within a cell comprises expressing a component of a Defense System IIIb within said cell, said component comprising a DruM polypeptide, a DruF polypeptide, a DruG polypeptide, or a DruE polypeptide, thereby editing the nucleic acid sequence.

[1967] In some embodiments, a method of editing a nucleic acid sequence within a cell comprises expressing a component of a Defense System IIIc within said cell, said component comprising a DruH polypeptide, or a DruE polypeptide, thereby editing the nucleic acid sequence.

[1968] In some embodiments, a method of editing a nucleic acid sequence within a cell comprises expressing a component of a Defense System IV within said cell, said component comprising a HamA polypeptide or a HamB polypeptide, thereby editing the nucleic acid sequence.

[1969] In some embodiments, a method of editing a nucleic acid sequence within a cell comprises expressing a component of a Defense System V within said cell, said component comprising a SduA polypeptide, thereby editing the nucleic acid sequence.

[1970] In some embodiments, a method of editing a nucleic acid sequence within a cell comprises expressing a component of a Defense System VI within said cell, said component comprising a GajA polypeptide or a GajB polypeptide, thereby editing the nucleic acid sequence.

[1971] In some embodiments, a method of editing a nucleic acid sequence within a cell comprises expressing a component of a Defense System VII within said cell, said component comprising a PtuA polypeptide or a PtuB polypeptide, thereby editing the nucleic acid sequence.

[1972] In some embodiments, a method of editing a nucleic acid sequence within a cell comprises expressing a component of a Defense System VIII within said cell, said component comprising a LmuA polypeptide or a LmuB polypeptide, thereby editing the nucleic acid sequence.

[1973] In some embodiments, a method of editing a nucleic acid sequence within a cell comprises expressing a component of a Defense System IX within said cell, said component comprising a KwaA polypeptide or a KwaB polypeptide, thereby editing the nucleic acid sequence.

[1974] In some embodiments, a method of editing a nucleic acid sequence within a cell comprises expressing a component of a Defense System Xa within said cell, said component comprising a JetA polypeptide, a JetB polypeptide, a JetC polypeptide, or a JetD polypeptide, thereby editing the nucleic acid sequence.

[1975] In some embodiments, a method of editing a nucleic acid sequence within a cell comprises expressing a component of a Defense System Xb within said cell, said component comprising a JetAⁱⁱ polypeptide, a JetBⁱⁱ polypeptide, a JetCⁱⁱ polypeptide, or a JetDⁱⁱ polypeptide, thereby editing the nucleic acid sequence.

[1976] In some embodiments, a method of editing a nucleic acid sequence within a cell comprises expressing a component of a Defense System Xc within said cell, said component comprising a JetAⁱⁱⁱ polypeptide, a JetBⁱⁱⁱ polypeptide, a JetCⁱⁱⁱ polypeptide, or a JetDⁱⁱ polypeptide, thereby editing the nucleic acid sequence.

[1977] In some embodiments, a method of editing a nucleic acid sequence within a cell comprises expressing a gene encoding a component of a Defense System Ia within said cell, said gene comprising a zorA gene, a zorB gene, a zorC gene, or a zorD gene, thereby editing the nucleic acid sequence.

[1978] In some embodiments, a method of editing a nucleic acid sequence within a cell comprises expressing a gene encoding a component of a Defense System Ib within said cell, said gene comprising a zorA gene, a zorB gene, or a zorD gene, thereby editing the nucleic acid sequence.

[1979] In some embodiments, a method of editing a nucleic acid sequence within a cell comprises expressing a gene encoding a component of a Defense System II within said cell, said gene comprising a thsA gene or a thsB gene, thereby editing the nucleic acid sequence.

[1980] In some embodiments, a method of editing a nucleic acid sequence within a cell comprises expressing a gene encoding a component of a Defense System IIIa within said cell, said gene comprising a druA gene, a druB gene, a druC gene, a druD polypeptide, or a druE gene, thereby editing the nucleic acid sequence.

[1981] In some embodiments, a method of editing a nucleic acid sequence within a cell comprises expressing a gene encoding a component of a Defense System IIIb within said cell, said gene comprising a druM gene, a druF gene, a druG gene, or a druE gene, thereby editing the nucleic acid sequence.

[1982] In some embodiments, a method of editing a nucleic acid sequence within a cell comprises expressing a gene encoding a component of a Defense System IIIc within said cell, said gene comprising a druH gene, or a druE gene, thereby editing the nucleic acid sequence.

[1983] In some embodiments, a method of editing a nucleic acid sequence within a cell comprises expressing a gene encoding a component of a Defense System IV within said cell, said gene comprising a hamA gene or a hamB gene, thereby editing the nucleic acid sequence.

[1984] In some embodiments, a method of editing a nucleic acid sequence within a cell comprises expressing a gene encoding a component of a Defense System V within said cell, said gene comprising a sduA gene, thereby editing the nucleic acid sequence.

[1985] In some embodiments, a method of editing a nucleic acid sequence within a cell comprises expressing a gene encoding a component of a Defense System VI within said cell, said gene comprising a gajA gene or a gajB gene, thereby editing the nucleic acid sequence.

[1986] In some embodiments, a method of editing a nucleic acid sequence within a cell comprises expressing a gene encoding a component of a Defense System VII within said cell, said gene comprising a ptuA gene or a ptuB gene, thereby editing the nucleic acid sequence.

[1987] In some embodiments, a method of editing a nucleic acid sequence within a cell comprises expressing a gene encoding a component of a Defense System VIII within said cell, said gene comprising a lmuA gene or a lmuB gene, thereby editing the nucleic acid sequence.

[1988] In some embodiments, a method of editing a nucleic acid sequence within a cell comprises expressing a gene encoding a component of a Defense System IX within said cell, said gene comprising a kwaA gene or a kwaB gene, thereby editing the nucleic acid sequence.

[1989] In some embodiments, a method of editing a nucleic acid sequence within a cell comprises expressing a gene encoding a component of a Defense System Xa within said cell, said gene comprising a jetA gene, a jetB gene, a jetC gene, or a jetD gene, thereby editing the nucleic acid sequence.

[1990] In some embodiments, a method of editing a nucleic acid sequence within a cell comprises expressing a gene encoding a component of a Defense System Xb within said cell, said gene comprising a jetAⁱⁱ gene, a jetBⁱⁱ gene, a jetCⁱⁱ gene, or a jetDⁱⁱ gene, thereby editing the nucleic acid sequence.

[1991] In some embodiments, a method of editing a nucleic acid sequence within a cell comprises expressing a gene encoding a component of a Defense System Xc within said cell, said gene comprising a jetAⁱⁱⁱ gene, a jetBⁱⁱⁱ gene, a jetCⁱⁱⁱ gene, or a jetDⁱⁱⁱ gene, thereby editing the nucleic acid sequence.

[1992] In some embodiments, the nucleic acid sequence being editing is not comprised in a cell expressing the defense system component. In some embodiments, the nucleic acid sequence being editing is not comprised in a cell expression a defense system polypeptide component comprising a ZorA, ZorB, ZorC, ZorD, ZorE, ThsA, ThsB, DruA, DruB, DruC, DruD, DruE, DruM, DruF, DruG, DruH, HamA, HamB, SduA, GajA, GajB, PtuA, PtuB, LmuA, LmuB, KwaA, KwaB, JetA, JetB, JetC, JetD, JetAⁱⁱ, JetBⁱⁱ, JetCⁱⁱ, JetDⁱⁱ, JetAiⁱⁱ, JetBⁱⁱⁱ, JetCⁱⁱⁱ, or JetDⁱⁱⁱ polypeptide.

[1993] In some embodiments, the nucleic acid sequence being editing is not comprised in a cell expressing a defense system gene encoding the polypeptide component, said gene comprising a zorA, zorB, zorC, zorD, zorE, thsA, thsB, druA, druB, druC, druD, druE, druM, druF, druG, druH, hamA, hamB, sduA, gajA, gajB, ptuA, ptuB, lmuA, lmuB, kwaA, kwaB, jetA, jetB, jetC, jetD, jetAⁱⁱ, jetBⁱⁱ, jetCⁱⁱ, jetDⁱⁱ, jetAⁱⁱⁱ, jetBⁱⁱⁱ, jetCⁱⁱⁱ, or jetDⁱⁱⁱ gene.

[1994] In some embodiments, the nucleic acid sequence being editing is not comprised in a cell expressing a functional defense system component. In some embodiments, the nucleic acid sequence being editing is not comprised in a cell expression a functional defense system polypeptide component comprising a ZorA, ZorB, ZorC, ZorD, ZorE, ThsA, ThsB, DruA, DruB, DruC, DruD, DruE, DruM, DruF, DruG, DruH, HamA, HamB, SduA, GajA, GajB, PtuA, PtuB, LmuA, LmuB, KwaA, KwaB, JetA, JetB, JetC, JetD, JetAⁱⁱ, JetBⁱⁱ, JetCⁱⁱ, JetDⁱⁱ, JetAiⁱⁱ, JetBⁱⁱⁱ, JetCⁱⁱⁱ, or JetDⁱⁱⁱ.

[1995] In some embodiments, the nucleic acid sequence being editing is not comprised in a cell expressing a functional defense system gene encoding the polypeptide component, said gene comprising a zorA, zorB, zorC, zorD, zorE, thsA, thsB, druA, druB, druC, druD, druE, druM, druF, druG, druH, hamA, hamB, sduA, gajA, gajB, ptuA, ptuB, lmuA, lmuB, kwaA, kwaB, jetA, jetB, jetC, jetD, jetAⁱⁱ, jetBⁱⁱ, jetCⁱⁱ, jetDⁱⁱ, jetAⁱⁱⁱ, jetBⁱⁱⁱ, jetCⁱⁱⁱ, or jetDⁱⁱⁱ gene.

[1996] In some embodiments, there is provided a method of cloning an expression product of interest, the method comprising:

[1997] (a) introducing into a nucleic acid construct a polynucleotide encoding the expression product of interest and a defense system component comprising a nucleic acid cleavage activity, or an unwinding activity; and

[1998] (b) further introducing into said nucleic acid construct an additional at least one component of the defense system, thereby cloning the expression product of interest.

[1999] In some embodiments, step (b) comprises introducing into said nucleic acid construct any other component of the defense system. In some embodiments, step (b) comprises introducing into said nucleic acid construct all other component of the defense system. In some embodiments, step (b) comprises introducing into said nucleic acid construct component of the defense system to form a functional defense system. According to some embodiments the cell does not express an endogenous defense system. In some embodiments, the nucleic acid sequence being edited is not comprised in a cell expressing an endogenous functional version of the defense system.

[2000] In a non-limited example, in some embodiments, there is provided a method of cloning an expression product of interest, the method comprising:

[2001] (a) introducing into a nucleic acid construct a polynucleotide encoding the expression product of interest and a DruM; and

[2002] (b) introducing into said nucleic acid construct a Druantia (Type II) system component selected from the group consisting of: a DruF polypeptide; a DruG polypeptide; and a DruE polypeptide; or any combination thereof, thereby cloning the expression product of interest.

[2003] According to some embodiments the cell does not express an endogenous Druantia system. In some embodiments, the nucleic acid sequence being edited is not comprised in a cell expressing an endogenous functional Druantia (Type II) system.

[2004] As used herein the term “about” refers to ±10%

[2005] As used herein, the singular form “a”, “an” and “the” include plural references unless the context clearly dictates otherwise. For example, the term “a compound” or “at least one compound” may include a plurality of compounds, including mixtures thereof.

[2006] Throughout this application, various embodiments are disclosed that may be presented in a range format. It should be understood that the description in range format is merely for convenience and brevity and should not be construed as an inflexible limitation on the scope. Accordingly, the description of a range should be considered to have specifically disclosed all the possible subranges as well as individual numerical values within that range. For example, description of a range such as from 1 to 6 should be considered to have specifically disclosed subranges such as from 1 to 3, from 1 to 4, from 1 to 5, from 2 to 4, from 2 to 6, from 3 to 6 etc., as well as individual numbers within that range, for example, 1, 2, 3, 4, 5, and 6. This applies regardless of the breadth of the range.

[2007] Whenever a numerical range is indicated herein, it is meant to include any cited numeral (fractional or integral) within the indicated range. The phrases “ranging/ranges between” a first indicate number and a second indicate number and “ranging/ranges from” a first indicate number “to” a second indicate number are used herein interchangeably and are meant to include the first and second indicated numbers and all the fractional and integral numerals therebetween.

[2008] As used herein the term “method” refers to manners, means, techniques and procedures for accomplishing a given task including, but not limited to, those manners, means, techniques and procedures either known to, or readily developed from known manners, means, techniques and procedures by practitioners of the chemical, pharmacological, biological, biochemical and medical arts.

[2009] When reference is made to particular sequence listings, such reference is to be understood to also encompass sequences that substantially correspond to its complementary sequence as including minor sequence variations, resulting from, e.g., sequencing errors, cloning errors, or other alterations resulting in base substitution, base deletion or base addition, provided that the frequency of such variations is less than 1 in 50 nucleotides, alternatively, less than 1 in 100 nucleotides, alternatively, less than 1 in 200 nucleotides, alternatively, less than 1 in 500 nucleotides, alternatively, less than 1 in 1000 nucleotides, alternatively, less than 1 in 5,000 nucleotides, alternatively, less than 1 in 10,000 nucleotides.

### EXAMPLES

[2010] Reference is now made to the following examples, which together with the above descriptions illustrate some embodiments in a non-limiting fashion.

[2011] Generally, the nomenclature used herein, and the laboratory procedures utilized, include molecular, biochemical, microbiological and recombinant DNA techniques. Such techniques are thoroughly explained in the literature. See, for example, “Molecular Cloning: A laboratory Manual” Sambrook et al., (1989); “Current Protocols in Molecular Biology” Volumes I-III Ausubel, R. M., ed. (1994); Ausubel et al., “Current Protocols in Molecular Biology”, John Wiley and Sons, Baltimore, Md. (1989); Perbal, “A Practical Guide to Molecular Cloning”, John Wiley & Sons, New York (1988); Watson et al., “Recombinant DNA”, Scientific American Books, New York; Birren et al. (eds) “Genome Analysis: A Laboratory Manual Series”, Vols. 1-4, Cold Spring Harbor Laboratory Press, New York (1998); methodologies as set forth in U.S. Pat. Nos. 4,666,828; 4,683,202; 4,801,531; 5,192,659 and 5,272,057; “Cell Biology: A Laboratory Handbook”, Volumes I-III Cellis, J. E., ed. (1994); “Culture of Animal Cells—A Manual of Basic Technique” by Freshney, Wiley-Liss, N.Y. (1994), Third Edition; “Current Protocols in Immunology” Volumes I-III Coligan J. E., ed. (1994); Stites et al. (eds), “Basic and Clinical Immunology” (8th Edition), Appleton & Lange, Norwalk, Conn. (1994); Mishell and Shiigi (eds), “Selected Methods in Cellular Immunology”, W. H. Freeman and Co., New York (1980); available immunoassays are extensively described in the patent and scientific literature, see, for example, U.S. Pat. Nos. 3,791,932; 3,839,153; 3,850,752; 3,850,578; 3,853,987; 3,867,517; 3,879,262; 3,901,654; 3,935,074; 3,984,533; 3,996,345; 4,034,074; 4,098,876; 4,879,219; 5,011,771 and 5,281,521; “Oligonucleotide Synthesis” Gait, M. J., ed. (1984); “nucleic Acid Hybridization” Hames, B. D., and Higgins S. J., eds. (1985); “Transcription and Translation” Hames, B. D., and Higgins S. J., eds. (1984); “Animal Cell Culture” Freshney, R. I., ed. (1986); “Immobilized Cells and Enzymes” IRL Press, (1986); “A Practical Guide to Molecular Cloning” Perbal, B., (1984) and “Methods in Enzymology” Vol. 1-317, Academic Press; “PCR Protocols: A Guide To Methods And Applications”, Academic Press, San Diego, Calif. (1990); Marshak et al., “Strategies for Protein Purification and Characterization—A Laboratory Course Manual” CSHL Press (1996); all of which are incorporated by reference as if fully set forth herein. Other general references are provided throughout this document. The procedures therein are well known in the art and are provided for the convenience of the reader. All the information contained therein is incorporated herein by reference.

### Materials and Methods

[2012] Computational Prediction of Defense Systems

[2013] A Set of Gene Families Known to Participate in Defense:

[2014] A set of pfams and COGs that are known to participate in anti-phage defense was compiled based on the gene families present in Table S10 from Makarova et al. (2011) Defense islands in bacterial and archaeal genomes and prediction of novel defense systems. J Bacteriol. 193: 6039-56, with the addition of pfams/COGs present in the BREX (Goldfarb T, et al. (2015) BREX is a novel phage resistance system widespread in microbial genomes. EMBO J. EMBO Press; 34: 169-83) and DISARM (Ofir G, et al. (2017) DISARM is a widespread bacterial defense system with broad anti-phage activities. Nat Microbiology 2017 doi: 10.1038/s41564-017-0051-0). This set is found in Table 1.

TABLE 1
Known Defense-associated gene families

| | Used in | | | | | |
|---|---|---|---|---|---|---|
| | prediction | | Defense | | Defense | Variability |
| Family | cycle # | Source | system type | Annotation/Comments | score | score |
| pfam12183 | 1 | Makarova et | RM | Restriction endonuclease NotI | 95.9% | 0.38 |
| | | al. (2011)¹ | | | | |
| pfam12161 | 1 | Makarova et | RM | HsdM N-terminal domain | 93.4% | 0.21 |
| | | al. (2011) | | | | |
| pfam12008 | 1 | Makarova et | RM | Type I restriction and | 85.7% | 0.19 |
| | | al. (2011) | | modification enzyme-subunit | | |
| | | | | R C terminal | | |
| pfam11663 | 1 | Makarova et | TA | Toxin with endonuclease | 75.5% | 0.14 |
| | | al. (2011) | | activity YhaV | | |
| pfam11487 | 1 | Makarova et | RM | Type II restriction enzyme | pfam < 20 | pfam < 20 |
| | | al. (2011) | | SfiI | members | members |
| pfam11455 | 1 | Makarova et | new_system | Protein of unknown function | 97.1% | 0.10 |
| | | al. (2011) | | (DUF3018); probable | | |
| | | | | antitoxin associated with | | |
| | | | | Toxin COG2337 | | |
| pfam11198 | 1 | Makarova et | new_system | Protein of unknown function | 80.0% | 0.14 |
| | | al. (2011) | | (DUF2857), associated with | | |
| | | | | COG1475, Spo0J | | |
| pfam11171 | 1 | Makarova et | new_RM | Protein of unknown function | 79.5% | 0.34 |
| | | al. (2011) | | (DUF2958), fused to | | |
| | | | | Methylase, helicase | | |
| pfam10832 | 1 | Makarova et | TA | Protein of unknown function | 96.8% | 0.03 |
| | | al. (2011) | | (DUF2559), TA system | | |
| | | | | component YhfG | | |
| pfam10784 | 1 | Makarova et | TA | Plasmid stability protein | 55.1% | 0.20 |
| | | al. (2011) | | | | |
| pfam10593 | 1 | Makarova et | RM | Z1 domain | 95.3% | 0.42 |
| | | al. (2011) | | | | |
| pfam10592 | 1 | Makarova et | Abi | AIPR protein; abortive | 72.4% | 0.39 |
| | | al. (2011) | | infection phage resistance | | |
| | | | | protein often found in | | |
| | | | | restriction modification | | |
| | | | | system operons; PMID: | | |
| | | | | 18346280 | | |
| pfam10544 | 1 | Makarova et | RM | Type III restriction enzyme, | 55.1% | 0.35 |
| | | al. (2011) | | res subunit | | |
| pfam10543 | 1 | Makarova et | new_system | ORF6N domain | 55.9% | 0.26 |
| | | al. (2011) | | | | |
| pfam10387 | 1 | Makarova et | new_TA | Xre family, TA; Protein of | 59.3% | 0.42 |
| | | al. (2011) | | unknown function (DUF2442) | | |
| pfam10047 | 1 | Makarova et | TA | Protein of unknown function | 86.9% | 0.53 |
| | | al. (2011) | | (DUF2281), same as | | |
| | | | | COG2442 (wHTH) | | |
| pfam10040 | 1 | Makarova et | CRISPR | RAMP, CRISPR related; | 94.6% | 0.34 |
| | | al. (2011) | | Uncharacterized conserved | | |
| | | | | protein (DUF2276) | | |
| pfam09957 | 1 | Makarova et | TA | RHH; Uncharacterized | 96.9% | 0.06 |
| | | al. (2011) | | protein conserved in bacteria | | |
| | | | | (DUF2191); Bacterial | | |
| | | | | antitoxin of type II TA | | |
| | | | | system, VapB | | |
| pfam09827 | 1 | Makarova et | CRISPR | CRISPR associated protein | 93.0% | 0.31 |
| | | al. (2011) | | Cas2 | | |
| pfam09823 | 1 | Makarova et | new_system | Domain of unknown function | 69.1% | 0.52 |
| | | al. (2011) | | (DUF2357) (often fused to | | |
| | | | | recB-like nuclease domain GI: | | |
| | | | | 218891088) | | |
| pfam09720 | 1 | Makarova et | TA | Putative addiction module | 81.8% | 0.44 |
| | | al. (2011) | | component | | |
| pfam09709 | 1 | Makarova et | CRISPR | CRISPR-associated protein | 97.4% | 0.27 |
| | | al. (2011) | | (Cas_Csd1) | | |
| pfam09707 | 1 | Makarova et | CRISPR | CRISPR-associated protein | 98.3% | 0.16 |
| | | al. (2011) | | (Cas_Cas2CT1978) | | |
| pfam09706 | 1 | Makarova et | CRISPR | CRISPR-associated protein | 99.4% | 0.33 |
| | | al. (2011) | | (Cas_CXXC_CXXC) | | |
| pfam09704 | 1 | Makarova et | CRISPR | CRISPR-associated protein | 99.2% | 0.25 |
| | | al. (2011) | | (Cas_Cas5) | | |
| pfam09703 | 1 | Makarova et | CRISPR | CRISPR-associated protein | 100.0% | 0.58 |
| | | al. (2011) | | (Cas_Csa4) | | |
| pfam09702 | 1 | Makarova et | CRISPR | CRISPR-associated protein | 71.1% | 0.72 |
| | | al. (2011) | | (Cas_Csa5) | | |
| pfam09701 | 1 | Makarova et | CRISPR | CRISPR-associated protein | 99.5% | 0.69 |
| | | al. (2011) | | (Cas_Cmr5) | | |
| pfam09700 | 1 | Makarova et | CRISPR | CRISPR-associated protein | 98.2% | 0.65 |
| | | al. (2011) | | (Cas_Cmr3) | | |
| pfam09670 | 1 | Makarova et | CRISPR | CRISPR-associated protein | 89.8% | 0.76 |
| | | al. (2011) | | (Cas_Cas02710) | | |
| pfam09665 | 1 | Makarova et | RM | Type II restriction | 97.4% | 0.18 |
| | | al. (2011) | | endonuclease | | |
| | | | | (RE_Alw26IDE) | | |
| pfam09659 | 1 | Makarova et | CRISPR | CRISPR-associated protein | 78.8% | 0.13 |
| | | al. (2011) | | (Cas_Csm6) | | |
| pfam09658 | 1 | Makarova et | CRISPR | CRISPR-associated protein | pfam < 20 | pfam < 20 |
| | | al. (2011) | | (Cas_Csx9) | members | members |
| pfam09657 | 1 | Makarova et | CRISPR | CRISPR-associated protein | 99.2% | 0.33 |
| | | al. (2011) | | Csx8 (Cas_Csx8) | | |
| pfam09652 | 1 | Makarova et | CRISPR | Putative CRISPR-associated | 94.5% | 0.86 |
| | | al. (2011) | | protein (Cas_VVA1548) | | |
| pfam09651 | 1 | Makarova et | CRISPR | CRISPR-associated protein | 93.0% | 0.76 |
| | | al. (2011) | | (Cas_APE2256) | | |
| pfam09623 | 1 | Makarova et | CRISPR | CRISPR-associated protein | 89.2% | 0.79 |
| | | al. (2011) | | NE0113 (Cas_NE0113) | | |
| pfam09620 | 1 | Makarova et | CRISPR | CRISPR-associated protein | 91.4% | 0.82 |
| | | al. (2011) | | (Cas_c5x3) | | |
| pfam09618 | 1 | Makarova et | CRISPR | CRISPR-associated protein | 98.3% | 0.21 |
| | | al. (2011) | | (Cas_Csy4) | | |
| pfam09617 | 1 | Makarova et | CRISPR | CRISPR-associated protein | 95.9% | 0.47 |
| | | al. (2011) | | GSU0053 (Cas_GSU0053) | | |
| pfam09615 | 1 | Makarova et | CRISPR | CRISPR-associated protein | 99.7% | 0.21 |
| | | al. (2011) | | (Cas_Csy3) | | |
| pfam09614 | 1 | Makarova et | CRISPR | CRISPR-associated protein | 99.8% | 0.19 |
| | | al. (2011) | | (Cas_Csy2) | | |
| pfam09611 | 1 | Makarova et | CRISPR | CRISPR-associated protein | 98.6% | 0.17 |
| | | al. (2011) | | (Cas_Csy1) | | |
| pfam09609 | 1 | Makarova et | CRISPR | CRISPR-associated protein, | 95.0% | 0.47 |
| | | al. (2011) | | GSU0054 family | | |
| | | | | (Cas_GSU0054) | | |
| pfam09573 | 1 | Makarova et | RM | TaqI restriction endonuclease | 85.5% | 0.51 |
| | | al. (2011) | | | | |
| pfam09572 | 1 | Makarova et | RM | XamI restriction endonuclease | 92.3% | 0.36 |
| | | al. (2011) | | | | |
| pfam09571 | 1 | Makarova et | RM | XcyI restriction endonuclease | 91.0% | 0.51 |
| | | al. (2011) | | | | |
| pfam09569 | 1 | Makarova et | RM | ScaI restriction endonuclease | 97.7% | 0.33 |
| | | al. (2011) | | | | |
| pfam09568 | 1 | Makarova et | RM | MjaI restriction endonuclease | 85.0% | 0.34 |
| | | al. (2011) | | | | |
| pfam09565 | 1 | Makarova et | RM | NgoFVII restriction | 95.1% | 0.42 |
| | | al. (2011) | | endonuclease | | |
| pfam09563 | 1 | Makarova et | RM | LlaJI restriction endonuclease | 94.0% | 0.45 |
| | | al. (2011) | | | | |
| pfam09559 | 1 | Makarova et | CRISPR | Cas6 Crispr | 80.0% | 0.40 |
| | | al. (2011) | | | | |
| pfam09556 | 1 | Makarova et | RM | HaeIII restriction | 97.1% | 0.34 |
| | | al. (2011) | | endonuclease | | |
| pfam09549 | 1 | Makarova et | RM | Bpu10I restriction | 96.1% | 0.50 |
| | | al. (2011) | | endonuclease | | |
| pfam09530 | 1 | Makarova et | CRISPR | CRISPR-associated protein | pfam < 20 | pfam < 20 |
| | | al. (2011) | | (cas_TM1812) | members | members |
| pfam09520 | 1 | Makarova et | RM | MjaII restriction endonuclease | 89.7% | 0.41 |
| | | al. (2011) | | | | |
| pfam09517 | 1 | Makarova et | RM | Eco29kI restriction | 95.5% | 0.32 |
| | | al. (2011) | | endonuclease | | |
| pfam09516 | 1 | Makarova et | RM | CfrBI restriction | 95.5% | 0.16 |
| | | al. (2011) | | endonuclease | | |
| pfam09491 | 1 | Makarova et | RM | AlwI restriction endonuclease | 90.5% | 0.28 |
| | | al. (2011) | | | | |
| pfam09485 | 1 | Makarova et | CRISPR | CRISPR-associated protein | 99.6% | 0.16 |
| | | al. (2011) | | Cse2 (CRISPR_cse2) | | |
| pfam09484 | 1 | Makarova et | CRISPR | CRISPR-associated protein | 93.0% | 0.51 |
| | | al. (2011) | | TM1802 (cas_TM1802) | | |
| pfam09481 | 1 | Makarova et | CRISPR | CRISPR-associated protein | 98.4% | 0.17 |
| | | al. (2011) | | Cse1 (CRISPR_cse1) | | |
| pfam09455 | 1 | Makarova et | CRISPR | CRISPR-associated (Cas) | 91.5% | 0.71 |
| | | al. (2011) | | DxTHG family | | |
| pfam09369 | 1 | Makarova et | new_RM | Contains a number of Zn- | 66.2% | 0.26 |
| | | al. (2011) | | binding domains; Domain of | | |
| | | | | unknown function | | |
| | | | | (DUF1998); DISARM | | |
| | | | | system: DrmB | | |
| pfam09344 | 1 | Makarova et | CRISPR | CT1975-like protein | 99.3% | 0.17 |
| | | al. (2011) | | | | |
| pfam09233 | 1 | Makarova et | RM | Restriction endonuclease | 91.6% | 0.39 |
| | | al. (2011) | | EcoRV | | |
| pfam09225 | 1 | Makarova et | RM | Restriction endonuclease | 99.5% | 0.16 |
| | | al. (2011) | | PvuII | | |
| pfam09217 | 1 | Makarova et | RM | Restriction endonuclease | 98.0% | 0.25 |
| | | al. (2011) | | EcoRII, N-terminal | | |
| pfam09208 | 1 | Makarova et | RM | Restriction endonuclease | 96.7% | 0.69 |
| | | al. (2011) | | MspI | | |
| pfam09195 | 1 | Makarova et | RM | Restriction endonuclease | 69.2% | 0.41 |
| | | al. (2011) | | BglII | | |
| pfam09194 | 1 | Makarova et | RM | Restriction endonuclease | 93.8% | 0.50 |
| | | al. (2011) | | BsobI | | |
| pfam09019 | 1 | Makarova et | RM | EcoRII C terminal | 97.7% | 0.17 |
| | | al. (2011) | | | | |
| pfam09002 | 1 | Makarova et | new_system | COG1517 contains RecB | 46.1% | 0.50 |
| | | al. (2011) | | family nuclease and wHTH; | | |
| | | | | Domain of unknown function | | |
| | | | | (DUF1887) | | |
| pfam08972 | 1 | Makarova et | TA | HicA; Domain of unknown | 73.2% | 0.47 |
| | | al. (2011) | | function (DUF1902) | | |
| pfam08849 | 1 | Makarova et | “new system”, | Same as DUF3387; which is | 95.2% | 0.39 |
| | | al. (2011), | BREX | fused to RM (GI: | | |
| | | Goldfarb et | | 209527353); Putative inner | | |
| | | al. (2015) | | membrane protein | | |
| | | | | (DUF1819); pdb: 3BHW; | | |
| | | | | BrxA-Unknown function | | |
| pfam08843 | 1 | Makarova et | new_Abi | Same as COG2253, AbiG; | 70.1% | 0.20 |
| | | al. (2011) | | Domain of unknown function | | |
| | | | | (DUF1814); Nucleotidyl | | |
| | | | | transferase AbiEii toxin, Type | | |
| | | | | IV TA system | | |
| pfam08808 | 1 | Makarova et | TA | RES domain | 66.6% | 0.14 |
| | | al. (2011) | | | | |
| pfam08798 | 1 | Makarova et | CRISPR | CRISPR associated protein | 98.6% | 0.18 |
| | | al. (2011) | | | | |
| pfam08780 | 1 | Makarova et | TA | HEPN; Nucleotidyltransferase | 91.2% | 0.32 |
| | | al. (2011) | | substrate binding protein like | | |
| pfam08747 | 1 | Makarova et | new_RM, | Domain of unknown function | 97.9% | 0.45 |
| | | al. (2011), | BREX | (DUF1788); BrxB-Unknown | | |
| | | Goldfarb et | | function | | |
| | | al. (2015) | | | | |
| pfam08665 | 1 | Makarova et | “new system” | PglZ domain, Alkaline | 69.4% | 0.45 |
| | | al. (2011) | | phosphatase clan. BREX | | |
| | | | | system: PglZ | | |
| pfam08463 | 1 | Makarova et | RM | EcoEI R protein C-terminal | 97.3% | 0.28 |
| | | al. (2011) | | | | |
| pfam07927 | 1 | Makarova et | TA | toxin component, HicA | 89.7% | 0.24 |
| | | al. (2011) | | family; YcfA-like protein; | | |
| | | | | HicA toxin of bacterial toxin- | | |
| | | | | antitoxin | | |
| pfam07805 | 1 | Makarova et | TA | HipA-like N-terminal domain | 57.3% | 0.24 |
| | | al. (2011) | | | | |
| pfam07804 | 1 | Makarova et | TA | HipA-like C-terminal domain | 56.2% | 0.24 |
| | | al. (2011) | | | | |
| pfam07751 | 1 | Makarova et | Abi | Abi-like protein | 66.3% | 0.17 |
| | | al. (2011) | | | | |
| pfam07669 | 1 | Makarova et | RM | Eco57I restriction | 74.2% | 0.29 |
| | | al. (2011) | | endonuclease | | |
| pfam07215 | 1 | Makarova et | new_RM | Protein of unknown function | 88.1% | 0.53 |
| | | al. (2011) | | (DUF1419) linked to | | |
| | | | | methylase COG0827 | | |
| pfam06616 | 1 | Makarova et | RM | BsuBI/PstI restriction | 81.7% | 0.34 |
| | | al. (2011) | | endonuclease C-terminus | | |
| pfam06414 | 1 | Makarova et | TA | Zeta toxin | 35.1% | 0.27 |
| | | al. (2011) | | | | |
| pfam06296 | 1 | Makarova et | TA | Toxin component, RelE | 90.5% | 0.13 |
| | | al. (2011) | | family Protein of unknown | | |
| | | | | function (DUF1044) | | |
| pfam06114 | 1 | Makarova et | TA | Same as COG2856; Domain | 48.5% | 0.16 |
| | | al. (2011) | | of unknown function | | |
| | | | | (DUF955) | | |
| pfam05942 | 1 | Makarova et | TA | Archaeal PaREP1/PaREP8 | 70.7% | 0.34 |
| | | al. (2011) | | family | | |
| pfam05534 | 1 | Makarova et | TA | HicB family | 76.4% | 0.21 |
| | | al. (2011) | | | | |
| pfam05016 | 1 | Makarova et | TA | Plasmid stabilisation system | 77.4% | 0.18 |
| | | al. (2011) | | protein; ParE toxin of type II | | |
| | | | | toxin-antitoxin system, parDE | | |
| pfam04851 | 1 | Makarova et | RM | Type III restriction enzyme, | 55.5% | 0.16 |
| | | al. (2011) | | res subunit | | |
| pfam04556 | 1 | Makarova et | RM | DpnII restriction | 93.8% | 0.19 |
| | | al. (2011) | | endonuclease | | |
| pfam04555 | 1 | Makarova et | RM | Restriction endonuclease | 90.0% | 0.39 |
| | | al. (2011) | | XhoI | | |
| pfam04149 | 1 | Makarova et | TA | DUF397, see our TA paper | 51.5% | 0.12 |
| | | al. (2011) | | | | |
| pfam04014 | 1 | Makarova et | TA | SpoVT/AbrB like domain; | 77.3% | 0.16 |
| | | al. (2011) | | Antidote-toxin recognition | | |
| | | | | MazE, bacterial antitoxin | | |
| pfam03787 | 1 | Makarova et | CRISPR | RAMP superfamily | 98.4% | 0.44 |
| | | al. (2011) | | | | |
| pfam03681 | 1 | Makarova et | TA | HicB family; Uncharacterized | pfam < 20 | pfam < 20 |
| | | al. (2011) | | protein family (UPF0150) | members | members |
| pfam03230 | 1 | Makarova et | RM | Antirestriction protein | 57.8% | 0.14 |
| | | al. (2011) | | | | |
| pfam02963 | 1 | Makarova et | RM | Restriction endonuclease | 61.6% | 0.40 |
| | | al. (2011) | | EcoRI | | |
| pfam02923 | 1 | Makarova et | RM | Restriction endonuclease | 97.4% | 0.47 |
| | | al. (2011) | | BamHI | | |
| pfam02604 | 1 | Makarova et | TA | Antitoxin Phd_Yet-M, type II | 90.5% | 0.13 |
| | | al. (2011) | | toxin-antitoxin system | | |
| pfam01930 | 1 | Makarova et | CRISPR | Domain of unknown function | 90.5% | 0.37 |
| | | al. (2011) | | DUF83 | | |
| pfam01909 | 1 | Makarova et | TA | Nucleotidyltransferase | 47.6% | 0.26 |
| | | al. (2011) | | domain, COG1669 | | |
| pfam01867 | 1 | Makarova et | CRISPR | CRISPR associated protein | 97.4% | 0.26 |
| | | al. (2011) | | Cas1 | | |
| pfam01850 | 1 | Makarova et | TA | PIN domain | 76.0% | 0.11 |
| | | al. (2011) | | | | |
| pfam01845 | 1 | Makarova et | TA | CcdB protein | 89.4% | 0.15 |
| | | al. (2011) | | | | |
| pfam01420 | 1 | Makarova et | RM | Type I restriction | 91.8% | 0.20 |
| | | al. (2011) | | modification DNA specificity | | |
| | | | | domain | | |
| pfam14390 | 1 | Ofir et al. | DISARM- | Putative PD-(D/E)XK family | 98.9% | 0.42 |
| | | (2017) | associated | member, (DUF4420) | | |
| pfam13659 | 1 | Goldfarb et | BREX, | PglX-Adenine-specific | 63.3% | 0.21 |
| | | al. (2015)², | DISARM | methylase; DrmMI- | | |
| | | Ofir et al. | | Superfamily SSF5335 (S- | | |
| | | (2017)³ | | adenosyl-L-methionine- | | |
| | | | | dependent | | |
| | | | | methyltransferases); | | |
| | | | | Methyltransferase domain | | |
| pfam13589 | 1 | Ofir et al. | DISARM- | Histidine kinase-, DNA | 33.5% | 0.21 |
| | | (2017) | associated | gyrase B-, and HSP90-like | | |
| | | | | ATPase | | |
| pfam13361 | 1 | Ofir et al. | DISARM- | UvrD-like helicase C-terminal | 50.2% | 0.08 |
| | | (2017) | associated | domain | | |
| pfam13182 | 1 | Goldfarb et | BREX | Protein of unknown function | 94.9% | 0.31 |
| | | al. (2015) | | (DUF4007); BrxP- | | |
| | | | | Phosphoadenosine | | |
| | | | | phosphosulfate reductase | | |
| pfam10923 | 1 | Goldfarb et | BREX | BrxC/PglY, BrxD-ATP | 93.1% | 0.28 |
| | | al. (2015) | | binding; P-loop Domain of | | |
| | | | | unknown function (DUF2791) | | |
| pfam04465 | 1 | Goldfarb et | BREX | BrxC/PglY-ATP binding; | 93.1% | 0.50 |
| | | al. (2015) | | Protein of unknown function | | |
| | | | | (DUF499) | | |
| pfam03852 | 1 | Ofir et al. | DISARM- | DNA mismatch endonuclease | 93.0% | 0.18 |
| | | (2017) | associated | Vsr | | |
| pfam01555 | 1 | Goldfarb et | BREX | DNA methylase; PglXI- | 64.4% | 0.20 |
| | | al. (2015) | | Adenine-specific methylase | | |
| pfam01507 | 1 | Goldfarb et | BREX | Phosphoadenosine | 62.9% | 0.07 |
| | | al. (2015) | | phosphosulfate reductase | | |
| | | | | family; BrxP- | | |
| | | | | Phosphoadenosine | | |
| | | | | phosphosulfate reductase | | |
| pfam00580 | 1 | Ofir et al. | DISARM- | UvrD/REP helicase N- | 47.4% | 0.09 |
| | | (2017) | associated | terminal domain | | |
| pfam00271 | 1 | Ofir et al. | DISARM | DrmA; Helicase conserved C- | 39.0% | 0.10 |
| | | (2017) | | terminal domain | | |
| pfam00176 | 1 | Ofir et al. | DISARM | DrmD; SNF2 family N- | 46.8% | 0.23 |
| | | (2017) | | terminal domain | | |
| pfam00145 | 1 | Ofir et al. | DISARM | DrmMII; C-5 cytosine- | 72.5% | 0.19 |
| | | (2017) | | specific DNA methylase | | |
| pfam00004 | 1 | Ofir et al. | DISARM- | ATPase family associated | 30.1% | 0.07 |
| | | (2017) | associated | with various cellular activities | | |
| | | | | (AAA) | | |
| COG5654 | 1 | Makarova et | TA | Uncharacterized conserved | | |
| | | al. (2011) | | protein | | |
| COG5642 | 1 | Makarova et | TA | Uncharacterized conserved | | |
| | | al. (2011) | | protein | | |
| COG4861 | 1 | Makarova et | Abi | Uncharacterized protein | | |
| | | al. (2011) | | conserved in bacteria | | |
| COG5611 | 1 | Makarova et | TA | PIN domain | | |
| | | al. (2011) | | | | |
| COG4849 | 1 | Makarova et | Abi | Uncharacterized protein | | |
| | | al. (2011) | | conserved in bacteria | | |
| COG5606 | 1 | Makarova et | TA | Uncharacterized conserved | | |
| | | al. (2011) | | small protein | | |
| COG4823 | 1 | Makarova et | Abi | Abortive infection | | |
| | | al. (2011) | | bacteriophage resistance | | |
| | | | | protein | | |
| COG5573 | 1 | Makarova et | TA | Predicted nucleic-acid- | | |
| | | al. (2011) | | binding protein, contains PIN | | |
| | | | | domain | | |
| COG4804 | 1 | Makarova et | new_system | Predicted nuclease of | | |
| | | al. (2011) | | restriction endonuclease-like | | |
| | | | | fold | | |
| COG5551 | 1 | Makarova et | CRISPR | CRISPR system related | | |
| | | al. (2011) | | protein, RAMP superfamily | | |
| COG4748 | 1 | Makarova et | RM | Uncharacterized conserved | | |
| | | al. (2011) | | protein | | |
| COG5519 | 1 | Makarova et | new_system | Superfamily II helicase or | | |
| | | al. (2011) | | inactivated derivatives, fused | | |
| | | | | to primase | | |
| COG4737 | 1 | Makarova et | TA | Uncharacterized protein | | |
| | | al. (2011) | | conserved in bacteria | | |
| COG5499 | 1 | Makarova et | TA | Predicted transcription | | |
| | | al. (2011) | | regulator containing HTH | | |
| | | | | domain | | |
| COG4710 | 1 | Makarova et | TA | Predicted DNA-binding | | |
| | | al. (2011) | | protein with an HTH domain | | |
| COG5464 | 1 | Makarova et | new_RM | RecB-family nuclease domain | | |
| | | al. (2011) | | (see TIGR01784), linked to | | |
| | | | | COG1479 | | |
| COG4694 | 1 | Makarova et | Abi | Wobble nucleotide-excising | | |
| | | al. (2011) | | tRNase | | |
| COG5450 | 1 | Makarova et | TA | Transcription regulator of the | | |
| | | al. (2011) | | Arc/MetJ class | | |
| COG4691 | 1 | Makarova et | TA | Plasmid stability protein | | |
| | | al. (2011) | | | | |
| COG5340 | 1 | Makarova et | Abi | Predicted transcriptional | | |
| | | al. (2011) | | regulator | | |
| COG4683 | 1 | Makarova et | TA | Uncharacterized protein | | |
| | | al. (2011) | | conserved in bacteria | | |
| COG5304 | 1 | Makarova et | TA | Uncharacterized protein | | |
| | | al. (2011) | | conserved in bacteria | | |
| COG4680 | 1 | Makarova et | TA | Uncharacterized protein | | |
| | | al. (2011) | | conserved in bacteria | | |
| COG5302 | 1 | Makarova et | TA | Post-segregation antitoxin | | |
| | | al. (2011) | | (ccd killing mechanism | | |
| | | | | protein) encoded by the F | | |
| | | | | plasmid | | |
| COG4679 | 1 | Makarova et | TA | Phage-related protein | | |
| | | al. (2011) | | | | |
| COG4951 | 1 | Makarova et | RM | Uncharacterized protein | | |
| | | al. (2011) | | conserved in bacteria | | |
| COG4646 | 1 | Makarova et | new_system | DNA methylase, see | | |
| | | al. (2011) | | COG0553 | | |
| COG4914 | 1 | Makarova et | Abi | Predicted | | |
| | | al. (2011) | | nucleotidyltransferase | | |
| COG4636 | 1 | Makarova et | TA | Endonuclease, Uma2 family | | |
| | | al. (2011) | | (restriction endonuclease fold) | | |
| COG4889 | 1 | Makarova et | RM | Predicted helicase | | |
| | | al. (2011) | | | | |
| COG4634 | 1 | Makarova et | TA | PIN family nuclease, potential | | |
| | | al. (2011) | | toxin-antitoxin system | | |
| | | | | component | | |
| COG4456 | 1 | Makarova et | TA | Virulence-associated protein | | |
| | | al. (2011) | | or related protein | | |
| COG4453 | 1 | Makarova et | TA | Uncharacterized protein | | |
| | | al. (2011) | | conserved in bacteria | | |
| COG4423 | 1 | Makarova et | TA | Uncharacterized protein | | |
| | | al. (2011) | | conserved in bacteria | | |
| COG4374 | 1 | Makarova et | TA | PIN domain nuclease, a | | |
| | | al. (2011) | | component of toxin-antitoxin | | |
| | | | | system (PIN domain) | | |
| COG4343 | 1 | Makarova et | CRISPR | CRISPR-associated protein, | | |
| | | al. (2011) | | RecB family exonuclease | | |
| COG4268 | 1 | Makarova et | RM | McrBC 5-methylcytosine | | |
| | | al. (2011) | | restriction system component | | |
| COG4227 | 1 | Makarova et | new_system | Antirestriction protein | | |
| | | al. (2011) | | | | |
| COG4226 | 1 | Makarova et | TA | Predicted nuclease of the | | |
| | | al. (2011) | | RNAse H fold, HicB family | | |
| COG4127 | 1 | Makarova et | new_RM | Mrr restriction endonuclease | | |
| | | al. (2011) | | domain | | |
| COG4118 | 1 | Makarova et | TA | Antitoxin (DNA binding | | |
| | | al. (2011) | | domain) of toxin-antitoxin | | |
| | | | | stability system | | |
| COG4115 | 1 | Makarova et | TA | Uncharacterized protein | | |
| | | al. (2011) | | conserved in bacteria | | |
| COG4113 | 1 | Makarova et | TA | Predicted nucleic acid-binding | | |
| | | al. (2011) | | protein, contains PIN domain | | |
| COG4096 | 1 | Makarova et | RM | Type I site-specific | | |
| | | al. (2011) | | restriction-modification | | |
| | | | | system, R (restriction) subunit | | |
| | | | | or related helicase | | |
| COG4006 | 1 | Makarova et | CRISPR | Uncharacterized protein | | |
| | | al. (2011) | | conserved in archaea | | |
| COG3950 | 1 | Makarova et | new_system | Predicted ATP-binding | | |
| | | al. (2011) | | protein involved in virulence | | |
| COG3943 | 1 | Makarova et | new_TA | Virulence protein | | |
| | | al. (2011) | | | | |
| COG3905 | 1 | Makarova et | TA | Predicted transcriptional | | |
| | | al. (2011) | | regulator | | |
| COG3886 | 1 | Makarova et | RM | Predicted HKD family | | |
| | | al. (2011) | | nuclease; type III restriction | | |
| | | | | protein res subunit | | |
| COG3832 | 1 | Makarova et | TA | Uncharacterized conserved | | |
| | | al. (2011) | | protein | | |
| COG3744 | 1 | Makarova et | TA | PIN domain nuclease, a | | |
| | | al. (2011) | | component of toxin-antitoxin | | |
| | | | | system (PIN domain) | | |
| COG3742 | 1 | Makarova et | TA | Uncharacterized protein | | |
| | | al. (2011) | | conserved in bacteria | | |
| COG3692 | 1 | Makarova et | TA | Uncharacterized protein | | |
| | | al. (2011) | | conserved in bacteria | | |
| COG3668 | 1 | Makarova et | TA | Plasmid stabilization system | | |
| | | al. (2011) | | protein | | |
| COG3657 | 1 | Makarova et | TA | Uncharacterized protein | | |
| | | al. (2011) | | conserved in bacteria | | |
| COG3654 | 1 | Makarova et | TA | Prophage maintenance system | | |
| | | al. (2011) | | killer protein | | |
| COG3649 | 1 | Makarova et | CRISPR | CRISPR system related | | |
| | | al. (2011) | | protein | | |
| COG3636 | 1 | Makarova et | TA | Predicted transcriptional | | |
| | | al. (2011) | | regulator | | |
| COG3609 | 1 | Makarova et | TA | Predicted transcriptional | | |
| | | al. (2011) | | regulators containing the | | |
| | | | | CopG/Arc/MetJ DNA-binding | | |
| | | | | domain | | |
| COG3598 | 1 | Makarova et | new_system | RecA-family ATPase, fused | | |
| | | al. (2011) | | to TOPRIM | | |
| COG3587 | 1 | Makarova et | RM | Restriction endonuclease | | |
| | | al. (2011) | | | | |
| COG3586 | 1 | Makarova et | new_system | Some protein fused to | | |
| | | al. (2011) | | domains similar to N terminal | | |
| | | | | regions found in type I | | |
| | | | | restriction enzyme R (HSDR) | | |
| | | | | proteins and RloF (gi: | | |
| | | | | 93006430) | | |
| COG3550 | 1 | Makarova et | TA | Toxin module HipA, protein | | |
| | | al. (2011) | | kinase of phosphatidylinositol | | |
| | | | | 3/4-kinase superfamily | | |
| COG3549 | 1 | Makarova et | TA | Plasmid maintenance system | | |
| | | al. (2011) | | killer protein | | |
| COG3514 | 1 | Makarova et | TA | Uncharacterized protein | | |
| | | al. (2011) | | conserved in bacteria | | |
| COG3513 | 1 | Makarova et | CRISPR | Predicted CRISPR-associated | | |
| | | al. (2011) | | nuclease, contains | | |
| | | | | McrA/HNH-nuclease and | | |
| | | | | RuvC-like nuclease domain | | |
| COG3512 | 1 | Makarova et | CRISPR | CRISPR-associated protein, | | |
| | | al. (2011) | | Cas2 homolog | | |
| COG3472 | 1 | Makarova et | new_system | Uncharacterized; often fused | | |
| | | al. (2011) | | to COG1479 | | |
| COG3440 | 1 | Makarova et | RM | Predicted restriction | | |
| | | al. (2011) | | endonuclease | | |
| COG3410 | 1 | Makarova et | Abi | Uncharacterized conserved | | |
| | | al. (2011) | | protein | | |
| COG3392 | 1 | Makarova et | RM | Adenine-specific DNA | | |
| | | al. (2011) | | methylase | | |
| COG3372 | 1 | Makarova et | new_RM | Predicted nuclease of | | |
| | | al. (2011) | | restriction endonuclease-like | | |
| | | | | fold; associated with | | |
| | | | | COG1061 (RM) | | |
| COG3344 | 1 | Makarova et | Abi | Retron-type reverse | | |
| | | al. (2011) | | transcriptase | | |
| COG3337 | 1 | Makarova et | CRISPR | CRISPR system related | | |
| | | al. (2011) | | protein | | |
| COG3311 | 1 | Makarova et | TA | HTH_MerR_SF | | |
| | | al. (2011) | | | | |
| COG3183 | 1 | Makarova et | RM | Predicted restriction | | |
| | | al. (2011) | | endonuclease | | |
| COG3177 | 1 | Makarova et | TA | Fic family protein | | |
| | | al. (2011) | | | | |
| COG3093 | 1 | Makarova et | TA | Plasmid maintenance system | | |
| | | al. (2011) | | antidote protein | | |
| COG3077 | 1 | Makarova et | TA | DNA-damage-inducible | | |
| | | al. (2011) | | protein J | | |
| COG3041 | 1 | Makarova et | TA | Uncharacterized protein | | |
| | | al. (2011) | | conserved in bacteria | | |
| COG2944 | 1 | Makarova et | TA | Predicted transcriptional | | |
| | | al. (2011) | | regulator | | |
| COG2929 | 1 | Makarova et | TA | Uncharacterized protein | | |
| | | al. (2011) | | conserved in bacteria | | |
| COG2886 | 1 | Makarova et | TA | Uncharacterized small protein | | |
| | | al. (2011) | | | | |
| COG2880 | 1 | Makarova et | TA | Uncharacterized protein | | |
| | | al. (2011) | | conserved in archaea | | |
| COG2865 | 1 | Makarova et | new_system | Predicted transcriptional | | |
| | | al. (2011) | | regulator containing an HTH | | |
| | | | | domain and diverged ATP- | | |
| | | | | binding domain (Schlafen- | | |
| | | | | like) | | |
| COG2856 | 1 | Makarova et | TA | Predicted Zn peptidase | | |
| | | al. (2011) | | | | |
| COG2852 | 1 | Makarova et | RM | Very-short-patch-repair | | |
| | | al. (2011) | | endonuclease | | |
| COG2810 | 1 | Makarova et | RM | Predicted type IV restriction | | |
| | | al. (2011) | | endonuclease | | |
| COG2521 | 1 | Makarova et | new_RM | Predicted archaeal | | |
| | | al. (2011) | | methyltransferase | | |
| COG2445 | 1 | Makarova et | TA | Uncharacterized conserved | | |
| | | al. (2011) | | protein | | |
| COG2442 | 1 | Makarova et | TA | Uncharacterized conserved | | |
| | | al. (2011) | | protein | | |
| COG2405 | 1 | Makarova et | TA | Predicted nucleic acid-binding | | |
| | | al. (2011) | | protein, contains PIN domain | | |
| COG2402 | 1 | Makarova et | TA | Predicted nucleic acid-binding | | |
| | | al. (2011) | | protein, contains PIN domain | | |
| COG2361 | 1 | Makarova et | TA | Uncharacterized conserved | | |
| | | al. (2011) | | protein | | |
| COG2337 | 1 | Makarova et | TA | Toxin-antitoxin addiction | | |
| | | al. (2011) | | module toxin component | | |
| | | | | MazF (an endoRNAse) | | |
| COG2336 | 1 | Makarova et | TA | Toxin-antitoxin addiction | | |
| | | al. (2011) | | module antitoxin component | | |
| | | | | MazE | | |
| COG2254 | 1 | Makarova et | CRISPR | Predicted HD superfamily | | |
| | | al. (2011) | | hydrolase, possibly a nuclease | | |
| COG2253 | 1 | Makarova et | Abi | Uncharacterized conserved | | |
| | | al. (2011) | | protein | | |
| COG2250 | 1 | Makarova et | TA | HEPN domain | | |
| | | al. (2011) | | | | |
| COG2189 | 1 | Makarova et | RM | Adenine specific DNA | | |
| | | al. (2011) | | methylase Mod | | |
| COG2184 | 1 | Makarova et | TA | Protein involved in cell | | |
| | | al. (2011) | | division | | |
| COG2161 | 1 | Makarova et | TA | Antitoxin (DNA-binding | | |
| | | al. (2011) | | domain) of toxin-antitoxin | | |
| | | | | stability system | | |
| COG2026 | 1 | Makarova et | TA | Cytotoxic translational | | |
| | | al. (2011) | | repressor of toxin-antitoxin | | |
| | | | | stability system | | |
| COG2002 | 1 | Makarova et | TA | Transcriptional regulator | | |
| | | al. (2011) | | AbrB | | |
| COG1895 | 1 | Makarova et | TA | Uncharacterized conserved | | |
| | | al. (2011) | | protein related to C-terminal | | |
| | | | | domain of eukaryotic | | |
| | | | | chaperone, SACSIN | | |
| COG1857 | 1 | Makarova et | CRISPR | CRISPR system related | | |
| | | al. (2011) | | protein | | |
| COG1848 | 1 | Makarova et | TA | Predicted nucleic acid-binding | | |
| | | al. (2011) | | protein, contains PIN domain | | |
| COG1787 | 1 | Makarova et | RM | Endonuclease, HJR/Mrr/RecB | | |
| | | al. (2011) | | family | | |
| COG1769 | 1 | Makarova et | CRISPR | CRISPR system related | | |
| | | al. (2011) | | protein, RAMP superfamily | | |
| COG1753 | 1 | Makarova et | TA | Predicted antitoxin, copG | | |
| | | al. (2011) | | family | | |
| COG1743 | 1 | Makarova et | RM, BREX | Adenine-specific DNA | | |
| | | al. (2011), | | methylase containing a Zn- | | |
| | | Goldfarb et | | ribbon; PglXI-Adenine- | | |
| | | al. (2015) | | specific methylase | | |
| COG1724 | 1 | Makarova et | TA | Predicted RNA binding | | |
| | | al. (2011) | | protein (dsRBD-like fold), | | |
| | | | | HicA family | | |
| COG1715 | 1 | Makarova et | RM | Restriction endonuclease | | |
| | | al. (2011) | | | | |
| COG1708 | 1 | Makarova et | TA | Predicted | | |
| | | al. (2011) | | nucleotidyltransferase | | |
| COG1700 | 1 | Makarova et | new_RM | Contains PD_(D/E)xK | | |
| | | al. (2011) | | nuclease odmain, DUF524 | | |
| COG1688 | 1 | Makarova et | CRISPR | CRISPR system related | | |
| | | al. (2011) | | protein, RAMP superfamily | | |
| COG1669 | 1 | Makarova et | TA | Nucleotidyltransferase | | |
| | | al. (2011) | | | | |
| COG1604 | 1 | Makarova et | CRISPR | CRISPR system related | | |
| | | al. (2011) | | protein, RAMP superfamily | | |
| COG1598 | 1 | Makarova et | TA | Predicted nuclease of the | | |
| | | al. (2011) | | RNAse H fold, HicB family | | |
| COG1583 | 1 | Makarova et | CRISPR | CRISPR system related | | |
| | | al. (2011) | | protein, RAMP superfamily | | |
| COG1569 | 1 | Makarova et | TA | Predicted nucleic acid-binding | | |
| | | al. (2011) | | protein, contains PIN domain | | |
| COG1567 | 1 | Makarova et | CRISPR | CRISPR system related | | |
| | | al. (2011) | | protein, RAMP superfamily | | |
| COG1518 | 1 | Makarova et | CRISPR | CRISPR-associated protein | | |
| | | al. (2011) | | Cas1 | | |
| COG1517 | 1 | Makarova et | CRISPR | CRISPR system related | | |
| | | al. (2011) | | protein | | |
| COG1487 | 1 | Makarova et | TA | Predicted nucleic acid-binding | | |
| | | al. (2011) | | protein, contains PIN domain | | |
| COG1479 | 1 | Makarova et | new_system | RloF-like, possible RM | | |
| | | al. (2011) | | component (contains HNH- | | |
| | | | | type nuclease domain) | | |
| COG1476 | 1 | Makarova et | TA | Predicted transcriptional | | |
| | | al. (2011) | | regulator, xre family | | |
| COG1475 | 1 | Makarova et | new_system | Stage 0 sporulation protein J | | |
| | | al. (2011) | | (antagonist of Soj); contains | | |
| | | | | ParB-like nuclease domain | | |
| COG1468 | 1 | Makarova et | CRISPR | CRISPR-associated protein | | |
| | | al. (2011) | | Cas4 (RecB family | | |
| | | | | exonuclease) | | |
| COG1431 | 1 | Makarova et | pAgo | Argonaute homolog, | | |
| | | al. (2011) | | implicated in RNA | | |
| | | | | metabolism | | |
| COG1421 | 1 | Makarova et | CRISPR | CRISPR system related | | |
| | | al. (2011) | | protein | | |
| COG1403 | 1 | Makarova et | RM | Restriction endonuclease, | | |
| | | al. (2011) | | McrA/HNH family | | |
| COG1401 | 1 | Makarova et | RM | GTPase subunit of restriction | | |
| | | al. (2011) | | endonuclease | | |
| COG1396 | 1 | Makarova et | TA | Predicted transcriptional | | |
| | | al. (2011) | | regulator, xre family | | |
| COG1367 | 1 | Makarova et | CRISPR | CRISPR system related | | |
| | | al. (2011) | | protein, RAMP superfamily | | |
| COG1353 | 1 | Makarova et | CRISPR | Predicted CRISPR-associated | | |
| | | al. (2011) | | polymerase | | |
| COG1343 | 1 | Makarova et | CRISPR | CRISPR-associated protein | | |
| | | al. (2011) | | Cas2 | | |
| COG1337 | 1 | Makarova et | CRISPR | CRISPR system related | | |
| | | al. (2011) | | protein, RAMP superfamily | | |
| COG1336 | 1 | Makarova et | CRISPR | CRISPR system related | | |
| | | al. (2011) | | protein, RAMP superfamily | | |
| COG1332 | 1 | Makarova et | CRISPR | CRISPR system related | | |
| | | al. (2011) | | protein, RAMP superfamily | | |
| COG1203 | 1 | Makarova et | CRISPR | CRISPR-associated helicase | | |
| | | al. (2011) | | Cas3 | | |
| COG1112 | 1 | Makarova et | new_system | Superfamily I DNA/RNA | | |
| | | al. (2011) | | helicase | | |
| COG1106 | 1 | Makarova et | Abi | Predicted ATPase | | |
| | | al. (2011) | | | | |
| COG1061 | 1 | Makarova et | RM | DNA or RNA helicase of | | |
| | | al. (2011) | | superfamily II | | |
| COG1002 | 1 | Makarova et | RM, BREX | Type II restriction enzyme, | | |
| | | al. (2011), | | methylase subunit; PglX- | | |
| | | Goldfarb et | | Adenine-specific methylase | | |
| | | al. (2015) | | | | |
| COG0864 | 1 | Makarova et | TA | Transcriptional regulator, | | |
| | | al. (2011) | | CopG/Arc/MetJ family | | |
| | | | | (DNA-binding and a metal- | | |
| | | | | binding domains) | | |
| COG0863 | 1 | Makarova et | RM, BREX | DNA modification methylase; | | |
| | | al. (2011), | | PglXI-Adenine-specific | | |
| | | Goldfarb et | | methylase | | |
| | | al. (2015) | | | | |
| COG0827 | 1 | Makarova et | RM | Adenine-specific DNA | | |
| | | al. (2011) | | methylase | | |
| COG0732 | 1 | Makarova et | RM | Restriction endonuclease S | | |
| | | al. (2011) | | subunit | | |
| COG0640 | 1 | Makarova et | TA | Transcriptional regulator | | |
| | | al. (2011) | | containing HTH domain, | | |
| | | | | ArsR family | | |
| COG0610 | 1 | Makarova et | RM | Type I site-specific | | |
| | | al. (2011) | | restriction-modification | | |
| | | | | system, R (restriction) subunit | | |
| | | | | or related helicase | | |
| COG0338 | 1 | Makarova et | RM | Site-specific DNA methylase | | |
| | | al. (2011) | | | | |
| COG0286 | 1 | Makarova et | RM, BREX | Type I restriction- | | |
| | | al. (2011), | | modification system | | |
| | | Goldfarb et | | methyltransferase subunit; | | |
| | | al. (2015) | | PglX-Adenine-specific | | |
| | | | | methylase | | |
| COG0270 | 1 | Makarova et | RM, | Dcm, Site-specific DNA- | | |
| | | al. (2011), | DISARM | cytosine methylase; DrmMII | | |
| | | Ofir et al. | | | | |
| | | (2017) | | | | |
| COG4930 | 1 | Goldfarb et | BREX | BrxL-Lon-like protease | | |
| | | al. (2015) | | | | |
| COG3655 | 1 | Ofir et al. | DISARM- | DNA-binding transcriptional | | |
| | | (2017) | associated | regulator, XRE family | | |
| COG1404 | 1 | Ofir et al. | DISARM- | Serine protease, subtilisin | | |
| | | (2017) | associated | family | | |
| COG1205 | 1 | Ofir et al. | DISARM- | ATP-dependent helicase | | |
| | | (2017) | associated | YprA, contains C-terminal | | |
| | | | | metal-binding DUF1998 | | |
| | | | | domain | | |
| COG1201 | 1 | Goldfarb et | BREX | BrxHI-Lhr-like helicase | | |
| | | al. (2015) | | | | |
| COG0553 | 1 | Goldfarb et | BREX, | BrxHII-DNA/RNA | | |
| | | al. (2015), | DISARM | helicases; DrmD; HepA, | | |
| | | Ofir et al. | | Superfamily II DNA or RNA | | |
| | | (2017) | | helicase, SNF2 family | | |
| COG0515 | 1 | Goldfarb et | BREX | PglW-Serine/threonine | | |
| | | al. (2015) | | protein kinase | | |
| COG0210 | 1 | Ofir et al. | DISARM- | UvrD, Superfamily I DNA or | | |
| | | (2017) | associated | RNA helicase | | |
| COG0175 | 1 | Goldfarb et | BREX | BrxP-Phosphoadenosine | | |
| | | al. (2015) | | phosphosulfate reductase | | |
| pfam13091 | 2 | Ofir et al. | DISARM | DrmC; PLD-like domain | 44.2% | 0.14 |
| | | (2017) | | | | |
| pfam01881 | 2 | known | CRISPR | CRISPR associated protein | 92.3% | 0.44 |
| | | system | | Cas6 | | |
| | | found in | | | | |
| | | round 1 | | | | |
| pfam01905 | 2 | known | CRISPR | CRISPR-associated negative | 99.3% | 0.41 |
| | | system | | auto-regulator DevR/Csa2 | | |
| | | found in | | | | |
| | | round 1 | | | | |
| pfam01954 | 2 | known | TA | Protein of unknown function | 89.8% | 0.59 |
| | | system | | DUF104. Probably a new | | |
| | | found in | | antitoxin; the associated gene | | |
| | | round 1 | | is a PIN-domain protein, | | |
| | | | | known toxin | | |
| pfam02697 | 2 | known | TA | Uncharacterized ACR, | 89.6% | 0.42 |
| | | system | | COG1753 | | |
| | | found in | | | | |
| | | round 1 | | | | |
| pfam02980 | 2 | known | RM | Restriction endonuclease | 74.4% | 0.63 |
| | | system | | FokI, catalytic domain | | |
| | | found in | | | | |
| | | round 1 | | | | |
| pfam02981 | 2 | known | RM | Restriction endonuclease | 75.0% | 0.64 |
| | | system | | FokI, recognition domain | | |
| | | found in | | | | |
| | | round 1 | | | | |
| pfam03235 | 2 | known | RM | Protein of unknown function | 78.8% | 0.38 |
| | | system | | DUF262 | | |
| | | found in | | | | |
| | | round 1, | | | | |
| | | putative | | | | |
| | | system | | | | |
| | | found in | | | | |
| | | round 1 | | | | |
| pfam03683 | 2 | known | TA | predicted | 88.3% | 0.54 |
| | | system | | | | |
| | | found in | | | | |
| | | round 1 | | | | |
| pfam03693 | 2 | known | TA | Bacterial antitoxin of ParD | 88.1% | 0.19 |
| | | system | | toxin-antitoxin type II system | | |
| | | found in | | and RHH | | |
| | | round 1 | | | | |
| pfam03750 | 2 | known | CRISPR | Protein of unknown function | 99.9% | 0.26 |
| | | system | | (DUF310) | | |
| | | found in | | | | |
| | | round 1 | | | | |
| pfam04255 | 2 | known | TA | Protein of unknown function | 69.0% | 0.36 |
| | | system | | (DUF433) | | |
| | | found in | | | | |
| | | round 1 | | | | |
| pfam04365 | 2 | known | TA | Ribonuclease toxin, BmT, of | 91.1% | 0.33 |
| | | system | | type II toxin-antitoxin system | | |
| | | found in | | | | |
| | | round 1 | | | | |
| pfam04411 | 2 | known | RM | PD-(D/E)XK nuclease | 84.0% | 0.57 |
| | | system | | superfamily | | |
| | | found in | | | | |
| | | round 1 | | | | |
| pfam05015 | 2 | known | TA | HigAB; RelE-like toxin of | 96.9% | 0.26 |
| | | system | | type II toxin-antitoxin system | | |
| | | found in | | HigB | | |
| | | round 1 | | | | |
| pfam05107 | 2 | known | CRISPR | CRISPR-associated protein | 98.5% | 0.41 |
| | | system | | Cas7 | | |
| | | found in | | | | |
| | | round 1 | | | | |
| pfam05168 | 2 | known | TA | HEPN domain | 84.9% | 0.36 |
| | | system | | | | |
| | | found in | | | | |
| | | round 1 | | | | |
| pfam05315 | 2 | known | RM | ICEA Protein | 98.7% | 0.17 |
| | | system | | | | |
| | | found in | | | | |
| | | round 1 | | | | |
| pfam06023 | 2 | known | CRISPR | Archaeal protein of unknown | 93.9% | 0.71 |
| | | system | | function (DUF911) | | |
| | | found in | | | | |
| | | round 1 | | | | |
| pfam06154 | 2 | known | TA | CbeA_antitoxin, type IV, | 97.2% | 0.11 |
| | | system | | cytoskeleton bundling- | | |
| | | found in | | enhancing factor A | | |
| | | round 1 | | | | |
| pfam06300 | 2 | known | RM | Tsp45I type II restriction | 97.1% | 0.33 |
| | | system | | enzyme | | |
| | | found in | | | | |
| | | round 1 | | | | |
| pfam06634 | 2 | known | RM, System | Protein of unknown function | 95.5% | 0.66 |
| | | system | around | (DUF1156) | | |
| | | found in | anchors | | | |
| | | round 1, | pfam06634, | | | |
| | | putative | COG1483, | | | |
| | | system | pfam12635 | | | |
| | | found in | | | | |
| | | round 1 | | | | |
| pfam06755 | 2 | known | TA | CbtA_toxin of type IV toxin- | 96.6% | 0.12 |
| | | system | | antitoxin system | | |
| | | found in | | | | |
| | | round 1 | | | | |
| pfam07362 | 2 | known | TA | Post-segregation antitoxin | 94.5% | 0.15 |
| | | system | | CcdA | | |
| | | found in | | | | |
| | | round 1 | | | | |
| pfam07510 | 2 | known | RM | Protein of unknown function | 72.8% | 0.29 |
| | | system | | (DUF1524) | | |
| | | found in | | | | |
| | | round 1, | | | | |
| | | putative | | | | |
| | | system | | | | |
| | | found in | | | | |
| | | round 1 | | | | |
| pfam07704 | 2 | known | TA | Rv0623-like transcription | 99.3% | 0.05 |
| | | system | | factor | | |
| | | found in | | | | |
| | | round 1 | | | | |
| pfam07832 | 2 | known | RM | Cfr10I/Bse634I restriction | 100.0% | 0.57 |
| | | system | | endonuclease | | |
| | | found in | | | | |
| | | round 1 | | | | |
| pfam08870 | 2 | known | DND | Domain of unknown function | 96.1% | 0.52 |
| | | system | | (DUF1832) | | |
| | | found in | | | | |
| | | round 1 | | | | |
| pfam08998 | 2 | known | TA | Bacterial epsilon antitoxin | 92.0% | 0.22 |
| | | system | | | | |
| | | found in | | | | |
| | | round 1 | | | | |
| pfam09015 | 2 | known | RM | NgoMIV restriction enzyme | 98.1% | 0.34 |
| | | system | | | | |
| | | found in | | | | |
| | | round 1 | | | | |
| pfam09126 | 2 | known | RM | Restriction endonuclease NaeI | 95.9% | 0.50 |
| | | system | | | | |
| | | found in | | | | |
| | | round 1 | | | | |
| pfam09226 | 2 | known | RM | Restriction endonuclease | 97.1% | 0.47 |
| | | system | | HincII | | |
| | | found in | | | | |
| | | round 1 | | | | |
| pfam09254 | 2 | known | RM | Restriction endonuclease | 78.3% | 0.73 |
| | | system | | FokI, C terminal | | |
| | | found in | | | | |
| | | round 1 | | | | |
| pfam09386 | 2 | known | TA | Antitoxin ParD | 92.1% | 0.58 |
| | | system | | | | |
| | | found in | | | | |
| | | round 1 | | | | |
| pfam09499 | 2 | known | RM | ApaLI-like restriction | 99.1% | 0.10 |
| | | system | | endonuclease | | |
| | | found in | | | | |
| | | round 1 | | | | |
| pfam09518 | 2 | known | RM | HindIII restriction | 84.8% | 0.46 |
| | | system | | endonuclease | | |
| | | found in | | | | |
| | | round 1 | | | | |
| pfam09519 | 2 | known | RM | Hind VP restriction | 93.8% | 0.56 |
| | | system | | endonuclease | | |
| | | found in | | | | |
| | | round 1 | | | | |
| pfam09521 | 2 | known | RM | NgoPII restriction | 96.4% | 0.18 |
| | | system | | endonuclease | | |
| | | found in | | | | |
| | | round 1 | | | | |
| pfam09545 | 2 | known | RM | AccI restriction endonuclease | 95.2% | 0.68 |
| | | system | | | | |
| | | found in | | | | |
| | | round 1 | | | | |
| pfam09553 | 2 | known | RM | Eco47II restriction | 97.6% | 0.36 |
| | | system | | endonuclease | | |
| | | found in | | | | |
| | | round 1 | | | | |
| pfam09554 | 2 | known | RM | HaeII restriction endonuclease | 97.5% | 0.33 |
| | | system | | | | |
| | | found in | | | | |
| | | round 1 | | | | |
| pfam09561 | 2 | known | RM | HpaII restriction | 82.0% | 0.33 |
| | | system | | endonuclease | | |
| | | found in | | | | |
| | | round 1 | | | | |
| pfam09564 | 2 | known | RM | NgoBV restriction | 99.6% | 0.13 |
| | | system | | endonuclease | | |
| | | found in | | | | |
| | | round 1 | | | | |
| pfam09566 | 2 | known | RM | SacI restriction endonuclease | 95.8% | 0.41 |
| | | system | | | | |
| | | found in | | | | |
| | | round 1 | | | | |
| pfam09570 | 2 | known | RM | SinI restriction endonuclease | 95.1% | 0.49 |
| | | system | | | | |
| | | found in | | | | |
| | | round 1 | | | | |
| pfam09711 | 2 | known | CRISPR | CRISPR-associated protein | 98.9% | 0.15 |
| | | system | | (Cas_Csn2) | | |
| | | found in | | | | |
| | | round 1 | | | | |
| pfam09722 | 2 | known | TA | Protein of unknown function | 92.7% | 0.16 |
| | | system | | (DUF2384) | | |
| | | found in | | | | |
| | | round 1 | | | | |
| pfam09907 | 2 | known | TA | HigAB | 97.8% | 0.18 |
| | | system | | | | |
| | | found in | | | | |
| | | round 1 | | | | |
| pfam09946 | 2 | known | TA | predicted | 97.9% | 0.16 |
| | | system | | | | |
| | | found in | | | | |
| | | round 1 | | | | |
| pfam09952 | 2 | known | TA | putative toxin has a | 94.2% | 0.13 |
| | | system | | nucleotidyl transferase | | |
| | | found in | | domain | | |
| | | round 1 | | | | |
| pfam10117 | 2 | known | RM | McrBC 5-methylcytosine | 75.9% | 0.40 |
| | | system | | restriction system component | | |
| | | found in | | | | |
| | | round 1 | | | | |
| pfam10884 | 2 | known | TA | Protein of unknown function | 80.7% | 0.44 |
| | | system | | (DUF2683) | | |
| | | found in | | | | |
| | | round 1 | | | | |
| pfam10959 | 2 | known | TA | Protein of unknown function | 91.3% | 0.33 |
| | | system | | (DUF2761) | | |
| | | found in | | | | |
| | | round 1 | | | | |
| pfam11463 | 2 | known | RM | R.HinP1I restriction | 90.9% | 0.36 |
| | | system | | endonuclease | | |
| | | found in | | | | |
| | | round 1 | | | | |
| pfam11564 | 2 | known | RM | Restriction endonuclease | 100.0% | 0.58 |
| | | system | | BpuJI-N terminal | | |
| | | found in | | | | |
| | | round 1 | | | | |
| pfam11848 | 2 | known | TA | contains PIN domain. Two | 95.9% | 0.54 |
| | | system | | small proteins | | |
| | | found in | | | | |
| | | round 1 | | | | |
| pfam11867 | 2 | known | RM | Domain of unknown function | 86.9% | 0.37 |
| | | system | | (DUF3387) | | |
| | | found in | | | | |
| | | round 1 | | | | |
| pfam12102 | 2 | known | RM | Domain of unknown function | 46.0% | 0.23 |
| | | system | | (DUF3578) | | |
| | | found in | | | | |
| | | round 1 | | | | |
| pfam12441 | 2 | known | TA | CopG antitoxin of type II | 89.9% | 0.46 |
| | | system | | toxin-antitoxin system | | |
| | | found in | | | | |
| | | round 1 | | | | |
| pfam12469 | 2 | known | CRISPR | CRISPR-associated protein | 98.2% | 0.70 |
| | | system | | | | |
| | | found in | | | | |
| | | round 1 | | | | |
| pfam12564 | 2 | known | RM | Type III | 95.3% | 0.25 |
| | | system | | restriction/modification | | |
| | | found in | | enzyme methylation subunit | | |
| | | round 1 | | | | |
| pfam12676 | 2 | known | TA | Protein of unknown function | 96.5% | 0.08 |
| | | system | | (DUF3796) | | |
| | | found in | | | | |
| | | round 1 | | | | |
| pfam13156 | 2 | known | RM | maybe a type IIG gene; | 82.5% | 0.19 |
| | | system | | Restriction endonuclease | | |
| | | found in | | | | |
| | | round 1 | | | | |
| pfam13337 | 2 | known | BREX | Putative ATP-dependent Lon | 91.8% | 0.56 |
| | | system | | protease | | |
| | | found in | | | | |
| | | round 1 | | | | |
| pfam13391 | 2 | known | RM | HNH_2, HNH endonuclease | 75.3% | 0.36 |
| | | system | | | | |
| | | found in | | | | |
| | | round 1 | | | | |
| pfam13395 | 2 | known | CRISPR | HNH endonuclease | 85.4% | 0.34 |
| | | system | | | | |
| | | found in | | | | |
| | | round 1 | | | | |
| pfam13643 | 2 | known | RM | Domain of unknown function | 70.9% | 0.44 |
| | | system | | (DUF4145) | | |
| | | found in | | | | |
| | | round 1 | | | | |
| pfam13957 | 2 | known | TA | Toxin YafO, type II toxin- | 79.6% | 0.11 |
| | | system | | antitoxin system | | |
| | | found in | | | | |
| | | round 1 | | | | |
| pfam14072 | 2 | known | DND | DndB, DNA-sulfur | 86.1% | 0.44 |
| | | system | | modification-associated | | |
| | | found in | | | | |
| | | round 1 | | | | |
| pfam14076 | 2 | known | TA | Domain of unknown function | 78.5% | 0.38 |
| | | system | | (DUF4258) | | |
| | | found in | | | | |
| | | round 1 | | | | |
| pfam14335 | 2 | known | RM | Domain of unknown function | 92.8% | 0.54 |
| | | system | | (DUF4391) | | |
| | | found in | | | | |
| | | round 1 | | | | |
| pfam14338 | 2 | known | RM | Mrr N-terminal domain | 87.8% | 0.27 |
| | | system | | | | |
| | | found in | | | | |
| | | round 1 | | | | |
| pfam14350 | 2 | known | TA | Nearby gene is HigA | 71.2% | 0.39 |
| | | system | | antitoxin | | |
| | | found in | | | | |
| | | round 1 | | | | |
| pfam14355 | 2 | known | Abi | Abortive infection C-terminus | 73.1% | 0.41 |
| | | system | | | | |
| | | found in | | | | |
| | | round 1 | | | | |
| pfam14367 | 2 | known | TA | Domain of unknown function | 98.0% | 0.17 |
| | | system | | (DUF4411) | | |
| | | found in | | | | |
| | | round 1 | | | | |
| pfam14384 | 2 | known | TA | BrnA antitoxin of type II | 88.9% | 0.26 |
| | | system | | toxin-antitoxin system | | |
| | | found in | | | | |
| | | round 1 | | | | |
| pfam14487 | 2 | known | TA | pmen type TA system | 88.7% | 0.22 |
| | | system | | | | |
| | | found in | | | | |
| | | round 1 | | | | |
| pfam14511 | 2 | known | RM | Type II restriction | 95.1% | 0.42 |
| | | system | | endonuclease EcoO109I | | |
| | | found in | | | | |
| | | round 1 | | | | |
| pfam14809 | 2 | known | tgtA | C1 domain of tRNA-guanine | 81.1% | 0.57 |
| | | system | (deazaguanine | transglycosylase dimerisation | | |
| | | found in | tRNA | | | |
| | | round 1 | modification) | | | |
| pfam15514 | 2 | known | RM | Restriction endonuclease ThaI | 95.1% | 0.33 |
| | | system | | | | |
| | | found in | | | | |
| | | round 1 | | | | |
| pfam15515 | 2 | known | RM | MvaI/BcnI restriction | 95.0% | 0.44 |
| | | system | | endonuclease family | | |
| | | found in | | | | |
| | | round 1 | | | | |
| pfam15723 | 2 | known | TA | Motility quorum-sensing | 81.1% | 0.19 |
| | | system | | regulator, toxin of MqsA | | |
| | | found in | | | | |
| | | round 1 | | | | |
| pfam15738 | 2 | known | TA | Bacterial toxin of type II | 87.0% | 0.22 |
| | | system | | toxin-antitoxin system, YafQ | | |
| | | found in | | | | |
| | | round 1 | | | | |
| pfam16277 | 2 | known | TA | Domain of unknown function | 87.5% | 0.22 |
| | | system | | (DUF4926) | | |
| | | found in | | | | |
| | | round 1 | | | | |
| pfam16565 | 2 | known | BREX | Lon Protease; Phospholipase | 85.5% | 0.74 |
| | | system | | D-like domain at C-terminus | | |
| | | found in | | of MIT | | |
| | | round 1 | | | | |
| pfam16592 | 2 | known | CRISPR | REC lobe of CRISPR- | 98.0% | 0.17 |
| | | system | | associated endonuclease Cas9 | | |
| | | found in | | | | |
| | | round 1 | | | | |
| pfam16593 | 2 | known | CRISPR | Bridge helix of CRISPR- | 97.8% | 0.14 |
| | | system | | associated endonuclease Cas9 | | |
| | | found in | | | | |
| | | round 1 | | | | |
| pfam16595 | 2 | known | CRISPR | PAM-interacting domain of | 99.4% | 0.14 |
| | | system | | CRISPR-associated | | |
| | | found in | | endonuclease Cas9 | | |
| | | round 1 | | | | |
| pfam16762 | 2 | known | TA | PIN domain; Ribbon-helix- | 96.6% | 0.38 |
| | | system | | helix domain | | |
| | | found in | | | | |
| | | round 1 | | | | |
| pfam16813 | 2 | known | CRISPR | CRISPR-associated protein | 98.8% | 0.28 |
| | | system | | Csn2 subfamily St | | |
| | | found in | | | | |
| | | round 1 | | | | |
| pfam16902 | 2 | known | RM | FokI; Type-2 restriction | 73.5% | 0.62 |
| | | system | | enzyme D3 domain | | |
| | | found in | | | | |
| | | round 1 | | | | |
| pfam16948 | 2 | known | TA | HipAB; Cell translocating | 73.9% | 0.56 |
| | | system | | kinase A N-terminus | | |
| | | found in | | | | |
| | | round 1 | | | | |
| pfam02384 | 2 | known | RM | N-6 DNA Methylase | 79.5% | 0.31 |
| | | system | | | | |
| | | found in | | | | |
| | | round 1 | | | | |
| pfam01541 | 2 | putative | single-gene | GIY-YIG catalytic domain | 38.0% | 0.12 |
| | | system | “system” of | | | |
| | | found in | pfam14267 | | | |
| | | round 1 | | | | |
| pfam01618 | 2 | putative | Zorya | ZorA; MotA/TolQ/ExbB | 66.5% | 0.06 |
| | | system | | proton channel family | | |
| | | found in | | | | |
| | | round 1 | | | | |
| pfam01863 | 2 | putative | single-gene | Protein of unknown function | 62.3% | 0.18 |
| | | system | “system” of | DUF45 | | |
| | | found in | COG1451 | | | |
| | | round 1 | | | | |
| pfam00691 | 2 | putative | Zorya | ZorB; OmpA family | 60.7% | 0.06 |
| | | system | | | | |
| | | found in | | | | |
| | | round 1 | | | | |
| pfam03174 | 2 | putative | System | Chitobiase/beta- | 41.9% | 0.24 |
| | | system | around | hexosaminidase C-terminal | | |
| | | found in | anchors | domain | | |
| | | round 1 | pfam06634, | | | |
| | | | COG1483, | | | |
| | | | pfam12635 | | | |
| pfam04383 | 2 | putative | single-gene | KilA-N domain | 43.1% | 0.31 |
| | | system | “system” of | | | |
| | | found in | pfam04383 | | | |
| | | round 1 | | | | |
| pfam04471 | 2 | putative | Zorya | ZorD (in some cases); | 66.7% | 0.31 |
| | | system | | Restriction endonuclease | | |
| | | found in | | | | |
| | | round 1 | | | | |
| pfam06250 | 2 | putative | single-gene | Protein of unknown function | 55.6% | 0.42 |
| | | system | “system”of | (DUF1016) | | |
| | | found in | COG4804 | | | |
| | | round 1 | | | | |
| pfam08878 | 2 | putative | Hachiman | HamA; Domain of unknown | 89.5% | 0.48 |
| | | system | | function (DUF1837) | | |
| | | found in | | | | |
| | | round 1 | | | | |
| pfam09414 | 2 | putative | System | RNA ligase | 34.5% | 0.39 |
| | | system | around anchor | | | |
| | | found in | pfam12476 | | | |
| | | round 1 | | | | |
| pfam09983 | 2 | putative | Wadjet | JetD; Uncharacterized protein | 87.5% | 0.45 |
| | | system | | conserved in bacteria C- | | |
| | | found in | | term(DUF2220) | | |
| | | round 1 | | | | |
| pfam10088 | 2 | putative | Lamassu | LmuB; Uncharacterized | 57.3% | 0.52 |
| | | system | | protein conserved in bacteria | | |
| | | found in | | (DUF2326) | | |
| | | round 1 | | | | |
| pfam11795 | 2 | putative | Wadjet | JetD; Uncharacterized protein | 95.3% | 0.40 |
| | | system | | conserved in bacteria N-term | | |
| | | found in | | (DUF3322) | | |
| | | round 1 | | | | |
| pfam11855 | 2 | putative | Wadjet | JetA; Protein of unknown | 97.6% | 0.31 |
| | | system | | function (DUF3375) | | |
| | | found in | | | | |
| | | round 1 | | | | |
| pfam12476 | 2 | putative | System | Protein of unknown function | 89.0% | 0.45 |
| | | system | around anchor | (DUF3696) | | |
| | | found in | pfam12476 | | | |
| | | round 1 | | | | |
| pfam12635 | 2 | putative | System | Protein of unknown function | 98.8% | 0.69 |
| | | system | around | (DUF3780) | | |
| | | found in | anchors | | | |
| | | round 1 | pfam06634, | | | |
| | | | COG1483, | | | |
| | | | pfam12635 | | | |
| pfam13020 | 2 | putative | System | Domain of unknown function | 52.6% | 0.41 |
| | | system | around | (DUF3883) | | |
| | | found in | anchors | | | |
| | | round 1 | pfam06634, | | | |
| | | | COG1483 | | | |
| pfam13175 | 2 | putative | Septu + System | PtuA; AAA ATPase domain | 73.9% | 0.37 |
| | | system | around anchor | | | |
| | | found in | pfam12476 | | | |
| | | round 1 | | | | |
| pfam13208 | 2 | putative | System | TerB N-terminal domain | 89.6% | 0.29 |
| | | system | around anchor | | | |
| | | found in | pfam13208 | | | |
| | | round 1 | | | | |
| pfam13304 | 2 | putative | Septu + System | PtuA; AAA domain, putative | 63.8% | 0.33 |
| | | system | around anchor | AbiEii toxin, Type IV TA | | |
| | | found in | pfam12476 | system | | |
| | | round 1 | | | | |
| pfam13476 | 2 | putative | Septu | PtuA; AAA domain | 47.1% | 0.24 |
| | | system | | | | |
| | | found in | | | | |
| | | round 1 | | | | |
| pfam13677 | 2 | putative | Zorya | ZorB; Membrane MotB of | 92.5% | 0.04 |
| | | system | | proton-channel complex | | |
| | | found in | | MotA/MotB | | |
| | | round 1 | | | | |
| pfam13835 | 2 | putative | Wadjet | JetB; Domain of unknown | 98.0% | 0.32 |
| | | system | | function (DUF4194) | | |
| | | found in | | | | |
| | | round 1 | | | | |
| pfam13910 | 2 | putative | single-gene | Domain of unknown function | 69.0% | 0.34 |
| | | system | “system” of | (DUF4209) | | |
| | | found in | pfam13910 | | | |
| | | round 1 | | | | |
| pfam14130 | 2 | putative | Lamassu | LmuA; Domain of unknown | 74.8% | 0.45 |
| | | system | | function (DUF4297) | | |
| | | found in | | | | |
| | | round 1 | | | | |
| pfam14267 | 2 | putative | single-gene | Domain of unknown function | 78.8% | 0.60 |
| | | system | “system” of | (DUF4357) | | |
| | | found in | pfam14267 | | | |
| | | round 1 | | | | |
| pfam14491 | 2 | putative | Septu- | Protein of unknown function | 92.4% | 0.29 |
| | | system | associated | (DUF4435) | | |
| | | found in | | | | |
| | | round 1 | | | | |
| pfam15611 | 2 | putative | Zorya | ZorC; EH_Signature domain | 98.3% | 0.55 |
| | | system | | | | |
| | | found in | | | | |
| | | round 1 | | | | |
| pfam15615 | 2 | putative | System | TerB-C domain | 92.1% | 0.29 |
| | | system | around anchor | | | |
| | | found in | pfam13208 | | | |
| | | round 1 | | | | |
| pfam13280 | 2 | putative | System | exists in subtypes; WYL | 57.6% | 0.19 |
| | | system | around | domain | | |
| | | found in | anchors | | | |
| | | round 1 | pfam06634, | | | |
| | | | COG1483 | | | |
| COG1483 | 2 | known | RM, System | Predicted ATPase, AAA + | | |
| | | system | around | superfamily | | |
| | | found in | anchors | | | |
| | | round 1, | pfam06634, | | | |
| | | putative | COG1483, | | | |
| | | system | pfam12635 | | | |
| | | found in | | | | |
| | | round 1 | | | | |
| COG0419 | 2 | putative | Lamassu | LmuB; SbcC, DNA repair | | |
| | | system | | exonuclease SbcCD ATPase | | |
| | | found in | | subunit | | |
| | | round 1 | | | | |
| COG3727 | 2 | known | RM | Vsr accompanying C | | |
| | | system | | methylase, auxilary to RM; | | |
| | | found in | | G:T-mismatch repair DNA | | |
| | | round 1 | | endonuclease, very short | | |
| | | | | patch repair protein | | |
| COG0840 | 2 | putative | Zorya | ZorA; Methyl-accepting | | |
| | | system | | chemotaxis protein | | |
| | | found in | | | | |
| | | round 1 | | | | |
| COG1196 | 2 | putative | Lamassu | LmuB; Smc, Chromosome | | |
| | | system | | segregation ATPase | | |
| | | found in | | | | |
| | | round 1 | | | | |
| COG1204 | 2 | putative | Lamassu- | Replicative superfamily II | | |
| | | system | associated | helicase | | |
| | | found in | | | | |
| | | round 1 | | | | |
| COG1360 | 2 | putative | Zorya | ZorB; Flagellar motor protein | | |
| | | system | | MotB | | |
| | | found in | | | | |
| | | round 1 | | | | |
| COG1451 | 2 | putative | single-gene | Predicted metal-dependent | | |
| | | system | “system” of | hydrolase | | |
| | | found in | COG1451 | | | |
| | | round 1 | | | | |
| COG2378 | 2 | putative | System | Predicted DNA-binding | | |
| | | system | around | transcriptional regulator | | |
| | | found in | anchors | YafY, contains an HTH and | | |
| | | round 1 | pfam06634, | WYL domains | | |
| | | | COG1483 | | | |
| COG2885 | 2 | putative | Zorya | ZorB; Outer membrane | | |
| | | system | | protein OmpA and related | | |
| | | found in | | peptidoglycan-associated | | |
| | | round 1 | | (lipo)proteins | | |
| COG4913 | 2 | putative | Wadjet | JetC; Uncharacterized protein, | | |
| | | system | | contains a C-terminal ATPase | | |
| | | found in | | domain | | |
| | | round 1 | | | | |
| COG4924 | 2 | putative | Wadjet | JetD; Uncharacterized protein | | |
| | | system | | | | |
| | | found in | | | | |
| | | round 1 | | | | |
| COG4938 | 2 | putative | System | Predicted ATPase | | |
| | | system | around anchor | | | |
| | | found in | pfam12476 | | | |
| | | round 1 | | | | |
| COG5293 | 2 | putative | Lamassu | LmuB; Uncharacterized | | |
| | | system | | protein YydD, contains | | |
| | | found in | | DUF2326 domain | | |
| | | round 1 | | (pfam10088) | | |

¹Makarova et al. J Bacteriol. 2011 November; 193(21): 6039-6056
²Goldfarb T, et al. (2015) BREX is a novel phage resistance system widespread in microbial genomes. EMBO J. EMBO Press; 34: 169-83
³Submitted

[2015] Identification of Pfams Enriched Near Defense Genes:

[2016] The genome sequences, gene annotations and taxonomy annotations of all publicly available sequenced bacterial and archaeal genomes were downloaded from the NCBI FTP site (ftp.ncbi.nih.gov/genomes/genbank/bacteria/ and ftp.ncbi.nih.gov/genomes/genbank/archaea/, respectively) on April 2016. pfam annotations for bacterial and archaeal genes were obtained from the Integrated Microbial Genomes (IMG) database (Markowitz V M, et al. (2012) IMG: the Integrated Microbial Genomes database and comparative analysis system. nucleic Acids Res. Oxford University Press; 40: D115-22) on December 2015, and cross-referenced to the genes in the genomes downloaded from NCBI using the locus_tag Genbank field. All pfams annotated in at least 20 genes (“members”) across the analyzed genomes (14,083 pfams) were scanned. For each pfam, the number of member genes for which a gene having an annotation of a known defense gene family (Table 1) was present in proximity (up to ten genes upstream and ten genes downstream) was recorded. The fraction of defense-associated members out of total members (“defense score”) was calculated per pfam. A second score (“defense context variability score”) was calculated for each pfam as follows: for each member gene occurring with at least one defense gene in proximity, a list of the proximal defense genes was recorded, and the fraction of unique lists out of total number of lists for that pfam represents the score (for example: if pfamX is found within 20 genes in our set, with 15 of them having Cas9 nearby and 5 having type I R-M nearby, the number of unique lists is 2, and the “defense context variability score” is 2/20=0.1). Pfams with defense score >=65% and defense context variability score >=0.1 were taken for further analysis. This list was supplemented with 35 non-pfam gene families that were predicted to be associated with defense by Makarova et al. (2011) ibid, as well as 23 pfams that were predicted in the same study but did not pass the thresholds above (Table 2).

TABLE 2
Scanned Families

| | Defense | Variability | | |
|---|---|---|---|---|
| Family | score | score | Family source | Classification |
| pfam10802 | 65.4% | 0.82 | Prediction cycle 1 | Likely mobilome |
| pfam10657 | 96.4% | 0.15 | Prediction cycle 1 | Likely non-defense function |
| pfam09226 | 94.3% | 0.30 | Prediction cycle 1 | Known system |
| pfam14809 | 70.3% | 0.58 | Prediction cycle 1 | Likely known system |
| pfam11572 | 92.1% | 0.23 | Prediction cycle 1 | Likely non-defense function |
| pfam14455 | 67.4% | 0.79 | Prediction cycle 1 | Likely mobilome |
| pfam07832 | 100.0% | 0.53 | Prediction cycle 1 | Known system |
| pfam10959 | 84.8% | 0.31 | Prediction cycle 1 | Likely known system |
| pfam04033 | 85.7% | 0.77 | Prediction cycle 1 | Possibly belongs to a new defense |
| | | | | system |
| pfam09629 | 70.9% | 0.26 | Prediction cycle 1 | Likely mobilome |
| pfam01304 | 74.6% | 0.41 | Prediction cycle 1 | Likely non-defense function |
| pfam11536 | 75.0% | 0.60 | Prediction cycle 1 | Possibly belongs to a new defense |
| | | | | system |
| pfam09545 | 80.6% | 0.70 | Prediction cycle 1 | Known system |
| pfam11564 | 100.0% | 0.48 | Prediction cycle 1 | Known system |
| pfam09566 | 95.8% | 0.38 | Prediction cycle 1 | Known system |
| pfam16902 | 69.9% | 0.45 | Prediction cycle 1 | Known system |
| pfam12942 | 78.2% | 0.13 | Prediction cycle 1 | Likely non-defense function |
| pfam02981 | 71.6% | 0.46 | Prediction cycle 1 | Known system |
| pfam16992 | 86.5% | 0.18 | Prediction cycle 1 | Likely non-defense function |
| pfam02980 | 71.1% | 0.44 | Prediction cycle 1 | Known system |
| pfam12962 | 67.0% | 0.34 | Prediction cycle 1 | Likely mobilome |
| pfam09518 | 76.8% | 0.43 | Prediction cycle 1 | Known system |
| pfam10473 | 78.3% | 0.18 | Prediction cycle 1 | Likely mobilome |
| pfam14466 | 84.6% | 0.28 | Prediction cycle 1 | Likely mobilome |
| pfam14456 | 78.3% | 0.34 | Prediction cycle 1 | Likely mobilome |
| pfam10876 | 66.7% | 0.40 | Prediction cycle 1 | Likely mobilome |
| pfam09543 | 67.9% | 0.24 | Prediction cycle 1 | Likely non-defense function |
| pfam09254 | 76.1% | 0.58 | Prediction cycle 1 | Known system |
| pfam09973 | 65.5% | 0.23 | Prediction cycle 1 | Likely non-defense function |
| pfam09570 | 92.3% | 0.42 | Prediction cycle 1 | Known system |
| pfam15514 | 95.1% | 0.29 | Prediction cycle 1 | Known system |
| pfam08078 | 66.7% | 0.36 | Prediction cycle 1 | Likely non-defense function |
| pfam09519 | 93.2% | 0.45 | Prediction cycle 1 | Known system |
| pfam09554 | 97.5% | 0.29 | Prediction cycle 1 | Known system |
| pfam11428 | 67.7% | 0.13 | Prediction cycle 1 | Likely non-defense function |
| pfam16813 | 98.8% | 0.20 | Prediction cycle 1 | Known system |
| pfam09895 | 71.4% | 0.18 | Prediction cycle 1 | Likely non-defense function |
| pfam11463 | 88.2% | 0.26 | Prediction cycle 1 | Known system |
| pfam09436 | 84.7% | 0.28 | Prediction cycle 1 | Likely mobilome |
| pfam10884 | 75.6% | 0.40 | Prediction cycle 1 | Known system |
| pfam10907 | 85.1% | 0.15 | Prediction cycle 1 | Likely mobilome |
| pfam12963 | 67.1% | 0.32 | Prediction cycle 1 | Likely mobilome |
| pfam16827 | 81.6% | 0.37 | Prediction cycle 1 | Likely non-defense function |
| pfam09871 | 66.0% | 0.16 | Prediction cycle 1 | Likely non-defense function |
| pfam12635 | 94.7% | 0.55 | Prediction cycle 1 | Possibly belongs to a new defense |
| | | | | system |
| pfam09126 | 95.5% | 0.40 | Prediction cycle 1 | Known system |
| pfam06023 | 93.9% | 0.69 | Prediction cycle 1 | Known system |
| pfam11645 | 67.2% | 0.21 | Prediction cycle 1 | Likely non-defense function |
| pfam12959 | 87.7% | 0.48 | Prediction cycle 1 | Likely mobilome |
| pfam06300 | 95.0% | 0.26 | Prediction cycle 1 | Known system |
| pfam16948 | 68.6% | 0.49 | Prediction cycle 1 | Known system |
| pfam09386 | 91.1% | 0.52 | Prediction cycle 1 | Known system |
| pfam09466 | 89.4% | 0.23 | Prediction cycle 1 | Likely mobilome |
| pfam16468 | 92.3% | 0.28 | Prediction cycle 1 | Likely mobilome |
| pfam09015 | 98.1% | 0.29 | Prediction cycle 1 | Known system |
| pfam09544 | 81.4% | 0.19 | Prediction cycle 1 | Possibly belongs to a new defense |
| | | | | system |
| pfam05315 | 98.1% | 0.13 | Prediction cycle 1 | Known system |
| pfam11426 | 66.1% | 0.36 | Prediction cycle 1 | Likely mobilome |
| pfam09553 | 97.3% | 0.29 | Prediction cycle 1 | Known system |
| pfam14462 | 81.4% | 0.53 | Prediction cycle 1 | Likely non-defense function |
| pfam12960 | 90.8% | 0.46 | Prediction cycle 1 | Likely mobilome |
| pfam12997 | 80.4% | 0.17 | Prediction cycle 1 | Likely non-defense function |
| pfam09521 | 95.3% | 0.15 | Prediction cycle 1 | Known system |
| pfam07015 | 69.5% | 0.61 | Prediction cycle 1 | Likely mobilome |
| pfam14457 | 71.2% | 0.51 | Prediction cycle 1 | Likely mobilome |
| pfam08998 | 91.0% | 0.19 | Prediction cycle 1 | Known system |
| pfam14511 | 93.2% | 0.34 | Prediction cycle 1 | Known system |
| pfam09946 | 97.7% | 0.12 | Prediction cycle 1 | Likely known system |
| pfam10398 | 93.2% | 0.26 | Prediction cycle 1 | Likely non-defense function |
| pfam16762 | 96.4% | 0.33 | Prediction cycle 1 | Known system |
| pfam03513 | 68.1% | 0.29 | Prediction cycle 1 | Likely non-defense function |
| pfam07820 | 68.8% | 0.41 | Prediction cycle 1 | Likely mobilome |
| pfam11320 | 69.8% | 0.27 | Prediction cycle 1 | Likely non-defense function |
| pfam16565 | 81.7% | 0.61 | Prediction cycle 1 | Known system |
| pfam11341 | 67.9% | 0.27 | Prediction cycle 1 | Likely non-defense function |
| pfam09561 | 80.1% | 0.25 | Prediction cycle 1 | Known system |
| pfam14386 | 71.5% | 0.45 | Prediction cycle 1 | Likely mobilome |
| pfam14192 | 89.7% | 0.30 | Prediction cycle 1 | Likely mobilome |
| pfam12617 | 73.3% | 0.24 | Prediction cycle 1 | Likely non-defense function |
| pfam14203 | 88.3% | 0.37 | Prediction cycle 1 | Likely mobilome |
| pfam07550 | 67.6% | 0.12 | Prediction cycle 1 | Likely non-defense function |
| pfam15515 | 93.8% | 0.37 | Prediction cycle 1 | Known system |
| pfam14101 | 76.9% | 0.11 | Prediction cycle 1 | Likely non-defense function |
| pfam16509 | 79.5% | 0.34 | Prediction cycle 1 | Likely mobilome |
| pfam08950 | 65.4% | 0.12 | Prediction cycle 1 | Likely non-defense function |
| pfam09274 | 70.3% | 0.39 | Prediction cycle 1 | Likely mobilome |
| pfam07764 | 78.8% | 0.19 | Prediction cycle 1 | Likely mobilome |
| pfam11083 | 80.5% | 0.11 | Prediction cycle 1 | Likely mobilome |
| pfam12957 | 68.2% | 0.48 | Prediction cycle 1 | Likely mobilome |
| pfam14194 | 73.8% | 0.29 | Prediction cycle 1 | Likely mobilome |
| pfam14461 | 67.1% | 0.35 | Prediction cycle 1 | Likely mobilome |
| pfam12599 | 72.6% | 0.55 | Prediction cycle 1 | Likely mobilome |
| pfam16734 | 66.7% | 0.39 | Prediction cycle 1 | Likely non-defense function |
| pfam14452 | 85.5% | 0.47 | Prediction cycle 1 | Likely non-defense function |
| pfam14193 | 80.3% | 0.31 | Prediction cycle 1 | Likely mobilome |
| pfam14195 | 77.6% | 0.39 | Prediction cycle 1 | Likely mobilome |
| pfam02697 | 88.4% | 0.38 | Prediction cycle 1 | Known system |
| pfam14217 | 67.9% | 0.30 | Prediction cycle 1 | Likely non-defense function |
| pfam15611 | 92.5% | 0.41 | Prediction cycle 1 | Possibly belongs to a new defense |
| | | | | system |
| pfam13910 | 65.1% | 0.27 | Prediction cycle 1 | Possibly belongs to a new defense |
| | | | | system |
| pfam12958 | 67.2% | 0.29 | Prediction cycle 1 | Likely mobilome |
| pfam14130 | 66.5% | 0.35 | Prediction cycle 1 | Possibly belongs to a new defense |
| | | | | system |
| pfam14460 | 65.9% | 0.30 | Prediction cycle 1 | Likely mobilome |
| pfam05626 | 83.4% | 0.23 | Prediction cycle 1 | Uncertain |
| pfam12664 | 72.1% | 0.17 | Prediction cycle 1 | Likely mobilome |
| pfam16560 | 73.7% | 0.11 | Prediction cycle 1 | Likely mobilome |
| pfam04796 | 69.8% | 0.42 | Prediction cycle 1 | Likely mobilome |
| pfam14271 | 66.0% | 0.15 | Prediction cycle 1 | Likely non-defense function |
| pfam08870 | 92.8% | 0.32 | Prediction cycle 1 | Known system |
| pfam11211 | 65.2% | 0.29 | Prediction cycle 1 | Likely mobilome |
| pfam12469 | 97.8% | 0.67 | Prediction cycle 1 | Known system |
| pfam05037 | 74.5% | 0.21 | Prediction cycle 1 | Likely mobilome |
| pfam06666 | 78.2% | 0.32 | Prediction cycle 1 | Likely mobilome |
| pfam06868 | 67.3% | 0.30 | Prediction cycle 1 | Likely mobilome |
| pfam08989 | 73.7% | 0.28 | Prediction cycle 1 | Uncertain |
| pfam04411 | 69.9% | 0.54 | Prediction cycle 1 | Likely known system |
| pfam11225 | 73.4% | 0.16 | Prediction cycle 1 | Likely non-defense function |
| pfam14350 | 68.9% | 0.31 | Prediction cycle 1 | Known system |
| pfam14335 | 91.7% | 0.45 | Prediction cycle 1 | Possibly belongs to a new defense |
| | | | | system |
| pfam12476 | 72.9% | 0.41 | Prediction cycle 1 | Possibly belongs to a new defense |
| | | | | system |
| pfam12750 | 77.7% | 0.31 | Prediction cycle 1 | Likely mobilome |
| pfam12564 | 94.5% | 0.19 | Prediction cycle 1 | Known system |
| pfam14198 | 70.8% | 0.44 | Prediction cycle 1 | Likely mobilome |
| pfam13872 | 71.6% | 0.45 | Prediction cycle 1 | Likely mobilome |
| pfam06634 | 91.9% | 0.50 | Prediction cycle 1 | Possibly belongs to a new defense |
| | | | | system |
| pfam13871 | 72.8% | 0.46 | Prediction cycle 1 | Likely mobilome |
| pfam14283 | 81.6% | 0.35 | Prediction cycle 1 | Likely mobilome |
| pfam10987 | 70.9% | 0.14 | Prediction cycle 1 | Likely non-defense function |
| pfam08878 | 86.8% | 0.38 | Prediction cycle 1 | Possibly belongs to a new defense |
| | | | | system |
| pfam13208 | 83.0% | 0.24 | Prediction cycle 1 | Possibly belongs to a new defense |
| | | | | system |
| pfam09509 | 68.3% | 0.39 | Prediction cycle 1 | Likely known system |
| pfam12358 | 70.0% | 0.34 | Prediction cycle 1 | Likely mobilome |
| pfam15723 | 76.6% | 0.17 | Prediction cycle 1 | Known system |
| pfam10980 | 78.5% | 0.22 | Prediction cycle 1 | Possibly belongs to a new defense |
| | | | | system |
| pfam15615 | 85.9% | 0.23 | Prediction cycle 1 | Possibly belongs to a new defense |
| | | | | system |
| pfam08775 | 70.6% | 0.23 | Prediction cycle 1 | Likely mobilome |
| pfam08814 | 70.1% | 0.48 | Prediction cycle 1 | Possibly belongs to a new defense |
| | | | | system |
| pfam11848 | 82.8% | 0.53 | Prediction cycle 1 | Likely known system |
| pfam12441 | 81.8% | 0.42 | Prediction cycle 1 | Known system |
| pfam14267 | 72.7% | 0.54 | Prediction cycle 1 | Possibly belongs to a new defense |
| | | | | system |
| pfam14065 | 65.4% | 0.14 | Prediction cycle 1 | Likely mobilome |
| pfam13101 | 70.3% | 0.25 | Prediction cycle 1 | Likely mobilome |
| pfam01905 | 99.0% | 0.37 | Prediction cycle 1 | Known system |
| pfam13351 | 67.1% | 0.25 | Prediction cycle 1 | Likely mobilome |
| pfam13337 | 89.2% | 0.44 | Prediction cycle 1 | Known system |
| pfam11103 | 68.9% | 0.36 | Prediction cycle 1 | Likely non-defense function |
| pfam12083 | 85.2% | 0.20 | Prediction cycle 1 | Likely mobilome |
| pfam09035 | 73.8% | 0.17 | Prediction cycle 1 | Likely mobilome |
| pfam13707 | 93.3% | 0.26 | Prediction cycle 1 | Likely known system |
| pfam07638 | 67.4% | 0.17 | Prediction cycle 1 | Likely non-defense function |
| pfam08869 | 72.6% | 0.43 | Prediction cycle 1 | Possibly belongs to a new defense |
| | | | | system |
| pfam14355 | 67.4% | 0.33 | Prediction cycle 1 | Known system |
| pfam03750 | 99.9% | 0.25 | Prediction cycle 1 | Known system |
| pfam06892 | 71.1% | 0.12 | Prediction cycle 1 | Likely mobilome |
| pfam14076 | 73.9% | 0.33 | Prediction cycle 1 | Likely known system |
| pfam07515 | 77.4% | 0.20 | Prediction cycle 1 | Likely mobilome |
| pfam02920 | 67.7% | 0.17 | Prediction cycle 1 | Likely mobilome |
| pfam10134 | 72.8% | 0.34 | Prediction cycle 1 | Likely mobilome |
| pfam11140 | 71.2% | 0.13 | Prediction cycle 1 | Likely non-defense function |
| pfam01881 | 90.7% | 0.40 | Prediction cycle 1 | Known system |
| pfam14072 | 80.6% | 0.31 | Prediction cycle 1 | Known system |
| pfam10552 | 72.0% | 0.11 | Prediction cycle 1 | Likely mobilome |
| pfam09952 | 92.9% | 0.11 | Prediction cycle 1 | Known system |
| pfam06290 | 87.1% | 0.12 | Prediction cycle 1 | Likely mobilome |
| pfam16277 | 85.0% | 0.19 | Prediction cycle 1 | Likely known system |
| pfam14367 | 97.4% | 0.14 | Prediction cycle 1 | Known system |
| pfam03683 | 85.0% | 0.46 | Prediction cycle 1 | Known system |
| pfam15937 | 96.2% | 0.14 | Prediction cycle 1 | Likely mobilome |
| pfam13156 | 79.4% | 0.16 | Prediction cycle 1 | Likely known system |
| pfam06952 | 84.0% | 0.12 | Prediction cycle 1 | Likely mobilome |
| pfam06953 | 78.6% | 0.10 | Prediction cycle 1 | Likely non-defense function |
| pfam14487 | 82.1% | 0.18 | Prediction cycle 1 | Known system |
| pfam05107 | 98.5% | 0.35 | Prediction cycle 1 | Known system |
| pfam13711 | 92.8% | 0.32 | Prediction cycle 1 | Likely mobilome |
| pfam10554 | 73.2% | 0.12 | Prediction cycle 1 | Likely mobilome |
| pfam07514 | 76.0% | 0.21 | Prediction cycle 1 | Likely mobilome |
| pfam05284 | 73.1% | 0.36 | Prediction cycle 1 | Likely mobilome |
| pfam13154 | 68.0% | 0.28 | Prediction cycle 1 | Likely mobilome |
| pfam14261 | 66.3% | 0.35 | Prediction cycle 1 | Likely mobilome |
| pfam07128 | 96.0% | 0.13 | Prediction cycle 1 | Likely mobilome |
| pfam08273 | 79.8% | 0.13 | Prediction cycle 1 | Likely mobilome |
| pfam13395 | 81.0% | 0.25 | Prediction cycle 1 | Known system |
| pfam06406 | 79.1% | 0.16 | Prediction cycle 1 | Likely mobilome |
| pfam14338 | 84.2% | 0.23 | Prediction cycle 1 | Known system |
| pfam10117 | 65.1% | 0.35 | Prediction cycle 1 | Known system |
| pfam13643 | 66.4% | 0.35 | Prediction cycle 1 | Likely known system |
| pfam08401 | 69.4% | 0.33 | Prediction cycle 1 | Likely mobilome |
| pfam09907 | 97.4% | 0.14 | Prediction cycle 1 | Known system |
| pfam13148 | 68.0% | 0.25 | Prediction cycle 1 | Uncertain |
| pfam07275 | 75.3% | 0.14 | Prediction cycle 1 | Likely mobilome |
| pfam15738 | 85.6% | 0.18 | Prediction cycle 1 | Known system |
| pfam13708 | 75.2% | 0.11 | Prediction cycle 1 | Uncertain |
| pfam14384 | 84.4% | 0.22 | Prediction cycle 1 | Known system |
| pfam07362 | 93.8% | 0.12 | Prediction cycle 1 | Known system |
| pfam03288 | 70.3% | 0.13 | Prediction cycle 1 | Likely mobilome |
| pfam05015 | 96.4% | 0.21 | Prediction cycle 1 | Known system |
| pfam13310 | 68.4% | 0.36 | Prediction cycle 1 | Likely known system |
| pfam11867 | 78.7% | 0.29 | Prediction cycle 1 | Known system |
| pfam05168 | 82.0% | 0.31 | Prediction cycle 1 | Likely known system |
| pfam04365 | 80.6% | 0.28 | Prediction cycle 1 | Known system |
| pfam13391 | 67.8% | 0.28 | Prediction cycle 1 | Known system |
| pfam13362 | 76.6% | 0.19 | Prediction cycle 1 | Likely mobilome |
| pfam08706 | 65.4% | 0.16 | Prediction cycle 1 | Likely mobilome |
| pfam08774 | 69.9% | 0.11 | Prediction cycle 1 | Likely mobilome |
| pfam03693 | 86.8% | 0.16 | Prediction cycle 1 | Known system |
| pfam04255 | 66.4% | 0.32 | Prediction cycle 1 | Likely known system |
| pfam13744 | 87.2% | 0.15 | Prediction cycle 1 | Known system |
| pfam06067 | 76.7% | 0.15 | Prediction cycle 1 | Possibly belongs to a new defense |
| | | | | system |
| pfam14657 | 67.2% | 0.11 | Prediction cycle 1 | Likely mobilome |
| pfam15919 | 75.6% | 0.26 | Prediction cycle 1 | Likely non-defense function |
| pfam04221 | 84.2% | 0.18 | Prediction cycle 1 | Known system |
| pfam05973 | 78.5% | 0.17 | Prediction cycle 1 | Known system |
| pfam03235 | 66.7% | 0.28 | Prediction cycle 1 | Possibly belongs to a new defense |
| | | | | system |
| pfam13635 | 68.0% | 0.19 | Prediction cycle 1 | Possibly belongs to a new defense |
| | | | | system |
| pfam11657 | 78.9% | 0.37 | Prediction cycle 1 | Likely mobilome |
| pfam14662 | 72.0% | 0.53 | Prediction cycle 1 | Likely non-defense function |
| pfam04313 | 90.7% | 0.23 | Prediction cycle 1 | Known system |
| pfam08130 | 65.0% | 0.31 | Prediction cycle 1 | Likely non-defense function |
| pfam09116 | 94.7% | 0.39 | Prediction cycle 1 | Likely mobilome |
| pfam04582 | 85.1% | 0.19 | Prediction cycle 1 | Likely mobilome |
| pfam04875 | 79.3% | 0.26 | Prediction cycle 1 | Likely mobilome |
| pfam11592 | 68.2% | 0.31 | Prediction cycle 1 | Likely non-defense function |
| pfam09552 | 92.7% | 0.47 | Prediction cycle 1 | Known system |
| pfam10892 | 93.8% | 0.29 | Prediction cycle 1 | Likely mobilome |
| pfam09567 | 72.7% | 0.53 | Prediction cycle 1 | Known system |
| pfam02691 | 78.6% | 0.12 | Prediction cycle 1 | Likely non-defense function |
| pfam08046 | 78.9% | 0.10 | Prediction cycle 1 | Likely non-defense function |
| pfam11570 | 71.0% | 0.24 | Prediction cycle 1 | Likely non-defense function |
| pfam10083 | 81.9% | 0.19 | Prediction cycle 1 | Likely mobilome |
| pfam02048 | 68.5% | 0.44 | Prediction cycle 1 | Likely non-defense function |
| pfam13604 | 66.3% | 0.10 | Prediction cycle 1 | Possibly belongs to a new defense |
| | | | | system |
| pfam11770 | 73.5% | 0.32 | Prediction cycle 1 | Likely non-defense function |
| pfam06709 | 86.8% | 0.36 | Prediction cycle 1 | Possibly belongs to a new defense |
| | | | | system |
| pfam16790 | 84.2% | 0.50 | Prediction cycle 1 | Likely mobilome |
| pfam04604 | 65.0% | 0.13 | Prediction cycle 1 | Likely non-defense function |
| pfam12113 | 66.1% | 0.17 | Prediction cycle 1 | Likely mobilome |
| pfam14459 | 66.7% | 0.68 | Prediction cycle 1 | Likely mobilome |
| pfam12703 | 88.5% | 0.28 | Prediction cycle 1 | Known system |
| pfam02384 | 77.6% | 0.22 | Prediction cycle 1 | Known system |
| pfam16848 | 80.2% | 0.15 | Prediction cycle 1 | Likely non-defense function |
| pfam11056 | 76.2% | 0.31 | Prediction cycle 1 | Likely mobilome |
| pfam07339 | 95.1% | 0.36 | Prediction cycle 1 | Likely mobilome |
| pfam14562 | 96.9% | 0.39 | Prediction cycle 1 | Known system |
| pfam09185 | 82.9% | 0.14 | Prediction cycle 1 | Likely non-defense function |
| pfam12493 | 82.3% | 0.32 | Prediction cycle 1 | Likely mobilome |
| pfam16831 | 68.0% | 0.28 | Prediction cycle 1 | Likely non-defense function |
| pfam01818 | 75.0% | 0.50 | Prediction cycle 1 | Likely mobilome |
| pfam11554 | 67.2% | 0.69 | Prediction cycle 1 | Likely mobilome |
| pfam09504 | 97.8% | 0.34 | Prediction cycle 1 | Known system |
| pfam16243 | 100.0% | 0.22 | Prediction cycle 1 | Likely mobilome |
| pfam16280 | 90.9% | 0.34 | Prediction cycle 1 | Likely known system |
| pfam09020 | 98.5% | 0.14 | Prediction cycle 1 | Likely mobilome |
| pfam09562 | 80.0% | 0.55 | Prediction cycle 1 | Known system |
| pfam07154 | 75.5% | 0.45 | Prediction cycle 1 | Possibly belongs to a new defense |
| | | | | system |
| pfam06443 | 77.1% | 0.12 | Prediction cycle 1 | Likely non-defense function |
| pfam03295 | 100.0% | 0.50 | Prediction cycle 1 | Likely mobilome |
| pfam13128 | 68.4% | 0.15 | Prediction cycle 1 | Likely mobilome |
| pfam11504 | 74.8% | 0.18 | Prediction cycle 1 | Likely non-defense function |
| pfam12136 | 98.2% | 0.14 | Prediction cycle 1 | Likely non-defense function |
| pfam07042 | 74.7% | 0.50 | Prediction cycle 1 | Likely mobilome |
| pfam11459 | 87.6% | 0.24 | Prediction cycle 1 + | Likely known system |
| | | | Makarova et al. (2011)⁴ | |
| pfam11726 | 79.5% | 0.12 | Prediction cycle 1 + | Likely mobilome |
| | | | Makarova et al. (2011) | |
| pfam01954 | 87.5% | 0.54 | Prediction cycle 1 + | Known system |
| | | | Makarova et al. (2011) | |
| pfam03428 | 86.2% | 0.26 | Prediction cycle 1 + | Likely mobilome |
| | | | Makarova et al. (2011) | |
| pfam06924 | 91.9% | 0.19 | Prediction cycle 1 + | Likely mobilome |
| | | | Makarova et al. (2011) | |
| pfam07183 | 77.6% | 0.59 | Prediction cycle 1 + | Likely mobilome |
| | | | Makarova et al. (2011) | |
| pfam11800 | 84.5% | 0.26 | Prediction cycle 1 + | Likely mobilome |
| | | | Makarova et al. (2011) | |
| pfam09722 | 90.4% | 0.12 | Prediction cycle 1 + | Known system |
| | | | Makarova et al. (2011) | |
| pfam11994 | 72.6% | 0.39 | Prediction cycle 1 + | Possibly belongs to a new defense |
| | | | Makarova et al. (2011) | system |
| pfam12101 | 84.6% | 0.19 | Prediction cycle 1 + | Likely mobilome |
| | | | Makarova et al. (2011) | |
| pfam08900 | 90.5% | 0.17 | Prediction cycle 1 +30 | Likely mobilome |
| | | | Makarova et al. (2011) | |
| pfam10074 | 83.5% | 0.24 | Prediction cycle 1 + | Likely mobilome |
| | | | Makarova et al. (2011) | |
| pfam11000 | 71.8% | 0.22 | Prediction cycle 1 + | Likely mobilome |
| | | | Makarova et al. (2011) | |
| pfam11284 | 86.2% | 0.21 | Prediction cycle 1 + | Likely mobilome |
| | | | Makarova et al. (2011) | |
| pfam11358 | 95.8% | 0.17 | Prediction cycle 1 + | Likely mobilome |
| | | | Makarova et al. (2011) | |
| pfam11679 | 93.3% | 0.18 | Prediction cycle 1 + | Likely mobilome |
| | | | Makarova et al. (2011) | |
| pfam12553 | 86.9% | 0.19 | Prediction cycle 1 + | Likely mobilome |
| | | | Makarova et al. (2011) | |
| COG4688 | | | Makarova et al. (2011) | Likely mobilome |
| COG4190 | | | Makarova et al. (2011) | Likely known system |
| COG5428 | | | Makarova et al. (2011) | Likely known system |
| COG3756 | | | Makarova et al. (2011) | Likely mobilome |
| COG4185 | | | Makarova et al. (2011) | Likely non-defense function |
| COG4854 | | | Makarova et al. (2011) | Likely non-defense function |
| COG5532 | | | Makarova et al. (2011) | Likely mobilome |
| COG5545 | | | Makarova et al. (2011) | Likely mobilome |
| COG5658 | | | Makarova et al. (2011) | Likely non-defense function |
| pfam01724 | 64.0% | 0.34 | Makarova et al. (2011) | Likely non-defense function |
| pfam03432 | 62.3% | 0.27 | Makarova et al. (2011) | Likely mobilome |
| pfam09588 | 40.7% | 0.25 | Makarova et al. (2011) | Likely mobilome |
| pfam11238 | 37.1% | 0.10 | Makarova et al. (2011) | Likely non-defense function |
| COG1205 | | | Makarova et al. (2011) | Possibly belongs to a new defense |
| | | | | system |
| COG4913 | | | Makarova et al. (2011) | Possibly belongs to a new defense |
| | | | | system |
| COG4924 | | | Makarova et al. (2011) | Possibly belongs to a new defense |
| | | | | system |
| pfam04383 | 32.4% | 0.28 | Makarova et al. (2011) | Possibly belongs to a new defense |
| | | | | system |
| COG1112 | | | Makarova et al. (2011) | Uncertain |
| COG1373 | | | Makarova et al. (2011) | Uncertain |
| COG2865 | | | Makarova et al. (2011) | Uncertain |
| COG3598 | | | Makarova et al. (2011) | Likely mobilome |
| pfam10543 | 55.9% | 0.26 | Makarova et al. (2011) | Uncertain |
| pfam11185 | 50.8% | 0.35 | Makarova et al. (2011) | Uncertain |
| pfam09823 | 69.1% | 0.52 | Makarova et al. (2011) | Likely known system |
| COG5519 | | | Makarova et al. (2011) | Likely mobilome |
| pfam10711 | 29.6% | 0.18 | Makarova et al. (2011) | Likely mobilome |
| COG1483 | | | Makarova et al. (2011) | Possibly belongs to a new defense |
| | | | | system |
| COG3586 | | | Makarova et al. (2011) | Possibly belongs to a new defense |
| | | | | system |
| COG3950 | | | Makarova et al. (2011) | Possibly belongs to a new defense |
| | | | | system |
| COG4804 | | | Makarova et al. (2011) | Possibly belongs to a new defense |
| | | | | system |
| pfam01541 | 31.4% | 0.10 | Makarova et al. (2011) | Uncertain |
| COG1475 | | | Makarova et al. (2011) | Likely mobilome |
| COG0507 | | | Makarova et al. (2011) | Likely non-defense function |
| COG0553 | | | Makarova et al. (2011) | Possibly belongs to a new defense |
| | | | | system |
| COG1192 | | | Makarova et al. (2011) | Likely mobilome |
| COG1451 | | | Makarova et al. (2011) | Possibly belongs to a new defense |
| | | | | system |
| COG3727 | | | Makarova et al. (2011) | Known system |
| pfam01464 | 22.2% | 0.10 | Makarova et al. (2011) | Likely mobilome |
| pfam02876 | 60.9% | 0.01 | Makarova et al. (2011) | Likely non-defense function |
| pfam03837 | 33.5% | 0.12 | Makarova et al. (2011) | Likely mobilome |
| pfam08861 | 30.3% | 0.09 | Makarova et al. (2011) | Likely known system |
| pfam09199 | 92.0% | 0.00 | Makarova et al. (2011) | Likely non-defense function |
| pfam09954 | 21.0% | 0.31 | Makarova et al. (2011) | Possibly belongs to a new defense |
| | | | | system |
| COG3505 | | | Makarova et al. (2011) | Likely mobilome |
| COG3843 | | | Makarova et al. (2011) | Likely mobilome |
| COG4227 | | | Makarova et al. (2011) | Likely mobilome |
| COG4646 | | | Makarova et al. (2011) | Likely mobilome |
| COG4930 | | | Makarova et al. (2011) | Known system |
| COG5489 | | | Makarova et al. (2011) | Likely mobilome |
| pfam07895 | 42.0% | 0.03 | Makarova et al. (2011) | Likely non-defense function |
| pfam08849 | 95.2% | 0.39 | Makarova et al. (2011) | Known system |
| pfam09002 | 46.1% | 0.50 | Makarova et al. (2011) | Known system |
| pfam11198 | 80.0% | 0.14 | Makarova et al. (2011) | Likely mobilome |
| pfam11455 | 97.1% | 0.10 | Makarova et al. (2011) | Known system |
| pfam11985 | 22.7% | 0.18 | Makarova et al. (2011) | Likely mobilome |
| COG1479 | | | Makarova et al. (2011) | Known system |
| COG3472 | | | Makarova et al. (2011) | Known system |
| pfam10923 | 93.1% | 0.28 | Makarova et al. (2011) | Possibly belongs to a new defense |
| | | | | system |
| pfam12495 | 85.7% | 0.17 | Prediction cycle 2 | Likely non-defense function |
| pfam04787 | 100.0% | 1.00 | Prediction cycle 2 | Likely mobilome |
| pfam15541 | 69.0% | 0.40 | Prediction cycle 2 | Likely mobilome |
| pfam04778 | 68.8% | 0.36 | Prediction cycle 2 | Likely non-defense function |
| pfam07199 | 69.7% | 0.26 | Prediction cycle 2 | Likely non-defense function |
| pfam10790 | 68.4% | 0.65 | Prediction cycle 2 | Likely mobilome |
| pfam09131 | 79.5% | 0.19 | Prediction cycle 2 | Likely non-defense function |
| pfam16445 | 66.7% | 0.19 | Prediction cycle 2 | Likely non-defense function |
| pfam11519 | 69.0% | 0.28 | Prediction cycle 2 | Likely non-defense function |
| pfam11516 | 95.3% | 0.17 | Prediction cycle 2 | Likely non-defense function |
| pfam16904 | 76.5% | 0.10 | Prediction cycle 2 | Likely non-defense function |
| pfam07046 | 90.4% | 0.11 | Prediction cycle 2 | Likely non-defense function |
| pfam16436 | 86.8% | 0.11 | Prediction cycle 2 | Likely non-defense function |
| pfam14590 | 72.2% | 0.15 | Prediction cycle 2 | Likely non-defense function |
| pfam12772 | 69.8% | 0.22 | Prediction cycle 2 | Likely non-defense function |
| pfam11263 | 98.3% | 0.10 | Prediction cycle 2 | Likely non-defense function |
| pfam10913 | 69.7% | 0.11 | Prediction cycle 2 | Likely mobilome |
| pfam16390 | 68.8% | 0.13 | Prediction cycle 2 | Uncertain |
| pfam16847 | 65.0% | 0.38 | Prediction cycle 2 | Likely non-defense function |
| pfam11565 | 92.0% | 0.11 | Prediction cycle 2 | Likely non-defense function |
| pfam03857 | 65.7% | 0.52 | Prediction cycle 2 | Likely non-defense function |
| pfam13497 | 92.2% | 0.19 | Prediction cycle 2 | Likely mobilome |
| pfam08048 | 85.3% | 0.33 | Prediction cycle 2 | Likely mobilome |
| pfam09264 | 83.5% | 0.11 | Prediction cycle 2 | Likely non-defense function |
| pfam05946 | 72.9% | 0.13 | Prediction cycle 2 | Likely non-defense function |
| pfam09930 | 97.8% | 0.16 | Prediction cycle 2 | Likely non-defense function |
| pfam16163 | 68.5% | 0.68 | Prediction cycle 2 | Likely non-defense function |
| pfam16754 | 75.7% | 0.29 | Prediction cycle 2 | Known system |
| pfam16416 | 65.2% | 0.48 | Prediction cycle 2 | Possibly belongs to a new defense |
| | | | | system |
| pfam06613 | 82.2% | 0.36 | Prediction cycle 2 | Likely mobilome |
| pfam16479 | 88.9% | 0.11 | Prediction cycle 2 | Likely non-defense function |
| pfam05969 | 65.3% | 0.40 | Prediction cycle 2 | Likely non-defense function |
| pfam15538 | 66.0% | 0.10 | Prediction cycle 2 | Likely non-defense function |
| pfam10865 | 68.9% | 0.41 | Prediction cycle 2 | Likely non-defense function |
| pfam07828 | 85.5% | 0.12 | Prediction cycle 2 | Likely non-defense function |
| pfam11580 | 85.6% | 0.10 | Prediction cycle 2 | Likely non-defense function |
| pfam08017 | 68.3% | 0.10 | Prediction cycle 2 | Likely non-defense function |
| pfam05265 | 88.7% | 0.12 | Prediction cycle 2 | Likely mobilome |
| pfam13009 | 66.7% | 0.53 | Prediction cycle 2 | Likely mobilome |
| pfam09016 | 65.9% | 0.19 | Prediction cycle 2 | Likely non-defense function |
| pfam10726 | 67.3% | 0.29 | Prediction cycle 2 | Likely non-defense function |
| pfam10130 | 69.0% | 0.71 | Prediction cycle 2 | Known system |
| pfam10616 | 78.4% | 0.10 | Prediction cycle 2 | Likely non-defense function |
| pfam13314 | 69.8% | 0.11 | Prediction cycle 2 | Likely non-defense function |
| pfam04485 | 65.1% | 0.35 | Prediction cycle 2 | Possibly belongs to a new defense |
| | | | | system |
| pfam12655 | 65.6% | 0.12 | Prediction cycle 2 | Likely non-defense function |
| pfam13079 | 69.0% | 0.11 | Prediction cycle 2 | Likely non-defense function |
| pfam14275 | 67.6% | 0.13 | Prediction cycle 2 | Likely non-defense function |
| pfam11686 | 70.8% | 0.11 | Prediction cycle 2 | Likely non-defense function |
| pfam11397 | 67.0% | 0.13 | Prediction cycle 2 | Likely non-defense function |
| pfam11796 | 65.0% | 0.59 | Prediction cycle 2 | Possibly belongs to a new defense |
| | | | | system |
| pfam09000 | 66.3% | 0.28 | Prediction cycle 2 | Likely non-defense function |
| pfam14453 | 65.8% | 0.12 | Prediction cycle 2 | Likely non-defense function |
| pfam13651 | 85.8% | 0.46 | Prediction cycle 2 | Known system |
| pfam11173 | 66.6% | 0.11 | Prediction cycle 2 | Likely non-defense function |
| pfam16162 | 70.6% | 0.46 | Prediction cycle 2 | Possibly belongs to a new defense |
| | | | | system |
| pfam12975 | 68.1% | 0.11 | Prediction cycle 2 | Likely non-defense function |
| pfam14133 | 71.1% | 0.18 | Prediction cycle 2 | Likely non-defense function |
| pfam16082 | 65.4% | 0.15 | Prediction cycle 2 | Likely mobilome |
| pfam16223 | 66.3% | 0.11 | Prediction cycle 2 | Likely non-defense function |
| pfam12545 | 65.6% | 0.11 | Prediction cycle 2 | Likely non-defense function |
| pfam09664 | 67.9% | 0.50 | Prediction cycle 2 | Possibly belongs to a new defense |
| | | | | system |
| pfam11813 | 79.5% | 0.10 | Prediction cycle 2 | Likely non-defense function |
| pfam11149 | 69.5% | 0.52 | Prediction cycle 2 | Likely mobilome |
| pfam16263 | 76.4% | 0.35 | Prediction cycle 2 | Possibly belongs to a new defense |
| | | | | system |
| pfam12119 | 72.8% | 0.11 | Prediction cycle 2 | Likely non-defense function |
| pfam10893 | 91.7% | 0.13 | Prediction cycle 2 | Likely mobilome |
| pfam14790 | 67.2% | 0.11 | Prediction cycle 2 | Likely non-defense function |
| pfam12668 | 68.0% | 0.38 | Prediction cycle 2 | Possibly belongs to a new defense |
| | | | | system |
| pfam14082 | 65.3% | 0.57 | Prediction cycle 2 | Possibly belongs to a new defense |
| | | | | system |
| pfam06698 | 79.9% | 0.12 | Prediction cycle 2 | Likely non-defense function |
| pfam07509 | 65.6% | 0.12 | Prediction cycle 2 | Likely non-defense function |
| pfam07323 | 77.8% | 0.12 | Prediction cycle 2 | Likely non-defense function |
| pfam09919 | 98.4% | 0.11 | Prediction cycle 2 | Likely non-defense function |
| pfam16930 | 85.1% | 0.11 | Prediction cycle 2 | Likely non-defense function |
| pfam14113 | 71.7% | 0.14 | Prediction cycle 2 | Likely non-defense function |
| pfam13151 | 65.5% | 0.40 | Prediction cycle 2 | Possibly belongs to a new defense |
| | | | | system |
| pfam14328 | 71.3% | 0.13 | Prediction cycle 2 | Likely non-defense function |
| pfam07511 | 68.4% | 0.23 | Prediction cycle 2 | Likely mobilome |
| pfam14281 | 71.4% | 0.59 | Prediction cycle 2 | Possibly belongs to a new defense |
| | | | | system |
| pfam14584 | 79.8% | 0.12 | Prediction cycle 2 | Likely non-defense function |
| pfam11047 | 78.1% | 0.11 | Prediction cycle 2 | Likely non-defense function |
| pfam11660 | 70.4% | 0.20 | Prediction cycle 2 | Likely mobilome |
| pfam11190 | 67.1% | 0.20 | Prediction cycle 2 | Likely mobilome |
| pfam14103 | 97.7% | 0.39 | Prediction cycle 2 | Likely known system |
| pfam09686 | 68.6% | 0.20 | Prediction cycle 2 | Likely mobilome |
| pfam15978 | 75.8% | 0.25 | Prediction cycle 2 | Likely mobilome |
| pfam09376 | 67.6% | 0.33 | Prediction cycle 2 | Possibly belongs to a new defense |
| | | | | system |
| pfam12602 | 69.9% | 0.18 | Prediction cycle 2 | Likely mobilome |
| pfam07455 | 91.6% | 0.11 | Prediction cycle 2 | Likely mobilome |
| pfam16452 | 82.1% | 0.13 | Prediction cycle 2 | Likely mobilome |
| pfam11072 | 75.0% | 0.20 | Prediction cycle 2 | Likely mobilome |
| pfam14253 | 69.7% | 0.30 | Prediction cycle 2 | Known system |
| pfam15731 | 83.3% | 0.28 | Prediction cycle 2 | Known system |
| pfam05419 | 65.3% | 0.43 | Prediction cycle 2 | Possibly belongs to a new defense |
| | | | | system |
| pfam12870 | 65.4% | 0.18 | Prediction cycle 2 | Likely non-defense function |
| pfam10723 | 78.2% | 0.20 | Prediction cycle 2 | Likely mobilome |
| pfam14302 | 67.0% | 0.10 | Prediction cycle 2 | Likely non-defense function |
| pfam14348 | 69.7% | 0.23 | Prediction cycle 2 | Likely mobilome |
| pfam10049 | 75.1% | 0.51 | Prediction cycle 2 | Likely known system |
| pfam13814 | 65.5% | 0.25 | Prediction cycle 2 | Likely mobilome |
| pfam12834 | 67.9% | 0.27 | Prediction cycle 2 | Likely mobilome |
| pfam09937 | 66.2% | 0.10 | Prediction cycle 2 | Likely non-defense function |
| pfam08937 | 67.8% | 0.33 | Prediction cycle 2 | Possibly belongs to a new defense |
| | | | | system |
| pfam09903 | 65.6% | 0.26 | Prediction cycle 2 | Possibly belongs to a new defense |
| | | | | system |
| pfam02521 | 90.4% | 0.11 | Prediction cycle 2 | Likely non-defense function |
| pfam12835 | 70.7% | 0.31 | Prediction cycle 2 | Likely mobilome |
| pfam02387 | 75.9% | 0.20 | Prediction cycle 2 | Likely mobilome |
| pfam13784 | 65.1% | 0.47 | Prediction cycle 2 | Possibly belongs to a new defense |
| | | | | system |
| pfam09848 | 65.6% | 0.45 | Prediction cycle 2 | Known system |
| pfam12950 | 67.4% | 0.39 | Prediction cycle 2 | Known system |
| pfam13166 | 75.6% | 0.39 | Prediction cycle 2 | Known system |
| pfam13555 | 70.4% | 0.27 | Prediction cycle 2 | Possibly belongs to a new defense |
| | | | | system |
| pfam01927 | 65.2% | 0.19 | Prediction cycle 2 | Likely known system |
| pfam06006 | 93.4% | 0.14 | Prediction cycle 2 | Likely mobilome |
| pfam06174 | 98.7% | 0.10 | Prediction cycle 2 | Likely mobilome |
| pfam11398 | 85.9% | 0.10 | Prediction cycle 2 | Likely non-defense function |
| pfam12686 | 65.4% | 0.32 | Prediction cycle 2 | Likely mobilome |
| pfam03596 | 70.8% | 0.12 | Prediction cycle 2 | Likely non-defense function |
| pfam06527 | 68.3% | 0.31 | Prediction cycle 2 | Likely mobilome |
| pfam07799 | 70.7% | 0.12 | Prediction cycle 2 | Likely mobilome |
| pfam13470 | 67.0% | 0.43 | Prediction cycle 2 | Known system |
| pfam13588 | 68.3% | 0.37 | Prediction cycle 2 | Known system |
| pfam05713 | 65.0% | 0.39 | Prediction cycle 2 | Likely mobilome |
| pfam05272 | 68.0% | 0.17 | Prediction cycle 2 | Uncertain |
| pfam13749 | 69.0% | 0.43 | Prediction cycle 2 | Possibly belongs to a new defense |
| | | | | system |
| pfam13657 | 69.5% | 0.30 | Prediction cycle 2 | Known system |
| pfam04326 | 65.1% | 0.39 | Prediction cycle 2 | Possibly belongs to a new defense |
| | | | | system |
| pfam06769 | 96.5% | 0.12 | Prediction cycle 2 | Known system |
| pfam02498 | 66.8% | 0.17 | Prediction cycle 2 | Likely mobilome |
| pfam13173 | 68.3% | 0.26 | Prediction cycle 2 | Possibly belongs to a new defense |
| | | | | system |
| pfam05685 | 67.2% | 0.27 | Prediction cycle 2 | Uncertain |
| pfam13538 | 66.9% | 0.13 | Prediction cycle 2 | Possibly belongs to a new defense |
| | | | | system |
| pfam01402 | 67.6% | 0.12 | Prediction cycle 2 | Likely non-defense function |
| pfam12705 | 76.4% | 0.10 | Prediction cycle 2 | Likely non-defense function |
| pfam13175 | 73.9% | 0.37 | Prediction cycle 2 | Possibly belongs to a new defense |
| | | | | system |
| pfam13304 | 63.8% | 0.33 | Prediction cycle 2 | Possibly belongs to a new defense |
| | | | | system |

⁴Makarova et al. J Bacteriol. 2011 Nov; 193(21): 6039-6056

[2017] From genes to systems: Each of the putative defense-related gene families was used as an anchor to search for multi-gene systems, as follows. The protein coding sequences for neighboring genes (+/−10 genes) for all family members were clustered based on sequence homology (for example, if pfamY is found within 50 genomes in our set, the 20 neighboring genes in each genome, plus the pfamY gene in each genome, were taken—altogether 50*21=1050 genes to be clustered). Clustering was done with OrthoMCL software v2.0.9 (Li L, Stoeckert C J, Roos D S. (2003) OrthoMCL: identification of ortholog groups for eukaryotic genomes. Genome Res. 13: 2178-89) with blastp parameters [-F ′m S′-v 100000 -b 100000 -e 1e-5 -m 8] and with mcl v12.068 downloaded from http://micans.org/mcl/ (Enright A J, Van Dongen S, Ouzounis C A. (2002) An efficient algorithm for large-scale detection of protein families. nucleic Acids Res. 30: 1575-84; van Dongen S, Abreu-Goodger C. (2012) Using MCL to Extract Clusters from Networks. Methods in molecular biology (Clifton, N.J.). pp. 281-295) with inflation value of 1.1. When the number of blastp hits for a given anchor pfam was too large and prohibitive for OrthoMCL to generate clusters (>75 million blastp hits), a subset of genomes, containing only bacterial and archaeal genomes annotated as “complete” (rather than “draft”) was used for clustering.

[2018] To detect the most prevalent genes around the anchor pfam, only the 10% largest clusters (“frequent clusters”) were considered. For the sake of cluster size calculation, genes originating from the same species (derived from the strain name in the NCBI annotation) were counted as one gene, to prevent organisms for which many strains have been sequenced from inflating the cluster size. An edge between cluster(i) and cluster(j) was defined if a gene from cluster(j) followed a gene from cluster(i) in a given genome with no other genes belonging to frequent clusters found in between, with edge weight (“thickness”) defined as the number of such adjacency cases. Again, edge weights were adjusted such that multiple appearances of a cluster pair originating from the same species were recorded as a single appearance. Only the 10% thickest edges were retained for further analysis. In each genome, the maximal “path” that included the anchor pfam gene and was composed of the retained (largest) clusters and the retained (thickest) edges was recorded. Such a “path”, representing a set of genes appearing in a conserved order in multiple genomes, was considered a candidate multi-gene system. Infrequent variations on the gene order and composition of common systems were merged into the common system if they shared at least 50% of their clusters and had less than 25% appearances than the common system. Only systems with five or more appearances from different species were further analyzed.

[2019] The domains within the gene members of each system were analyzed bioinformatically using the tools HHpred (Soding J, Biegert A, Lupas A N. (2005) The HHpred interactive server for protein homology detection and structure prediction. nucleic Acids Res. 33: W244-W248; Alva V, Nam S-Z, Soding J, Lupas A N, I. S, S. C, et al. (2016) The MPI bioinformatics Toolkit as an integrative platform for advanced protein sequence and structure analysis. nucleic Acids Res. Oxford University Press; 44: W410-W415), Phyre2 (Kelley L A, Mezulis S, Yates C M, Wass M N, Sternberg M J E. (2015) The Phyre2 web portal for protein modeling, prediction and analysis. Nat Protoc. Nature Research; 10: 845-858), PSI-BLAST (Altschul S F, Madden T L, Schïffer A A, Zhang J, Zhang Z, Miller W, et al. (1997) Gapped BLAST and PSI-BLAST: a new generation of protein database search programs. nucleic Acids Res. 25: 3389-402), and NCBI's Conserved Domain Database (CDD) (Marchler-Bauer A, Lu S, Anderson J B, Chitsaz F, Derbyshire M K, DeWeese-Scott C, et al. (2011) CDD: a Conserved Domain Database for the functional annotation of proteins. nucleic Acids Res. 39: D225-D229). The systems were then manually filtered, based on this analysis, to remove (i) known defense systems whose domains did not appear in our initial set of gene families known to participate in defense; (ii) systems likely representing mobile genetic elements (“mobilome”) and; (iii) systems likely participating in non-defensive functions or house-keeping systems (Table 2).

[2020] A second cycle of prediction was then performed, expanding the set of “positive” gene families from Table 1 to include the gene families participating in the candidate new defense systems, as well as the gene families participating in known defense systems that were previously missing from our set and detected in the first round. All pfams were again scanned and the same thresholds were applied (defense score 65%, context variability score 0.1). New pfams retrieved from the second cycle were analyzed as above to generate and annotate multi-gene systems.

[2021] Candidate new systems were further prioritized to select instances for experimental validations. Systems tagged as “questionable”, due to uncertainty whether they represent defense genes or mobile genetic elements, were filtered out (Table 3). Systems existing in only a narrow range of organisms, as well as systems that were not found in organisms phylogenetically close either to E. coli or B. subtilis, were not tested experimentally (Table 3).

TABLE 3
Candidate Defense Systems

| | | Included/ | |
|---|---|---|---|
| | | Excluded from | |
| Anchor protein | Number | experimental | |
| families | of genes? | study | Reason for exclusion |
| pfam04033 | 1 | Excluded | Archaea specific |
| pfam11536 | 2 | Excluded | Thermococcus specific |
| pfam12635; | 3-4 | Included | — |
| pfam06634; | | | |
| COG1483 | | | |
| pfam09544 | 3-4 | Excluded | Myxococcales specific |
| pfam15611; | 3-4 | Included | — |
| COG0553 | | | |
| pfam13910 | 1 | Included | — |
| pfam14130 | 2 | Included | — |
| pfam14335 | 1-2 | Excluded | No locus that is a stand- |
| | | | alone gene, always |
| | | | within R-M systems |
| pfam12476; | 3 | Included | — |
| pfam03235 | | | |
| pfam08878 | 2 | included | — |
| pfam13208; | 3 | Included | — |
| pfam15615; | | | |
| pfam10923 | | | |
| pfam10980 | 7 | Included | — |
| pfam08814; | 2 | Excluded | Cyanobacteria specific |
| pfam08869 | | | |
| pfam14267 | 1 | Included | — |
| pfam06067 | 1-2 | Excluded | Loci in Bacillus are in |
| | | | phage/mobilome |
| | | | context |
| pfam13635; | 1 | Included | — |
| pfam13173 | | | |
| pfam13604; | 1 | Included | — |
| pfam13538 | | | |
| pfam06709 | 1 | Excluded | Vibrio specific |
| pfam07154 | 1 | Excluded | Cyanobacteria specific |
| pfam11994 | 3 | Excluded | Not found in |
| | | | bacillus/coli |
| COG1205 | 2-5 | Included | — |
| COG4913; | 3-4 | Included | — |
| COG4924; | | | |
| pfam11796; | | | |
| pfam09664; | | | |
| pfam13555 | | | |
| pfam04383 | 1 | Included | — |
| COG3586 | 1 | Included | — |
| COG3950 | 2 | Included | — |
| COG4804 | 1 | Included | — |
| COG1451 | 1 | Included | — |
| pfam09954 | 1 | Excluded | No appropriate locus |
| | | | that is a stand-alone |
| | | | gene, always comes |
| | | | with other genes + |
| | | | already exists in |
| | | | BEST7003 |
| pfam16416; | 2-4 | Excluded | Cyanobacteria specific |
| pfam05419 | | | |
| pfam04485 | 4 | Excluded | Cyanobacteria specific |
| pfam16162 | 2 | Included | — |
| pfam16263 | 1 | Excluded | Loci in Bacillus are in |
| | | | phage/mobilome |
| | | | context |
| pfam12668; | 2 | Included | — |
| pfam13151 | | | |
| pfam14082 | 1 | Included | — |
| pfam14281 | 1 | Included | — |
| pfam09376 | 3 | Included | — |
| pfam08937 | 2 | Included | — |
| pfam09903 | 1 | Included | — |
| pfam13784 | 1 | Included | — |
| pfam13749; | 1 | Included | — |
| pfam04326 | | | |
| pfam13175; | 2 | included | — |
| pfam13304 | | | |

[2022] Phylogenetic Distribution Analysis of New Systems:

[2023] For each validated defense system, several loci including the locus that was experimentally verified were taken as seeds for psi-Blast. psi-Blast version 2.5.0 of BLAST+ (Altschul S F, Madden T L, Schïffer A A, Zhang J, Zhang Z, Miller W, Lipman D J. (1997) Gapped BLAST and PSI-BLAST: a new generation of protein database search programs. nucleic Acids Res.; 25: 3389-402; Camacho C, Coulouris G, Avagyan V, Ma N, Papadopoulos J, Bealer K, Madden TL. (2009) BLAST+: architecture and applications. BMC Bioinformatics. 10: 421. doi: 10.1186/1471 -2105-10-421) with parameters [-num_iterations 10 -max_hsps 1 -max_target_seqs 100000 -evalue 1e-10] was performed for each protein of each system, against all microbial genomes downloaded from NCBI on April 2016. When the hits of all proteins of a system were found closely localized on a genome, spanning no more than 150% of the length of the original system, this genome was recorded as containing the system. For the Druantia and Wadjet systems, -evalue 1e-5 was used to enable detection of distant homologs. For systems with 4 or 5 genes (Zorya type I, Druantia types I and II, Wadjet), systems were reported if at least 3 of their genes were identified. For the Druantia system, systems with hits to the DruE protein were retained if the DruE size was >1300aa. For the Thoeris system, multiple thsB genes near the thsA gene were recorded if they were within 10 kb of genomic DNA around the identified thsA. Phylum for each genome was obtained using the JGI taxonomy server (https://taxonomyjgi-psf.org/).

[2024] Experimental Validation of Defense Systems

[2025] Cloning of the Systems into E. coli MG1655 and/or B. subtilis BEST7003

[2026] A cloning shuttle vector for large fragments was constructed as previously described (Ofir G, Melamed S, Sberro H, Silverman S, Doron S, Yaakov G, Mukamel Z, Sorek R. (2017) DISARM, a novel bacterial defense system with broad anti-phage activities, submitted). The vector contains a p15a origin of replication and ampicillin resistance for plasmid propagation in E. coli, and amyE integration cassette with spectinomycin resistance for genomic integration into B. subtilis. The backbone of this vector was amplified using primers OGO309+OGO310, adding to it a BamHI restriction site and a terminator site upstream to the insert cloning site. The multiple cloning site of plasmid pBS1C (Radeck J, Kraft K, Bartels J, Cikovic T, Dürr F, Emenegger J, Kelterborn S, Sauer C, Fritz G, Gebhard S, Mascher T. (2013) The Bacillus BioBrick Box: generation and evaluation of essential genetic building blocks for standardized work with Bacillus subtilis. J Biol Eng. BioMed Central; 7: 29. doi:10.1186/1754-1611-7-29), received from BGSC (accession ECE257), was amplified using primers OGO311+OGO312. Both fragments were digested using AscI and BamHI, ligated using T4 ligase and transformed into E. coli, resulting in plasmid pSG1-rfp.

[2027] The loci of most systems were commercially synthesized by Genscript and cloned, also by Genscript, directly into pSG1-rfp between the AscI and NotI sites of the multiple cloning site (Table 4: “Cloning method” column).

TABLE 4
Loci for Candidate Systems

| Anchor | | Construct | Donor bacteria | | |
|---|---|---|---|---|---|
| protein | System | number | (IMG | Position | Length |
| families | name | (C.N.) | accession) | (strand) | in bp |
| pfam16162 | Kiwa | 1 | Bacillus sp. | 1801073-1803310 | 2238 |
| | | | FJAT-27997 | (+) | |
| | | | (Ga0081961_11) | | |
| | Kiwa | 2 | E. coli O55:H7 | 5120652-5122819 | 2168 |
| | | | RM12579 | (−) | |
| | | | (CP003109) | | |
| pfam08878 | Hachiman | 3 | B. cereus | 106560-111167 | 5122 |
| | | | B4087 | (−) | |
| | | | (phylogroup | | |
| | | | III-12 9) | | |
| | | | (LCYM01000053) | | |
| | Hachiman | 4 | B. cereus | 77887-82731 | 4845 |
| | | | H3081.97 | (+) | |
| | | | (ABDL02000007) | | |
| pfam13749; | | 5 | B. iranensis | 391132-393430 | 2299 |
| pfam04326 | | | DSM 23995 | (+) | |
| | | | (Ga0075261_103) | | |
| | | 6 | B. boroniphilus | 3453-5851 | 2399 |
| | | | JCM 21738 | (−) | |
| | | | (Ga0054992_1085) | | |
| pfam13175; | Gabija | 7 | B. cereus | 172515-177839 | 5325 |
| pfam13304 | | | HuB5-5 | (+) | |
| | | | (AHEG01000016) | | |
| | Gabija | 8 | B. cereus | 93871-97763 | 3893 |
| | | | VD045 | (+) | |
| | | | (AHET01000033) | | |
| pfam13208; | | 9 | B. methanolicus | 1037084-1043201 | 6118 |
| pfam15615; | | | PB1 | (−) | |
| pfam10923 | | | (AFEU01000001) | | |
| | | 10 | B. cereus | 118058-124729 | 6672 |
| | | | NVH0597-99 | (−) | |
| | | | ABDK02000013 | | |
| | | | (ABDK02000013) | | |
| pfam04383 | | 11 | Enterococcus | 142827-143797 | 970 |
| | | | faecalis TR197 | (+) | |
| | | | (ASDV01000010) | | |
| | | 12 | Lactobacillus | 785262-786580 | 1320 |
| | | | plantarum | (−) | |
| | | | subsp. | | |
| | | | plantarum ST- | | |
| | | | III chromosome | | |
| | | | (NC_014554) | | |
| pfam14130 | Lamassu | 13 | Bacillus sp. | 104996-108335 | 3358 |
| | | | NIO-1130 | (−) | |
| | | | (Ga0061086_109) | | |
| | Lamassu | 14 | B. cereus | 52399-56035 | 3637 |
| | | | VD014 | (+) | |
| | | | (AHER01000061) | | |
| pfam10980 | | 15 | Pseudoalteromonas | 119710-124196 | 4486 |
| | | | marina | (−) | |
| | | | mano4 | | |
| | | | (AHCB02000060) | | |
| | | 16 | E. coli UMEA | 116829-122750 | 5921 |
| | | | 3355-1 | (−) | |
| | | | (AWDK01000015) | | |
| pfam13604; | | 17 | B. cereus | 120797-124381 | 3585 |
| pfam13538 | | | HuA2-1 | (+) | |
| | | | (AHDV01000009) | | |
| | | 18 | B. paralicheniformis | 4324128-4327523 | 3382 |
| | | | ATCC 9945a | (−) | |
| | | | (CP005965 | | |
| | | | (NC 021362)) | | |
| pfam13635; | | 19 | Bacillus sp. | 420-2978 | 2559 |
| pfam13173 | | | L1(2012) | (−) | |
| | | | (BLTDRAFT_ANNK01000002_1.2) | | |
| | | 20 | Bacillus sp. | 98213-100268 | 2056 |
| | | | MT2 | (+) | |
| | | | (Ga0058649_116) | | |
| pfam12668; | | 21 | B. cereus | 4327581-4328881 | 1301 |
| pfam13151 | | | G9241 | (−) | |
| | | | (Ga0077877_11) | | |
| | | 22 | B. cereus | 92524-94334 | 1811 |
| | | | R309803 | (−) | |
| | | | (NZ_ACLY01000076) | | |
| pfam09376 | | 23 | B. cereus Q1 | 1003565-1008191 | 4627 |
| | | | (NC_011969) | (+) | |
| | | 24 | B. subtilis Hall | 25333-30937 | 5605 |
| | | | (A921DRAFT_AMCA01000155_1.155) | (−) | |
| pfam13784 | | 25 | E. coli H397 | 928-2724 | 1797 |
| | | | (AEXH01000043) | (−) | |
| | | 26 | E. coli UMEA | 254125-256825 | 2000 |
| | | | 3108-1 | (+) | |
| | | | (AWBD01000001) | | |
| pfam14082 | Shedu | 27 | B. cereus | 186286-187555 | 1270 |
| | | | BAG2O-2 | (−) | |
| | | | (AHCX01000044) | | |
| | Shedu | 28 | B. cereus | 954837-957049 | 2213 |
| | | | B4264 | (−) | |
| | | | (NC_011725) | | |
| pfam12635; | | 29 | Paenibacillus | 743619-754251 | 10633 |
| pfam06634; | | | sabinae T27 | (+) | |
| COG1483 | | | (CP004078) | | |
| COG4804 | | 30 | Paenibacillus | 649-3948 | 3300 |
| | | | sophorae S27 | (+) | |
| | | | (L689DRAFT_ASSF01000040_1.18) | | |
| pfam08937 | Thoeris | 31 | B. cereus MSX- | 16453-19685 | 2477 |
| | | | D12 | (+) | |
| | | | (AHEQ01000050) | | |
| | Thoeris | 32 | B. amyloliquefaciens | 2071378-2073427 | 2050 |
| | | | Y2 | (−) | |
| | | | (CP003332) | | |
| | Thoeris | 33 | B. cereus | 93628-95745 | 1689 |
| | | | HuB4-4 | (+) | |
| | | | (AHEF01000014) | | |
| | Thoeris | 34 | B. thuringiensis | 134769-136361 | 1590 |
| | | | serovar | (−) | |
| | | | finitimus YBT- | | |
| | | | 020 plasmid | | |
| | | | pBMB26 | | |
| | | | (CP002509) | | |
| pfam14267 | | 35 | Paenibacillus | 94753-96069 | 1316 |
| | | | macerans 8244 | (−) | |
| | | | (Ga0097770_129) | | |
| | | 36 | B. cereus | 57053-58320 | 1154 |
| | | | BAG2X1-1 | (−) | |
| | | | (AHCZ01000031) | | |
| pfam12476; | | 37 | Solibacillus | 1395361-1399023 | 3663 |
| pfam03235 | | | silvestris | (+) | |
| | | | (AP012157) | | |
| | | 38 | Tumebacillus | 100864-104082 | 3219 |
| | | | flagellatus | (−) | |
| | | | GST4 | | |
| | | | (JMIR01000008) | | |
| | | 39 | Paenibacillus | 23305-26493 | 3189 |
| | | | sp. FSL R7-269 | (+) | |
| | | | (ASPS01000025) | | |
| COG1451 | | 40 | B. cereus | 119987-121875 | 1888 |
| | | | MC67 | (+) | |
| | | | (AHEN01000008) | | |
| | | 41 | B. cereus IS195 | 240659-242023 | 1364 |
| | | | (AHEH01000058) | (+) | |
| COG3950 | Septu | 42 | B. thuringiensis | 2740820-2743903 | 3083 |
| | | | HD12 | (+) | |
| | | | (Ga0125139_15) | | |
| | Septu | 43 | B. weihenstephanensis | 3499862-3504110 | 3745 |
| | | | KBAB4 | (−) | |
| | | | (NC_010184) | | |
| | Septu | 44 | B. cereus | 90978-93642 | 2665 |
| | | | m1293 | (−) | |
| | | | (NZ_ACLS01000104) | | |
| COG3586 | | 45 | B. paralicheniformis | 829842-834035 | 4194 |
| | | | ATCC 9945a | (+) | |
| | | | (CP005965 | | |
| | | | (NC_021362)) | | |
| | | 46 | B. vallismortis | 121062-122280 | 1219 |
| | | | DV1-F-3 | (+) | |
| | | | (GYSDRAFT_AFSH01000055_1.55) | | |
| | | 47 | Bacillus sp. | 1839870-1841334 | 1465 |
| | | | BC15 | (+) | |
| | | | (Ga0066720_10) | | |
| pfam09903 | | 48 | Geobacter sulfurreducens | 72105-73998 | 1894 |
| | | | AM-1 | (+) | |
| | | | (Ga0098194_11) | | |
| pfam15611; | Zorya | 49 | E. coli | 298890-307639 | 8750 |
| COG0553 | | | E24377A | (−) | |
| | | | (NC_009801) | | |
| | Zorya | 50 | E. coli KOEGE | 522466-531355 | 8890 |
| | | | 71 (186a) | (+) | |
| | | | (AWAO01000003) | | |
| | Zorya | 51 | E. coli ATCC | 4265695-4269611 | 3917 |
| | | | 8739 | (+) | |
| | | | (NC_010468) | | |
| pfam14281 | | 52 | B. cereus LK9 | 37579-39692 | 2114 |
| | | | (Ga0081098-108) | (−) | |
| | | 53 | B. cereus | 14516-15854 | 1339 |
| | | | VD200 | (+) | |
| | | | (AHFM01000019) | | |
| | | 54 | B. subtilis HM- | 187758-189194 | 1437 |
| | | | 66 | (−) | |
| | | | (Ga0124450_104) | | |
| COG1205 | Druantia | 55 | E. coli KTE181 | 35990-46193 | 10204 |
| | | | (ANTC01000054) | (+) | |
| | Druantia | 56 | E. coli UMEA | 219529-231495 | 11967 |
| | | | 4076-1 | (+) | |
| | | | (AWEM01000032) | | |
| | Druantia | 57 | B. cereus LK9 | 4022-14331 | 10310 |
| | | | (Ga0081098_108) | (−) | |
| pfam13910 | | 58 | B. megaterium | 3517210-3519233 | 2024 |
| | | | Q3 | (−) | |
| | | | (Ga0081752_11) | | |
| COG4913; | Wadjet | 59 | B. cereus Q1 | 1011280-1018329 | 7050 |
| COG4924; | | | (NC_011969) | (+) | |
| pfam11796; | | | | | |
| pfam09664; | | | | | |
| pfam13555 | | | | | |
| | Wadjet | 60 | B. vireti LMG | 67917-76250 | 8334 |
| | | | 21834 | (−) | |
| | | | (ALAN01000059) | | |
| | Wadjet | 61 | B. thuringiensis | 1018412-1025427 | 7013 |
| | | | serovar | (+) | |
| | | | finitimus YBT- | | |
| | | | 020 plasmid | | |
| | | | pBMB26 | | |
| | | | (CP002508) | | |
| Controls | | | | | |
| Type III | | 63 | Lactobacillus | 1034479-1039919 | 5441 |
| RM system | | | rhamnosus GG | (+) | |
| (BceSI) | | | (AP011548) | | |
| Type III | | 64 | B. thuringiensis | 52683-53616 | 934 |
| TA system | | | sv. kurstaki | (+) | |
| (ToxIN) | | | HD-1 | | |
| | | | (CP004874) | | |
| Type II RM | | 65 | B. amyloliquefaciens | 3187589-3190876 | 3192 |
| system | | | DSM 7 | (+) | |
| (BamHI) | | | (NC_014551) | | |
| Abi system | | 66 | B. cereus | 18460-19683 | 1224 |
| (AbiH) | | | ATCC 10876 | (−) | |
| | | | (NZ_ACLT01000157) | | |
| Type I RM | | 67 | B. glycinifermentans | 59672-66665 | 6994 |
| system | | | TH008 | (−) | |
| (BliDi) | | | (Ga0077513_1025) | | |
| DISARM | | 68 | B. paralicheniformis | 815730-826377 | 10648 |
| | | | ATCC 9945a | (+) | |
| | | | (CP005965 | | |
| | | | (NC_021362)) | | |
| Negative | | 69 | (empty vector) | | 0 |
| Control | | | | | |

| | | | | | NA | | Open |
|---|---|---|---|---|---|---|---|
| Anchor | | Construct | | | SEQ | | Reading |
| protein | System | number | Cloning | Cloning | ID | | Frame |
| families | name | (C.N.) | method | successful? | NO: | Expressed? | Coordinates |
| pfam16162 | Kiwa | 1 | Synthesis | yes | | yes | |
| | Kiwa | 2 | Synthesis | yes | SEQ | yes | kwaA: 572-1159 |
| | | | | | ID | | kwaB: 1156-2103 |
| | | | | | NO: 3 | | |
| pfam08878 | Hachiman | 3 | Synthesis | yes | SEQ | yes | hamA: 339-1154 |
| | | | | | ID | | hamB: 1114-4506 |
| | | | | | NO: 4 | | |
| | Hachiman | 4 | Synthesis | yes | | yes | |
| pfam13749; | | 5 | Synthesis | yes | | yes | |
| pfam04326 | | | | | | | |
| | | 6 | Synthesis | yes | | yes | |
| pfam13175; | Gabija | 7 | Synthesis | yes | SEQ | yes | gajA: 810-2870 |
| pfam13304 | | | | | ID | | gajB: 2873-4927 |
| | | | | | NO: 5 | | |
| | Gabija | 8 | Synthesis | yes | SEQ | yes | gajA: 320-2056 |
| | | | | | ID | | gajB: 2058-3542 |
| | | | | | NO: 6 | | |
| pfam13208; | | 9 | Synthesis | yes | | yes | |
| pfam15615; | | | | | | | |
| pfam10923 | | | | | | | |
| | | 10 | Synthesis | yes | | yes | |
| pfam04383 | | 11 | Synthesis | yes | | yes | |
| | | 12 | Synthesis | yes | | yes | |
| pfam14130 | Lamassu | 13 | Strain | yes | SEQ | yes | lmuA: 361-1308 |
| | | | obtained | | ID | | lmuB: 1314-3002 |
| | | | from | | NO: 7 | | |
| | | | DSMZ | | | | |
| | | | (DSM | | | | |
| | | | 25149) | | | | |
| | Lamassu | 14 | Synthesis | yes | SEQ | yes | lmuA: 877-1863 |
| | | | | | ID | | lmuB: 1868-3562 |
| | | | | | NO: 8 | | |
| pfam10980 | | 15 | Synthesis | yes | | yes | |
| | | 16 | Synthesis | no | | — | |
| pfam13604; | | 17 | Synthesis | yes | | yes | |
| pfam13538 | | | | | | | |
| | | 18 | Strain | yes | | yes | |
| | | | obtained | | | | |
| | | | from | | | | |
| | | | ATCC | | | | |
| | | | (9945a) | | | | |
| pfam13635; | | 19 | Synthesis | yes | | yes | |
| pfam13173 | | | | | | | |
| | | 20 | Synthesis | yes | | yes | |
| pfam12668; | | 21 | Synthesis | yes | | yes | |
| pfam13151 | | | | | | | |
| | | 22 | Synthesis | yes | | yes | |
| pfam09376 | | 23 | Synthesis | yes | | yes | |
| | | 24 | Synthesis | yes | | yes | |
| pfam13784 | | 25 | Synthesis | yes | | yes | |
| | | 26 | Synthesis | yes | | yes | |
| pfam14082 | Shedu | 27 | Synthesis | yes | | yes | |
| | Shedu | 28 | Synthesis | yes | SEQ | yes | sduA: 760-1902 |
| | | | | | ID | | |
| | | | | | NO: 9 | | |
| pfam12635; | | 29 | Strain | no | | — | |
| pfam06634; | | | obtained | | | | |
| COG1483 | | | from | | | | |
| | | | DSMZ | | | | |
| | | | (DSM | | | | |
| | | | 17841) | | | | |
| COG4804 | | 30 | Synthesis | yes | | yes | |
| pfam08937 | Thoeris | 31 | Synthesis | yes | SEQ | yes | thsA: 205-1635 |
| | | | | | ID | | thsB: 1674-2252 |
| | | | | | NO: | | |
| | | | | | 10 | | |
| | Thoeris | 32 | Synthesis | yes | SEQ | yes | thsA: 298-1191 |
| | | | | | ID | | thsB: 1181-1753 |
| | | | | | NO: | | |
| | | | | | 11 | | |
| | Thoeris | 33 | Synthesis | yes | | yes | |
| | Thoeris | 34 | Strain | yes | | no | |
| | | | obtained | | | | |
| | | | from BGSC | | | | |
| | | | (4B4) | | | | |
| pfam14267 | | 35 | Synthesis | yes | | no | |
| | | 36 | Synthesis | yes | | no | |
| pfam12476; | | 37 | Synthesis | yes | | yes | |
| pfam03235 | | | | | | | |
| | | 38 | Synthesis | no | | — | |
| | | 39 | Synthesis | no | | — | |
| COG1451 | | 40 | Synthesis | yes | | yes | |
| | | 41 | Synthesis | yes | | yes | |
| COG3950 | Septu | 42 | Strain | yes | SEQ | yes | ptuA: 434-1624 |
| | | | obtained | | ID | | ptuB: 1621-2394 |
| | | | from BGSC | | NO: | | |
| | | | (4K1) | | 12 | | |
| | Septu | 43 | Synthesis | yes | SEQ | yes | ptuA: 251-2380 |
| | | | | | ID | | ptuB: 2389-3276 |
| | | | | | NO: | | |
| | | | | | 13 | | |
| | Septu | 44 | Strain | no | | — | |
| | | | obtained | | | | |
| | | | from BGSC | | | | |
| | | | (6A54) | | | | |
| COG3586 | | 45 | Strain | yes | | yes | |
| | | | obtained | | | | |
| | | | from | | | | |
| | | | ATCC | | | | |
| | | | (9945a) | | | | |
| | | 46 | Strain | yes | | yes | |
| | | | obtained | | | | |
| | | | from BGSC | | | | |
| | | | (28A4) | | | | |
| | | 47 | Synthesis | yes | | yes | |
| pfam09903 | | 48 | Synthesis | yes | | yes | |
| pfam15611; | Zorya | 49 | Synthesis | yes | SEQ | yes | zorA: 364-2553 |
| COG0553 | | | | | ID | | zorB: 2567-3307 |
| | | | | | NO: | | zorC: 3304-4986 |
| | | | | | 14 | | zorD: 4986-8228 |
| | Zorya | 50 | Synthesis | yes | | yes | |
| | Zorya | 51 | Strain | yes | SEQ | yes | zorA: 213-1865 |
| | | | obtained | | ID | | zorB: 1872-2579 |
| | | | from | | NO: | | zorE: 2583-3686 |
| | | | ATCC | | 15 | | |
| | | | (8739) | | | | |
| pfam14281 | | 52 | Synthesis | yes | | yes | |
| | | 53 | Synthesis | yes | | yes | |
| | | 54 | Synthesis | yes | | no | |
| COG1205 | Druantia | 55 | Strain | yes | | yes | |
| | | | obtained | | | | |
| | | | from BEI | | | | |
| | | | Resources | | | | |
| | | | (NR- | | | | |
| | | | 32771) | | | | |
| | Druantia | 56 | Synthesis | yes | SEQ | yes | druA: 378-1592 |
| | | | (fragments) | | ID | | druB: 1614-3260 |
| | | | | | NO: | | druC: 3272-5155 |
| | | | | | 16 | | druD: 5167-6210 |
| | | | | | | | druE: 6207-11717 |
| | Druantia | 57 | Synthesis | yes | | yes | |
| | | | (fragments) | | | | |
| pfam13910 | | 58 | Synthesis | yes | | yes | |
| COG4913; | Wadjet | 59 | Synthesis | yes | SEQ | yes | jetA: 146-1552 |
| COG4924; | | | (fragments), | | ID | | jetB: 1562-2155 |
| pfam11796; | | | by Gen9 | | NO: | | jetC: 2133-5447 |
| pfam09664; | | | | | 17 | | jetD: 5551-6636 |
| pfam13555 | | | | | | | |
| | Wadjet | 60 | Synthesis | yes | SEQ | yes | jetAⁱⁱ: 230-1717 |
| | | | | | ID | | jetBⁱⁱ: 1717-2883 |
| | | | | | NO: | | jetCⁱⁱ: 2883-6992 |
| | | | | | 18 | | jetDⁱⁱ: 6985-8280 |
| | Wadjet | 61 | Strain | yes | SEQ | yes | jetDⁱⁱⁱ: 444-1700 |
| | | | obtained | | ID | | jetAⁱⁱⁱ: 1676-3070 |
| | | | from BGSC | | NO: | | jetBⁱⁱⁱ: 3030-3713 |
| | | | (4B4) | | 19 | | jetCⁱⁱⁱ: 3710-6931 |
| Controls | | | | yes | | yes | |
| Type III | | 63 | Strain | yes | | yes | |
| RM system | | | obtained | | | | |
| (BceSI) | | | from | | | | |
| | | | ATCC | | | | |
| | | | (53103) | | | | |
| Type III | | 64 | Strain | yes | | yes | |
| TA system | | | obtained | | | | |
| (ToxIN) | | | from BGSC | | | | |
| | | | (4D1) | | | | |
| Type II RM | | 65 | Strain | yes | | yes | |
| system | | | obtained | | | | |
| (BamHI) | | | from | | | | |
| | | | DSMZ | | | | |
| | | | (DSM 7) | | | | |
| Abi system | | 66 | Strain | yes | | yes | |
| (AbiH) | | | obtained | | | | |
| | | | from | | | | |
| | | | DSMZ | | | | |
| | | | (DSM | | | | |
| | | | 9378) | | | | |
| Type I RM | | 67 | Strain | yes | | yes | |
| system | | | obtained | | | | |
| (BliDi) | | | from BGSC | | | | |
| | | | (51A1) | | | | |
| DISARM | | 68 | Ofir et al. | yes | | yes | |
| | | | 2017 | | | | |
| Negative | | 69 | | yes | | yes | |
| Control | | | | | | | |

[2028] In one case (the Type I Wadjet system) the DNA was synthesized by Gen9 (Boston, Mass.) with synonymous modifications to optimize GC content. In case the donor strains were readily available the system was not synthesized but instead was directly amplified from the genomic DNA of the donor strain using KAPA HiFi HotStart ReadyMix (Kapa Biosystems KK2601) with primers as detailed in Table 5.

TABLE 5
Primers

| | | | |
|---|---|---|---|
| SEQ ID | | | |
| NO | Primer | Sequence (5′-3′) | Description |

pSG1

| | | | |
|---|---|---|---|
| SEQ ID | OGO309 | aaaGGATCCCTCTAGAGTTAACAAGAGTT | Amplification of plasmid backbone containing amyE |
| NO: 20 | | TGTAG | integration cassette with SpecR selection in B. subtilis, and |
| | | | p15a ori with ampR selection for E. coli. With OGO310 |
| SEQ ID | OGO310 | aaaGGCGCGCCATAAAAAACGCCCGGCG | Amplification of plasmid backbone containing amyE |
| NO: 21 | | GCAACCGAGCGTTCTGAATCGATCAGA | integration cassette with SpecR selection in B. subtilis, and |
| | | CCAGTTTTTAATTTG | p15a on with ampR selection for E. coli, adding |
| | | | terminator and AscI site upstream to the multiple cloning |
| | | | site. With OGO309 |
| SEQ ID | OGO311 | CTGATCGGATCCTAGAAG | Amplification of the biobrick MCS from pBSC1, use with |
| NO: 22 | | | OGO312 |
| SEQ ID | OGO312 | aaaGGCGCGCCCCCTTTTTTGCCGG | Amplification of the biobrick MCS from pBSC1, adding a |
| NO: 23 | | | AscI site, use with OGO311 |
| SEQ ID | OSM315 | GGCGCGCCATAAAAAAC | pSG1 backbone used in NEBuilder reactions, use with |
| NO: 24 | | | OSM316 |
| SEQ ID | OSM316 | GCGGCCGCGAATTC | |
| NO: 25 | | | |

Primers for putative systems

| | | | |
|---|---|---|---|
| SEQ ID | OSM319 | GTTGCCGCCGGGCGTTTTTTATGGCGCG | C.N. 42 to lift from strain, use with OSM320 |
| NO: 26 | | CCGGGAATGCAAAAAGGAGG | |
| SEQ ID | OSM320 | ATCCTAGAAGCTTATCGAATTCGCGGCC | |
| NO: 27 | | GCATATCATCCCTCGTTTTCGTC | |
| SEQ ID | OSM321 | ATCCTAGAAGCTTATCGAATTCGCGGCC | C.N. 44 to lift from strain, use with OSM322 |
| NO: 28 | | GCAGTGGATACAAAGAGTGAACG | |
| SEQ ID | OSM322 | GTTGCCGCCGGGCGTTTTTTATGGCGCG | |
| NO: 29 | | CCATTCATTCTTATTCCGCTAACTTTG | |
| SEQ ID | OSM325 | ATCCTAGAAGCTTATCGAATTCGCGGCC | C.N. 45 to lift from strain, use with OSM326 |
| NO: 30 | | GCGAGTTTGATCAAAGATTTGCC | |
| SEQ ID | OSM326 | GTTGCCGCCGGGCGTTTTTTATGGCGCG | |
| NO: 31 | | CCATTTAATTCTGCTTATCTCCAAG | |
| SEQ ID | OSM327 | ATCCTAGAAGCTTATCGAATTCGCGGCC | C.N. 13 to lift from strain, use with OSM328 |
| NO: 32 | | GCTGCATATTTATAATTGTGTGTTGAG | |
| SEQ ID | OSM328 | GTTGCCGCCGGGCGTTTTTTATGGCGCG | |
| NO: 33 | | CCAGAATGGAAAGTTGAATCAACTC | |
| SEQ ID | OSM333 | ATCCTAGAAGCTTATCGAATTCGCGGCC | C.N. 65 to lift from strain, use with OSM334 |
| NO: 34 | | GCACGATAAACTCGGTGTATTGAC | |
| SEQ ID | OSM334 | GTTGCCGCCGGGCGTTTTTTATGGCGCG | |
| NO: 35 | | CCAAAAGCTTTCGGCATCAAAG | |
| SEQ ID | OSM323 | ATCCTAGAAGCTTATCGAATTCGCGGCC | C.N. 46 to lift from strain, use with OSM324 |
| NO: 36 | | GCTGACCATTTCCCTTCTTTTTTAC | |
| SEQ ID | OSM324 | GTTGCCGCCGGGCGTTTTTTATGGCGCG | |
| NO: 37 | | CCTATAACCAACTCCCAATATATGG | |
| SEQ ID | OSM331 | ATCCTAGAAGCTTATCGAATTCGCGGCC | C.N. 67 to lift from strain, use with OSM332 |
| NO: 38 | | GCAACTAATAGTTTAAAACTTTACGGAT | |
| | | G | |
| SEQ ID | OSM332 | GTTGCCGCCGGGCGTTTTTTATGGCGCG | |
| NO: 39 | | CCTATCAAGCCCCCTCATTTCA | |
| SEQ ID | OSM340 | atcctagaagcttatcgaattcgcggccgcTTCGTTACTT | C.N. 29 to lift from strain, use with OSM341 |
| NO: 40 | | CTGGGATGGG | |
| SEQ ID | OSM341 | gttgccgccgggcgttttttatggcgcgccTGAAAAAGA | |
| NO: 41 | | CTCCTCCGTATTTG | |
| SEQ ID | OSM365 | atcctagaagcttatcgaattcgcggccgcTAACTGGAC | C.N. 34 to lift from strain, use with OSM366 |
| NO: 42 | | AGTGCTCTTGG | |
| SEQ ID | OSM366 | gttgccgccgggcgttttttatggcgcgccATGCCGATA | |
| NO: 43 | | GAAGATATTGCG | |
| SEQ ID | OSM342 | atcctagaagcttatcgaattcgcggccgcTTCCGATAC | C.N. 61 to lift from strain, use with OSM343a |
| NO: 44 | | TCTTTAGCCATAA | |
| SEQ ID | OSM343a | gttgccgccgggcgttttttatggcgcgccACAATCACA | |
| NO: 45 | | TCCTTATTTTCTT | |
| SEQ ID | OSM343b | atcctagaagcttatcgaattcgcggccgcATCTTTTTGA | C.N. 18 to lift from strain, use with OSM344 |
| NO: 46 | | ATAGTTTCAATGATG | |
| SEQ ID | OSM344 | gttgccgccgggcgttttttatggcgcgccAGTGTGGTA | |
| NO: 47 | | TGGAGATTAGC | |
| SEQ ID | OSM359 | atcctagaagcttatcgaattcgcggccgcGTGCTTAGA | C.N. 57 to lift fragment 1 from Genscript plasmid, use |
| NO: 48 | | TACGAAGGG | with OSM360 |
| SEQ ID | OSM360 | TAGCTCATTCTCTACAAAATCC | |
| NO: 49 | | | |
| SEQ ID | OSM361 | TCGATAGAGGATTTTGTAGAG | C.N. 57 to lift fragment 2 from Genscript plasmid, use |
| NO: 50 | | | with OSM362 |
| SEQ ID | OSM362 | TTTTTGACGACCGTCTGAA | |
| NO: 51 | | | |
| SEQ ID | OSM363 | AGTTTTGCTATTTTCAGAC | C.N. 57 to lift fragment 3 from Genscript plasmid, use |
| NO: 52 | | | with OSM364 |
| SEQ ID | OSM364 | gttgccgccgggcgttttttatggcgcgccTGGTTATGG | |
| NO: 53 | | TTAGTATTATCTAAATT | |
| SEQ ID | OSM402 | TAGAGCAAATACCTGATCTGG | C.N. 55 to lift fragment 1 from strain, use with OSM371 |
| NO: 54 | | | |
| SEQ ID | OSM371 | GTTGCCGCCGGGCGTTTTTTATGGCGCG | |
| NO: 55 | | CCAGCGGTAAGTTTTATAGAAAAT | |
| SEQ ID | OSM403 | TCTCTTAGATCCAGATCAGG | C.N. 55 to lift fragment 2 from strain, use with OSM370 |
| NO: 56 | | | |
| SEQ ID | OSM370 | ATCCTAGAAGCTTATCGAATTCGCGGCC | |
| NO: 57 | | GCAGGGGGGATATAGATTTATATATAA | |
| | | T | |
| SEQ ID | OSM335 | ATCCTAGAAGCTTATCGAATTCGCGGCC | C.N. 25 to lift from strain, use with OSM336 |
| NO: 58 | | GCACAAGATACATCACATTGAAGG | |
| SEQ ID | OSM336 | GTTGCCGCCGGGCGTTTTTTATGGCGCG | |
| NO: 59 | | CCCAATATATGCGATATACGCAAAAAC | |
| SEQ ID | OSM329 | ATCCTAGAAGCTTATCGAATTCGCGGCC | C.N. 64 to lift from strain, use with OSM330 |
| NO: 60 | | GCACAAATGGGCAGAGAGAG | |
| SEQ ID | OSM330 | GTTGCCGCCGGGCGTTTTTTATGGCGCG | |
| NO: 61 | | CCGATATTTCATTTTCTTCTTCCTCTCAC | |
| SEQ ID | OSM420 | ATCCTAGAAGCTTATCGAATTCGCGGCC | C.N. 66 to lift from strain, use with OSM421 |
| NO: 62 | | GCGGTGAATGTAAAAATATTGATACAG | |
| SEQ ID | OSM421 | GTTGCCGCCGGGCGTTTTTTATGGCGCG | |
| NO: 63 | | CCAATTTAGTCCTCCTGGGG | |
| SEQ ID | OSM31 | tgagttgattgcagtccagttac | C.N. 59 to lift fragment 1 from Gen9 construct, use with |
| NO: 64 | | | OSM32 |
| SEQ ID | OSM32 | GTTACCACCTACTATCTCTTCAGC | |
| NO: 65 | | | |
| SEQ ID | OSM33 | TCTTTAGCTGAAGAGATAGTAGGTG | C.N. 59 to lift fragment 2 from Gen9 construct, use with |
| NO: 66 | | | OSM34 |
| SEQ ID | OSM34 | tatggaggtcaggtatgatttaaatg | |
| NO: 67 | | | |
| SEQ ID | 0G0242 | catcactgaccatttaaatcatacctgacctccataCGAATG | p15-pDR110 backbone for C.N. 59, use with OSM28 |
| NO: 68 | | GCGATTTTCGTTCGTG | |
| SEQ ID | OSM28 | gcttgactccagcgtaactggactgcaatcaactcaCGATC | |
| NO: 69 | | AGACCAGTTTTTAAT | |
| SEQ ID | OSM386 | ATCCTAGAAGCTTATCGAATTC | C.N. 56 to lift fragment 1 from Genscript plasmid, use |
| NO: 70 | | | with OSM387 |
| SEQ ID | OSM387 | ATGTCATTCATAGCCAGAGC | |
| NO: 71 | | | |
| SEQ ID | OSM388 | AGATTTTAATGCTCTGGCTA | C.N. 56 to lift fragment 2 from Genscript plasmid, use |
| NO: 72 | | | with OSM389 |
| SEQ ID | OSM389 | CTCATCTTCTGATAATGGTCC | |
| NO: 73 | | | |
| SEQ ID | OSM390 | CAGCCGAACGGACCATT | C.N. 56 to lift fragment 3 from Genscript plasmid, use |
| NO: 74 | | | with OSM391 |
| SEQ ID | OSM391 | GTTGCCGCCGGGCGT | |
| NO: 75 | | | |
| SEQ ID | OLA489 | ATCCTAGAAGCTTATCGAATTCGCGGCC | C.N. 51 to lift from strain, use with OLA490 |
| NO: 76 | | GCACCTGCCTTCCTTTGATACAATTC | |
| SEQ ID | OLA490 | GTTGCCGCCGGGCGTTTTTTATGGCGCG | |
| NO: 77 | | CCTCAATTTATTGCTTTATTCATTGTGAC | |
| | | TG | |

[2029] For long systems (>10000 bases) when the donor strain was not available, the system was commercially synthesized in overlapping fragments (Table 4, “Cloning method” column). Systems amplified from genomic DNA or ordered as overlapping fragments were cloned into pSG1-rfp between the AscI and NotI sites using NEBuilder HiFI DNA Assembly cloning kit (NEB E5520S). The full list of sources used for cloning the systems into our model organisms is found in Table 4, including accessions of all strains ordered.

[2030] Transformation to B. subtilis was performed using MC medium as previously described (Wilson G A, Bott K F. (1968) Nutritional factors influencing the development of competence in the Bacillus subtilis transformation system. J Bacteriol. 95: 1439-49). MC medium was composed of 80 mM K₂HPO₄, 30 mM KH₂PO₄, 2% Glucose, 30 mM Trisodium citrate, 22 μg/ml Ferric ammonium citrate, 0.1% Casein Hydrolysate (CAA), 0.2% potassium glutamate. From an overnight starter of bacteria, 10 μl were diluted in 1 ml of MC medium supplemented with 10 μl 1M MgSO₄. After 3 hours of incubation (37° C., 200 rpm), 300 μl was transferred to a new 15 ml tube and ˜200 ng of plasmid DNA was added. The tube was incubated for another 3 hours (37° C., 200 rpm), and the entire reaction was plated on LB agar plates supplemented with 100 μg/ml spectinomycin and incubated overnight at 30° C.

[2031] For systems to be tested on E. coli, the cloned vector was transformed into E. coli MG1655 cells (ATCC 47076), and the resulting transformants were verified by PCR. For systems to be tested in B. subtilis, the cloned vector was transformed into B. subtilis BEST7003 cells. The system was integrated into the amyE locus, and resulting transformants were screened on starch plates for amylase-deficient phenotype. Whole-genome sequencing was then applied to all transformed B. subtilis and E. coli clones as described in (Ofir G, Melamed S, Sberro H, Silverman S, Doron S, Yaakov G, Mukamel Z, Sorek R. (2017) DISARM, a novel bacterial defense system with broad anti-phage activities. ibid) to verify system's integrity and lack of mutations.

[2032] As a negative control for transformation into B. subtilis, a transformant with an empty plasmid, containing only the spectinomycin resistance gene in the amyE locus, was used. As a negative control for transformation into E. coli, the wild-type E. coli MG1655 carrying an empty plasmid was used.

[2033] For strains with gene deletions and point mutations, plasmids containing systems with these deletions/mutations were commercially synthesized by Genscript. The mutated systems were transformed into B. subtilis and E. coli as described above, and clones used were fully sequenced to verify proper integration and sequence of the mutated systems.

[2034] Phage Strains, Cultivation, and Plaque Assay

[2035] The following B. subtilis phages were obtained from the Bacillus Genetic Stock Center (BGSC): SPO1 (BGSCID 1P4), phi3T (BGSCID 1L1), SPβ (BGSCID 1L5), SPR (BGSCID 1L56), phi105 (BGSCID 1L11), rho14 (BGSCID 1L15), and SPP1 (BGSCID 1P7). Phage phi29 was obtained from the DSMZ (DSM 5546). Phages SBSphiJ and SBSphiC were isolated by us from mixed soil and leaves samples on B. subtilis BEST7003. For this, soil and leaves samples were added to a log phase B. subtilis BEST7003 culture and incubated overnight to enrich for B. subtilis phages. The enriched sample was centrifuged and filtered through 0.2 μm filters, and the filtered supernatant was used to perform double layer plaque assays as described in Kropinski et al. (Kropinski A M, Mazzocco A, Waddell T E, Lingohr E, Johnson R P. Enumeration of Bacteriophages by Double Agar Overlay Plaque Assay. In: Clokie M R J, Kropinski A M, editors. Bacteriophages: Methods and protocols. NY: Humana Press; 2009. pp. 69-76). Single plaques that appeared after overnight incubation were picked, re-isolated 3 times, and amplified as described below.

[2036] E. coli phages (T4, T7, lambda-vir) were kindly provided by U. Qimron. Phages SECphi17, SECphi18 and SECphi27 were isolated as described in Wommack et al. (Wommack K E, Williamson K E, Helton R R, Bench S R, Winget D M. Methods for the Isolation of Viruses from Environmental Samples. In: Clokie M R J, Kropinski A M, editors. Bacteriophages: Methods and protocols. NY: Humana Press; 2009. pp. 3-14) from sewage samples on E. coli MG1655. 0.2 μm filtered concentrated sewage samples were used to perform double layer plaque assays, individual plaques were picked, re-isolated 3 times, and amplified as described below.

[2037] All phages isolated by us were Illumina sequenced following a library prep using the Nextera protocol (Baym M, Kryazhimskiy S, Lieberman T D, Chung H, Desai M M, Kishony R. (2015) Inexpensive multiplexed library preparation for megabase-sized genomes. PLoS One. 10: e0128036) and assembled using SPAdes v. 3.10.1 using the -careful and -cov-cutoff auto modifiers (Bankevich et al. (2012) A New Genome Assembly Algorithm and Its Applications to Single-Cell Sequencing. J Comput Biol.; 19: 455-477. doi:10.1089/cmb.2012.0021). Assembled genomes and raw reads were deposited in the European Nucleotide Archive (ENA) under study accession PRJEB23070. Phage classification was done according to sequence homology to the closest known similar phage. Phage SECphi17 (ENA ERS1981053) has a 5,538 bp genome and its closest relative is Coliphage WA3 (GenBank DQ079897.1, 66% coverage, 81% identity), indicating it is an ssDNA phage of the Microviridae family. Phage SECphi18 (ENA ERS1981054) has a 44,798 bp genome and its closest relative is Escherichia phage Gluttony (GenBank KX534336.1, 92% coverage, 93% identity), indicating it is a member of the Siphoviridae family. Phage SECphi27 (ENA ERS1981055) has a 51,811 bp genome, and its closest relative is Escherichia phage vB_Eco_swan01 (GenBank LT841304.1, 91% coverage, 98% identity), indicating it is a member of the Siphoviridae family. Phage SBSphiJ (ENA ERS1981056) has a 156,875 bp genome, and its closest relative is Bacillus phage Grass (GenBank KF669652.1, 91% coverage, 95% identity), indicating it is a member of the family Myoviridae. Phage SBSphiC (ENA ERS1981057) has a 144,651 bp genome, and its closest relative is Bacillus phage SP10 (GenBank AB605730.1, 94% coverage, 90% identity), indicating it is a member of the Myoviridae family. Siphoviridae and Myoviridae phage morphologies were verified by electron microscopy (EM). For the EM experiments, phage lysates were blotted onto copper grids, stained using uranyl acetate 2%, and visualized in FEI Tecnai T12 transmitting electron microscope.

[2038] Phages were propagated on either E. coli MG1655 or B. subtilis BEST7003 using the plate lysate method as previously described (Fortier L-C, Moineau S. (2009) Phage production and maintenance of stocks, including expected stock lifetimes. Methods Mol Biol. 501: 203-19). Lysate titer was determined using the small drop plaque assay method as previously described (Mazzocco A, Waddell T E, Lingohr E, Johnson R P. (2009) Enumeration of bacteriophages using the small drop plaque assay system. [Internet]. Methods in molecular biology (Clifton, N.J.). pp. 81-5). Bacteria were mixed with MMB agar (LB+0.1 mM MnCl₂+5 mM MgCl₂+5 mM CaCl₂+0.5% agar), and serial dilutions of phage lysate in MMB were dropped on top of them. After the drops dried up, plates were incubated at room temperature overnight. Efficiency of plating (EOP) was measured by performing small drop plaque assay with the same phage lysate on control bacteria and bacteria containing the candidate defense system, and comparing the ratio of plaque formation.

[2039] To determine the number of infective centers during infection with T7 phage of control bacteria and bacteria containing type I or type II Zorya (Defense Systems Ia and Ib, respectively), a modified version of the technique described in (Sing et al., (19909) J. Gen. Microbiol. 136:807-1815) as used. Zorya-lacking E. coli MG1655 or Zorya-containing cells were infected with T7 phage at MOI 0.05 and incubated for 10 min at 37° C. to allow adsorption. Cells with adsorbed phages were then centrifuged (1 min, 14,000 rpm) at 4° C., washed once with ice-cold MMB medium, and resuspended in 200 mlice-cold MMB medium. Then, 100 ml aliquots of 10-fold dilutions of resuspended phage-infected cells were mixed with 100 ml of a Zorya-lacking E. coli MG1655 culture grown to O.D. 0.3. The mixture was plated using the double agar over-lay method and infection centers (plaques) were counted after overnight incubation in room temperature.

[2040] For the liquid culture infection with T7 phage, overnight cultures of Zorya-lacking E. coli MG1655 or Zorya-containing cells were diluted 1:100 in MMB medium. 180 ml volumes of the diluted culture were dispersed into wells in a 96-well plate and grown at 37° C. with vigorous shaking until early log phase (O.D.600 0.3). 20 mlofT7 phage lysate were added at multiplicities of infection 0.05, 0.5 and 5 in three replicates. Optical density measurements at a wavelength of 600 nm were taken every 15 min using a TECAN Infinite 200 plate reader in a 96-well plate.

[2041] Transformation Efficiency Assay

[2042] Transformation was performed using the MC medium as described above. To test plasmid transformation efficiency, the episomal Bacillus plasmid pHCMC05 was used (Titok M., Chapuis J, Selezneva Y., Lagodich A., Prokulevich V., Ehrlich S., Jannière L. (2003) Bacillus subtilis soil isolates: plasmid replicon analysis and construction of a new theta-replicating vector. Plasmid. 49: 53-62). Transformation efficiency was calculated by dividing the number of transformants that grew on LB plates containing 5 μg/ml chloramphenicol by the live count on LB plates.

[2043] DNA-Seq and RNA-Seq

[2044] DNA was extracted from bacteria using Qiagen DNeasy blood and tissue kit (Qiagen 69504). DNA libraries were constructed using the Nextera library preparation protocol as previously published (Baym M, Kryazhimskiy S, Lieberman T D, Chung H, Desai M M, Kishony R. (2015) Inexpensive multiplexed library preparation for megabase-sized genomes. PLoS One. 10: e0128036). RNA-seq was performed with the NEBNext Ultra Directional RNA Library Prep Kit (NEB, E7420) according to the manufacturer's instructions with modifications as previously described (Dar D, Shamir M, Mellin J R, Koutero M, Stern-Ginossar N, Cossart P, Sorek R. (2016) Term-seq reveals abundant ribo-regulation of antibiotics resistance in bacteria. Science. 352: aad9822-aad9822). Prior to library preparation, equal amounts of extracted RNA from 3-7 strain samples were pooled together and processed as a single library. All libraries were sequenced using the Illumina NextSeq500. The sequencing reads were aligned to the reference genomes of B. subtilis BEST7003 (Genbank: AP012496) and E. coli MG1655 (Genbank: NC_000913), and to the plasmid sequence of each system, using Novoalign 3.02.02 (Novocraft Technologies Sdn Bhd, http://www.novocraft.com) with the default parameters and [-r Random]. The coverage along the reference genomes was calculated, to check if each system exists in the genome (DNA-seq) or expressed (RNA-seq). The pooled RNA library was sequenced to a depth of 5 million reads per sample and later aligned to the reference genomes as described.

### Example 1

### Identification of New Bacterial Defense Systems

[2045] Objective:

[2046] To comprehensively identify new defense systems enriched within defense islands, in an attempt to systematically map the arsenal of defense systems that are at the disposal of bacteria and archaea in their fight against phages. Anti-phage defense systems were found to be frequently physically clustered in bacterial and archaeal genomes such that, for example, genes comprising restriction enzymes commonly reside in the vicinity of genes comprising infection systems and other phage resistance systems. The observation that defense systems are clustered in genomic “defense islands” has led to the suggestion that genes of unknown function residing within such defense islands may also participate in anti-phage defense.

[2047] Methods:

[2048] The first step in this discovery effort was to identify gene families that are enriched near known defense systems in the microbial pan-genome (FIG. 1A). For this, 14,083 protein families (pfams) were analyzed in >45,000 available bacterial and archaeal genomes (overall comprising >120 million genes). Each pfam represents a set of genes sharing a common protein domain. For each pfam, the prevalence of its member genes to reside in the vicinity (10 genes from each side) of one or more known defense genes was calculated (FIG. 1B). Pfams were selected that had at least 65% of their member genes found next to defense genes, and that their member genes appeared in diverse defense contexts in different genomes (at least 10% variability; FIG. 1B). These thresholds were selected as they capture the majority of pfams that comprise known defense systems (FIGS. 1A-1C; Table 1). The resulting set of 277 candidate pfams was supplemented by 58 additional gene families that were previously predicted to be associated with known defense systems (Makarova K S, Wolf Y I, Snir S, Koonin E V. (2011) Defense islands in bacterial and archaeal genomes and prediction of novel defense systems. J Bacteriol. 193: 6039-56), altogether yielding a list of 335 candidate gene families (Table 2).

[2049] To check whether the defense-associated pfams belong to multi-gene systems, each such pfam was used as an anchor around which commonly associated genes were searched for (FIG. 1A). For this, all the neighboring genes (10 genes from each side) from all the genomes in which members of the anchor pfam occurred were collected, and these genes were clustered based on sequence homology. Cassettes of gene clusters were then searched for that showed conserved order across multiple different genomes, marking such cassettes as candidate multi-gene systems (FIG. 1A).

[2050] Results:

[2051] The gene annotations in the resulting candidate systems were manually inspected in order to filter out likely false predictions. It was found that 39% of the cases represented non-defense, mobile genetic elements that are known to co-localize to defense islands (Table 2). Additionally, 30% of the resulting candidate defense systems found represented known defense systems whose pfams were not included in the original set of known defense pfams, and 17% belonged to operons probably performing metabolic functions or other functions not associated with defense (FIGS. 2A and 2B).

[2052] The remaining systems possibly represent putative new defense systems. To expand the predictions with new pfams that may be specifically enriched next to the putative new defense systems, a second prediction cycle was performed, this time adding the members of the predicted new systems to the positive defense pfam set (FIG. 1A).

[2053] Altogether, 41 candidate single-gene or multi-gene systems were retrieved from this analysis (Table 3). This set of systems was further filtered to remove systems that were largely confined to a specific clade (e.g., systems appearing only in cyanobacteria or only in actinobacteria), resulting in a set of 28 candidate systems that showed broad phylogenetic distribution.

### Example 2

### Verification of New Bacterial Defense Systems

[2054] Objective:

[2055] To experimentally verify the candidate defense systems identified in Example 1, as having defense system activity.

[2056] Methods:

[2057] Two bacteria strains were selected for verification of candidate defense systems, Escherichia coli str. MG1655 and Bacillus subtilis str. BEST7003. These bacteria were utilized as models to experimentally examine whether the predicted systems confer defense against phage (FIG. 3A). None of the candidate new systems are naturally present in the genomes of these two bacteria. For each candidate system, source organisms were selected from which the system was taken and heterologously cloned into one of the model organisms. To increase the probability that the cloned system would be compatible and functionally expressed within the receiving bacterium, systems were selected from mesophilic organisms as close phylogenetically as possible to E. coli or to B. subtilis, and included the upstream and downstream intergenic regions so that promoters, terminators or other regulatory sequences would be preserved. Where possible at least two instances of each system were used (from two different source genomes), to account for the possibility that some systems may not be active in their source organism. The DNA of each system, spanning the predicted genes and the intergenic spaces, was synthesized or amplified from the source genome (donor species) and cloned either to E. coli (on a plasmid) or to B. subtilis (genomically integrated). As a control, the procedure was repeated with 5 known defense systems (instances of types I, II and III R-M systems, type III toxin/antitoxin system and an infection gene of the AbiH family) for which source organisms were similarly selected and cloning was performed into B. subtilis, as well a 6^{th} control comprised of the recently discovered DISARM defense system.

[2058] Results:

[2059] Altogether, heterologously cloning of 61 representative instances of the 28 candidate new systems was attempted, and successful cloning was verified by whole genome sequencing (Table 4). For 27 of these 28 systems there was at least one candidate locus for which cloning was successful, and RNA-seq of the transformants showed that for 26 of the systems, at least one of the candidates was expressed in the receiving E. coli or B. subtilis strain.

[2060] The engineered bacteria were then challenged by an array of phages consisting of 10 B. subtilis and 6 E. coli phages, spanning the three major families of tailed dsDNA phages (myo-, sipho- and podo-phages), as well as one ssDNA phage infecting E. coli (FIGS. 3B, 3C, and 3D). Measuring phage efficiency of plating (EOP) on system-containing bacteria vs. control cells, it was found that 9 of the 26 tested systems (35%) showed protection from infection by at least one phage (FIGS. 3B, 3C, 3D, 3E, and 3F). In comparison, three of the six positive control systems showed defense, with the remaining 3 showing no protection against the 10 B. subtilis phages tested.

[2061] The 9 verified new systems were named after protective deities from various world mythologies. These defense systems are comprised of between 1 and 5 genes and span between 2 and 12 kb of genomic DNA (Table 6; Table 7).

TABLE 6
Composition of Defense Systems Reported

| | | | | | No. (%) | |
|---|---|---|---|---|---|---|
| | | | | # of | of | |
| | | | | instances | genomes | |
| | | | | detected | in which | |
| | | | | within | system | |
| System | Operon | Associated domains | Domain annotations | microbes | is found | comments |
| Thoeris | ThsAB | pfam13289, pfam14519, | SIR2, Macro domain, | 2,099 | 2070 | Membrane |
| | | pfam08937, pfam13676 | TIR domain | | (4.0%) | associated |
| | | | | | | (sometime) |
| Hachiman | HamAB | pfam08878, COG1204, | Helicase | 1,781 | 1742 | |
| | | pfam00270, pfam0271 | | | (3.4%) | |
| Shedu | SduA | pfam14082 | Nuclease | 1,246 | 1191 | |
| | | | | | (2.3%) | |
| Gabija | GajAB | pfam13175, COG3593, | ATPase, helicase, | 4,598 | 4360 | |
| | | pfam13361, pfam00580, | nuclease | | (8.5)% | |
| | | COG0210, pfam13245 | | | | |
| Septu | PtuAB | pfam13304, COG3950, | ATPase, HNH nuclease | 2,506 | 2117 | |
| | | pfam13395, pfam01844 | | | (4.1%) | |
| Lamassu | LmuAB | pfam14130, pfam02463 | SMC ATPase N-terminal | 697 | 682 | |
| | | | domain | | (1.3%) | |
| Zorya | ZorABCD | pfam01618, pfam13677, | MotA/ExbB, MotB, | 1,173 | 1055 | Membrane |
| (type I) | | pfam00691, COG1360, | helicase, Mrr-like | | (2.1%) | associated |
| | | pfam15611, pfam00176, | nuclease | | | |
| | | pfam00271, COG0553, | | | | |
| | | pfam04471 | | | | |
| Zorya | ZorABE | pfam01618, pfam13677, | MotA/ExbB, MotB, | 656 | 655 | Membrane |
| (type II) | | pfam00691, COG1360, | HNH nuclease | | (1.3%) | associated |
| | | COG3183, pfam01844 | | | | |
| Kiwa | KwaAB | pfam16162 | No annotated domain | 934 | 924 | Membrane |
| | | | | | (1.8%) | associated |
| Druantia | DruABC | pfam14236, pfam00270, | Helicase, methylase | 1,342 | 1321 | |
| | DE (type | pfam00271, pfam09369, | | | (2.6%) | |
| | I) | pfam00145, COG1205, | | | | |
| | DruMFG | COG0270 | | | | |
| | E (type II) | | | | | |
| | DruHE | | | | | |
| | (III) | | | | | |
| Wadjet | JetABCD | pfam11855, pfam09660, | MukBEF condensin, | 3,173 | 2880 | |
| | | pfam13835, pfam09661, | topoisomerase VI | | (5.6%) | |
| | | pfam13555, pfam13558, | | | | |
| | | COG4913, COG1196, | | | | |
| | | pfam11795, pfam09983, | | | | |
| | | pfam11796, pfam09664, | | | | |
| | | COG4924 | | | | |

TABLE 7
Verified Defense Systems

| | | | | Median | |
|---|---|---|---|---|---|
| | | Associated | | gene size | |
| System | Genes | domains | Domain annotation | (aa) | Comment |
| Thoeris | ThsA | pfam13289, | Sir2/Macro domain | 477 | In some cases N- |
| | | pfam14519 | (NAD binding) | | terminal |
| | | | | | transmembrane |
| | | | | | helices |
| | ThsB | pfam08937 | TIR domain | 195 | Often multiple |
| | | | | | ThsB genes in the |
| | | | | | locus |
| Hachiman | HamA | pfam08878 | Unknown function | 269 | |
| | | (DUF1837) | | | |
| | HamB | COG1204, | Helicase | 867 | |
| | | pfam00270, | | | |
| | | pfam00271 | | | |
| Shedu | SduA | pfam14082 | Endonuclease NucS | 367 | |
| | | (DUF4263), | | | |
| | | pfam01939 | | | |
| Gabija | GajA | pfam13175, | ATPase domain, | 670 | |
| | | COG3593 | Predicted ATP- | | |
| | | | dependent | | |
| | | | endonuclease | | |
| | GajB | pfam04257, | UvrD helicase | 598 | |
| | | pfam00580- | | | |
| | | pfam13361 | | | |
| Septu | PtuA | pfam13304, | AAA domain, | 452 | In some cases has |
| | | pfam02463 | RecF/RecN/SMC N | | N-terminal |
| | | | terminal domain | | predicted HNH |
| | | | | | nuclease domain |
| | PtuB | pfam13395, | HNH endonuclease | 219 | |
| | | pfam01844 | | | |
| Lamassu | LmuA | pfam14130 | Unknown function | 361 | |
| | | (DUF4297) | | | |
| | LmuB | pfam02463 | RecF/RecN/SMC N | 559 | |
| | | | terminal domain | | |
| Zorya | ZorA | pfam01618 | MotA/ExbB/TolQ | 550 | Predicted |
| type I | | | | | transmembrane |
| | | | | | helices |
| | ZorB | pfam13677- | MotB | 217 | Predicted |
| | | pfam00691 | | | transmembrane |
| | | | | | helix |
| | ZorC | pfam15611 | EH signature | 470 | |
| | ZorD | pfam00176- | SWI2/SNF2 helicase | 1080 | |
| | | pfam00271 | | | |
| Zorya | ZorE | COG3183, | HNH endonuclease | 367 | |
| type II | | pfam01844 | | | |
| Kiwa | KwaA | No domain | | 194 | Predicted |
| | | annotation | | | transmembrane |
| | | | | | helices |
| | KwaB | pfam16162 | Unknown function | 315 | |
| | | (DUF4868) | | | |
| Druantia | DruA | pfam14236 | Unknown function | 404 | |
| type I | | (DUF4338) | | | |
| | DruB | No domain | | 531 | |
| | | annotation | | | |
| | DruC | No domain | | 627 | |
| | | annotation | | | |
| | DruD | No domain | | 347 | |
| | | annotation | | | |
| | DruE | pfam00270, | Helicase | 2104 | |
| | | pfam00271, | | | |
| | | pfam09369 | | | |
| | | (DUF1998) | | | |
| Druantia | DruM | pfam00145, | Cytosine methylase | 386 | |
| type II | | COG0270 | | | |
| | DruF | No domain | | 852 | |
| | | annotation | | | |
| | DruG | No domain | | 711 | |
| | | annotation | | | |
| Druantia | DruH | No domain | | 1079 | |
| type III | | annotation | | | |
| Wadjet | JetA | pfam11855 | Unknown functions | 488 | MukF-like |
| | | (DUF3375)/ | | | |
| | | pfam09660 | | | |
| | | (DUF2397) | | | |
| | JetB | pfam13835 | Unknown functions | 247 | MukE-like |
| | | (DUF4194)/ | | | |
| | | pfam09661 | | | |
| | | (DUF2398) | | | |
| | JetC | pfam13555- | ATP binding domain, | 1476 | MukB-like |
| | | pfam13558 | Putative exonuclease | | |
| | | | SbcC | | |
| | JetD | pfam11795 | Unknown functions | 347 | Topoisomerase VI |
| | | (DUF3322)- | | | predicted by |
| | | pfam09983 | | | structural |
| | | (DUF2220)/ | | | similarities |
| | | pfam11796 | | | |
| | | (DUF3323)- | | | |
| | | pfam09664 | | | |
| | | (DUF2399) | | | |

[2062] Where possible, system consistency was verified by testing for phage resistance in systems where individual genes were deleted (FIG. 3G). We found between several hundreds and several thousand representations of each of the defense systems in sequenced microbial genomes, usually with broad phylogenetic distribution (FIG. 3H; Tables 8-17). Most systems were detected in >10 taxonomic phyla, and 7 of them appear in archaea (FIG. 3H).

[2063] Some of the systems seem to target a specific class of phages (e.g., the Thoeris system appears to specifically protect from myophages), while others, such as the Hachiman system, provide broader defense (FIG. 3B). The genes comprising the new systems encode many protein domains that are commonly present in antiviral systems such as CRISPR-Cas and RNAi, including helicases, nucleases, and nucleic acid binding domains, in addition to many domains of unknown function and also atypical domains as described herein. Three of the systems contain membrane-associated proteins as predicted by the presence of multiple transmembrane helices. Further functional analyses was performed for a selected set of systems.

### Example 3

### Genomic Identification and Analysis of the ZORYA System

[2064] Objective:

[2065] Identify the candidate defense system based on the enrichment of the anchor pfam15611.

[2066] Method:

[2067] ZORYA was one of the systems identified in the first round of prediction. The anchor gene family for ZORYA was pfam15611. This pfam had a defense score of 0.98 and a diversity score of 0.55.

[2068] Cloning of ZORYA into E. coli MG1655—A cloning vector for large fragments was constructed by assembling the p15a origin of replication (ori) from pACYCDuet-1 and the amyE integration cassette from plasmid pDR110 (see https://www(dot)ncbi(dot)nlm(dot)nih(dot)gov/pmc/articles/PMC3814332/#pgen.1003892.s005). The p15a ori was amplified using primers OGO174+OGO175 (a list of all primers is provided in Table 5). The amyE integration cassette was amplified using primers OGO176+OGO185. The two fragments were assembled and transformed into E. coli cells using Gibson assembly cloning kit (NEB E5510S), and assembled plasmids were verified by restriction pattern and full sequencing.

[2069] The backbone of the above described vector was amplified using primers OGO309+OGO310, adding to it a BamHI restriction site and a terminator site. The multiple cloning site of plasmid pBS1C (received from the BGSC) was amplified using primers OGO311+OGO312. Both fragments were digested using AscI and BamHI, ligated using T4 ligase and transformed into E. coli, resulting in plasmid pSG1-rfp. The plasmid was digestion verified and fully sequenced.

[2070] A representative ZORYA operon (locus) from E. coli E24377A (RefSeq accession NC_009801, coordinates 298890-307639 of the reverse strand, SEQ ID NO: XXXX) was commercially synthesized (GenScript) directly into pSG1-rfp between the AscI and NotI sites of the multiple cloning site. The cloned vector was transformed into E. coli MG1655 cells, and the resulting transformants were verified by PCR and whole genome sequencing.

[2071] Phage cultivation and plaque assays have been described above.

[2072] For analysis in solid cultures, Zorya-containing cells (Defense System Ia or Defense System Ib) were infected with T7 phage at MOI 0.05 and were incubated for 10 min at 37° C. to allow phage adsorption (FIG. 4G). Cells with adsorbed phages were then centrifuged and washed to eliminate unabsorbed phages. These T7-infected cells were mixed together with E. coli MG1655 cells that lacked a Zorya defense system, and the mixture was plated using an agar overlay method. Phage bursts from successful infections were visualized as a single infection center on a lawn from the T7-sensitive E. coli strain, enabling an evaluation of the number of phages that have adsorbed and completed a successful infection cycle. For analysis in liquid cultures, T7 infection in liquid cultures of E. coli cells containing type I (FIG. 4H) and type II (FIG. 4I) Zorya. Bacteria were infected at t=0 at multiplicities of infection (MOI) of 0.05, 0.5 and 5.

[2073] Results:

[2074] The Zorya system (named after a deity from the Slavic mythology) was identified based on the enrichment of the anchor pfam15611, representing a domain of unknown function, within defense islands. Pfam15611-containing gene clusters were previously reported as genomically associated with tellurium- and stress-resistance genes.

[2075] The computational analysis found this pfam to be part of a 4-gene system, zorABCD comprising ZorA, ZorB, ZorC, and ZorD polypeptides. Overall the ZORYA gene system encompasses ˜9 kb of DNA, with pfam15611 being the third gene in the system (zorC; FIG. 3C, and FIGS. 4A and 4B; Table 6). Initially 262 appearances of the ZORYA system were found in the dataset that was used in the automatic prediction.

[2076] A representative ZORYA operon from E. coli E24377A was cloned into E. coli MG1655 (FIG. 4C), which does not contain an endogenous ZORYA system. The correct insertion of the system into the E. coli MG1655 genome was verified by whole genome sequencing.

[2077] In the next step, the E. coli MG1655 containing the ZORYA system (type I) was challenged with phage from three families of the dsDNA tail phages Caudavirales: T4 of Myoviridae, T7 of the Podoviridae, and Lambda of the Siphoviridae. T4 and T7 are obligatory lytic phages, while Lambda is a temperate phage. In addition to the wild-type Lambda phage (lambda-wt), a mutant that is an obligatory lytic phage was also used (lambda-vir). The results showed that the type I ZORYA system provided protection against T7 phage (2-3 orders of magnitude), and lambda-vir phage (at least 2 orders of magnitude), manifested by reduction in plaque formation on the ZORYA-containing strains (FIG. 3E). Further analysis showed that the type I ZORYA system provided 10-10000-fold protection against infection by T7, SECphi27, and lambda-vir phages (FIGS. 3C and 3F). Further searches based on homologies to the first two genes in the system, zorA and zorB, revealed a second type of ZORYA, comprised of the 3 genes zorABE. (FIGS. 4D and 4E). A Type II Zorya system was cloned from E. coli ATCC8739 into E. coli MG1655 and yielded 10,000-fold defense against T7 and 10-fold against the ssDNA phage SECphi17 (FIG. 3C and FIGS. 4B and 4C).

[2078] The first two genes of the Zorya system, zorA and zorB, contain protein domains sharing sequence homology with motA and motB, respectively (FIG. 4B). MotA and MotB are inner membrane proteins that are part of the flagellar motor of bacteria. They assemble into a MotAB complex, which forms the stator of the flagellar motor (the static part within which the flagellar rotor swivels). The MotAB complex also forms the proton channel that provides the energy for flagellar rotation, coupling transport of protons into the cell with the rotation (FIG. 4F). While zorB shares the same size and domain organization with motB (including the pfam13677 and pfam00691 domains), zorA contains, in addition to the MotA domain (pfam01618), also a long C-terminal helical domain that is sometime identified as a “methyl-accepting chemotaxis domain” (COG0840). In addition to these two genes, Type I Zorya contains zorC, a gene of unknown function, and zorD, which is a large gene (encoding a ˜1200aa polypeptide) comprising a helicase domain. Type II Zorya lacks zorC and zorD and instead contains zorE, a smaller gene comprising an HNH-endonuclease domain.

[2079] Analysis of the Zorya Defense Systems was performed by performing phage infection of Zorya Defense System-containing bacteria cells (Defense System Ia or Defense System Ib) in solid and liquid cultures. Three replicates of cells containing type I Zorya, type II Zorya or no Zorya defense system are shown in FIGS. 4G-4I; data represent, for each replicate, the number of derived infection centers as a fraction from the average number of infection centers derived from Zorya-lacking (“No Zorya”) cells (see Methods). The results show that in cells containing a type I Zorya defense system, only an average of 17% of infection events lead to successful phage progeny, while in cells containing a type II Zorya defense system, 6% of the infected cells yield successful phage bursts. (FIG. 4G) For liquid culture infection, shown are three replicates for each MOI, with each curve showing an individual replicate. The delayed collapse of Zorya-containing cultures suggests that most of the infected Zorya-containing cells undergo abortive infection, while a minority of cells produces viable phage progeny, which eventually accumulate to a high MOI leading to a culture collapse.

[2080] Conclusion:

[2081] The Zorya defense system was identified in 1829 instances within 1663 sequenced bacterial genomes belonging to 12 phyla, marking this system as prevalent in at least 3% of sequenced bacteria (Table 8).

TABLE 8
ZORYA Defense System and Components Thereof
This table is presented in landscape orientation. Due to the number of columns, the
table has been split into parts. Part A includes the first set of columns and therefore should be
place to the left of subsequent parts (Part B and where relevant Part C). To avoid any doubt, the
rows of the table in each part line up once the tables are placed together.
(Part A)

| | A | B | C | D | E | F | G |
|---|---|---|---|---|---|---|---|
| 1 | assembly_accession | taxid | species_taxid | organism_name | infraspecific_name | phylum | genomic_accession |
| 2 | GCA_000017645.1 | 78245 | 280 | Xanthobacter autotrophicus Py2 | Py2 | Proteobacteria | CP000781.1 |
| 3 | GCA_000761245.1 | 285 | 285 | Comamonas testosteroni | JL40 | Proteobacteria | AWOR01000012.1 |
| 4 | GCA_000017205.1 | 381754 | 287 | Pseudomonas aeruginosa PA7 | PA7 | Proteobacteria | CP000744.1 |
| 5 | GCA_000259025.1 | 1134459 | 287 | Pseudomonas aeruginosa PADK2_CF510 | PADK2_CF510 | Proteobacteria | AJHI01000009.1 |
| 6 | GCA_000297315.1 | 1163394 | 287 | Pseudomonas aeruginosa ATCC 700888 | ATCC 700888 | Proteobacteria | AKZF01000392.1 |
| 7 | GCA_000297355.1 | 1163395 | 287 | Pseudomonas aeruginosa E2 | E2 | Proteobacteria | AKZH01000152.1 |
| 8 | GCA_000399805.1 | 1315978 | 287 | Pseudomonas aeruginosa VRFPA02 | VRFPA02 | Proteobacteria | AQHM01000100.1 |
| 9 | GCA_000467675.1 | 1350465 | 287 | Pseudomonas aeruginosa VRFPA03 | VRFPA03 | Proteobacteria | ATNK01000038.1 |
| 10 | GCA_000480705.1 | 1402563 | 287 | Pseudomonas aeruginosa BL22 | BL22 | Proteobacteria | KI518786.1 |
| 11 | GCA_000480725.1 | 1402562 | 287 | Pseudomonas aeruginosa BL21 | BL21 | Proteobacteria | KI518793.1 |
| 12 | GCA_000480745.1 | 1402561 | 287 | Pseudomonas aeruginosa BL20 | BL20 | Proteobacteria | KI518807.1 |
| 13 | GCA_000480965.1 | 1402550 | 287 | Pseudomonas aeruginosa BL09 | BL09 | Proteobacteria | KI518889.1 |
| 14 | GCA_000481705.1 | 1402500 | 287 | Pseudomonas aeruginosa X13273 | X13273 | Proteobacteria | KI519199.1 |
| 15 | GCA_000481765.1 | 1402497 | 287 | Pseudomonas aeruginosa 19660 | 19660 | Proteobacteria | KI519236.1 |
| 16 | GCA_000481825.1 | 1402494 | 287 | Pseudomonas aeruginosa S54485 | S54485 | Proteobacteria | KI519256.1 |
| 17 | GCA_000482005.1 | 1163395 | 287 | Pseudomonas aeruginosa E2 | E2 | Proteobacteria | KI519307.1 |
| 18 | GCA_000496325.1 | 1408193 | 287 | Pseudomonas aeruginosa VRFPA05 | VRFPA05 | Proteobacteria | AXZJ01000095.1 |
| 19 | GCA_000520195.1 | 1402581 | 287 | Pseudomonas aeruginosa PS42 | PS42 | Proteobacteria | KI914449.1 |
| 20 | GCA_000531435.1 | 1407059 | 287 | Pseudomonas aeruginosa PA38182 | PA38182 | Proteobacteria | HG530068.1 |
| 21 | GCA_000531435.1 | 1407059 | 287 | Pseudomonas aeruginosa PA38182 | PA38182 | Proteobacteria | HG530068.1 |
| 22 | GCA_000558345.1 | 1441931 | 287 | Pseudomonas aeruginosa VRFPA09 | VRFPA09 | Proteobacteria | JAAO01000047.1 |
| 23 | GCA_000611995.2 | 1437873 | 287 | Pseudomonas aeruginosa PA99 | PA99 | Proteobacteria | KK111873.1 |
| 24 | GCA_000629065.1 | 1447541 | 287 | Pseudomonas aeruginosa BWH033 | BWH033 | Proteobacteria | KK212100.1 |
| 25 | GCA_000629285.1 | 1447530 | 287 | Pseudomonas aeruginosa 3575 | 3575 | Proteobacteria | KK212903.1 |
| 26 | GCA_000629505.1 | 1418240 | 287 | Pseudomonas aeruginosa BWH054 | BWH054 | Proteobacteria | KK213223.1 |
| 27 | GCA_000689435.1 | 1336203 | 287 | Pseudomonas aeruginosa MH38 | MH38 | Proteobacteria | CBTQ010000132.1 |
| 28 | GCA_000689435.1 | 1336203 | 287 | Pseudomonas aeruginosa MH38 | MH38 | Proteobacteria | CBTQ010000056.1 |
| 29 | GCA_000705175.1 | 1441459 | 287 | Pseudomonas aeruginosa C2773C | C2773C | Proteobacteria | JGZW01000198.1 |
| 30 | GCA_000829885.1 | 287 | 287 | Pseudomonas aeruginosa | FRD1 | Proteobacteria | CP010555.1 |
| 31 | GCA_000981825.1 | 287 | 287 | Pseudomonas aeruginosa | Carb01 63 | Proteobacteria | CP011317.1 |
| 32 | GCA_000981825.1 | 287 | 287 | Pseudomonas aeruginosa | Carb01 63 | Proteobacteria | CP011317.1 |
| 33 | GCA_001180345.1 | 287 | 287 | Pseudomonas aeruginosa | P1_London_28_IMP_1_04_05 | Proteobacteria | CVUY01000300.1 |
| 34 | GCA_001180345.1 | 287 | 287 | Pseudomonas aeruginosa | P1_London_28_IMP_1_04_05 | Proteobacteria | CVUY01000281.1 |
| 35 | GCA_001180365.1 | 287 | 287 | Pseudomonas aeruginosa | P2_London_28_IMP_1_06_05 | Proteobacteria | CVWC01000358.1 |
| 36 | GCA_001180365.1 | 287 | 287 | Pseudomonas aeruginosa | P2_London_28_IMP_1_06_05 | Proteobacteria | CVWC01000094.1 |
| 37 | GCA_001180385.1 | 287 | 287 | Pseudomonas aeruginosa | P3_North_West_16_VIM_2_07_06 | Proteobacteria | CVVV01000260.1 |
| 38 | GCA_001180385.1 | 287 | 287 | Pseudomonas aeruginosa | P3_North_West_16_VIM_2_07_06 | Proteobacteria | CVVV01000250.1 |
| 39 | GCA_001180405.1 | 287 | 287 | Pseudomonas aeruginosa | P4_London_1_VIM_2_10_07 | Proteobacteria | CVWA01000298.1 |
| 40 | GCA_001180405.1 | 287 | 287 | Pseudomonas aeruginosa | P4_London_1_VIM_2_10_07 | Proteobacteria | CVWA01000358.1 |
| 41 | GCA_001180425.1 | 287 | 287 | Pseudomonas aeruginosa | P5_London_26_VIM_2_01_09 | Proteobacteria | CVWS01000233.1 |
| 42 | GCA_001180445.1 | 287 | 287 | Pseudomonas aeruginosa | E1_London_17_VIM_2_02_09 | Proteobacteria | CWGH01000216.1 |
| 43 | GCA_001180445.1 | 287 | 287 | Pseudomonas aeruginosa | E1_London_17_VIM_2_02_09 | Proteobacteria | CWGH01000243.1 |
| 44 | GCA_001180465.1 | 287 | 287 | Pseudomonas aeruginosa | E2_London_17_VIM_2_02_09 | Proteobacteria | CVUZ01000030.1 |
| 45 | GCA_001180485.1 | 287 | 287 | Pseudomonas aeruginosa | E3_London_17_VIM_2_03_09 | Proteobacteria | CVVB01000221.1 |
| 46 | GCA_001180485.1 | 287 | 287 | Pseudomonas aeruginosa | E3_London_17_VIM_2_03_09 | Proteobacteria | CVVB01000215.1 |
| 47 | GCA_001180505.1 | 287 | 287 | Pseudomonas aeruginosa | E4_London_17_VIM_2_03_09 | Proteobacteria | CVUK01000139.1 |
| 48 | GCA_001180505.1 | 287 | 287 | Pseudomonas aeruginosa | E4_London_17_VIM_2_03_09 | Proteobacteria | CVUK01000152.1 |
| 49 | GCA_001180525.1 | 287 | 287 | Pseudomonas aeruginosa | P6_East_of_England_6_IMP_1_03_09 | Proteobacteria | CWFP01000032.1 |
| 50 | GCA_001180525.1 | 287 | 287 | Pseudomonas aeruginosa | P6_East_of_England_6_IMP_1_03_09 | Proteobacteria | CWFP01000037.1 |
| 51 | GCA_001180545.1 | 287 | 287 | Pseudomonas aeruginosa | P7_London_17_VIM_2_06_09 | Proteobacteria | CVXP01000253.1 |
| 52 | GCA_001180545.1 | 287 | 287 | Pseudomonas aeruginosa | P7_London_17_VIM_2_06_09 | Proteobacteria | CVXP01000219.1 |
| 53 | GCA_001180565.1 | 287 | 287 | Pseudomonas aeruginosa | P8_1_South_East_10_VIM_2_07_09 | Proteobacteria | CWET01000247.1 |
| 54 | GCA_001180565.1 | 287 | 287 | Pseudomonas aeruginosa | P8_1_South_East_10_VIM_2_07_09 | Proteobacteria | CWET01000222.1 |
| 55 | GCA_001180585.1 | 287 | 287 | Pseudomonas aeruginosa | P9_East_of_England_6_IMP_13_08_09 | Proteobacteria | CWEU01000015.1 |
| 56 | GCA_001180585.1 | 287 | 287 | Pseudomonas aeruginosa | P9_East_of_England_6_IMP_13_08_09 | Proteobacteria | CWEU01000241.1 |
| 57 | GCA_001180605.1 | 287 | 287 | Pseudomonas aeruginosa | P10_London_6_VIM_2_09_09 | Proteobacteria | CVVA01000108.1 |
| 58 | GCA_001180605.1 | 287 | 287 | Pseudomonas aeruginosa | P10_London_6_VIM_2_09_09 | Proteobacteria | CVVA01000120.1 |
| 59 | GCA_001180625.1 | 287 | 287 | Pseudomonas aeruginosa | P11_London_17_VIM_2_10_09 | Proteobacteria | CVVH01000136.1 |
| 60 | GCA_001180625.1 | 287 | 287 | Pseudomonas aeruginosa | P11_London_17_VIM_2_10_09 | Proteobacteria | CVVH01000150.1 |
| 61 | GCA_001180645.1 | 287 | 287 | Pseudomonas aeruginosa | P12_London_17_VIM_2_11_09 | Proteobacteria | CVUP01000157.1 |
| 62 | GCA_001180645.1 | 287 | 287 | Pseudomonas aeruginosa | P12_London_17_VIM_2_11_09 | Proteobacteria | CVUP01000141.1 |
| 63 | GCA_001180665.1 | 287 | 287 | Pseudomonas aeruginosa | P13_London_14_VIM_2_12_09 | Proteobacteria | CVUL01000136.1 |
| 64 | GCA_001180665.1 | 287 | 287 | Pseudomonas aeruginosa | P13_London_14_VIM_2_12_09 | Proteobacteria | CVUL01000126.1 |
| 65 | GCA_001180685.1 | 287 | 287 | Pseudomonas aeruginosa | P14_London_17_VIM_2_01_10 | Proteobacteria | CVVT01000217.1 |
| 66 | GCA_001180685.1 | 287 | 287 | Pseudomonas aeruginosa | P14_London_17_VIM_2_01_10 | Proteobacteria | CVVT01000236.1 |
| 67 | GCA_001180705.1 | 287 | 287 | Pseudomonas aeruginosa | P15_London_17_02_10 | Proteobacteria | CVVW01000231.1 |
| 68 | GCA_001180705.1 | 287 | 287 | Pseudomonas aeruginosa | P15_London_17_02_10 | Proteobacteria | CVVW01000262.1 |
| 69 | GCA_001180725.1 | 287 | 287 | Pseudomonas aeruginosa | P16_Lonon_17_VIM_2_02_10 | Proteobacteria | CVVD01000204.1 |
| 70 | GCA_001180725.1 | 287 | 287 | Pseudomonas aeruginosa | P16_Lonon_17_VIM_2_02_10 | Proteobacteria | CVVD01000193.1 |
| 71 | GCA_001180745.1 | 287 | 287 | Pseudomonas aeruginosa | P17_North_West_14_VIM_2_03_10 | Proteobacteria | CVUV01000236.1 |
| 72 | GCA_001180745.1 | 287 | 287 | Pseudomonas aeruginosa | P17_North_West_14_VIM_2_03_10 | Proteobacteria | CVUV01000189.1 |
| 73 | GCA_001180765.1 | 287 | 287 | Pseudomonas aeruginosa | P18_London_17_VIM_2_04_10 | Proteobacteria | CVVY01000157.1 |
| 74 | GCA_001180765.1 | 287 | 287 | Pseudomonas aeruginosa | P18_London_17_VIM_2_04_10 | Proteobacteria | CVVY01000399.1 |
| 75 | GCA_001180785.1 | 287 | 287 | Pseudomonas aeruginosa | P19_London_7_VIM_2_05_10 | Proteobacteria | CVVU01000221.1 |
| 76 | GCA_001180785.1 | 287 | 287 | Pseudomonas aeruginosa | P19_London_7_VIM_2_05_10 | Proteobacteria | CVVU01000253.1 |
| 77 | GCA_001180805.1 | 287 | 287 | Pseudomonas aeruginosa | P20_London_17_VIM_2_05_10 | Proteobacteria | CVUO01000146.1 |
| 78 | GCA_001180805.1 | 287 | 287 | Pseudomonas aeruginosa | P20_London_17_VIM_2_05_10 | Proteobacteria | CVUO01000165.1 |
| 79 | GCA_001180825.1 | 287 | 287 | Pseudomonas aeruginosa | P21_London_17_VIM_2_06_10 | Proteobacteria | CVVE01000135.1 |
| 80 | GCA_001180825.1 | 287 | 287 | Pseudomonas aeruginosa | P21_London_17_VIM_2_06_10 | Proteobacteria | CVVE01000123.1 |
| 81 | GCA_001180845.1 | 287 | 287 | Pseudomonas aeruginosa | P22_London_17_VIM_2_06_10 | Proteobacteria | CVVI01000141.1 |
| 82 | GCA_001180845.1 | 287 | 287 | Pseudomonas aeruginosa | P22_London_17_VIM_2_06_10 | Proteobacteria | CVVI01000153.1 |
| 83 | GCA_001180865.1 | 287 | 287 | Pseudomonas aeruginosa | P23_East_of_England_6_IMP_13_07_10 | Proteobacteria | CVUU01000179.1 |
| 84 | GCA_001180865.1 | 287 | 287 | Pseudomonas aeruginosa | P23_East_of_England_6_IMP_13_07_10 | Proteobacteria | CVUU01000198.1 |
| 85 | GCA_001180885.1 | 287 | 287 | Pseudomonas aeruginosa | P24_London_17_VIM_2_08_10 | Proteobacteria | CVUR01000168.1 |
| 86 | GCA_001180885.1 | 287 | 287 | Pseudomonas aeruginosa | P24_London_17_VIM_2_08_10 | Proteobacteria | CVUR01000157.1 |
| 87 | GCA_001180905.1 | 287 | 287 | Pseudomonas aeruginosa | P25_London_12_VIM_2_08_10 | Proteobacteria | CVVL01000167.1 |
| 88 | GCA_001180905.1 | 287 | 287 | Pseudomonas aeruginosa | P25_London_12_VIM_2_08_10 | Proteobacteria | CVVL01000150.1 |
| 89 | GCA_001180925.1 | 287 | 287 | Pseudomonas aeruginosa | P26_Wales_1_VIM_2_11_10 | Proteobacteria | CVVN01000216.1 |
| 90 | GCA_001180925.1 | 287 | 287 | Pseudomonas aeruginosa | P26_Wales_1_VIM_2_11_10 | Proteobacteria | CVVN01000169.1 |
| 91 | GCA_001180945.1 | 287 | 287 | Pseudomonas aeruginosa | P27_Wales_1_VIM_2_02_11 | Proteobacteria | CVVX01000242.1 |
| 92 | GCA_001180945.1 | 287 | 287 | Pseudomonas aeruginosa | P27_Wales_1_VIM_2_02_11 | Proteobacteria | CVVX01000290.1 |
| 93 | GCA_001180965.1 | 287 | 287 | Pseudomonas aeruginosa | P28_London_17_02_11 | Proteobacteria | CVUQ01000182.1 |
| 94 | GCA_001180965.1 | 287 | 287 | Pseudomonas aeruginosa | P28_London_17_02_11 | Proteobacteria | CVUQ01000192.1 |
| 95 | GCA_001180985.1 | 287 | 287 | Pseudomonas aeruginosa | P29_London_12_VIM_2_05_11 | Proteobacteria | CVVO01000189.1 |
| 96 | GCA_001180985.1 | 287 | 287 | Pseudomonas aeruginosa | P29_London_12_VIM_2_05_11 | Proteobacteria | CVVO01000175.1 |
| 97 | GCA_001181005.1 | 287 | 287 | Pseudomonas aeruginosa | P30_South_East_2_VIM_2_10_11 | Proteobacteria | CVVK01000149.1 |
| 98 | GCA_001181005.1 | 287 | 287 | Pseudomonas aeruginosa | P30_South_East_2_VIM_2_10_11 | Proteobacteria | CVVK01000161.1 |
| 99 | GCA_001181025.1 | 287 | 287 | Pseudomonas aeruginosa | P31_Wales_1_VIM_2_11_11 | Proteobacteria | CVVS01000268.1 |
| 100 | GCA_001181025.1 | 287 | 287 | Pseudomonas aeruginosa | P31_Wales_1_VIM_2_11_11 | Proteobacteria | CVVS01000311.1 |
| 101 | GCA_001181045.1 | 287 | 287 | Pseudomonas aeruginosa | P32_London_17_VIM_2_10_11 | Proteobacteria | CVVJ01000160.1 |
| 102 | GCA_001181045.1 | 287 | 287 | Pseudomonas aeruginosa | P32_London_17_VIM_2_10_11 | Proteobacteria | CVVJ01000144.1 |
| 103 | GCA_001181065.1 | 287 | 287 | Pseudomonas aeruginosa | P33_London_28_VIM_2_02_12 | Proteobacteria | CVVG01000131.1 |
| 104 | GCA_001181065.1 | 287 | 287 | Pseudomonas aeruginosa | P33_London_28_VIM_2_02_12 | Proteobacteria | CVVG01000143.1 |
| 105 | GCA_001181085.1 | 287 | 287 | Pseudomonas aeruginosa | P34_London_28_VIM_2_02_12 | Proteobacteria | CVVF01000155.1 |
| 106 | GCA_001181085.1 | 287 | 287 | Pseudomonas aeruginosa | P34_London_28_VIM_2_02_12 | Proteobacteria | CVVF01000134.1 |
| 107 | GCA_001181105.1 | 287 | 287 | Pseudomonas aeruginosa | P35_London_26_VIM_2_05_12 | Proteobacteria | CVUS01000188.1 |
| 108 | GCA_001181105.1 | 287 | 287 | Pseudomonas aeruginosa | P35_London_26_VIM_2_05_12 | Proteobacteria | CVUS01000164.1 |
| 109 | GCA_001181125.1 | 287 | 287 | Pseudomonas aeruginosa | P36_West_Midlands_5_VIM_2_06_12 | Proteobacteria | CVVP01000172.1 |
| 110 | GCA_001181125.1 | 287 | 287 | Pseudomonas aeruginosa | P36_West_Midlands_5_VIM_2_06_12 | Proteobacteria | CVVP01000215.1 |
| 111 | GCA_001181145.1 | 287 | 287 | Pseudomonas aeruginosa | P37_London_28_VIM_2_07_12 | Proteobacteria | CVUJ01000135.1 |
| 112 | GCA_001181145.1 | 287 | 287 | Pseudomonas aeruginosa | P37_London_28_VIM_2_07_12 | Proteobacteria | CVUJ01000152.1 |
| 113 | GCA_001181165.1 | 287 | 287 | Pseudomonas aeruginosa | P38_London_12_VIM_2_08_12 | Proteobacteria | CVUT01000161.1 |
| 114 | GCA_001181165.1 | 287 | 287 | Pseudomonas aeruginosa | P38_London_12_VIM_2_08_12 | Proteobacteria | CVUT01000152.1 |
| 115 | GCA_001181185.1 | 287 | 287 | Pseudomonas aeruginosa | P39_London_29_08_12 | Proteobacteria | CVVC01000121.1 |
| 116 | GCA_001181185.1 | 287 | 287 | Pseudomonas aeruginosa | P39_London_29_08_12 | Proteobacteria | CVVC01000131.1 |
| 117 | GCA_001181205.1 | 287 | 287 | Pseudomonas aeruginosa | P40_Scotland_4_VIM_2_09_12 | Proteobacteria | CVUM01000136.1 |
| 118 | GCA_001181205.1 | 287 | 287 | Pseudomonas aeruginosa | P40_Scotland_4_VIM_2_09_12 | Proteobacteria | CVUM01000124.1 |
| 119 | GCA_001181225.1 | 287 | 287 | Pseudomonas aeruginosa | P41_London_28_09_12 | Proteobacteria | CVVR01000160.1 |
| 120 | GCA_001181225.1 | 287 | 287 | Pseudomonas aeruginosa | P41_London_28_09_12 | Proteobacteria | CVVR01000143.1 |
| 121 | GCA_001181245.1 | 287 | 287 | Pseudomonas aeruginosa | P42_1_London_26_VIM_2_10_12 | Proteobacteria | CVWH01000143.1 |
| 122 | GCA_001181245.1 | 287 | 287 | Pseudomonas aeruginosa | P42_1_London_26_VIM_2_10_12 | Proteobacteria | CVWH01000149.1 |
| 123 | GCA_001181265.1 | 287 | 287 | Pseudomonas aeruginosa | P43_1_London_9_VIM_2_11_12 | Proteobacteria | CVWJ01000147.1 |
| 124 | GCA_001181265.1 | 287 | 287 | Pseudomonas aeruginosa | P43_1_London_9_VIM_2_11_12 | Proteobacteria | CVWJ01000137.1 |
| 125 | GCA_001181285.1 | 287 | 287 | Pseudomonas aeruginosa | P42_2_London_28_VIM_2_11_12 | Proteobacteria | CVWI01000128.1 |
| 126 | GCA_001181285.1 | 287 | 287 | Pseudomonas aeruginosa | P42_2_London_28_VIM_2_11_12 | Proteobacteria | CVWI01000133.1 |
| 127 | GCA_001181305.1 | 287 | 287 | Pseudomonas aeruginosa | P45_London_17_VIM_2_12_12 | Proteobacteria | CVWO01000030.1 |
| 128 | GCA_001181305.1 | 287 | 287 | Pseudomonas aeruginosa | P45_London_17_VIM_2_12_12 | Proteobacteria | CVWO01000099.1 |
| 129 | GCA_001181325.1 | 287 | 287 | Pseudomonas aeruginosa | E5_London_17_VIM_2_12_12 | Proteobacteria | CVWE01000133.1 |
| 130 | GCA_001181325.1 | 287 | 287 | Pseudomonas aeruginosa | E5_London_17_VIM_2_12_12 | Proteobacteria | CVWE01000188.1 |
| 131 | GCA_001181345.1 | 287 | 287 | Pseudomonas aeruginosa | E6_London_17_VIM_2_12_12 | Proteobacteria | CVWD01000029.1 |
| 132 | GCA_001181345.1 | 287 | 287 | Pseudomonas aeruginosa | E6_London_17_VIM_2_12_12 | Proteobacteria | CVWD01000443.1 |
| 133 | GCA_001181365.1 | 287 | 287 | Pseudomonas aeruginosa | P46_South_East_6_12_12 | Proteobacteria | CVWM01000196.1 |
| 134 | GCA_001181365.1 | 287 | 287 | Pseudomonas aeruginosa | P46_South_East_6_12_12 | Proteobacteria | CVWM01000176.1 |
| 135 | GCA_001181385.1 | 287 | 287 | Pseudomonas aeruginosa | P47_London_12_VIM_2_12_12 | Proteobacteria | CVWN01000372.1 |
| 136 | GCA_001181385.1 | 287 | 287 | Pseudomonas aeruginosa | P47_London_12_VIM_2_12_12 | Proteobacteria | CVWN01000371.1 |
| 137 | GCA_001181405.1 | 287 | 287 | Pseudomonas aeruginosa | P48_London_17_VIM_2_01_13 | Proteobacteria | CVWT01000099.1 |
| 138 | GCA_001181405.1 | 287 | 287 | Pseudomonas aeruginosa | P48_London_17_VIM_2_01_13 | Proteobacteria | CVWT01000133.1 |
| 139 | GCA_001181425.1 | 287 | 287 | Pseudomonas aeruginosa | P49_London_7_VIM_2_01_13 | Proteobacteria | CVWQ01000279.1 |
| 140 | GCA_001181425.1 | 287 | 287 | Pseudomonas aeruginosa | P49_London_7_VIM_2_01_13 | Proteobacteria | CVWQ01000286.1 |
| 141 | GCA_001181445.1 | 287 | 287 | Pseudomonas aeruginosa | P50_London_9_VIM_2_01_13 | Proteobacteria | CVWP01000147.1 |
| 142 | GCA_001181445.1 | 287 | 287 | Pseudomonas aeruginosa | P50_London_9_VIM_2_01_13 | Proteobacteria | CVWP01000136.1 |
| 143 | GCA_001181465.1 | 287 | 287 | Pseudomonas aeruginosa | P43_2_London_9_VIM_2_11_12 | Proteobacteria | CVWK01000146.1 |
| 144 | GCA_001181465.1 | 287 | 287 | Pseudomonas aeruginosa | P43_2_London_9_VIM_2_11_12 | Proteobacteria | CVWK01000139.1 |
| 145 | GCA_001181485.1 | 287 | 287 | Pseudomonas aeruginosa | P51_1_London_9_VIM_2_02_13 | Proteobacteria | CVWR01000277.1 |
| 146 | GCA_001181485.1 | 287 | 287 | Pseudomonas aeruginosa | P51_1_London_9_VIM_2_02_13 | Proteobacteria | CVWR01000249.1 |
| 147 | GCA_001181505.1 | 287 | 287 | Pseudomonas aeruginosa | E7_London_9_VIM_2_02_13 | Proteobacteria | CVWB01000104.1 |
| 148 | GCA_001181505.1 | 287 | 287 | Pseudomonas aeruginosa | E7_London_9_VIM_2_02_13 | Proteobacteria | CVWB01000325.1 |
| 149 | GCA_001181525.1 | 287 | 287 | Pseudomonas aeruginosa | P52_1_London_26_VIM_2_02_13 | Proteobacteria | CVWV01000212.1 |
| 150 | GCA_001181525.1 | 287 | 287 | Pseudomonas aeruginosa | P52_1_London_26_VIM_2_02_13 | Proteobacteria | CVWV01000231.1 |
| 151 | GCA_001181545.1 | 287 | 287 | Pseudomonas aeruginosa | P51_2_London_11_VIM_2_02_13 | Proteobacteria | CVWU01000143.1 |
| 152 | GCA_001181545.1 | 287 | 287 | Pseudomonas aeruginosa | P51_2_London_11_VIM_2_02_13 | Proteobacteria | CVWU01000157.1 |
| 153 | GCA_001181565.1 | 287 | 287 | Pseudomonas aeruginosa | P52_2_London_26_VIM_2_02_13 | Proteobacteria | CVWW01000197.1 |
| 154 | GCA_001181565.1 | 287 | 287 | Pseudomonas aeruginosa | P52_2_London_26_VIM_2_02_13 | Proteobacteria | CVWW01000223.1 |
| 155 | GCA_001181585.1 | 287 | 287 | Pseudomonas aeruginosa | P53_London_9_VIM_2_02_13 | Proteobacteria | CWER01000327.1 |
| 156 | GCA_001181585.1 | 287 | 287 | Pseudomonas aeruginosa | P53_London_9_VIM_2_02_13 | Proteobacteria | CWER01000323.1 |
| 157 | GCA_001181605.1 | 287 | 287 | Pseudomonas aeruginosa | P54_1_London_24_VIM_2_04_13 | Proteobacteria | CWFR01000366.1 |
| 158 | GCA_001181605.1 | 287 | 287 | Pseudomonas aeruginosa | P54_1_London_24_VIM_2_04_13 | Proteobacteria | CWFR01000421.1 |
| 159 | GCA_001181625.1 | 287 | 287 | Pseudomonas aeruginosa | E8_London_17_VIM_2_04_13 | Proteobacteria | CVUW01000183.1 |
| 160 | GCA_001181625.1 | 287 | 287 | Pseudomonas aeruginosa | E8_London_17_VIM_2_04_13 | Proteobacteria | CVUW01000203.1 |
| 161 | GCA_001181645.1 | 287 | 287 | Pseudomonas aeruginosa | E9_London_17_VIM_2_04_13 | Proteobacteria | CVUN01000148.1 |
| 162 | GCA_001181645.1 | 287 | 287 | Pseudomonas aeruginosa | E9_London_17_VIM_2_04_13 | Proteobacteria | CVUN01000161.1 |
| 163 | GCA_001181665.1 | 287 | 287 | Pseudomonas aeruginosa | P54_2_London_24_VIM_2_04_13 | Proteobacteria | CVXL01000226.1 |
| 164 | GCA_001181665.1 | 287 | 287 | Pseudomonas aeruginosa | P54_2_London_24_VIM_2_04_13 | Proteobacteria | CVXL01000242.1 |
| 165 | GCA_001181685.1 | 287 | 287 | Pseudomonas aeruginosa | P55_London_26_VIM_2_05_13 | Proteobacteria | CVWX01000125.1 |
| 166 | GCA_001181685.1 | 287 | 287 | Pseudomonas aeruginosa | P55_London_26_VIM_2_05_13 | Proteobacteria | CVWX01000140.1 |
| 167 | GCA_001181705.1 | 287 | 287 | Pseudomonas aeruginosa | E10_London_26_VIM_2_06_13 | Proteobacteria | CVVZ01000308.1 |
| 168 | GCA_001181705.1 | 287 | 287 | Pseudomonas aeruginosa | E10_London_26_VIM_2_06_13 | Proteobacteria | CVVZ01000025.1 |
| 169 | GCA_001181725.1 | 287 | 287 | Pseudomonas aeruginosa | E11_London_26_VIM_2_06_13 | Proteobacteria | CVVM01000142.1 |
| 170 | GCA_001181725.1 | 287 | 287 | Pseudomonas aeruginosa | E11_London_26_VIM_2_06_13 | Proteobacteria | CVVM01000156.1 |
| 171 | GCA_001181745.1 | 287 | 287 | Pseudomonas aeruginosa | E12_London_26_VIM_2_06_13 | Proteobacteria | CVUX01000216.1 |
| 172 | GCA_001181745.1 | 287 | 287 | Pseudomonas aeruginosa | E12_London_26_VIM_2_06_13 | Proteobacteria | CVUX01000199.1 |
| 173 | GCA_001181765.1 | 287 | 287 | Pseudomonas aeruginosa | E13_London_26_VIM_2_06_13 | Proteobacteria | CVVQ01000190.1 |
| 174 | GCA_001181765.1 | 287 | 287 | Pseudomonas aeruginosa | E13_London_26_VIM_2_06_13 | Proteobacteria | CVVQ01000177.1 |
| 175 | GCA_001181785.1 | 287 | 287 | Pseudomonas aeruginosa | E14_London_26_VIM_2_06_13 | Proteobacteria | CWGG01000138.1 |
| 176 | GCA_001181785.1 | 287 | 287 | Pseudomonas aeruginosa | E14_London_26_VIM_2_06_13 | Proteobacteria | CWGG01000153.1 |
| 177 | GCA_001181805.1 | 287 | 287 | Pseudomonas aeruginosa | P56_London_12_VIM_2_07_13 | Proteobacteria | CVXC01000168.1 |
| 178 | GCA_001181805.1 | 287 | 287 | Pseudomonas aeruginosa | P56_London_12_VIM_2_07_13 | Proteobacteria | CVXC01000184.1 |
| 179 | GCA_001181825.1 | 287 | 287 | Pseudomonas aeruginosa | P8_2_London_17_VIM_2_07_13 | Proteobacteria | CVXH01000145.1 |
| 180 | GCA_001181825.1 | 287 | 287 | Pseudomonas aeruginosa | P8_2_London_17_VIM_2_07_13 | Proteobacteria | CVXH01000148.1 |
| 181 | GCA_001181845.1 | 287 | 287 | Pseudomonas aeruginosa | P57_South_East_3_VIM_2_09_13 | Proteobacteria | CVWZ01000144.1 |
| 182 | GCA_001181845.1 | 287 | 287 | Pseudomonas aeruginosa | P57_South_East_3_VIM_2_09_13 | Proteobacteria | CVWZ01000159.1 |
| 183 | GCA_001181865.1 | 287 | 287 | Pseudomonas aeruginosa | P58_London_29_09_13 | Proteobacteria | CVXA01000139.1 |
| 184 | GCA_001181865.1 | 287 | 287 | Pseudomonas aeruginosa | P58_London_29_09_13 | Proteobacteria | CVXA01000156.1 |
| 185 | GCA_001181885.1 | 287 | 287 | Pseudomonas aeruginosa | P59_Wales_1_VIM_2_09_13 | Proteobacteria | CVXN01000001.1 |
| 186 | GCA_001181885.1 | 287 | 287 | Pseudomonas aeruginosa | P59_Wales_1_VIM_2_09_13 | Proteobacteria | CVXN01000252.1 |
| 187 | GCA_001181905.1 | 287 | 287 | Pseudomonas aeruginosa | P60_London_6_VIM_2_11_13 | Proteobacteria | CVXD01000175.1 |
| 188 | GCA_001181905.1 | 287 | 287 | Pseudomonas aeruginosa | P60_London_6_VIM_2_11_13 | Proteobacteria | CVXD01000153.1 |
| 189 | GCA_001181925.1 | 287 | 287 | Pseudomonas aeruginosa | P61_London_9_VIM_2_11_13 | Proteobacteria | CVXB01000157.1 |
| 190 | GCA_001181925.1 | 287 | 287 | Pseudomonas aeruginosa | P61_London_9_VIM_2_11_13 | Proteobacteria | CVXB01000171.1 |
| 191 | GCA_001181945.1 | 287 | 287 | Pseudomonas aeruginosa | P64_East_of_England_6_01_14 | Proteobacteria | CWFQ01000009.1 |
| 192 | GCA_001181945.1 | 287 | 287 | Pseudomonas aeruginosa | P64_East_of_England_6_01_14 | Proteobacteria | CWFQ01000391.1 |
| 193 | GCA_001181965.1 | 287 | 287 | Pseudomonas aeruginosa | P62_London_9_VIM_2_01_14 | Proteobacteria | CWEO01000265.1 |
| 194 | GCA_001181965.1 | 287 | 287 | Pseudomonas aeruginosa | P62_London_9_VIM_2_01_14 | Proteobacteria | CWEO01000250.1 |
| 195 | GCA_001181985.1 | 287 | 287 | Pseudomonas aeruginosa | E15_London_28_01_14 | Proteobacteria | CVWF01000732.1 |
| 196 | GCA_001182005.1 | 287 | 287 | Pseudomonas aeruginosa | P63_London_25_VIM_2_03_14 | Proteobacteria | CWFH01000250.1 |
| 197 | GCA_001182005.1 | 287 | 287 | Pseudomonas aeruginosa | P63_London_25_VIM_2_03_14 | Proteobacteria | CWFH01000268.1 |
| 198 | GCA_001182025.1 | 287 | 287 | Pseudomonas aeruginosa | E16_London_17_VIM_2_04_14 | Proteobacteria | CVWG01001003.1 |
| 199 | GCA_001182025.1 | 287 | 287 | Pseudomonas aeruginosa | E16_London_17_VIM_2_04_14 | Proteobacteria | CVWG01000111.1 |
| 200 | GCA_001182945.1 | 287 | 287 | Pseudomonas aeruginosa | P44_Wales_1_VIM_2_11_12 | Proteobacteria | CVWL01000374.1 |
| 201 | GCA_001182945.1 | 287 | 287 | Pseudomonas aeruginosa | P44_Wales_1_VIM_2_11_12 | Proteobacteria | CVWL01000327.1 |
| 202 | GCA_001420185.1 | 287 | 287 | Pseudomonas aeruginosa | ATCC 33349 | Proteobacteria | LINV01000076.1 |
| 203 | GCA_001444845.1 | 287 | 287 | Pseudomonas aeruginosa | ATCC 33361 | Proteobacteria | LIZH01000277.1 |
| 204 | GCA_001444865.1 | 287 | 287 | Pseudomonas aeruginosa | ATCC 33362 | Proteobacteria | LIZI01000121.1 |
| 205 | GCA_001444975.1 | 287 | 287 | Pseudomonas aeruginosa | ATCC 33359 | Proteobacteria | LIZF01000253.1 |
| 206 | GCA_001444995.1 | 287 | 287 | Pseudomonas aeruginosa | ATCC 33360 | Proteobacteria | LIZG01000273.1 |
| 207 | GCA_001449385.1 | 287 | 287 | Pseudomonas aeruginosa | WH-SGI-V-07072 | Proteobacteria | LLLP01000007.1 |
| 208 | GCA_001449465.1 | 287 | 287 | Pseudomonas aeruginosa | WH-SGI-V-07165 | Proteobacteria | LLLU01000037.1 |
| 209 | GCA_001449505.1 | 287 | 287 | Pseudomonas aeruginosa | WH-SGI-V-07167 | Proteobacteria | LLLW01000014.1 |
| 210 | GCA_001449515.1 | 287 | 287 | Pseudomonas aeruginosa | WH-SGI-V-07168 | Proteobacteria | LLLX01000036.1 |
| 211 | GCA_001449515.1 | 287 | 287 | Pseudomonas aeruginosa | WH-SGI-V-07168 | Proteobacteria | LLLX01000030.1 |
| 212 | GCA_001449555.1 | 287 | 287 | Pseudomonas aeruginosa | WH-SGI-V-07171 | Proteobacteria | LLMA01000028.1 |
| 213 | GCA_001449555.1 | 287 | 287 | Pseudomonas aeruginosa | WH-SGI-V-07171 | Proteobacteria | LLMA01000003.1 |
| 214 | GCA_001449605.1 | 287 | 287 | Pseudomonas aeruginosa | WH-SGI-V-07174 | Proteobacteria | LLMD01000001.1 |
| 215 | GCA_001449605.1 | 287 | 287 | Pseudomonas aeruginosa | WH-SGI-V-07174 | Proteobacteria | LLMD01000070.1 |
| 216 | GCA_001449625.1 | 287 | 287 | Pseudomonas aeruginosa | WH-SGI-V-07175 | Proteobacteria | LLME01000030.1 |
| 217 | GCA_001449625.1 | 287 | 287 | Pseudomonas aeruginosa | WH-SGI-V-07175 | Proteobacteria | LLME01000022.1 |
| 218 | GCA_001449675.1 | 287 | 287 | Pseudomonas aeruginosa | WH-SGI-V-07180 | Proteobacteria | LLMJ01000031.1 |
| 219 | GCA_001449705.1 | 287 | 287 | Pseudomonas aeruginosa | WH-SGI-V-07221 | Proteobacteria | LLMK01000076.1 |
| 220 | GCA_001449705.1 | 287 | 287 | Pseudomonas aeruginosa | WH-SGI-V-07221 | Proteobacteria | LLMK01000071.1 |
| 221 | GCA_001450165.1 | 287 | 287 | Pseudomonas aeruginosa | WH-SGI-V-07370 | Proteobacteria | LLNU01000057.1 |
| 222 | GCA_001450275.1 | 287 | 287 | Pseudomonas aeruginosa | WH-SGI-V-07379 | Proteobacteria | LLOD01000041.1 |
| 223 | GCA_001450355.1 | 287 | 287 | Pseudomonas aeruginosa | WH-SGI-V-07055 | Proteobacteria | LLKZ01000040.1 |
| 224 | GCA_001450385.1 | 287 | 287 | Pseudomonas aeruginosa | WH-SGI-V-07065 | Proteobacteria | LLLC01000012.1 |
| 225 | GCA_001450465.1 | 287 | 287 | Pseudomonas aeruginosa | WH-SGI-V-07064 | Proteobacteria | LLLN01000006.1 |
| 226 | GCA_001450525.1 | 287 | 287 | Pseudomonas aeruginosa | WH-SGI-V-07173 | Proteobacteria | LLMC01000045.1 |
| 227 | GCA_001450525.1 | 287 | 287 | Pseudomonas aeruginosa | WH-SGI-V-07173 | Proteobacteria | LLMC01000054.1 |
| 228 | GCA_001450625.1 | 287 | 287 | Pseudomonas aeruginosa | WH-SGI-V-07185 | Proteobacteria | LLMP01000039.1 |
| 229 | GCA_001451065.1 | 287 | 287 | Pseudomonas aeruginosa | WH-SGI-V-07392 | Proteobacteria | LLOQ01000102.1 |
| 230 | GCA_001451075.1 | 287 | 287 | Pseudomonas aeruginosa | WH-SGI-V-07391 | Proteobacteria | LLOP01000052.1 |
| 231 | GCA_001451225.1 | 287 | 287 | Pseudomonas aeruginosa | WH-SGI-V-07415 | Proteobacteria | LLPC01000038.1 |
| 232 | GCA_001451505.1 | 287 | 287 | Pseudomonas aeruginosa | WH-SGI-V-07426 | Proteobacteria | LLPN01000122.1 |
| 233 | GCA_001451705.1 | 287 | 287 | Pseudomonas aeruginosa | WH-SGI-V-07491 | Proteobacteria | LLPX01000023.1 |
| 234 | GCA_001451805.1 | 287 | 287 | Pseudomonas aeruginosa | WH-SGI-V-07497 | Proteobacteria | LLQD01000079.1 |
| 235 | GCA_001451945.1 | 287 | 287 | Pseudomonas aeruginosa | WH-SGI-V-07618 | Proteobacteria | LLQP01000102.1 |
| 236 | GCA_001452185.1 | 287 | 287 | Pseudomonas aeruginosa | WH-SGI-V-07637 | Proteobacteria | LLRI01000005.1 |
| 237 | GCA_001452205.1 | 287 | 287 | Pseudomonas aeruginosa | WH-SGI-V-07640 | Proteobacteria | LLRL01000163.1 |
| 238 | GCA_001452365.1 | 287 | 287 | Pseudomonas aeruginosa | WH-SGI-V-07651 | Proteobacteria | LLRW01000066.1 |
| 239 | GCA_001452365.1 | 287 | 287 | Pseudomonas aeruginosa | WH-SGI-V-07651 | Proteobacteria | LLRW01000061.1 |
| 240 | GCA_001452385.1 | 287 | 287 | Pseudomonas aeruginosa | WH-SGI-V-07652 | Proteobacteria | LLRX01000045.1 |
| 241 | GCA_001452415.1 | 287 | 287 | Pseudomonas aeruginosa | WH-SGI-V-07681 | Proteobacteria | LLSB01000007.1 |
| 242 | GCA_001452465.1 | 287 | 287 | Pseudomonas aeruginosa | WH-SGI-V-07687 | Proteobacteria | LLSH01000054.1 |
| 243 | GCA_001452485.1 | 287 | 287 | Pseudomonas aeruginosa | WH-SGI-V-07688 | Proteobacteria | LLSI01000049.1 |
| 244 | GCA_001452485.1 | 287 | 287 | Pseudomonas aeruginosa | WH-SGI-V-07688 | Proteobacteria | LLSI01000001.1 |
| 245 | GCA_001452565.1 | 287 | 287 | Pseudomonas aeruginosa | WH-SGI-V-07693 | Proteobacteria | LLSN01000046.1 |
| 246 | GCA_001452645.1 | 287 | 287 | Pseudomonas aeruginosa | WH-SGI-V-07700 | Proteobacteria | LLSU01000053.1 |
| 247 | GCA_001452645.1 | 287 | 287 | Pseudomonas aeruginosa | WH-SGI-V-07700 | Proteobacteria | LLSU01000046.1 |
| 248 | GCA_001452665.1 | 287 | 287 | Pseudomonas aeruginosa | WH-SGI-V-07702 | Proteobacteria | LLSW01000054.1 |
| 249 | GCA_001452665.1 | 287 | 287 | Pseudomonas aeruginosa | WH-SGI-V-07702 | Proteobacteria | LLSW01000062.1 |
| 250 | GCA_001452765.1 | 287 | 287 | Pseudomonas aeruginosa | WH-SGI-V-07711 | Proteobacteria | LLTF01000239.1 |
| 251 | GCA_001452905.1 | 287 | 287 | Pseudomonas aeruginosa | WH-SGI-V-07253 | Proteobacteria | LLTN01000034.1 |
| 252 | GCA_001453015.1 | 287 | 287 | Pseudomonas aeruginosa | WH-SGI-V-07263 | Proteobacteria | LLTV01000056.1 |
| 253 | GCA_001453615.1 | 287 | 287 | Pseudomonas aeruginosa | WH-SGI-V-07684 | Proteobacteria | LLSE01000089.1 |
| 254 | GCA_001453755.1 | 287 | 287 | Pseudomonas aeruginosa | WH-SGI-V-07705 | Proteobacteria | LLSZ01000120.1 |
| 255 | GCA_001453855.1 | 287 | 287 | Pseudomonas aeruginosa | WH-SGI-V-07256 | Proteobacteria | LLTQ01000112.1 |
| 256 | GCA_001453855.1 | 287 | 287 | Pseudomonas aeruginosa | WH-SGI-V-07256 | Proteobacteria | LLTQ01000118.1 |
| 257 | GCA_001453885.1 | 287 | 287 | Pseudomonas aeruginosa | WH-SGI-V-07259 | Proteobacteria | LLTS01000104.1 |
| 258 | GCA_001453885.1 | 287 | 287 | Pseudomonas aeruginosa | WH-SGI-V-07259 | Proteobacteria | LLTS01000112.1 |
| 259 | GCA_001454125.1 | 287 | 287 | Pseudomonas aeruginosa | WH-SGI-V-07290 | Proteobacteria | LLUN01000012.1 |
| 260 | GCA_001454145.1 | 287 | 287 | Pseudomonas aeruginosa | WH-SGI-V-07291 | Proteobacteria | LLUO01000109.1 |
| 261 | GCA_001454205.1 | 287 | 287 | Pseudomonas aeruginosa | WH-SGI-V-07295 | Proteobacteria | LLUR01000002.1 |
| 262 | GCA_001454225.1 | 287 | 287 | Pseudomonas aeruginosa | WH-SGI-V-07296 | Proteobacteria | LLUS01000044.1 |
| 263 | GCA_001454225.1 | 287 | 287 | Pseudomonas aeruginosa | WH-SGI-V-07296 | Proteobacteria | LLUS01000001.1 |
| 264 | GCA_001454445.1 | 287 | 287 | Pseudomonas aeruginosa | WH-SGI-V-07322 | Proteobacteria | LLVI01000081.1 |
| 265 | GCA_001454445.1 | 287 | 287 | Pseudomonas aeruginosa | WH-SGI-V-07322 | Proteobacteria | LLVI01000088.1 |
| 266 | GCA_001454485.1 | 287 | 287 | Pseudomonas aeruginosa | WH-SGI-V-07324 | Proteobacteria | LLVK01000064.1 |
| 267 | GCA_001454485.1 | 287 | 287 | Pseudomonas aeruginosa | WH-SGI-V-07324 | Proteobacteria | LLVK01000044.1 |
| 268 | GCA_001454495.1 | 287 | 287 | Pseudomonas aeruginosa | WH-SGI-V-07325 | Proteobacteria | LLVL01000090.1 |
| 269 | GCA_001454495.1 | 287 | 287 | Pseudomonas aeruginosa | WH-SGI-V-07325 | Proteobacteria | LLVL01000001.1 |
| 270 | GCA_001454515.1 | 287 | 287 | Pseudomonas aeruginosa | WH-SGI-V-07328 | Proteobacteria | LLVO01000057.1 |
| 271 | GCA_001454515.1 | 287 | 287 | Pseudomonas aeruginosa | WH-SGI-V-07328 | Proteobacteria | LLVO01000082.1 |
| 272 | GCA_001454545.1 | 287 | 287 | Pseudomonas aeruginosa | WH-SGI-V-07329 | Proteobacteria | LLVP01000031.1 |
| 273 | GCA_001454545.1 | 287 | 287 | Pseudomonas aeruginosa | WH-SGI-V-07329 | Proteobacteria | LLVP01000037.1 |
| 274 | GCA_001454565.1 | 287 | 287 | Pseudomonas aeruginosa | WH-SGI-V-07330 | Proteobacteria | LLVQ01000079.1 |
| 275 | GCA_001454565.1 | 287 | 287 | Pseudomonas aeruginosa | WH-SGI-V-07330 | Proteobacteria | LLVQ01000086.1 |
| 276 | GCA_001454675.1 | 287 | 287 | Pseudomonas aeruginosa | WH-SGI-V-07287 | Proteobacteria | LLUM01000045.1 |
| 277 | GCA_001454805.1 | 287 | 287 | Pseudomonas aeruginosa | WH-SGI-V-07326 | Proteobacteria | LLVM01000239.1 |
| 278 | GCA_001454805.1 | 287 | 287 | Pseudomonas aeruginosa | WH-SGI-V-07326 | Proteobacteria | LLVM01000224.1 |
| 279 | GCA_001454825.1 | 287 | 287 | Pseudomonas aeruginosa | WH-SGI-V-07327 | Proteobacteria | LLVN01000114.1 |
| 280 | GCA_001454825.1 | 287 | 287 | Pseudomonas aeruginosa | WH-SGI-V-07327 | Proteobacteria | LLVN01000121.1 |
| 281 | GCA_001469695.1 | 287 | 287 | Pseudomonas aeruginosa | AATYA | Proteobacteria | LODN01000001.1 |
| 282 | GCA_001469695.1 | 287 | 287 | Pseudomonas aeruginosa | AATYA | Proteobacteria | LODN01000079.1 |
| 283 | GCA_001471355.1 | 287 | 287 | Pseudomonas aeruginosa | FDAARGOS_154 | Proteobacteria | LORM01000001.1 |
| 284 | GCA_001516165.1 | 287 | 287 | Pseudomonas aeruginosa | W16407 | Proteobacteria | CP008869.1 |
| 285 | GCA_001516245.1 | 287 | 287 | Pseudomonas aeruginosa | F23197 | Proteobacteria | CP008856.1 |
| 286 | GCA_001516265.1 | 287 | 287 | Pseudomonas aeruginosa | F30658 | Proteobacteria | CP008857.1 |
| 287 | GCA_001516265.1 | 287 | 287 | Pseudomonas aeruginosa | F30658 | Proteobacteria | CP008857.1 |
| 288 | GCA_001535675.1 | 287 | 287 | Pseudomonas aeruginosa | SPA01 | Proteobacteria | LQBU01000001.1 |
| 289 | GCA_001547575.1 | 287 | 287 | Pseudomonas aeruginosa | BH6 | Proteobacteria | LGVH01000140.1 |
| 290 | GCA_001560865.1 | 287 | 287 | Pseudomonas aeruginosa | 105777 | Proteobacteria | LODH01000011.1 |
| 291 | GCA_001601745.1 | 287 | 287 | Pseudomonas aeruginosa | 105819 | Proteobacteria | LOHH01000029.1 |
| 292 | GCA_000877315.1 | 292 | 292 | Burkholderia cepacia | LMG 16656 | Proteobacteria | JTDP01000004.1 |
| 293 | GCA_001522525.1 | 292 | 292 | Burkholderia cepacia | INT1-BP277 | Proteobacteria | LOTX01000037.1 |
| 294 | GCA_001523085.1 | 292 | 292 | Burkholderia cepacia | INT25-BP2 | Proteobacteria | LOUT01000007.1 |
| 295 | GCA_000237065.1 | 1114970 | 294 | Pseudomonas fluorescens F113 | F113 | Proteobacteria | CP003150.1 |
| 296 | GCA_000411675.1 | 1324332 | 294 | Pseudomonas fluorescens LMG 5329 | LMG 5329 | Proteobacteria | ASGY01000250.1 |
| 297 | GCA_001542695.1 | 294 | 294 | Pseudomonas fluorescens | Ps_20 | Proteobacteria | LCYD01000004.1 |
| 298 | GCA_000016865.1 | 351746 | 303 | Pseudomonas putida F1 | F1 | Proteobacteria | CP000712.1 |
| 299 | GCA_000264665.1 | 231023 | 303 | Pseudomonas putida ND6 | ND6 | Proteobacteria | CP003588.1 |
| 300 | GCA_000294445.2 | 1193146 | 303 | Pseudomonas putida LS46 | LS46 | Proteobacteria | ALPV02000008.1 |
| 301 | GCA_000325725.1 | 1215088 | 303 | Pseudomonas putida HB3267 | PC9 | Proteobacteria | CP003738.1 |
| 302 | GCA_001467305.1 | 303 | 303 | Pseudomonas putida | ABAC8 | Proteobacteria | LKGZ01000002.1 |
| 303 | GCA_000013785.1 | 379731 | 316 | Pseudomonas stutzeri A1501 | A1501 | Proteobacteria | CP000304.1 |
| 304 | GCA_000195105.1 | 996285 | 316 | Pseudomonas stutzeri DSM 4166 | DSM 4166 | Proteobacteria | CP002622.1 |
| 305 | GCA_000237885.2 | 32042 | 316 | Pseudomonas stutzeri ATCC 14405 = CCUG 16156 | CCUG16156 | Proteobacteria | AGSL01000126.1 |
| 306 | GCA_000267545.1 | 1196835 | 316 | Pseudomonas stutzeri CCUG 29243 | CCUG 29243 | Proteobacteria | CP003677.1 |
| 307 | GCA_000307775.2 | 1218352 | 316 | Pseudomonas stutzeri KOS6 | KOS6 | Proteobacteria | KK020678.1 |
| 308 | GCA_000416345.1 | 1212549 | 316 | Pseudomonas stutzeri B1SMN1 | B1SMN1 | Proteobacteria | AMVM01000007.1 |
| 309 | GCA_000416545.1 | 1194422 | 317 | Pseudomonas syringae pv. actinidiae ICMP 19098 | ICMP 19098 | Proteobacteria | AOKE01000198.1 |
| 310 | GCA_000416645.2 | 1194405 | 317 | Pseudomonas syringae pv. actinidiae ICMP 19096 | ICMP 19096 | Proteobacteria | AOKF01004024.1 |
| 311 | GCA_000416745.1 | 1194401 | 317 | Pseudomonas syringae pv. actinidiae ICMP 19094 | ICMP 19094 | Proteobacteria | AOKJ01000458.1 |
| 312 | GCA_000416765.1 | 1194403 | 317 | Pseudomonas syringae pv. actinidiae ICMP 19095 | ICMP 19095 | Proteobacteria | AOKI01000655.1 |
| 313 | GCA_000416785.2 | 1194402 | 317 | Pseudomonas syringae pv. actinidiae ICMP 18883 | ICMP 18883 | Proteobacteria | AOKH01000282.1 |
| 314 | GCA_000416805.1 | 1194421 | 317 | Pseudomonas syringae pv. actinidiae ICMP 19099 | ICMP 19099 | Proteobacteria | AOKD01000288.1 |
| 315 | GCA_000416825.2 | 1194420 | 317 | Pseudomonas syringae pv. actinidiae ICMP 19100 | ICMP 19100 | Proteobacteria | AOKC01000529.1 |
| 316 | GCA_000416905.2 | 1104682 | 317 | Pseudomonas syringae pv. actinidiae ICMP 18804 | ICMP 18804 | Proteobacteria | AOJU01004126.1 |
| 317 | GCA_000737235.1 | 317 | 317 | Pseudomonas syringae | CEB003 | Proteobacteria | JPQT01000163.1 |
| 318 | GCA_001467225.1 | 1208099 | 317 | Pseudomonas syringae pv. actinidiae ICMP 19497 | ICMP 19497 | Proteobacteria | LKBQ01000046.1 |
| 319 | GCA_000007145.1 | 190485 | 339 | Xanthomonas campestris pv. campestris str. ATCC 33913 | ATCC 33913 | Proteobacteria | AE008922.1 |
| 320 | GCA_000012105.1 | 314565 | 339 | Xanthomonas campestris pv. campestris str. 8004 | 8004 | Proteobacteria | CP000050.1 |
| 321 | GCA_001186415.1 | 340 | 339 | Xanthomonas campestris pv. campestris | ICMP 21080 | Proteobacteria | CP012145.1 |
| 322 | GCA_000018545.1 | 394 | 380 | Sinorhizobium fredii NGR234 | NGR234 | Proteobacteria | CP001389.1 |
| 323 | GCA_001510895.1 | 381 | 381 | Mesorhizobium loti | UFLA 01-765 | Proteobacteria | LPWA01000115.1 |
| 324 | GCA_001510895.1 | 381 | 381 | Mesorhizobium loti | UFLA 01-765 | Proteobacteria | LPWA01000098.1 |
| 325 | GCA_000985895.1 | 323655 | 399 | Neorhizobium galegae bv. orientalis | | Proteobacteria | CCRN01000010.1 |
| 326 | GCA_000021845.1 | 440085 | 408 | Methylobacterium extorquens CM4 | CM4 | Proteobacteria | CP001298.1 |
| 327 | GCA_000048665.1 | 297245 | 446 | Legionella pneumophila str. Lens | Lens | Proteobacteria | CR628337.1 |
| 328 | GCA_000306865.1 | 91891 | 446 | Legionella pneumophila subsp. pneumophila | Lorraine | Proteobacteria | FQ958210.1 |
| 329 | GCA_900048955.1 | 446 | 446 | Legionella pneumophila | 2532STDY5467593 | Proteobacteria | FJID01000003.1 |
| 330 | GCA_900048965.1 | 446 | 446 | Legionella pneumophila | 2532STDY5467557 | Proteobacteria | FJJD01000021.1 |
| 331 | GCA_900049285.1 | 446 | 446 | Legionella pneumophila | 2532STDY5467623 | Proteobacteria | FJLD01000023.1 |
| 332 | GCA_900049295.1 | 446 | 446 | Legionella pneumophila | 2532STDY5467622 | Proteobacteria | FJLF01000024.1 |
| 333 | GCA_900049305.1 | 446 | 446 | Legionella pneumophila | 2532STDY5467621 | Proteobacteria | FJLH01000015.1 |
| 334 | GCA_900049375.1 | 446 | 446 | Legionella pneumophila | 2532STDY5467550 | Proteobacteria | FJJA01000022.1 |
| 335 | GCA_900050245.1 | 446 | 446 | Legionella pneumophila | 2532STDY5467555 | Proteobacteria | FJJC01000012.1 |
| 336 | GCA_900051005.1 | 446 | 446 | Legionella pneumophila | 2532STDY5467663 | Proteobacteria | FJLJ01000022.1 |
| 337 | GCA_900051015.1 | 446 | 446 | Legionella pneumophila | 2531STDY5467451 | Proteobacteria | FJLL01000023.1 |
| 338 | GCA_900051745.1 | 446 | 446 | Legionella pneumophila | 2532STDY5467554 | Proteobacteria | FJJB01000022.1 |
| 339 | GCA_900052325.1 | 446 | 446 | Legionella pneumophila | 2532STDY5467604 | Proteobacteria | FJKF01000025.1 |
| 340 | GCA_900052335.1 | 446 | 446 | Legionella pneumophila | 2532STDY5467588 | Proteobacteria | FJKM01000021.1 |
| 341 | GCA_900052945.1 | 446 | 446 | Legionella pneumophila | 2532STDY5467560 | Proteobacteria | FJIL01000023.1 |
| 342 | GCA_900053425.1 | 446 | 446 | Legionella pneumophila | 2532STDY5467573 | Proteobacteria | FJJV01000023.1 |
| 343 | GCA_900053435.1 | 446 | 446 | Legionella pneumophila | 2532STDY5467568 | Proteobacteria | FJJX01000003.1 |
| 344 | GCA_900053445.1 | 446 | 446 | Legionella pneumophila | 2532STDY5467595 | Proteobacteria | FJJZ01000021.1 |
| 345 | GCA_900054165.1 | 446 | 446 | Legionella pneumophila | 2532STDY5467626 | Proteobacteria | FJHY01000004.1 |
| 346 | GCA_900054385.1 | 446 | 446 | Legionella pneumophila | 2531STDY5467312 | Proteobacteria | FJAT01000023.1 |
| 347 | GCA_900054395.1 | 446 | 446 | Legionella pneumophila | 2531STDY5467310 | Proteobacteria | FJBR01000001.1 |
| 348 | GCA_900054645.1 | 446 | 446 | Legionella pneumophila | 2532STDY5467583 | Proteobacteria | FJKP01000024.1 |
| 349 | GCA_900054655.1 | 446 | 446 | Legionella pneumophila | 2532STDY5467613 | Proteobacteria | FJKY01000028.1 |
| 350 | GCA_900054665.1 | 446 | 446 | Legionella pneumophila | 2532STDY5467610 | Proteobacteria | FJLB01000023.1 |
| 351 | GCA_900054675.1 | 446 | 446 | Legionella pneumophila | 2532STDY5467611 | Proteobacteria | FJLA01000022.1 |
| 352 | GCA_900054685.1 | 446 | 446 | Legionella pneumophila | 2532STDY5467619 | Proteobacteria | FJLG01000023.1 |
| 353 | GCA_900055215.1 | 446 | 446 | Legionella pneumophila | 2532STDY5467582 | Proteobacteria | FJKK01000023.1 |
| 354 | GCA_900055605.1 | 446 | 446 | Legionella pneumophila | 2532STDY5467580 | Proteobacteria | FJIF01000024.1 |
| 355 | GCA_900055615.1 | 446 | 446 | Legionella pneumophila | 2532STDY5467553 | Proteobacteria | FJIH01000023.1 |
| 356 | GCA_900055625.1 | 446 | 446 | Legionella pneumophila | 2532STDY5467571 | Proteobacteria | FJJY01000024.1 |
| 357 | GCA_900055635.1 | 446 | 446 | Legionella pneumophila | 2532STDY5467607 | Proteobacteria | FJLC01000024.1 |
| 358 | GCA_900056195.1 | 446 | 446 | Legionella pneumophila | 2532STDY5467551 | Proteobacteria | FJJP01000022.1 |
| 359 | GCA_900056205.1 | 446 | 446 | Legionella pneumophila | 2532STDY5467617 | Proteobacteria | FJKS01000024.1 |
| 360 | GCA_900056215.1 | 446 | 446 | Legionella pneumophila | 2532STDY5467616 | Proteobacteria | FJKT01000023.1 |
| 361 | GCA_900056935.1 | 446 | 446 | Legionella pneumophila | 2532STDY5467541 | Proteobacteria | FJJR01000023.1 |
| 362 | GCA_900056945.1 | 446 | 446 | Legionella pneumophila | 2532STDY5467540 | Proteobacteria | FJJU01000024.1 |
| 363 | GCA_900057265.1 | 446 | 446 | Legionella pneumophila | 2532STDY5467592 | Proteobacteria | FJKR01000024.1 |
| 364 | GCA_900057575.1 | 446 | 446 | Legionella pneumophila | 2532STDY5467547 | Proteobacteria | FJIP01000023.1 |
| 365 | GCA_900057585.1 | 446 | 446 | Legionella pneumophila | 2532STDY5467543 | Proteobacteria | FJJT01000023.1 |
| 366 | GCA_900057595.1 | 446 | 446 | Legionella pneumophila | 2532STDY5467574 | Proteobacteria | FJKC01000003.1 |
| 367 | GCA_900057605.1 | 446 | 446 | Legionella pneumophila | 2532STDY5467625 | Proteobacteria | FJKU01000024.1 |
| 368 | GCA_900057615.1 | 446 | 446 | Legionella pneumophila | 2531STDY5467449 | Proteobacteria | FJLM01000024.1 |
| 369 | GCA_900057785.1 | 446 | 446 | Legionella pneumophila | 2532STDY5467576 | Proteobacteria | FJIA01000024.1 |
| 370 | GCA_900058605.1 | 446 | 446 | Legionella pneumophila | 2532STDY5467563 | Proteobacteria | FJJL01000023.1 |
| 371 | GCA_900058825.1 | 446 | 446 | Legionella pneumophila | 2532STDY5467600 | Proteobacteria | FJIT01000024.1 |
| 372 | GCA_900058835.1 | 446 | 446 | Legionella pneumophila | 2532STDY5467548 | Proteobacteria | FJIZ01000023.1 |
| 373 | GCA_900059595.1 | 446 | 446 | Legionella pneumophila | 2532STDY5467603 | Proteobacteria | FJKE01000023.1 |
| 374 | GCA_900059605.1 | 446 | 446 | Legionella pneumophila | 2532STDY5467614 | Proteobacteria | FJKV01000024.1 |
| 375 | GCA_900060005.1 | 446 | 446 | Legionella pneumophila | 2532STDY5467535 | Proteobacteria | FJIG01000023.1 |
| 376 | GCA_900060015.1 | 446 | 446 | Legionella pneumophila | 2532STDY5467596 | Proteobacteria | FJJG01000023.1 |
| 377 | GCA_900060415.1 | 446 | 446 | Legionella pneumophila | 2532STDY5467542 | Proteobacteria | FJII01000024.1 |
| 378 | GCA_900060425.1 | 446 | 446 | Legionella pneumophila | 2532STDY5467549 | Proteobacteria | FJIJ01000024.1 |
| 379 | GCA_900060435.1 | 446 | 446 | Legionella pneumophila | 2532STDY5467544 | Proteobacteria | FJIK01000023.1 |
| 380 | GCA_900060445.1 | 446 | 446 | Legionella pneumophila | 2532STDY5467537 | Proteobacteria | FJIM01000023.1 |
| 381 | GCA_900060455.1 | 446 | 446 | Legionella pneumophila | 2532STDY5467584 | Proteobacteria | FJKQ01000023.1 |
| 382 | GCA_900060775.1 | 446 | 446 | Legionella pneumophila | 2532STDY5467627 | Proteobacteria | FJIS01000025.1 |
| 383 | GCA_900060785.1 | 446 | 446 | Legionella pneumophila | 2532STDY5467556 | Proteobacteria | FJJF01000024.1 |
| 384 | GCA_900061535.1 | 446 | 446 | Legionella pneumophila | 2531STDY5467351 | Proteobacteria | FJCL01000024.1 |
| 385 | GCA_900062525.1 | 446 | 446 | Legionella pneumophila | 2531STDY5467450 | Proteobacteria | FJHW01000004.1 |
| 386 | GCA_900062535.1 | 446 | 446 | Legionella pneumophila | 2532STDY5467575 | Proteobacteria | FJHX01000023.1 |
| 387 | GCA_900062545.1 | 446 | 446 | Legionella pneumophila | 2532STDY5467591 | Proteobacteria | FJHZ01000023.1 |
| 388 | GCA_900062555.1 | 446 | 446 | Legionella pneumophila | 2532STDY5467578 | Proteobacteria | FJIB01000025.1 |
| 389 | GCA_900062565.1 | 446 | 446 | Legionella pneumophila | 2532STDY5467581 | Proteobacteria | FJIC01000024.1 |
| 390 | GCA_900062575.1 | 446 | 446 | Legionella pneumophila | 2532STDY5467577 | Proteobacteria | FJIE01000004.1 |
| 391 | GCA_900062585.1 | 446 | 446 | Legionella pneumophila | 2532STDY5467546 | Proteobacteria | FJIN01000024.1 |
| 392 | GCA_900062595.1 | 446 | 446 | Legionella pneumophila | 2532STDY5467565 | Proteobacteria | FJIO01000024.1 |
| 393 | GCA_900062605.1 | 446 | 446 | Legionella pneumophila | 2532STDY5467561 | Proteobacteria | FJIR01000021.1 |
| 394 | GCA_900062615.1 | 446 | 446 | Legionella pneumophila | 2532STDY5467559 | Proteobacteria | FJIQ01000021.1 |
| 395 | GCA_900062625.1 | 446 | 446 | Legionella pneumophila | 2532STDY5467628 | Proteobacteria | FJIU01000023.1 |
| 396 | GCA_900062635.1 | 446 | 446 | Legionella pneumophila | 2532STDY5467538 | Proteobacteria | FJIY01000023.1 |
| 397 | GCA_900062645.1 | 446 | 446 | Legionella pneumophila | 2532STDY5467545 | Proteobacteria | FJIX01000022.1 |
| 398 | GCA_900062655.1 | 446 | 446 | Legionella pneumophila | 2532STDY5467602 | Proteobacteria | FJJH01000024.1 |
| 399 | GCA_900062665.1 | 446 | 446 | Legionella pneumophila | 2532STDY5467562 | Proteobacteria | FJJI01000022.1 |
| 400 | GCA_900062675.1 | 446 | 446 | Legionella pneumophila | 2532STDY5467539 | Proteobacteria | FJJJ01000022.1 |
| 401 | GCA_900062685.1 | 446 | 446 | Legionella pneumophila | 2532STDY5467566 | Proteobacteria | FJJK01000024.1 |
| 402 | GCA_900062695.1 | 446 | 446 | Legionella pneumophila | 2532STDY5467572 | Proteobacteria | FJJM01000023.1 |
| 403 | GCA_900062705.1 | 446 | 446 | Legionella pneumophila | 2532STDY5467608 | Proteobacteria | FJJO01000023.1 |
| 404 | GCA_900062715.1 | 446 | 446 | Legionella pneumophila | 2532STDY5467564 | Proteobacteria | FJJN01000023.1 |
| 405 | GCA_900062725.1 | 446 | 446 | Legionella pneumophila | 2532STDY5467586 | Proteobacteria | FJJQ01000024.1 |
| 406 | GCA_900062735.1 | 446 | 446 | Legionella pneumophila | 2532STDY5467567 | Proteobacteria | FJJW01000021.1 |
| 407 | GCA_900062745.1 | 446 | 446 | Legionella pneumophila | 2532STDY5467598 | Proteobacteria | FJKA01000023.1 |
| 408 | GCA_900062755.1 | 446 | 446 | Legionella pneumophila | 2532STDY5467585 | Proteobacteria | FJKB01000023.1 |
| 409 | GCA_900063115.1 | 446 | 446 | Legionella pneumophila | 2532STDY5467558 | Proteobacteria | FJJS01000025.1 |
| 410 | GCA_900063125.1 | 446 | 446 | Legionella pneumophila | 2532STDY5467615 | Proteobacteria | FJKW01000024.1 |
| 411 | GCA_900063135.1 | 446 | 446 | Legionella pneumophila | 2532STDY5467587 | Proteobacteria | FJKZ01000024.1 |
| 412 | GCA_900063145.1 | 446 | 446 | Legionella pneumophila | 2532STDY5467612 | Proteobacteria | FJKX01000024.1 |
| 413 | GCA_900063835.1 | 446 | 446 | Legionella pneumophila | 2532STDY5467552 | Proteobacteria | FJJE01000022.1 |
| 414 | GCA_900063845.1 | 446 | 446 | Legionella pneumophila | 2532STDY5467605 | Proteobacteria | FJKD01000023.1 |
| 415 | GCA_900063855.1 | 446 | 446 | Legionella pneumophila | 2532STDY5467597 | Proteobacteria | FJKG01000023.1 |
| 416 | GCA_900063865.1 | 446 | 446 | Legionella pneumophila | 2532STDY5467594 | Proteobacteria | FJKH01000022.1 |
| 417 | GCA_900063875.1 | 446 | 446 | Legionella pneumophila | 2532STDY5467589 | Proteobacteria | FJKN01000025.1 |
| 418 | GCA_900063885.1 | 446 | 446 | Legionella pneumophila | 2532STDY5467601 | Proteobacteria | FJKO01000022.1 |
| 419 | GCA_900063895.1 | 446 | 446 | Legionella pneumophila | 2532STDY5467620 | Proteobacteria | FJLE01000025.1 |
| 420 | GCA_900064205.1 | 446 | 446 | Legionella pneumophila | 2532STDY5467618 | Proteobacteria | FJLI01000003.1 |
| 421 | GCA_900064315.1 | 446 | 446 | Legionella pneumophila | 2532STDY5467599 | Proteobacteria | FJKJ01000024.1 |
| 422 | GCA_900064325.1 | 446 | 446 | Legionella pneumophila | 2532STDY5467606 | Proteobacteria | FJKL01000024.1 |
| 423 | GCA_900064495.1 | 446 | 446 | Legionella pneumophila | 2532STDY5467534 | Proteobacteria | FJIW01000023.1 |
| 424 | GCA_900064755.1 | 446 | 446 | Legionella pneumophila | 2532STDY5467579 | Proteobacteria | FJIV01000020.1 |
| 425 | GCA_900064765.1 | 446 | 446 | Legionella pneumophila | 2532STDY5467590 | Proteobacteria | FJKI01000024.1 |
| 426 | GCA_900073005.1 | 446 | 446 | Legionella pneumophila | LP_617 | Proteobacteria | FJOC01000028.1 |
| 427 | GCA_001467765.1 | 456 | 456 | Legionella jordanis | BL-540 | Proteobacteria | LNYJ01000003.1 |
| 428 | GCA_000353775.1 | 1094483 | 470 | Acinetobacter baumannii ABNIH19 | ABNIH19 | Proteobacteria | APBH01000063.1 |
| 429 | GCA_000353955.1 | 1094470 | 470 | Acinetobacter baumannii ABNIH6 | ABNIH6 | Proteobacteria | APAX01000087.1 |
| 430 | GCA_000353975.1 | 1094471 | 470 | Acinetobacter baumannii ABNIH7 | ABNIH7 | Proteobacteria | APAY01000451.1 |
| 431 | GCA_000353995.1 | 1094474 | 470 | Acinetobacter baumannii ABNIH10 | ABNIH10 | Proteobacteria | APAZ01000253.1 |
| 432 | GCA_000354015.1 | 1094475 | 470 | Acinetobacter baumannii ABNIH11 | ABNIH11 | Proteobacteria | APBA01000112.1 |
| 433 | GCA_000580595.1 | 1310619 | 470 | Acinetobacter baumannii 1419130 | 1419130 | Proteobacteria | JEWL01000035.1 |
| 434 | GCA_000580635.1 | 1310647 | 470 | Acinetobacter baumannii 1461402 | 1461402 | Proteobacteria | JEWP01000001.1 |
| 435 | GCA_000580875.1 | 1310613 | 470 | Acinetobacter baumannii 1295743 | 1295743 | Proteobacteria | JEWH01000023.1 |
| 436 | GCA_000580995.1 | 1310611 | 470 | Acinetobacter baumannii 466760 | 466760 | Proteobacteria | JEXB01000001.1 |
| 437 | GCA_000581195.1 | 1310651 | 470 | Acinetobacter baumannii 230853 | 230853 | Proteobacteria | JEWW01000002.1 |
| 438 | GCA_000582235.1 | 1310680 | 470 | Acinetobacter baumannii 1239920 | 1239920 | Proteobacteria | JEXZ01000002.1 |
| 439 | GCA_000582255.1 | 1310683 | 470 | Acinetobacter baumannii 1566109 | 1566109 | Proteobacteria | JEYB01000087.1 |
| 440 | GCA_000682355.1 | 1310685 | 470 | Acinetobacter baumannii 72431 | 72431 | Proteobacteria | JMNZ01000050.1 |
| 441 | GCA_000805365.1 | 470 | 470 | Acinetobacter baumannii | 1 | Proteobacteria | JSAO01000006.1 |
| 442 | GCA_001028315.1 | 1409926 | 470 | Acinetobacter baumannii MRSN 58 | MRSN 58 | Proteobacteria | JPHW01000032.1 |
| 443 | GCA_001432425.1 | 470 | 470 | Acinetobacter baumannii | ABBL014 | Proteobacteria | LLCU01000093.1 |
| 444 | GCA_001433005.1 | 470 | 470 | Acinetobacter baumannii | ABBL038 | Proteobacteria | LLDS01000053.1 |
| 445 | GCA_001578145.1 | 470 | 470 | Acinetobacter baumannii | XH858 | Proteobacteria | CP014528.1 |
| 446 | GCA_000690355.2 | 1458258 | 518 | Bordetella bronchiseptica B18-5 (C3) | B18-5 (C3) | Proteobacteria | JGWP01000092.1 |
| 447 | GCA_000690635.1 | 1331233 | 518 | Bordetella bronchiseptica MBORD762 | MBORD762 | Proteobacteria | JHBR01000046.1 |
| 448 | GCA_000024245.1 | 622759 | 542 | Zymomonas mobilis subsp. mobilis NCIMB 11163 | NCIMB 11163 | Proteobacteria | CP001723.1 |
| 449 | GCA_000218875.1 | 579138 | 542 | Zymomonas mobilis subsp. pomaceae ATCC 29192 | ATCC 29192 | Proteobacteria | CP002866.1 |
| 450 | GCA_001472275.1 | 548 | 548 | Enterobacter aerogenes | SMART_429 | Proteobacteria | LPQB01000006.1 |
| 451 | GCA_001518035.1 | 548 | 548 | Enterobacter aerogenes | GN02710 | Proteobacteria | LRCB01000137.1 |
| 452 | GCA_000743785.2 | 549 | 549 | Pantoea agglomerans | 4 | Proteobacteria | JPOT02000001.1 |
| 453 | GCA_000286275.1 | 1211025 | 550 | Enterobacter cloacae subsp. cloacae ENHKU01 | ENHKU01 | Proteobacteria | CP003737.1 |
| 454 | GCA_000496775.1 | 1399146 | 550 | Enterobacter cloacae S611 | S611 | Proteobacteria | AXOM01000016.1 |
| 455 | GCA_000534275.1 | 1400147 | 550 | Enterobacter cloacae UCI 24 | UCI 24 | Proteobacteria | KI973153.1 |
| 456 | GCA_000692355.1 | 1400148 | 550 | Enterobacter cloacae UCI 29 | UCI 29 | Proteobacteria | KK736271.1 |
| 457 | GCA_000784865.1 | 550 | 550 | Enterobacter cloacae | ECNIH4 | Proteobacteria | CP009850.1 |
| 458 | GCA_000965825.1 | 550 | 550 | Enterobacter cloacae | CIDEIMsCOL5 | Proteobacteria | JZKP01000063.1 |
| 459 | GCA_000966005.1 | 550 | 550 | Enterobacter cloacae | CIDEIMsCOL4 | Proteobacteria | JZKO01000065.1 |
| 460 | GCA_001317225.1 | 336306 | 550 | Enterobacter cloacae subsp. cloacae | ST434:953099839 | Proteobacteria | LIEW01000028.1 |
| 461 | GCA_001441705.1 | 550 | 550 | Enterobacter cloacae | 8706 | Proteobacteria | LLXN01000108.1 |
| 462 | GCA_001518525.1 | 550 | 550 | Enterobacter cloacae | GN02618 | Proteobacteria | LRBY01000003.1 |
| 463 | GCA_000270125.2 | 932677 | 553 | Pantoea ananatis AJ13355 | AJ13355 | Proteobacteria | AP012032.2 |
| 464 | GCA_000283875.1 | 1123863 | 553 | Pantoea ananatis LMG 5342 | LMG 5342 | Proteobacteria | HE617160.1 |
| 465 | GCA_000294535.1 | 1218933 | 554 | Pectobacterium carotovorum subsp. carotovorum PCC21 | PCC21 | Proteobacteria | CP003776.1 |
| 466 | GCA_000808145.1 | 180957 | 554 | Pectobacterium carotovorum subsp. brasiliense | YC D62 | Proteobacteria | JUJD01000008.1 |
| 467 | GCA_000808295.1 | 180957 | 554 | Pectobacterium carotovorum subsp. brasiliense | YC T31 | Proteobacteria | JUJL01000008.1 |
| 468 | GCA_000808315.1 | 180957 | 554 | Pectobacterium carotovorum subsp. brasiliense | YC T3 | Proteobacteria | JUJM01000011.1 |
| 469 | GCA_000017745.1 | 331111 | 562 | Escherichia coli O139:H28 str. E24377A | E24377A | Proteobacteria | CP000800.1 |
| 470 | GCA_000267025.1 | 1005535 | 562 | Escherichia coli EC1738 | EC1738 | Proteobacteria | AKMN01000044.1 |
| 471 | GCA_000267865.2 | 1005494 | 562 | Escherichia coli PA10 | PA10 | Proteobacteria | JH708741.1 |
| 472 | GCA_000304875.2 | 1005452 | 562 | Escherichia coli 5.2239 | 5.2239 | Proteobacteria | JH970984.1 |
| 473 | GCA_000316885.2 | 1005408 | 562 | Escherichia coli 95.0943 | 95.0943 | Proteobacteria | KB000904.1 |
| 474 | GCA_000335135.1 | 1005439 | 562 | Escherichia coli 99.1781 | 99.1781 | Proteobacteria | AOEQ01000009.1 |
| 475 | GCA_000335295.2 | 1005440 | 562 | Escherichia coli 99.1753 | 99.1753 | Proteobacteria | AOED01000081.1 |
| 476 | GCA_000335315.2 | 1005438 | 562 | Escherichia coli 99.1775 | 99.1775 | Proteobacteria | AOEE01000071.1 |
| 477 | GCA_000340455.2 | 1081887 | 562 | Escherichia coli 09BKT078844 | 09BKT078844 | Proteobacteria | KB452795.1 |
| 478 | GCA_000351585.1 | 1182667 | 562 | Escherichia coli KTE60 | KTE60 | Proteobacteria | KB732732.1 |
| 479 | GCA_000352105.1 | 1169329 | 562 | Escherichia coli KTE9 | KTE9 | Proteobacteria | KB732995.1 |
| 480 | GCA_000357165.1 | 1116056 | 562 | Escherichia coli P0299917.10 | P0299917.10 | Proteobacteria | APYK01000102.1 |
| 481 | GCA_000357185.2 | 1116048 | 562 | Escherichia coli P0299917.2 | P0299917.2 | Proteobacteria | APYL01000006.1 |
| 482 | GCA_000357205.2 | 1116049 | 562 | Escherichia coli P0299917.3 | P0299917.3 | Proteobacteria | APYM01000020.1 |
| 483 | GCA_000357305.2 | 1116050 | 562 | Escherichia coli P0299917.4 | P0299917.4 | Proteobacteria | APYN01000006.1 |
| 484 | GCA_000357325.1 | 1116051 | 562 | Escherichia coli P0299917.5 | P0299917.5 | Proteobacteria | APYO01000007.1 |
| 485 | GCA_000357345.2 | 1116052 | 562 | Escherichia coli P0299917.6 | P0299917.6 | Proteobacteria | APYP01000006.1 |
| 486 | GCA_000357365.2 | 1116053 | 562 | Escherichia coli P0299917.7 | P0299917.7 | Proteobacteria | APYQ01000007.1 |
| 487 | GCA_000357505.2 | 1116055 | 562 | Escherichia coli P0299917.9 | P0299917.9 | Proteobacteria | APYS01000112.1 |
| 488 | GCA_000357685.2 | 1125651 | 562 | Escherichia coli P0304799.3 | P0304799.3 | Proteobacteria | APZX01000274.1 |
| 489 | GCA_000358795.2 | 1116054 | 562 | Escherichia coli P0299917.8 | P0299917.8 | Proteobacteria | APYR01000109.1 |
| 490 | GCA_000398885.1 | 1169351 | 562 | Escherichia coli KTE33 | KTE33 | Proteobacteria | KB976087.1 |
| 491 | GCA_000459555.1 | 1281153 | 562 | Escherichia coli KOEGE 3 (4a) | KOEGE 3 (4a) | Proteobacteria | KE701179.1 |
| 492 | GCA_000459855.1 | 1281168 | 562 | Escherichia coli KOEGE 71 (186a) | KOEGE 71 (186a) | Proteobacteria | KE701379.1 |
| 493 | GCA_000459915.1 | 1281171 | 562 | Escherichia coli KOEGE 118 (317a) | KOEGE 118 (317a) | Proteobacteria | KE701414.1 |
| 494 | GCA_000460355.1 | 1281194 | 562 | Escherichia coli UMEA 3151-1 | UMEA 3151-1 | Proteobacteria | KE701683.1 |
| 495 | GCA_000461795.1 | 1281275 | 562 | Escherichia coli UMEA 3899-1 | UMEA 3899-1 | Proteobacteria | KE702684.1 |
| 496 | GCA_000461915.2 | 1151226 | 562 | Escherichia coli B26-2 | B26-2 | Proteobacteria | AVQV01000011.1 |
| 497 | GCA_000461955.2 | 1151213 | 562 | Escherichia coli B102 | B102 | Proteobacteria | AVQS01000034.1 |
| 498 | GCA_000461995.2 | 1151214 | 562 | Escherichia coli B107 | B107 | Proteobacteria | AVQT01000036.1 |
| 499 | GCA_000462025.2 | 1151225 | 562 | Escherichia coli B26-1 | B26-1 | Proteobacteria | AVQU01000037.1 |
| 500 | GCA_000462485.2 | 1151234 | 562 | Escherichia coli B103 | B103 | Proteobacteria | AVRS01000033.1 |
| 501 | GCA_000462505.2 | 1151243 | 562 | Escherichia coli B104 | B104 | Proteobacteria | AVRT01000033.1 |
| 502 | GCA_000462525.2 | 1151247 | 562 | Escherichia coli B105 | B105 | Proteobacteria | AVRU01000004.1 |
| 503 | GCA_000462545.2 | 1151248 | 562 | Escherichia coli B106 | B106 | Proteobacteria | AVRV01000031.1 |
| 504 | GCA_000462685.2 | 1151227 | 562 | Escherichia coli B40-1 | B40-1 | Proteobacteria | AVSD01000007.1 |
| 505 | GCA_000462705.2 | 1151228 | 562 | Escherichia coli B40-2 | B40-2 | Proteobacteria | AVSE01000035.1 |
| 506 | GCA_000462725.2 | 1151246 | 562 | Escherichia coli B49-2 | B49-2 | Proteobacteria | AVSF01000004.1 |
| 507 | GCA_000462765.2 | 1151239 | 562 | Escherichia coli B83 | B83 | Proteobacteria | AVSH01000033.1 |
| 508 | GCA_000462785.2 | 1151240 | 562 | Escherichia coli B84 | B84 | Proteobacteria | AVSI01000002.1 |
| 509 | GCA_000462805.2 | 1151241 | 562 | Escherichia coli B85 | B85 | Proteobacteria | AVSJ01000006.1 |
| 510 | GCA_000462825.2 | 1151242 | 562 | Escherichia coli B86 | B86 | Proteobacteria | AVSK01000012.1 |
| 511 | GCA_000599665.1 | 562 | 562 | Escherichia coli | ST2747 | Proteobacteria | CP007392.1 |
| 512 | GCA_000599685.1 | 562 | 562 | Escherichia coli | ST2747 | Proteobacteria | CP007393.1 |
| 513 | GCA_000599705.1 | 562 | 562 | Escherichia coli | ST2747 | Proteobacteria | CP007394.1 |
| 514 | GCA_000601195.1 | 1444161 | 562 | Escherichia coli 1-176-05_S3_C2 | 1-176-05_S3_C2 | Proteobacteria | JHDF01000008.1 |
| 515 | GCA_000614255.1 | 1446644 | 562 | Escherichia coli O157:H7 str. 2011EL-2114 | 2011EL-2114 | Proteobacteria | JHKH01000012.1 |
| 516 | GCA_000614645.2 | 1446643 | 562 | Escherichia coli O157:H7 str. 2011EL-2113 | 2011EL-2113 | Proteobacteria | JHKI01000034.1 |
| 517 | GCA_000614805.2 | 1446656 | 562 | Escherichia coli O157:H7 str. F7350 | F7350 | Proteobacteria | JHJN01000063.1 |
| 518 | GCA_000615745.2 | 1446634 | 562 | Escherichia coli O157:H7 str. 2011EL-2103 | 2011EL-2103 | Proteobacteria | JHKR01000093.1 |
| 519 | GCA_000615785.2 | 1446635 | 562 | Escherichia coli O157:H7 str. 2011EL-2104 | 2011EL-2104 | Proteobacteria | JHKQ01000088.1 |
| 520 | GCA_000615815.2 | 1446636 | 562 | Escherichia coli O157:H7 str. 2011EL-2105 | 2011EL-2105 | Proteobacteria | JHKP01000065.1 |
| 521 | GCA_000615865.2 | 1446637 | 562 | Escherichia coli O157:H7 str. 2011EL-2106 | 2011EL-2106 | Proteobacteria | JHKO01000118.1 |
| 522 | GCA_000615925.2 | 1446638 | 562 | Escherichia coli O157:H7 str. 2011EL-2107 | 2011EL-2107 | Proteobacteria | JHKN01000091.1 |
| 523 | GCA_000615965.2 | 1446639 | 562 | Escherichia coli O157:H7 str. 2011EL-2108 | 2011EL-2108 | Proteobacteria | JHKM01000041.1 |
| 524 | GCA_000616005.2 | 1446640 | 562 | Escherichia coli O157:H7 str. 2011EL-2109 | 2011EL-2109 | Proteobacteria | JHKL01000081.1 |
| 525 | GCA_000616035.2 | 1446641 | 562 | Escherichia coli O157:H7 str. 2011EL-2111 | 2011EL-2111 | Proteobacteria | JHKK01000026.1 |
| 526 | GCA_000616075.2 | 1446642 | 562 | Escherichia coli O157:H7 str. 2011EL-2112 | 2011EL-2112 | Proteobacteria | JHKJ01000066.1 |
| 527 | GCA_000617465.2 | 1446524 | 562 | Escherichia coli O111:NM str. 2010C-4735 | 2010C-4735 | Proteobacteria | JHMU01000073.1 |
| 528 | GCA_000618225.2 | 1446657 | 562 | Escherichia coli O157:H7 str. F7377 | F7377 | Proteobacteria | JHJM01000101.1 |
| 529 | GCA_000619325.2 | 1446580 | 562 | Escherichia coli O123:H11 str. 2009C-3307 | 2009C-3307 | Proteobacteria | JHHB01000001.1 |
| 530 | GCA_000704985.1 | 1444084 | 562 | Escherichia coli 3-105-05_S1_C2 | 3-105-05_S1_C2 | Proteobacteria | JNSA01000028.1 |
| 531 | GCA_000797815.1 | 562 | 562 | Escherichia coli | CVM N41556PS | Proteobacteria | JUBQ01000063.1 |
| 532 | GCA_000797915.1 | 562 | 562 | Escherichia coli | CVM N41498PS | Proteobacteria | JUBR01000061.1 |
| 533 | GCA_001281885.1 | 562 | 562 | Escherichia coli | STEC 2257 | Proteobacteria | LGBF01000030.1 |
| 534 | GCA_001281915.1 | 562 | 562 | Escherichia coli | STEC 2821 | Proteobacteria | LGBI01000040.1 |
| 535 | GCA_001282065.1 | 562 | 562 | Escherichia coli | STEC 2820 | Proteobacteria | LGBQ01000093.1 |
| 536 | GCA_001284745.1 | 562 | 562 | Escherichia coli | 401709_aEPEC | Proteobacteria | CYCR01000027.1 |
| 537 | GCA_001285705.1 | 562 | 562 | Escherichia coli | 402767 | Proteobacteria | CYET01000020.1 |
| 538 | GCA_001297965.1 | 562 | 562 | Escherichia coli | STEC 915 | Proteobacteria | LFUH01000095.1 |
| 539 | GCA_001297985.1 | 562 | 562 | Escherichia coli | STEC 623 | Proteobacteria | LFUB01000081.1 |
| 540 | GCA_001309565.1 | 562 | 562 | Escherichia coli | PARC448 | Proteobacteria | LDYO01000075.1 |
| 541 | GCA_001309965.1 | 562 | 562 | Escherichia coli | CO283 | Proteobacteria | LEAI01000125.1 |
| 542 | GCA_001419785.1 | 562 | 562 | Escherichia coli | 33 | Proteobacteria | LIUW01000013.1 |
| 543 | GCA_001455035.1 | 562 | 562 | Escherichia coli | 22593 | Proteobacteria | LMBK01000190.1 |
| 544 | GCA_001519145.1 | 562 | 562 | Escherichia coli | GN02606 | Proteobacteria | LQUQ01000101.1 |
| 545 | GCA_001521225.1 | 562 | 562 | Escherichia coli | GN02350 | Proteobacteria | LQTE01000121.1 |
| 546 | GCA_001572045.1 | 562 | 562 | Escherichia coli | CFSAN025093 | Proteobacteria | LPXY01000033.1 |
| 547 | GCA_001572205.1 | 562 | 562 | Escherichia coli | CFSAN025114 | Proteobacteria | LPYO01000230.1 |
| 548 | GCA_001572345.1 | 562 | 562 | Escherichia coli | CFSAN025116 | Proteobacteria | LPYQ01000200.1 |
| 549 | GCA_001572445.1 | 562 | 562 | Escherichia coli | CFSAN025127 | Proteobacteria | LPYZ01000229.1 |
| 550 | GCA_001575465.1 | 562 | 562 | Escherichia coli | G222 | Proteobacteria | LOOL01000028.1 |
| 551 | GCA_001575625.1 | 562 | 562 | Escherichia coli | G236 | Proteobacteria | LOOR01000015.1 |
| 552 | GCA_001576035.1 | 562 | 562 | Escherichia coli | G27 | Proteobacteria | LOOY01000001.1 |
| 553 | GCA_001576095.1 | 562 | 562 | Escherichia coli | G303 | Proteobacteria | LOPE01000051.1 |
| 554 | GCA_001576205.1 | 562 | 562 | Escherichia coli | G301 | Proteobacteria | LOPD01000001.1 |
| 555 | GCA_001576325.1 | 562 | 562 | Escherichia coli | G28 | Proteobacteria | LOOZ01000025.1 |
| 556 | GCA_001576455.1 | 562 | 562 | Escherichia coli | G51 | Proteobacteria | LOPO01000094.1 |
| 557 | GCA_000191665.1 | 981367 | 564 | Escherichia fergusonii ECD227 | ECD227 | Proteobacteria | CM001142.1 |
| 558 | GCA_000248015.2 | 1115512 | 565 | Escherichia hermannii NBRC 105704 | NBRC 105704 | Proteobacteria | BAFF01000030.1 |
| 559 | GCA_000239255.1 | 1002364 | 569 | Hafnia alvei ATCC 51873 | ATCC 51873 | Proteobacteria | JH417508.1 |
| 560 | GCA_000300675.1 | 1203545 | 573 | Klebsiella pneumoniae subsp. pneumoniae WGLW2 | WGLW2 | Proteobacteria | JH930419.1 |
| 561 | GCA_000300675.1 | 1203545 | 573 | Klebsiella pneumoniae subsp. pneumoniae WGLW2 | WGLW2 | Proteobacteria | JH930421.1 |
| 562 | GCA_000316265.2 | 1236101 | 573 | Klebsiella pneumoniae JHCK1 | JHCK1 | Proteobacteria | ANGH02000148.1 |
| 563 | GCA_000316265.2 | 1236101 | 573 | Klebsiella pneumoniae JHCK1 | JHCK1 | Proteobacteria | ANGH02000193.1 |
| 564 | GCA_000409125.1 | 1284817 | 573 | Klebsiella pneumoniae UHKPC57 | UHKPC57 | Proteobacteria | ARPR01000165.1 |
| 565 | GCA_000417465.1 | 1284818 | 573 | Klebsiella pneumoniae UHKPC179 | UHKPC179 | Proteobacteria | ARSM01000009.1 |
| 566 | GCA_000474635.1 | 1381121 | 573 | Klebsiella pneumoniae 303K | 303K | Proteobacteria | AVAN01000015.1 |
| 567 | GCA_000492775.1 | 1328378 | 573 | Klebsiella pneumoniae MGH 46 | MGH 46 | Proteobacteria | KI535585.1 |
| 568 | GCA_000529945.1 | 1432553 | 573 | Klebsiella pneumoniae IS46 | IS46 | Proteobacteria | CBWL010000661.1 |
| 569 | GCA_000567405.1 | 1328405 | 573 | Klebsiella pneumoniae BIDMC 11 | BIDMC 11 | Proteobacteria | KK036861.1 |
| 570 | GCA_000567405.1 | 1328405 | 573 | Klebsiella pneumoniae BIDMC 11 | BIDMC 11 | Proteobacteria | KK036856.1 |
| 571 | GCA_000688155.1 | 1438786 | 573 | Klebsiella pneumoniae MGH 63 | MGH 63 | Proteobacteria | JJNB01000019.1 |
| 572 | GCA_000688215.1 | 1438798 | 573 | Klebsiella pneumoniae MGH 75 | MGH 75 | Proteobacteria | JJNK01000020.1 |
| 573 | GCA_000694235.1 | 1438772 | 573 | Klebsiella pneumoniae CHS 66 | CHS 66 | Proteobacteria | KK737377.1 |
| 574 | GCA_000694535.1 | 1438788 | 573 | Klebsiella pneumoniae MGH 65 | MGH 65 | Proteobacteria | KK737534.1 |
| 575 | GCA_000707985.1 | 1329843 | 573 | Klebsiella pneumoniae BIDMC 33B | BIDMC 33B | Proteobacteria | KL407346.1 |
| 576 | GCA_000733255.1 | 1406314 | 573 | Klebsiella pneumoniae subsp. pneumoniae PittNDM01 | PittNDM01 | Proteobacteria | CP006798.1 |
| 577 | GCA_000764615.1 | 573 | 573 | Klebsiella pneumoniae | PMK1 | Proteobacteria | CP008929.1 |
| 578 | GCA_000764635.1 | 573 | 573 | Klebsiella pneumoniae | BAMC 07-18 | Proteobacteria | JRQE01000001.1 |
| 579 | GCA_000788005.1 | 573 | 573 | Klebsiella pneumoniae | 101712 | Proteobacteria | JSZI01000009.1 |
| 580 | GCA_000943095.1 | 573 | 573 | Klebsiella pneumoniae | ST15 NDM-1 | Proteobacteria | CDQG01000025.1 |
| 581 | GCA_001031325.1 | 573 | 573 | Klebsiella pneumoniae | CHS112 | Proteobacteria | KQ088280.1 |
| 582 | GCA_001032775.1 | 573 | 573 | Klebsiella pneumoniae | CHS201 | Proteobacteria | KQ088952.1 |
| 583 | GCA_001033455.1 | 573 | 573 | Klebsiella pneumoniae | MGH81 | Proteobacteria | KQ089253.1 |
| 584 | GCA_001033725.1 | 573 | 573 | Klebsiella pneumoniae | MGH101 | Proteobacteria | KQ089465.1 |
| 585 | GCA_001033755.1 | 573 | 573 | Klebsiella pneumoniae | MGH111 | Proteobacteria | KQ089480.1 |
| 586 | GCA_001033835.1 | 573 | 573 | Klebsiella pneumoniae | MGH115 | Proteobacteria | KQ089541.1 |
| 587 | GCA_001033885.1 | 573 | 573 | Klebsiella pneumoniae | MGH117 | Proteobacteria | KQ089551.1 |
| 588 | GCA_001033925.1 | 573 | 573 | Klebsiella pneumoniae | MGH124 | Proteobacteria | KQ089570.1 |
| 589 | GCA_001033925.1 | 573 | 573 | Klebsiella pneumoniae | MGH124 | Proteobacteria | KQ089573.1 |
| 590 | GCA_001034065.1 | 573 | 573 | Klebsiella pneumoniae | BIDMC90 | Proteobacteria | KQ089642.1 |
| 591 | GCA_001034365.1 | 573 | 573 | Klebsiella pneumoniae | UCI96 | Proteobacteria | KQ089764.1 |
| 592 | GCA_001185865.1 | 573 | 573 | Klebsiella pneumoniae | CHS175 | Proteobacteria | KQ236853.1 |
| 593 | GCA_001307175.1 | 573 | 573 | Klebsiella pneumoniae | KP617 | Proteobacteria | CP012753.1 |
| 594 | GCA_001316865.1 | 72407 | 573 | Klebsiella pneumoniae subsp. pneumoniae | ST14:944535499 | Proteobacteria | LIDW01000003.1 |
| 595 | GCA_001462705.1 | 573 | 573 | Klebsiella pneumoniae | K57-33 | Proteobacteria | LNGX01000156.1 |
| 596 | GCA_001463165.1 | 573 | 573 | Klebsiella pneumoniae | U25 | Proteobacteria | CP012043.1 |
| 597 | GCA_001463475.1 | 573 | 573 | Klebsiella pneumoniae | 50884375 | Proteobacteria | LNIS01000122.1 |
| 598 | GCA_001521895.1 | 72407 | 573 | Klebsiella pneumoniae subsp. pneumoniae | NUHL24835 | Proteobacteria | CP014004.1 |
| 599 | GCA_001574505.1 | 573 | 573 | Klebsiella pneumoniae | U41 | Proteobacteria | LSTN01000108.1 |
| 600 | GCA_001596905.1 | 573 | 573 | Klebsiella pneumoniae | KPOII-4 | Proteobacteria | JXIW01000052.1 |
| 601 | GCA_001596915.1 | 573 | 573 | Klebsiella pneumoniae | KPOII-2 | Proteobacteria | JXIV01000036.1 |
| 602 | GCA_001596925.1 | 573 | 573 | Klebsiella pneumoniae | KPOII-2 | Proteobacteria | JUBO01000066.1 |
| 603 | GCA_001596935.1 | 573 | 573 | Klebsiella pneumoniae | KPOII-1 | Proteobacteria | JUBN01000046.1 |
| 604 | GCA_001596985.1 | 573 | 573 | Klebsiella pneumoniae | KPOII-7 | Proteobacteria | JXIY01000037.1 |
| 605 | GCA_001596995.1 | 573 | 573 | Klebsiella pneumoniae | KPOII-10 | Proteobacteria | JXJB01000058.1 |
| 606 | GCA_001597015.1 | 573 | 573 | Klebsiella pneumoniae | KP-33P | Proteobacteria | JXJG01000008.1 |
| 607 | GCA_001597095.1 | 573 | 573 | Klebsiella pneumoniae | KPOII-1 | Proteobacteria | JXIU01000015.1 |
| 608 | GCA_001597115.1 | 573 | 573 | Klebsiella pneumoniae | KPOII-6 | Proteobacteria | JXIX01000053.1 |
| 609 | GCA_001597145.1 | 573 | 573 | Klebsiella pneumoniae | KPOII-8 | Proteobacteria | JXIZ01000056.1 |
| 610 | GCA_001597165.1 | 573 | 573 | Klebsiella pneumoniae | KPOII-9 | Proteobacteria | JXJA01000044.1 |
| 611 | GCA_001597175.1 | 573 | 573 | Klebsiella pneumoniae | KPEII-1 | Proteobacteria | JXJC01000056.1 |
| 612 | GCA_001597195.1 | 573 | 573 | Klebsiella pneumoniae | KPEII-2 | Proteobacteria | JXJD01000059.1 |
| 613 | GCA_001597225.1 | 573 | 573 | Klebsiella pneumoniae | KPEII-3 | Proteobacteria | JXJE01000058.1 |
| 614 | GCA_001597245.1 | 573 | 573 | Klebsiella pneumoniae | KP-10 | Proteobacteria | LDOY01000067.1 |
| 615 | GCA_001219605.1 | 630 | 630 | Yersinia enterocolitica | YE04/02 | Proteobacteria | CTKX01000003.1 |
| 616 | GCA_001319885.1 | 633 | 633 | Yersinia pseudotuberculosis | OK6088 | Proteobacteria | CGGM01000007.1 |
| 617 | GCA_001131685.1 | 634 | 634 | Yersinia bercovieri | 127/84 | Proteobacteria | CQBU01000002.1 |
| 618 | GCA_000612075.2 | 1448139 | 644 | Aeromonas hydrophila YL17 | YL17 | Proteobacteria | CP007518.2 |
| 619 | GCA_001270765.1 | 648 | 648 | Aeromonas caviae | 429865 | Proteobacteria | LIIX01000004.1 |
| 620 | GCA_001446895.1 | 656 | 656 | Aeromonas allosaccharophila | TTU2014-159ASC | Proteobacteria | LKKI01000013.1 |
| 621 | GCA_000006745.1 | 243277 | 666 | Vibrio cholerae O1 biovar El Tor str. N16961 | N16961 | Proteobacteria | AE003852.1 |
| 622 | GCA_000016245.1 | 345073 | 666 | Vibrio cholerae O395 | O395 | Proteobacteria | CP000627.1 |
| 623 | GCA_000021605.1 | 579112 | 666 | Vibrio cholerae M66-2 | M66-2 | Proteobacteria | CP001233.1 |
| 624 | GCA_000021625.1 | 345073 | 666 | Vibrio cholerae O395 | O395 | Proteobacteria | CP001235.1 |
| 625 | GCA_000022585.1 | 593588 | 666 | Vibrio cholerae MJ-1236 | MJ-1236 | Proteobacteria | CP001485.1 |
| 626 | GCA_000153865.1 | 412967 | 666 | Vibrio cholerae MAK 757 | MAK 757 | Proteobacteria | GG774578.1 |
| 627 | GCA_000153945.1 | 417399 | 666 | Vibrio cholerae NCTC 8457 | NCTC 8457 | Proteobacteria | DS178000.1 |
| 628 | GCA_000153965.1 | 417400 | 666 | Vibrio cholerae B33 | B33 | Proteobacteria | DS178064.1 |
| 629 | GCA_000166455.2 | 914149 | 666 | Vibrio cholerae O1 str. 2010EL-1786 | 2010EL-1786 | Proteobacteria | CP003069.1 |
| 630 | GCA_000167935.2 | 345076 | 666 | Vibrio cholerae V52 | V52 | Proteobacteria | KQ410498.1 |
| 631 | GCA_000168915.3 | 412614 | 666 | Vibrio cholerae 2740-80 | 2740-80 | Proteobacteria | KQ257329.1 |
| 632 | GCA_000174275.1 | 593589 | 666 | Vibrio cholerae RC9 | RC9 | Proteobacteria | ACHX01000011.1 |
| 633 | GCA_000174315.1 | 417400 | 666 | Vibrio cholerae B33 | B33 | Proteobacteria | ACHZ01000017.1 |
| 634 | GCA_000174335.1 | 593587 | 666 | Vibrio cholerae BX 330286 | BX 330286 | Proteobacteria | ACIA01000006.1 |
| 635 | GCA_000175695.1 | 661513 | 666 | Vibrio cholerae CIRS101 | CIRS 101 | Proteobacteria | ACVW01000011.1 |
| 636 | GCA_000176395.1 | 675807 | 666 | Vibrio cholerae RC27 | RC27 | Proteobacteria | ADAI01000041.1 |
| 637 | GCA_000176435.1 | 675808 | 666 | Vibrio cholerae INDRE 91/1 | INDRE 91/1 | Proteobacteria | ADAK01000056.1 |
| 638 | GCA_000220725.2 | 991935 | 666 | Vibrio cholerae HC-49A2 | HC-49A2 | Proteobacteria | AFOM01000018.1 |
| 639 | GCA_000220745.3 | 991930 | 666 | Vibrio cholerae HCUF01 | HCUF01 | Proteobacteria | AFOO01000018.1 |
| 640 | GCA_000221345.1 | 991961 | 666 | Vibrio cholerae HC-40A1 | HC-40A1 | Proteobacteria | GL988221.1 |
| 641 | GCA_000221365.1 | 991965 | 666 | Vibrio cholerae HC-48A1 | HC-48A1 | Proteobacteria | GL988437.1 |
| 642 | GCA_000221385.1 | 991984 | 666 | Vibrio cholerae HC-70A1 | HC-70A1 | Proteobacteria | GL988603.1 |
| 643 | GCA_000221425.1 | 991989 | 666 | Vibrio cholerae HFU-02 | HFU-02 | Proteobacteria | GL988896.1 |
| 644 | GCA_000221485.1 | 991959 | 666 | Vibrio cholerae HC-38A1 | HC-38A1 | Proteobacteria | GL989435.1 |
| 645 | GCA_000234375.2 | 991950 | 666 | Vibrio cholerae HC-06A1 | HC-06A1 | Proteobacteria | AGUI01000118.1 |
| 646 | GCA_000234395.2 | 991933 | 666 | Vibrio cholerae HC-23A1 | HC-23A1 | Proteobacteria | AGUM01000011.1 |
| 647 | GCA_000234415.2 | 991955 | 666 | Vibrio cholerae HC-28A1 | HC-28A1 | Proteobacteria | AGUN01000124.1 |
| 648 | GCA_000234435.2 | 991938 | 666 | Vibrio cholerae HC-43A1 | HC-43A1 | Proteobacteria | AGUQ01000018.1 |
| 649 | GCA_000234455.3 | 991942 | 666 | Vibrio cholerae HC-61A1 | HC-61A1 | Proteobacteria | AGUS01000010.1 |
| 650 | GCA_000234865.1 | 991966 | 666 | Vibrio cholerae HC-48B2 | HC-48B2 | Proteobacteria | JH377577.1 |
| 651 | GCA_000234885.1 | 991957 | 666 | Vibrio cholerae HC-33A2 | HC-33A2 | Proteobacteria | JH377410.1 |
| 652 | GCA_000234905.1 | 991956 | 666 | Vibrio cholerae HC-32A1 | HC-32A1 | Proteobacteria | JH377638.1 |
| 653 | GCA_000234925.1 | 991954 | 666 | Vibrio cholerae HC-22A1 | HC-22A1 | Proteobacteria | JH377759.1 |
| 654 | GCA_000234945.1 | 991953 | 666 | Vibrio cholerae HC-21A1 | HC-21A1 | Proteobacteria | JH377863.1 |
| 655 | GCA_000234965.1 | 991952 | 666 | Vibrio cholerae HC-19A1 | HC-19A1 | Proteobacteria | JH377908.1 |
| 656 | GCA_000250855.1 | 1134456 | 666 | Vibrio cholerae IEC224 | IEC224 | Proteobacteria | CP003330.1 |
| 657 | GCA_000279185.1 | 991963 | 666 | Vibrio cholerae HC-42A1 | HC-42A1 | Proteobacteria | JH724360.1 |
| 658 | GCA_000279205.1 | 991974 | 666 | Vibrio cholerae HC-56A2 | HC-56A2 | Proteobacteria | JH724528.1 |
| 659 | GCA_000279245.1 | 991926 | 666 | Vibrio cholerae CP1041(14) | CP1041(14) | Proteobacteria | ALDE01000022.1 |
| 660 | GCA_000279305.1 | 991923 | 666 | Vibrio cholerae CP1032(5) | CP1032(5) | Proteobacteria | ALDA01000015.1 |
| 661 | GCA_000279325.1 | 991925 | 666 | Vibrio cholerae CP1038(11) | CP1038(11) | Proteobacteria | ALDC01000012.1 |
| 662 | GCA_000279345.1 | 991927 | 666 | Vibrio cholerae CP1042(15) | CP1042(15) | Proteobacteria | ALDF01000012.1 |
| 663 | GCA_000279375.1 | 991976 | 666 | Vibrio cholerae HC-57A2 | HC-57A2 | Proteobacteria | JH724633.1 |
| 664 | GCA_000279395.1 | 991929 | 666 | Vibrio cholerae CP1048(21) | CP1048(21) | Proteobacteria | ALDJ01000013.1 |
| 665 | GCA_000279415.1 | 991932 | 666 | Vibrio cholerae HC-20A2 | HC-20A2 | Proteobacteria | ALDL01000012.1 |
| 666 | GCA_000279455.1 | 991940 | 666 | Vibrio cholerae HC-46A1 | HC-46A1 | Proteobacteria | ALDQ01000020.1 |
| 667 | GCA_000279555.1 | 991990 | 666 | Vibrio cholerae CP1030(3) | CP1030(3) | Proteobacteria | JH724671.1 |
| 668 | GCA_000279785.1 | 991995 | 666 | Vibrio cholerae CP1047(20) | CP1047(20) | Proteobacteria | JH724786.1 |
| 669 | GCA_000279955.1 | 992003 | 666 | Vibrio cholerae HC-47A1 | HC-47A1 | Proteobacteria | JH724973.1 |
| 670 | GCA_000281655.1 | 991928 | 666 | Vibrio cholerae CP1046(19) | CP1046(19) | Proteobacteria | ALDH01000023.1 |
| 671 | GCA_000302755.1 | 991962 | 666 | Vibrio cholerae HC-41A1 | HC-41A1 | Proteobacteria | JH941098.1 |
| 672 | GCA_000302775.1 | 991960 | 666 | Vibrio cholerae HC-39A1 | HC-39A1 | Proteobacteria | JH942109.1 |
| 673 | GCA_000302985.1 | 991993 | 666 | Vibrio cholerae CP1040(13) | CP1040(13) | Proteobacteria | JH942548.1 |
| 674 | GCA_000303045.1 | 991994 | 666 | Vibrio cholerae CP1044(17) | CP1044(17) | Proteobacteria | JH942687.1 |
| 675 | GCA_000303065.1 | 991996 | 666 | Vibrio cholerae CP1050(23) | CP1050(23) | Proteobacteria | JH941754.1 |
| 676 | GCA_000303125.1 | 1000951 | 666 | Vibrio cholerae HC-81A2 | HC-81A2 | Proteobacteria | JH941263.1 |
| 677 | GCA_000304755.1 | 991924 | 666 | Vibrio cholerae CP1033(6) | CP1033(6) | Proteobacteria | AJRL01000031.1 |
| 678 | GCA_000304935.2 | 991951 | 666 | Vibrio cholerae HC-17A1 | HC-17A1 | Proteobacteria | JH966643.1 |
| 679 | GCA_000304995.1 | 991968 | 666 | Vibrio cholerae HC-50A2 | HC-50A2 | Proteobacteria | JH967085.1 |
| 680 | GCA_000305075.2 | 992006 | 666 | Vibrio cholerae HC-62A1 | HC-62A1 | Proteobacteria | JH967577.1 |
| 681 | GCA_000305095.2 | 991987 | 666 | Vibrio cholerae HC-77A1 | HC-77A1 | Proteobacteria | JH967738.1 |
| 682 | GCA_000305585.2 | 991958 | 666 | Vibrio cholerae HC-37A1 | HC-37A1 | Proteobacteria | JH973721.1 |
| 683 | GCA_000305625.2 | 992007 | 666 | Vibrio cholerae HC-62B1 | HC-62B1 | Proteobacteria | JH976192.1 |
| 684 | GCA_000305675.2 | 1000952 | 666 | Vibrio cholerae HC-17A2 | HC-17A2 | Proteobacteria | JH974083.1 |
| 685 | GCA_000305695.2 | 992008 | 666 | Vibrio cholerae HC-69A1 | HC-69A1 | Proteobacteria | JH974129.1 |
| 686 | GCA_000318485.2 | 991931 | 666 | Vibrio cholerae HC-7A1 | HC-7A1 | Proteobacteria | AGVA02000011.1 |
| 687 | GCA_000318505.2 | 991936 | 666 | Vibrio cholerae HC-81A1 | HC-81A1 | Proteobacteria | AGVC02000007.1 |
| 688 | GCA_000327105.3 | 991980 | 666 | Vibrio cholerae HC-64A1 | HC-64A1 | Proteobacteria | KB454193.1 |
| 689 | GCA_000327125.3 | 991981 | 666 | Vibrio cholerae HC-65A1 | HC-65A1 | Proteobacteria | KB454294.1 |
| 690 | GCA_000327145.3 | 991982 | 666 | Vibrio cholerae HC-67A1 | HC-67A1 | Proteobacteria | KB454387.1 |
| 691 | GCA_000327165.3 | 991983 | 666 | Vibrio cholerae HC-68A1 | HC-68A1 | Proteobacteria | KB454110.1 |
| 692 | GCA_000327185.3 | 991985 | 666 | Vibrio cholerae HC-71A1 | HC-71A1 | Proteobacteria | KB454017.1 |
| 693 | GCA_000327205.3 | 1000953 | 666 | Vibrio cholerae HC-72A2 | HC-72A2 | Proteobacteria | KB453970.1 |
| 694 | GCA_000327245.3 | 991988 | 666 | Vibrio cholerae HC-80A1 | HC-80A1 | Proteobacteria | KB453739.1 |
| 695 | GCA_000338075.1 | 1224154 | 666 | Vibrio cholerae O1 str. Inaba G4222 | Inaba G4222 | Proteobacteria | CM001785.1 |
| 696 | GCA_000348045.2 | 1095661 | 666 | Vibrio cholerae O1 str. 116059 | 116059 | Proteobacteria | KB661123.1 |
| 697 | GCA_000348105.2 | 1095660 | 666 | Vibrio cholerae O1 str. 95412 | 95412 | Proteobacteria | KB662042.1 |
| 698 | GCA_000348125.2 | 1095645 | 666 | Vibrio cholerae O1 str. AG-7404 | AG-7404 | Proteobacteria | KB662659.1 |
| 699 | GCA_000348145.2 | 1095644 | 666 | Vibrio cholerae O1 str. AG-8040 | AG-8040 | Proteobacteria | KB663097.1 |
| 700 | GCA_000348165.2 | 1095651 | 666 | Vibrio cholerae O1 str. EC-0009 | EC-0009 | Proteobacteria | KB663518.1 |
| 701 | GCA_000348185.2 | 1095652 | 666 | Vibrio cholerae O1 str. EC-0012 | EC-0012 | Proteobacteria | KB661760.1 |
| 702 | GCA_000348205.2 | 1095653 | 666 | Vibrio cholerae O1 str. EC-0027 | EC-0027 | Proteobacteria | KB663429.1 |
| 703 | GCA_000348225.2 | 1095654 | 666 | Vibrio cholerae O1 str. EC-0051 | EC-0051 | Proteobacteria | KB661629.1 |
| 704 | GCA_000348245.2 | 1095640 | 666 | Vibrio cholerae O1 str. EDC-020 | EDC-020 | Proteobacteria | KB663379.1 |
| 705 | GCA_000348265.2 | 1095641 | 666 | Vibrio cholerae O1 str. EDC-022 | EDC-022 | Proteobacteria | KB663300.1 |
| 706 | GCA_000348285.2 | 1095646 | 666 | Vibrio cholerae O1 str. EM-1536 | EM-1536 | Proteobacteria | KB662939.1 |
| 707 | GCA_000348305.2 | 1095647 | 666 | Vibrio cholerae O1 str. EM-1546 | EM-1546 | Proteobacteria | KB663192.1 |
| 708 | GCA_000348325.2 | 1095648 | 666 | Vibrio cholerae O1 str. EM-1626 | EM-1626 | Proteobacteria | KB662879.1 |
| 709 | GCA_000348365.1 | 1095650 | 666 | Vibrio cholerae O1 str. EM-1727 | EM-1727 | Proteobacteria | KB662387.1 |
| 710 | GCA_000348385.2 | 1095655 | 666 | Vibrio cholerae O1 str. NHCC-004A | NHCC-004A | Proteobacteria | KB662555.1 |
| 711 | GCA_000348405.2 | 1095656 | 666 | Vibrio cholerae O1 str. NHCC-006C | NHCC-006C | Proteobacteria | KB662604.1 |
| 712 | GCA_000348445.2 | 1095658 | 666 | Vibrio cholerae O1 str. NHCC-010F | NHCC-010F | Proteobacteria | KB662324.1 |
| 713 | GCA_000348465.2 | 1095642 | 666 | Vibrio cholerae O1 str. Nep-21106 | Nep-21106 | Proteobacteria | KB661614.1 |
| 714 | GCA_000348485.2 | 1095643 | 666 | Vibrio cholerae O1 str. Nep-21113 | Nep-21113 | Proteobacteria | KB662142.1 |
| 715 | GCA_000348505.2 | 1095639 | 666 | Vibrio cholerae O1 str. PCS-023 | PCS-023 | Proteobacteria | KB661938.1 |
| 716 | GCA_000569115.2 | 1095638 | 666 | Vibrio cholerae O1 str. PCS-022 | PCS-022 | Proteobacteria | KK037973.1 |
| 717 | GCA_000705295.1 | 686 | 666 | Vibrio cholerae O1 biovar El Tor | M-1293 | Proteobacteria | JFFW01000006.1 |
| 718 | GCA_000710155.1 | 1343738 | 666 | Vibrio cholerae 2012EL-1759 | 2012EL-1759 | Proteobacteria | JNEW01000011.1 |
| 719 | GCA_000710445.1 | 686 | 666 | Vibrio cholerae O1 biovar El Tor | Ogawa RND19188 | Proteobacteria | JNGU01000059.1 |
| 720 | GCA_000710455.1 | 686 | 666 | Vibrio cholerae O1 biovar El Tor | Ogawa RND19191 | Proteobacteria | JNGT01000078.1 |
| 721 | GCA_000736795.1 | 666 | 666 | Vibrio cholerae | 5473-62 | Proteobacteria | JIDI01000041.1 |
| 722 | GCA_000736855.1 | 666 | 666 | Vibrio cholerae | 1311-69 | Proteobacteria | JIDJ01000055.1 |
| 723 | GCA_000736865.1 | 666 | 666 | Vibrio cholerae | NIH41 | Proteobacteria | JIDH01000006.1 |
| 724 | GCA_000736925.1 | 666 | 666 | Vibrio cholerae | 981-75 | Proteobacteria | JIDM01000006.1 |
| 725 | GCA_000753725.1 | 686 | 666 | Vibrio cholerae O1 biovar El Tor | MAK676 | Proteobacteria | JRBD01000007.1 |
| 726 | GCA_000765415.1 | 666 | 666 | Vibrio cholerae | 2012EL-2176 | Proteobacteria | CP007634.1 |
| 727 | GCA_000786335.1 | 666 | 666 | Vibrio cholerae | 81 | Proteobacteria | JRQM01000007.1 |
| 728 | GCA_000786345.1 | 666 | 666 | Vibrio cholerae | 3265/80 | Proteobacteria | JRQL01000006.1 |
| 729 | GCA_000829215.1 | 1420885 | 666 | Vibrio cholerae MS6 | MS6 | Proteobacteria | AP014524.1 |
| 730 | GCA_000939665.1 | 686 | 666 | Vibrio cholerae O1 biovar El Tor | MAK97 | Proteobacteria | JZCB01000007.1 |
| 731 | GCA_000953755.1 | 666 | 666 | Vibrio cholerae | InDRE 4354 | Proteobacteria | JZUA01000014.1 |
| 732 | GCA_000953775.1 | 666 | 666 | Vibrio cholerae | InDRE 4262 | Proteobacteria | JZUB01000015.1 |
| 733 | GCA_000960915.1 | 686 | 666 | Vibrio cholerae O1 biovar El Tor | M1429 | Proteobacteria | LAEM01000007.1 |
| 734 | GCA_000961975.1 | 666 | 666 | Vibrio cholerae | D-35 | Proteobacteria | LAED01000005.1 |
| 735 | GCA_000963555.1 | 686 | 666 | Vibrio cholerae O1 biovar El Tor | FJ147 | Proteobacteria | CP009042.1 |
| 736 | GCA_000965285.1 | 686 | 666 | Vibrio cholerae O1 biovar El Tor | R17644 | Proteobacteria | JRTW01000033.1 |
| 737 | GCA_000966385.1 | 666 | 666 | Vibrio cholerae | M818 | Proteobacteria | LAHM01000006.1 |
| 738 | GCA_001029975.1 | 666 | 666 | Vibrio cholerae | YN2011004 | Proteobacteria | KQ087383.1 |
| 739 | GCA_001030015.1 | 666 | 666 | Vibrio cholerae | YN97083 | Proteobacteria | KQ087448.1 |
| 740 | GCA_001030035.1 | 666 | 666 | Vibrio cholerae | YN89004 | Proteobacteria | KQ087512.1 |
| 741 | GCA_001045415.1 | 666 | 666 | Vibrio cholerae | TSY216 | Proteobacteria | CP007653.1 |
| 742 | GCA_001246285.1 | 666 | 666 | Vibrio cholerae | A346(2) | Proteobacteria | CWQG01000013.1 |
| 743 | GCA_001247245.1 | 666 | 666 | Vibrio cholerae | 4679 | Proteobacteria | CWOC01000002.1 |
| 744 | GCA_001247525.1 | 666 | 666 | Vibrio cholerae | A346(1) | Proteobacteria | CWSM01000004.1 |
| 745 | GCA_001247835.1 | 666 | 666 | Vibrio cholerae | 1627 | Proteobacteria | CWNK01000005.1 |
| 746 | GCA_001247885.1 | 666 | 666 | Vibrio cholerae | IDHO1_726 | Proteobacteria | CWQN01000008.1 |
| 747 | GCA_001248135.1 | 666 | 666 | Vibrio cholerae | A186 | Proteobacteria | CWPM01000020.1 |
| 748 | GCA_001248195.1 | 666 | 666 | Vibrio cholerae | A60 | Proteobacteria | CWOY01000004.1 |
| 749 | GCA_001248235.1 | 666 | 666 | Vibrio cholerae | A217 | Proteobacteria | CWPV01000006.1 |
| 750 | GCA_001248365.1 | 666 | 666 | Vibrio cholerae | A397 | Proteobacteria | CWQB01000004.1 |
| 751 | GCA_001248465.1 | 666 | 666 | Vibrio cholerae | V212-1 | Proteobacteria | CWPH01000003.1 |
| 752 | GCA_001248505.1 | 666 | 666 | Vibrio cholerae | 4519 | Proteobacteria | CWRZ01000004.1 |
| 753 | GCA_001248645.1 | 666 | 666 | Vibrio cholerae | 6214 | Proteobacteria | CWQT01000002.1 |
| 754 | GCA_001248865.1 | 666 | 666 | Vibrio cholerae | A193 | Proteobacteria | CWPN01000010.1 |
| 755 | GCA_001248905.1 | 666 | 666 | Vibrio cholerae | A70 | Proteobacteria | CWOM01000009.1 |
| 756 | GCA_001248945.1 | 666 | 666 | Vibrio cholerae | A213 | Proteobacteria | CWPS01000006.1 |
| 757 | GCA_001249085.1 | 666 | 666 | Vibrio cholerae | MBRN14 | Proteobacteria | CWNR01000004.1 |
| 758 | GCA_001249315.1 | 666 | 666 | Vibrio cholerae | 4322 | Proteobacteria | CWOX01000006.1 |
| 759 | GCA_001249515.1 | 666 | 666 | Vibrio cholerae | 6191 | Proteobacteria | CWQQ01000006.1 |
| 760 | GCA_001249715.1 | 666 | 666 | Vibrio cholerae | GP152 | Proteobacteria | CWQK01000006.1 |
| 761 | GCA_001249815.1 | 666 | 666 | Vibrio cholerae | 7682 | Proteobacteria | CWNO01000007.1 |
| 762 | GCA_001249995.1 | 666 | 666 | Vibrio cholerae | A177 | Proteobacteria | CWNQ01000004.1 |
| 763 | GCA_001250035.1 | 666 | 666 | Vibrio cholerae | GP145 | Proteobacteria | CWQL01000008.1 |
| 764 | GCA_001250195.1 | 666 | 666 | Vibrio cholerae | MJ1485 | Proteobacteria | CWNZ01000023.1 |
| 765 | GCA_001250235.1 | 666 | 666 | Vibrio cholerae | A19 | Proteobacteria | CWSH01000005.1 |
| 766 | GCA_001250435.1 | 666 | 666 | Vibrio cholerae | 4642 | Proteobacteria | CWPE01000005.1 |
| 767 | GCA_001250455.1 | 666 | 666 | Vibrio cholerae | A32 | Proteobacteria | CWNM01000004.1 |
| 768 | GCA_001250615.1 | 666 | 666 | Vibrio cholerae | A488(2) | Proteobacteria | CWOA01000007.1 |
| 769 | GCA_001250795.1 | 666 | 666 | Vibrio cholerae | MBN17 | Proteobacteria | CWNW01000004.1 |
| 770 | GCA_001250935.1 | 666 | 666 | Vibrio cholerae | A61 | Proteobacteria | CWOS01000008.1 |
| 771 | GCA_001251155.1 | 666 | 666 | Vibrio cholerae | A130 | Proteobacteria | CWNY01000012.1 |
| 772 | GCA_001251415.1 | 666 | 666 | Vibrio cholerae | A487(2) | Proteobacteria | CWQX01000001.1 |
| 773 | GCA_001251435.1 | 666 | 666 | Vibrio cholerae | 7687 | Proteobacteria | CWRG01000008.1 |
| 774 | GCA_001251495.1 | 666 | 666 | Vibrio cholerae | GP16 | Proteobacteria | CWQE01000007.1 |
| 775 | GCA_001251595.1 | 666 | 666 | Vibrio cholerae | A483 | Proteobacteria | CWQA01000003.1 |
| 776 | GCA_001251935.1 | 666 | 666 | Vibrio cholerae | 6194 | Proteobacteria | CWQW01000017.1 |
| 777 | GCA_001251975.1 | 666 | 666 | Vibrio cholerae | 6212 | Proteobacteria | CWQV01000004.1 |
| 778 | GCA_001252055.1 | 666 | 666 | Vibrio cholerae | 4551 | Proteobacteria | CWRK01000003.1 |
| 779 | GCA_001252075.1 | 666 | 666 | Vibrio cholerae | 4121 | Proteobacteria | CWRP01000009.1 |
| 780 | GCA_001252495.1 | 666 | 666 | Vibrio cholerae | A18 | Proteobacteria | CWSJ01000005.1 |
| 781 | GCA_001252675.1 | 666 | 666 | Vibrio cholerae | V5 | Proteobacteria | CWNT01000007.1 |
| 782 | GCA_001252775.1 | 666 | 666 | Vibrio cholerae | 6215 | Proteobacteria | CWRD01000009.1 |
| 783 | GCA_001252855.1 | 666 | 666 | Vibrio cholerae | 4111 | Proteobacteria | CWOZ01000011.1 |
| 784 | GCA_001252875.1 | 666 | 666 | Vibrio cholerae | A152 | Proteobacteria | CWOB01000008.1 |
| 785 | GCA_001252895.1 | 666 | 666 | Vibrio cholerae | 4585 | Proteobacteria | CWRS01000004.1 |
| 786 | GCA_001253035.1 | 666 | 666 | Vibrio cholerae | 1346 | Proteobacteria | CWRJ01000005.1 |
| 787 | GCA_001253055.1 | 666 | 666 | Vibrio cholerae | 4600 | Proteobacteria | CWRW01000004.1 |
| 788 | GCA_001253155.1 | 666 | 666 | Vibrio cholerae | A154 | Proteobacteria | CWNX01000009.1 |
| 789 | GCA_001253175.1 | 666 | 666 | Vibrio cholerae | A184 | Proteobacteria | CWOO01000008.1 |
| 790 | GCA_001253235.1 | 666 | 666 | Vibrio cholerae | A29 | Proteobacteria | CWSI01000004.1 |
| 791 | GCA_001253295.1 | 666 | 666 | Vibrio cholerae | A185 | Proteobacteria | CWOK01000008.1 |
| 792 | GCA_001253315.1 | 666 | 666 | Vibrio cholerae | GP140 | Proteobacteria | CWRA01000011.1 |
| 793 | GCA_001253435.1 | 666 | 666 | Vibrio cholerae | A51 | Proteobacteria | CWOW01000014.1 |
| 794 | GCA_001253495.1 | 666 | 666 | Vibrio cholerae | A111 | Proteobacteria | CWOV01000006.1 |
| 795 | GCA_001253555.1 | 666 | 666 | Vibrio cholerae | A279 | Proteobacteria | CWQC01000021.1 |
| 796 | GCA_001253575.1 | 666 | 666 | Vibrio cholerae | GP8 | Proteobacteria | CWNN01000007.1 |
| 797 | GCA_001253615.1 | 666 | 666 | Vibrio cholerae | A219 | Proteobacteria | CWPQ01000002.1 |
| 798 | GCA_001253695.1 | 666 | 666 | Vibrio cholerae | A31 | Proteobacteria | CWSK01000004.1 |
| 799 | GCA_001253755.1 | 666 | 666 | Vibrio cholerae | VC51 | Proteobacteria | CWOI01000007.1 |
| 800 | GCA_001253835.1 | 666 | 666 | Vibrio cholerae | A49 | Proteobacteria | CWPI01000004.1 |
| 801 | GCA_001254055.1 | 666 | 666 | Vibrio cholerae | A4 | Proteobacteria | CWSC01000005.1 |
| 802 | GCA_001254255.1 | 666 | 666 | Vibrio cholerae | A481 | Proteobacteria | CWQD01000029.1 |
| 803 | GCA_001254335.1 | 666 | 666 | Vibrio cholerae | 4784 | Proteobacteria | CWRV01000004.1 |
| 804 | GCA_001254355.1 | 666 | 666 | Vibrio cholerae | MG116226 | Proteobacteria | CWSQ01000005.1 |
| 805 | GCA_001254435.1 | 666 | 666 | Vibrio cholerae | GP160 | Proteobacteria | CWSB01000005.1 |
| 806 | GCA_001254535.1 | 666 | 666 | Vibrio cholerae | A59 | Proteobacteria | CWOG01000006.1 |
| 807 | GCA_001254575.1 | 666 | 666 | Vibrio cholerae | A103 | Proteobacteria | CWOP01000008.1 |
| 808 | GCA_001254635.1 | 666 | 666 | Vibrio cholerae | 4623 | Proteobacteria | CWRM01000004.1 |
| 809 | GCA_001254655.1 | 666 | 666 | Vibrio cholerae | A10 | Proteobacteria | CWSF01000005.1 |
| 810 | GCA_001254675.1 | 666 | 666 | Vibrio cholerae | A5 | Proteobacteria | CWSE01000005.1 |
| 811 | GCA_001254895.1 | 666 | 666 | Vibrio cholerae | MG116025 | Proteobacteria | CWNS01000006.1 |
| 812 | GCA_001254915.1 | 666 | 666 | Vibrio cholerae | A180 | Proteobacteria | CWOR01000008.1 |
| 813 | GCA_001254955.1 | 666 | 666 | Vibrio cholerae | 6197 | Proteobacteria | CWRB01000040.1 |
| 814 | GCA_001255155.1 | 666 | 666 | Vibrio cholerae | A22 | Proteobacteria | CWNL01000007.1 |
| 815 | GCA_001255295.1 | 666 | 666 | Vibrio cholerae | A200 | Proteobacteria | CWPW01000009.1 |
| 816 | GCA_001255575.1 | 666 | 666 | Vibrio cholerae | A6 | Proteobacteria | CWSG01000004.1 |
| 817 | GCA_001255835.1 | 666 | 666 | Vibrio cholerae | 4536 | Proteobacteria | CWSA01000001.1 |
| 818 | GCA_001255915.1 | 666 | 666 | Vibrio cholerae | 7685 | Proteobacteria | CWRI01000009.1 |
| 819 | GCA_001256015.1 | 666 | 666 | Vibrio cholerae | 4663 | Proteobacteria | CWOD01000006.1 |
| 820 | GCA_001256355.1 | 666 | 666 | Vibrio cholerae | PRL5 | Proteobacteria | CWQI01000001.1 |
| 821 | GCA_001256655.1 | 666 | 666 | Vibrio cholerae | A209 | Proteobacteria | CWPU01000001.1 |
| 822 | GCA_001256675.1 | 666 | 666 | Vibrio cholerae | A241 | Proteobacteria | CWPX01000008.1 |
| 823 | GCA_001256835.1 | 666 | 666 | Vibrio cholerae | A231 | Proteobacteria | CWPP01000001.1 |
| 824 | GCA_001257035.1 | 666 | 666 | Vibrio cholerae | 4110 | Proteobacteria | CWOT01000002.1 |
| 825 | GCA_001257075.1 | 666 | 666 | Vibrio cholerae | A488(1) | Proteobacteria | CWSN01000007.1 |
| 826 | GCA_001257255.1 | 666 | 666 | Vibrio cholerae | V109 | Proteobacteria | CWOJ01000008.1 |
| 827 | GCA_001257835.1 | 666 | 666 | Vibrio cholerae | 6193 | Proteobacteria | CWQZ01000004.1 |
| 828 | GCA_001257895.1 | 666 | 666 | Vibrio cholerae | 4593 | Proteobacteria | CWRL01000004.1 |
| 829 | GCA_001258495.1 | 666 | 666 | Vibrio cholerae | 4656 | Proteobacteria | CWOQ01000004.1 |
| 830 | GCA_001258535.1 | 666 | 666 | Vibrio cholerae | 7686 | Proteobacteria | CWRH01000019.1 |
| 831 | GCA_001258555.1 | 666 | 666 | Vibrio cholerae | 4488 | Proteobacteria | CWRU01000004.1 |
| 832 | GCA_001258995.1 | 666 | 666 | Vibrio cholerae | 4646 | Proteobacteria | CWRX01000004.1 |
| 833 | GCA_001259055.1 | 666 | 666 | Vibrio cholerae | 4113 | Proteobacteria | CWRQ01000003.1 |
| 834 | GCA_001259135.1 | 666 | 666 | Vibrio cholerae | 4605 | Proteobacteria | CWON01000005.1 |
| 835 | GCA_001259235.1 | 666 | 666 | Vibrio cholerae | 4552 | Proteobacteria | CWRT01000003.1 |
| 836 | GCA_001259315.1 | 666 | 666 | Vibrio cholerae | A131 | Proteobacteria | CWOL01000002.1 |
| 837 | GCA_001259475.1 | 666 | 666 | Vibrio cholerae | 6210 | Proteobacteria | CWQO01000008.1 |
| 838 | GCA_001259495.1 | 666 | 666 | Vibrio cholerae | A76 | Proteobacteria | CWOF01000008.1 |
| 839 | GCA_001259555.1 | 666 | 666 | Vibrio cholerae | A46 | Proteobacteria | CWOH01000007.1 |
| 840 | GCA_001259575.1 | 666 | 666 | Vibrio cholerae | A390 | Proteobacteria | CWQF01000001.1 |
| 841 | GCA_001259635.1 | 666 | 666 | Vibrio cholerae | A68 | Proteobacteria | CWNV01000008.1 |
| 842 | GCA_001259715.1 | 666 | 666 | Vibrio cholerae | 4538 | Proteobacteria | CWRO01000004.1 |
| 843 | GCA_001259795.1 | 666 | 666 | Vibrio cholerae | A389 | Proteobacteria | CWQH01000016.1 |
| 844 | GCA_001259915.1 | 666 | 666 | Vibrio cholerae | A155 | Proteobacteria | CWOE01000008.1 |
| 845 | GCA_001259935.1 | 666 | 666 | Vibrio cholerae | A109 | Proteobacteria | CWPD01000024.1 |
| 846 | GCA_001260175.1 | 666 | 666 | Vibrio cholerae | 4662 | Proteobacteria | CWRY01000001.1 |
| 847 | GCA_001260295.1 | 666 | 666 | Vibrio cholerae | 1362 | Proteobacteria | CWRR01000004.1 |
| 848 | GCA_001260335.1 | 666 | 666 | Vibrio cholerae | 4339 | Proteobacteria | CWRN01000004.1 |
| 849 | GCA_001260915.1 | 666 | 666 | Vibrio cholerae | A66 | Proteobacteria | CWOU01000006.1 |
| 850 | GCA_001260995.1 | 666 | 666 | Vibrio cholerae | A27 | Proteobacteria | CWSD01000004.1 |
| 851 | GCA_001261075.1 | 666 | 666 | Vibrio cholerae | PRL64 | Proteobacteria | CWQM01000006.1 |
| 852 | GCA_001261095.1 | 666 | 666 | Vibrio cholerae | A482 | Proteobacteria | CWPZ01000016.1 |
| 853 | GCA_001261135.1 | 666 | 666 | Vibrio cholerae | A245 | Proteobacteria | CWPY01000019.1 |
| 854 | GCA_001261515.1 | 666 | 666 | Vibrio cholerae | A201 | Proteobacteria | CWPT01000008.1 |
| 855 | GCA_001261535.1 | 666 | 666 | Vibrio cholerae | A487(1) | Proteobacteria | CWSP01000004.1 |
| 856 | GCA_001261555.1 | 666 | 666 | Vibrio cholerae | 6201 | Proteobacteria | CWQP01000004.1 |
| 857 | GCA_001281585.1 | 686 | 666 | Vibrio cholerae O1 biovar El Tor | 31 | Proteobacteria | LIFF01000004.1 |
| 858 | GCA_001281595.1 | 686 | 666 | Vibrio cholerae O1 biovar El Tor | 39 | Proteobacteria | LIFG01000007.1 |
| 859 | GCA_001281615.1 | 686 | 666 | Vibrio cholerae O1 biovar El Tor | 43 | Proteobacteria | LIFH01000031.1 |
| 860 | GCA_001281665.1 | 686 | 666 | Vibrio cholerae O1 biovar El Tor | 56 | Proteobacteria | LIFI01000004.1 |
| 861 | GCA_001282605.1 | 666 | 666 | Vibrio cholerae | EC-051 | Proteobacteria | LFZZ01000030.1 |
| 862 | GCA_001318185.1 | 1433144 | 666 | Vibrio cholerae O1 str. KW3 | KW3 | Proteobacteria | CP006947.1 |
| 863 | GCA_001471455.1 | 666 | 666 | Vibrio cholerae | ATCC 11629 | Proteobacteria | LOSM01000005.1 |
| 864 | GCA_001515095.1 | 666 | 666 | Vibrio cholerae | ME-7 | Proteobacteria | LQBW01000005.1 |
| 865 | GCA_001517845.1 | 686 | 666 | Vibrio cholerae O1 biovar El Tor | M1275 | Proteobacteria | LRAF01000011.1 |
| 866 | GCA_001517855.1 | 686 | 666 | Vibrio cholerae O1 biovar El Tor | M1275D | Proteobacteria | LRAG01000003.1 |
| 867 | GCA_001521835.1 | 666 | 666 | Vibrio cholerae | M888 | Proteobacteria | LRBH01000022.1 |
| 868 | GCA_001525525.1 | 666 | 666 | Vibrio cholerae | ATCC 25874 | Proteobacteria | LRIK01000002.1 |
| 869 | GCA_001543465.1 | 686 | 666 | Vibrio cholerae O1 biovar El Tor | Inaba PIC018 | Proteobacteria | LQHM01000074.1 |
| 870 | GCA_000260675.1 | 1095743 | 736 | Haemophilus paraphrohaemolyticus HK411 | HK411 | Proteobacteria | AJMU01000074.1 |
| 871 | GCA_000771955.1 | 750 | 750 | Gallibacterium anatis | F0003406 | Proteobacteria | JPXV01000009.1 |
| 872 | GCA_000772275.1 | 750 | 750 | Gallibacterium anatis | 10672/9 | Proteobacteria | JPTU01000008.1 |
| 873 | GCA_000772385.1 | 1396511 | 750 | Gallibacterium anatis 7990 | 7990 | Proteobacteria | JPJL01000011.1 |
| 874 | GCA_000024665.1 | 59374 | 833 | Fibrobacter succinogenes subsp. succinogenes S85 | S85 | Fibrobacteres | CP001792.1 |
| 875 | GCA_000146505.1 | 59374 | 833 | Fibrobacter succinogenes subsp. succinogenes S85 | S85 | Fibrobacteres | CP002158.1 |
| 876 | GCA_000158275.2 | 457405 | 851 | Fusobacterium nucleatum subsp. animalis 7_1 | 7_1 | Fusobacteria | CP007062.1 |
| 877 | GCA_000234075.2 | 693991 | 851 | Fusobacterium nucleatum subsp. polymorphum F0401 | F0401 | Fusobacteria | ADDB02000001.1 |
| 878 | GCA_000479285.1 | 1204474 | 851 | Fusobacterium nucleatum CTI-1 | CTI-1 | Fusobacteria | KI518459.1 |
| 879 | GCA_000158215.3 | 469599 | 860 | Fusobacterium periodonticum 2_1_31 | 2_1_31 | Fusobacteria | KN173678.1 |
| 880 | GCA_000160475.1 | 546275 | 860 | Fusobacterium periodonticum ATCC 33693 | ATCC 33693 | Fusobacteria | GG665893.1 |
| 881 | GCA_000015485.1 | 391774 | 881 | Desulfovibrio vulgaris DP4 | DP4 | Proteobacteria | CP000527.1 |
| 882 | GCA_000025305.1 | 591001 | 905 | Acidaminococcus fermentans DSM 20731 | DSM 20731 | Firmicutes | CP001859.1 |
| 883 | GCA_000021865.1 | 272942 | 1061 | Rhodobacter capsulatus SB 1003 | SB 1003 | Proteobacteria | CP001312.1 |
| 884 | GCA_000505785.1 | 1415160 | 1061 | Rhodobacter capsulatus DE442 | DE442 | Proteobacteria | AYPR01000015.1 |
| 885 | GCA_000506425.2 | 1415162 | 1061 | Rhodobacter capsulatus B6 | B6 | Proteobacteria | AYQA01000010.1 |
| 886 | GCA_000506565.2 | 1415163 | 1061 | Rhodobacter capsulatus R121 | R121 | Proteobacteria | AYQC01000013.1 |
| 887 | GCA_000506965.2 | 1415161 | 1061 | Rhodobacter capsulatus Y262 | Y262 | Proteobacteria | AYQB01000018.1 |
| 888 | GCA_000341585.2 | 317619 | 1223 | Prochlorothrix hollandica PCC 9006 | | Cyanobacteria | AJTX02000004.1 |
| 889 | GCA_000740735.1 | 1229 | 1229 | Nitrosococcus oceani | AFC132 | Proteobacteria | JPFN01000044.1 |
| 890 | GCA_001183895.1 | 1422 | 1422 | Geobacillus stearothermophilus | A1 | Firmicutes | LDNS01000331.1 |
| 891 | GCA_001183915.1 | 1422 | 1422 | Geobacillus stearothermophilus | P3 | Firmicutes | LDNT01000009.1 |
| 892 | GCA_001587395.1 | 1422 | 1422 | Geobacillus stearothermophilus | B4114 | Firmicutes | LQYY01000004.1 |
| 893 | GCA_000415905.1 | 1337888 | 1462 | Geobacillus kaustophilus GBlys | GBlys | Firmicutes | BASG01000012.1 |
| 894 | GCA_000353265.2 | 1198630 | 1516 | Thermoanaerobacter thermohydrosulfuricus WC1 | WC1 | Firmicutes | KB731278.1 |
| 895 | GCA_000219125.2 | 1009370 | 2374 | Acetonema longum DSM 6540 | DSM 6540 | Firmicutes | AFGF01000017.1 |
| 896 | GCA_000300715.1 | 1161912 | 2421 | Thermosipho africanus H17ap60334 | H17ap60334 | Thermotogae | AJIP01000035.1 |
| 897 | GCA_000284255.1 | 983917 | 28068 | Rubrivivax gelatinosus IL144 | IL144 | Proteobacteria | AP012320.1 |
| 898 | GCA_001467525.1 | 28082 | 28082 | Legionella anisa | WA-316-C3 | Proteobacteria | LNXS01000010.1 |
| 899 | GCA_000178275.1 | 702443 | 28116 | Bacteroides ovatus SD CMC 3f | SD CMC 3f | Bacteroidetes | ADMO01000148.1 |
| 900 | GCA_000017665.1 | 290339 | 28141 | Cronobacter sakazakii ATCC BAA-894 | ATCC BAA-894 | Proteobacteria | CP000783.1 |
| 901 | GCA_000214745.2 | 930780 | 28141 | Cronobacter sakazakii E899 | E899 | Proteobacteria | AFMO01000120.1 |
| 902 | GCA_000316155.1 | 1208664 | 28141 | Cronobacter sakazakii 696 | 696 | Proteobacteria | CALF01000071.1 |
| 903 | GCA_000319595.1 | 1208663 | 28141 | Cronobacter sakazakii 701 | 701 | Proteobacteria | CALE01000616.1 |
| 904 | GCA_000723765.1 | 1238450 | 28173 | Vibrio nigripulchritudo SOn1 | SOn1 | Proteobacteria | LK391965.1 |
| 905 | GCA_000307105.1 | 651182 | 28223 | Desulfobacula toluolica Tol2 | Tol2 | Proteobacteria | FO203503.1 |
| 906 | GCA_000757225.1 | 28450 | 28450 | Burkholderia pseudomallei | BEC | Proteobacteria | KN150953.1 |
| 907 | GCA_000773415.1 | 1435374 | 28450 | Burkholderia pseudomallei MSHR7500 | MSHR7500 | Proteobacteria | JREN01000128.1 |
| 908 | GCA_000774635.1 | 1434195 | 28450 | Burkholderia pseudomallei MSHR4303 | MSHR4303 | Proteobacteria | KN323039.1 |
| 909 | GCA_000775025.1 | 1437004 | 28450 | Burkholderia pseudomallei MSHR3709 | MSHR3709 | Proteobacteria | KN323107.1 |
| 910 | GCA_000775045.1 | 1435993 | 28450 | Burkholderia pseudomallei MSHR2138 | MSHR2138 | Proteobacteria | KN323181.1 |
| 911 | GCA_001202135.1 | 28450 | 28450 | Burkholderia pseudomallei | P166/04 | Proteobacteria | CSLD01000016.1 |
| 912 | GCA_001448845.1 | 1240693 | 28901 | Salmonella enterica subsp. enterica serovar Rubislaw str. | SA20030553 | Proteobacteria | LHTG01000011.1 |
| | | | | SA20030553 | | | |
| 913 | GCA_000189775.3 | 858215 | 29329 | Thermoanaerobacterium xylanolyticum LX-11 | LX-11 | Firmicutes | CP002739.1 |
| 914 | GCA_000369085.1 | 1217986 | 29430 | Acinetobacter haemolyticus NIPH 261 | NIPH 261 | Proteobacteria | KB849819.1 |
| 915 | GCA_000015745.1 | 420246 | 33940 | Geobacillus thermodenitrificans NG80-2 | NG80-2 | Firmicutes | CP000557.1 |
| 916 | GCA_000016185.1 | 414684 | 34018 | Rhodospirillum centenum SW | SW; ATCC 51521 | Proteobacteria | CP000613.2 |
| 917 | GCA_000023345.1 | 543728 | 34073 | Variovorax paradoxus S110 | S110 | Proteobacteria | CP001635.1 |
| 918 | GCA_000214275.3 | 686340 | 39775 | Methylomicrobium album BG8 | BG8 | Proteobacteria | CM001475.1 |
| 919 | GCA_000175675.1 | 596318 | 40216 | Acinetobacter radioresistens SK82 | SK82 | Proteobacteria | ACVR01000061.1 |
| 920 | GCA_000367985.1 | 40373 | 40373 | Acinetobacter sp. CIP-A165 | CIP A165 | Proteobacteria | KB849201.1 |
| 921 | GCA_001273775.1 | 42253 | 42253 | Nitrospira moscoviensis | NSP M-1 | Nitrospirae | CP011801.1 |
| 922 | GCA_000328625.1 | 748449 | 42422 | Halobacteroides halobius DSM 5150 | DSM 5150 | Firmicutes | CP003359.1 |
| 923 | GCA_000154785.2 | 391595 | 42443 | Roseobacter litoralis Och 149 | Och 149 | Proteobacteria | CP002623.1 |
| 924 | GCA_000350165.1 | 1293054 | 43595 | Halanaerobium saccharolyticum subsp. saccharolyticum | type strain:DSM 6643 | Firmicutes | CAUI01000005.1 |
| | | | | DSM 6643 | | | |
| 925 | GCA_000238375.3 | 1117314 | 43655 | Pseudoalteromonas citrea DSM 8771 | NCIMB 1889 | Proteobacteria | AHBZ02000147.1 |
| 926 | GCA_001298525.1 | 45610 | 45610 | Psychrobacter urativorans | R10.10B | Proteobacteria | CP012678.1 |
| 927 | GCA_000147695.3 | 697303 | 46354 | Thermoanaerobacter wiegelii Rt8.B1 | Rt8.B1 | Firmicutes | CP002991.1 |
| 928 | GCA_000186425.1 | 887898 | 47671 | Lautropia mirabilis ATCC 51599 | ATCC 51599 | Proteobacteria | GL636062.1 |
| 929 | GCA_001432715.1 | 48296 | 48296 | Acinetobacter pittii | ABBL005 | Proteobacteria | LLCL01000049.1 |
| 930 | GCA_000219855.1 | 1051632 | 53633 | Sulfobacillus acidophilus TPY | TPY | Firmicutes | CP002901.1 |
| 931 | GCA_000237975.1 | 679936 | 53633 | Sulfobacillus acidophilus DSM 10332 | DSM 10332 | Firmicutes | CP003179.1 |
| 932 | GCA_000749925.1 | 55207 | 55207 | Pectobacterium betavasculorum | NCPPB 2793 | Proteobacteria | JQHL01000017.1 |
| 933 | GCA_001005725.1 | 56193 | 56193 | Sphingobium chungbukense | DJ77 | Proteobacteria | LBIC01000001.1 |
| 934 | GCA_001529365.1 | 56812 | 56812 | Shewanella frigidimarina | Ag06-30 | Proteobacteria | LRDC01000001.1 |
| 935 | GCA_000958425.1 | 61645 | 61645 | Enterobacter asburiae | 42192 | Proteobacteria | JZYJ01000004.1 |
| 936 | GCA_001011855.1 | 61645 | 61645 | Enterobacter asburiae | GN02073 | Proteobacteria | LDCE01000036.1 |
| 937 | GCA_001011955.1 | 61645 | 61645 | Enterobacter asburiae | GN02208 | Proteobacteria | LDCK01000037.1 |
| 938 | GCA_001023015.1 | 61645 | 61645 | Enterobacter asburiae | GN04222 | Proteobacteria | LECX01000031.1 |
| 939 | GCA_001471995.1 | 61645 | 61645 | Enterobacter asburiae | SMART_269 | Proteobacteria | LPQP01000010.1 |
| 940 | GCA_001472305.1 | 61645 | 61645 | Enterobacter asburiae | SMART_454 | Proteobacteria | LPPZ01000027.1 |
| 941 | GCA_001472715.1 | 61645 | 61645 | Enterobacter asburiae | SMART_763 | Proteobacteria | LPPF01000080.1 |
| 942 | GCA_001022135.1 | 61648 | 61648 | Kluyvera intermedia | CAV1151 | Proteobacteria | CP011602.1 |
| 943 | GCA_000317635.1 | 65093 | 65093 | Halothece sp. PCC 7418 | PCC 7418 | Cyanobacteria | CP003945.1 |
| 944 | GCA_000021825.1 | 65393 | 65393 | Cyanothece sp. PCC 7424 | PCC 7424 | Cyanobacteria | CP001291.1 |
| 945 | GCA_000832305.1 | 68895 | 68895 | Cupriavidus basilensis | 4G11 | Proteobacteria | CP010537.1 |
| 946 | GCA_000169135.1 | 313624 | 70799 | Nodularia spumigena CCY9414 | CCY9414 | Cyanobacteria | AAVW01000117.1 |
| 947 | GCA_000340565.3 | 313624 | 70799 | Nodularia spumigena CCY9414 | CCY9414 | Cyanobacteria | CP007203.2 |
| 948 | GCA_000818015.1 | 1123016 | 74829 | Pseudomonas balearica DSM 6083 | DSM6083 (=SP1402) | Proteobacteria | CP007511.1 |
| 949 | GCA_001458455.1 | 75695 | 75695 | Chrysosporum ovalisporum | UAM-MAO | Cyanobacteria | CDHJ01000123.1 |
| 950 | GCA_000242075.2 | 883150 | 76832 | Myroides odoratimimus CCUG 10230 | CCUG 10230 | Bacteroidetes | KE161015.1 |
| 951 | GCA_000026985.1 | 644651 | 79967 | Erwinia pyrifoliae DSM 12163 | DSM 12163 | Proteobacteria | FN392235.1 |
| 952 | GCA_000027265.1 | 634499 | 79967 | Erwinia pyrifoliae Ep1/96 | Ep1/96 | Proteobacteria | FP236842.1 |
| 953 | GCA_000327045.1 | 765912 | 80679 | Thioflavicoccus mobilis 8321 | 8321 | Proteobacteria | CP003051.1 |
| 954 | GCA_001458195.1 | 81569 | 81569 | Ruegeria atlantica | CECT 4292 | Proteobacteria | CYPU01000011.1 |
| 955 | GCA_001586165.1 | 82983 | 82983 | Obesumbacterium proteus | DSM 2777 | Proteobacteria | CP014608.1 |
| 956 | GCA_000438825.1 | 1348660 | 82996 | Serratia plymuthica S13 | | Proteobacteria | CP006566.1 |
| 957 | GCA_000622345.1 | 1443112 | 83219 | Sulfitobacter mediterraneus KCTC 32188 | KCTC 32188 | Proteobacteria | JASH01000008.1 |
| 958 | GCA_001605015.1 | 83263 | 83263 | Aminobacter aminovorans | KCTC 2477 | Proteobacteria | CP015005.1 |
| 959 | GCA_000203935.1 | 94122 | 94122 | Shewanella sp. ANA-3 | ANA-3 | Proteobacteria | CP000469.1 |
| 960 | GCA_000067205.1 | 94624 | 94624 | Bordetella petrii | DSM 12804 | Proteobacteria | AM902716.1 |
| 961 | GCA_000333135.2 | 985077 | 95486 | Burkholderia cenocepacia BC7 | | Proteobacteria | ALIZ02000089.1 |
| 962 | GCA_000333155.2 | 985076 | 95486 | Burkholderia cenocepacia K56-2Valvano | K56-2Valvano | Proteobacteria | ALJA02000012.1 |
| 963 | GCA_000981305.1 | 95486 | 95486 | Burkholderia cenocepacia | K56-2 | Proteobacteria | LAUA01000017.1 |
| 964 | GCA_001523855.1 | 101571 | 101571 | Burkholderia ubonensis | ABCPW-28 | Proteobacteria | LOVU01000053.1 |
| 965 | GCA_001528985.1 | 101571 | 101571 | Burkholderia ubonensis | MSMB1162WGS | Proteobacteria | LPDS01000057.1 |
| 966 | GCA_001530375.1 | 101571 | 101571 | Burkholderia ubonensis | MSMB1473WGS | Proteobacteria | LPFJ01000144.1 |
| 967 | GCA_000317575.1 | 111780 | 102116 | Stanieria cyanosphaera PCC 7437 | PCC 7437 | Cyanobacteria | CP003653.1 |
| 968 | GCA_000025645.1 | 580331 | 108150 | Thermoanaerobacter italicus Ab9 | Ab9 | Firmicutes | CP001936.1 |
| 969 | GCA_000215105.1 | 743718 | 139208 | Isoptericola variabilis 225 | 225 | Actinobacteria | CP002810.1 |
| 970 | GCA_000024825.1 | 150340 | 150340 | Vibrio antiquarius | EX25 | Proteobacteria | CP001805.1 |
| 971 | GCA_000152485.1 | 150340 | 150340 | Vibrio antiquarius | EX25 | Proteobacteria | DS267811.1 |
| 972 | GCA_000759535.1 | 157783 | 157783 | Pseudomonas cremoricolorata | ND07 | Proteobacteria | CP009455.1 |
| 973 | GCA_000012985.1 | 349521 | 158327 | Hahella chejuensis KCTC 2396 | KCTC 2396 | Proteobacteria | CP000155.1 |
| 974 | GCA_001506165.1 | 158822 | 158822 | Cedecea neteri | ND02 | Proteobacteria | CP011427.1 |
| 975 | GCA_000181515.1 | 161528 | 161528 | Erythrobacter sp. SD-21 | SD-21 | Proteobacteria | ABCG01000002.1 |
| 976 | GCA_000069785.1 | 977880 | 164546 | Cupriavidus taiwanensis LMG 19424 | LMG19424 | Proteobacteria | CU633749.1 |
| 977 | GCA_000010305.1 | 379066 | 173480 | Gemmatimonas aurantiaca T-27 | T-27 | Gemmatimonadetes | AP009153.1 |
| 978 | GCA_000774145.1 | 1348058 | 183795 | Pseudomonas mediterranea CFBP 5447 | CFBP 5447 | Proteobacteria | KN322981.1 |
| 979 | GCA_000255295.1 | 1144275 | 184914 | Corallococcus coralloides DSM 2259 | DSM 2259 | Proteobacteria | CP003389.1 |
| 980 | GCA_000235975.2 | 1088721 | 205844 | Novosphingobium pentaromativorans US6-1 | US6-1 | Proteobacteria | AGFM01000037.1 |
| 981 | GCA_000767465.1 | 1088721 | 205844 | Novosphingobium pentaromativorans US6-1 | US6-1 | Proteobacteria | CP009291.1 |
| 982 | GCA_000091465.1 | 575788 | 212663 | Vibrio tasmaniensis LGP32 | LGP32 | Proteobacteria | FM954972.2 |
| 983 | GCA_000165815.1 | 215689 | 215689 | Erwinia sp. Ejp617 | Ejp617 | Proteobacteria | CP002124.1 |
| 984 | GCA_000015505.1 | 365044 | 216465 | Polaromonas naphthalenivorans CJ2 | CJ2 | Proteobacteria | CP000530.1 |
| 985 | GCA_000264315.1 | 1163408 | 219571 | Rhodanobacter fulvus Jip2 | Jip2 | Proteobacteria | AJXU01000037.1 |
| 986 | GCA_000315055.1 | 1129793 | 222814 | Paraglaciecola polaris LMG 21857 | LMG 21857 | Proteobacteria | BAER01000023.1 |
| 987 | GCA_000317495.1 | 1173022 | 241425 | Crinalium epipsammum PCC 9333 | PCC 9333 | Cyanobacteria | CP003620.1 |
| 988 | GCA_000742915.1 | 244366 | 244366 | Klebsiella variicola | BZ19 | Proteobacteria | JDWA01000007.1 |
| 989 | GCA_001048495.1 | 246167 | 246167 | Vibrio crassostreae | J5-19 | Proteobacteria | CCJU01000026.1 |
| 990 | GCA_001368875.1 | 246167 | 246167 | Vibrio crassostreae | J5-4 | Proteobacteria | CCJX01000059.1 |
| 991 | GCA_001580835.1 | 257438 | 257438 | Gluconobacter thailandicus | LMG 1741 | Proteobacteria | LHZM01000066.1 |
| 992 | GCA_000168275.1 | 262489 | 262489 | delta proteobacterium MLMS-1 | MLMS-1 | Proteobacteria | AAQF01000005.1 |
| 993 | GCA_001548015.1 | 270351 | 270351 | Methylobacterium aquaticum | MA-22A | Proteobacteria | AP014704.1 |
| 994 | GCA_000968535.1 | 1091494 | 271065 | Methylomicrobium alcaliphilum 20Z | 20Z | Proteobacteria | FO082060.1 |
| 995 | GCA_000825645.1 | 271420 | 271420 | Pseudomonas xanthomarina | S11 | Proteobacteria | CCYE01000007.1 |
| 996 | GCA_000280495.1 | 1177180 | 283686 | Kosakonia radicincitans DSM 16656 | DSM 16656 | Proteobacteria | JH725436.1 |
| 997 | GCA_000691205.1 | 1455607 | 283686 | Kosakonia radicincitans UMEnt01/12 | UMEnt01/12 | Proteobacteria | JDYJ01000004.1 |
| 998 | GCA_000317615.1 | 13035 | 292566 | Dactylococcopsis salina PCC 8305 | PCC 8305 | Cyanobacteria | CP003944.1 |
| 999 | GCA_000517385.1 | 1294265 | 308892 | Bacillus boroniphilus JCM 21738 | JCM 21738 | Firmicutes | BAUW01000042.1 |
| 1000 | GCA_000152965.1 | 314262 | 314262 | Roseobacter sp. MED193 | MED193 | Proteobacteria | CH902583.1 |
| 1001 | GCA_000171815.1 | 314289 | 314289 | Vibrio sp. AND4 | AND4 | Proteobacteria | ABGR01000004.1 |
| 1002 | GCA_001458175.1 | 321267 | 321267 | Shimia marina | CECT 7688 | Proteobacteria | CYPW01000010.1 |
| 1003 | GCA_001544495.1 | 326475 | 326475 | Paraburkholderia telluris | | Proteobacteria | FCNZ01000045.1 |
| 1004 | GCA_000013905.1 | 335284 | 330922 | Psychrobacter cryohalolentis K5 | K5 | Proteobacteria | CP000323.1 |
| 1005 | GCA_000382885.1 | 1301087 | 332056 | Sphingobium japonicum BiD32 | BiD32 | Proteobacteria | CAVK010000098.1 |
| 1006 | GCA_000015285.1 | 357804 | 357794 | Psychromonas ingrahamii 37 | 37 | Proteobacteria | CP000510.1 |
| 1007 | GCA_000302535.1 | 358220 | 358220 | Acidovorax sp. KKS102 | KKS102 | Proteobacteria | CP003872.1 |
| 1008 | GCA_000242115.2 | 1117958 | 359110 | Pseudomonas extremaustralis 14-3 substr. 14-3b | 14-3 substr. 14-3b | Proteobacteria | AHIP01000001.1 |
| 1009 | GCA_000145255.1 | 395494 | 370405 | Gallionella capsiferriformans ES-2 | ES-2 | Proteobacteria | CP002159.1 |
| 1010 | GCA_000241365.2 | 386428 | 386428 | Pseudoalteromonas sp. BSi20480 | BSi20480 | Proteobacteria | BADX01000166.1 |
| 1011 | GCA_001563285.1 | 407020 | 407020 | Sphingobium sp. MI1205 | MI1205 | Proteobacteria | CP005188.1 |
| 1012 | GCA_000166355.1 | 632292 | 413888 | Caldicellulosiruptor hydrothermalis 108 | 108 | Firmicutes | CP002219.1 |
| 1013 | GCA_000177355.1 | 679191 | 419005 | Prevotella amnii CRIS 21A-A | CRIS 21A-A | Bacteroidetes | ADFQ01000093.1 |
| 1014 | GCA_001553225.1 | 419005 | 419005 | Prevotella amnii | DNF00307 | Bacteroidetes | KQ960543.1 |
| 1015 | GCA_000421925.1 | 1346790 | 420233 | Sphingobium chinhatense IP26 | IP26 | Proteobacteria | AUDA01000024.1 |
| 1016 | GCA_001043885.1 | 1295136 | 427683 | Methylobacterium platani JCM 14648 | JCM 14648 | Proteobacteria | JXOD01000086.1 |
| 1017 | GCA_000633575.2 | 1450518 | 440518 | Sphingobium lucknowense F2 | F2 | Proteobacteria | JANF02000055.1 |
| 1018 | GCA_000023645.1 | 443144 | 443144 | Geobacter sp. M21 | M21 | Proteobacteria | CP001661.1 |
| 1019 | GCA_000157035.2 | 457388 | 457388 | Parabacteroides sp. 2_1_7 | 2_1_7 | Bacteroidetes | KQ236092.1 |
| 1020 | GCA_001517385.1 | 466044 | 466044 | Pannonibacter indicus | DSM 23407 | Proteobacteria | CYHE01000022.1 |
| 1021 | GCA_000143085.1 | 105559 | 473531 | Nitrosococcus watsonii C-113 | C-113 | Proteobacteria | CP002086.1 |
| 1022 | GCA_000943805.1 | 484429 | 484429 | Sphingobium sp. YBL2 | YBL2 | Proteobacteria | CP010954.1 |
| 1023 | GCA_000943805.1 | 484429 | 484429 | Sphingobium sp. YBL2 | YBL2 | Proteobacteria | CP010954.1 |
| 1024 | GCA_000242435.1 | 742743 | 487173 | Dialister succinatiphilus YIT 11850 | YIT 11850 | Firmicutes | JH591187.1 |
| 1025 | GCA_001527605.1 | 488732 | 488732 | Burkholderia diffusa | MSMB1544 | Proteobacteria | LOZQ01000052.1 |
| 1026 | GCA_000173035.1 | 495036 | 495036 | Geobacillus sp. G11MC16 | G11MC16 | Firmicutes | ABVH01000002.1 |
| 1027 | GCA_001545155.1 | 507626 | 507626 | Halomonas chromatireducens | AGD 8-3 | Proteobacteria | CP014226.1 |
| 1028 | GCA_000245735.2 | 1129374 | 545533 | Alishewanella jeotgali KCTC 22429 | KCTC 22429 | Proteobacteria | AHTH01000002.1 |
| 1029 | GCA_000225565.1 | 598467 | 598467 | Brenneria sp. EniD312 | EniD312 | Proteobacteria | CM001230.1 |
| 1030 | GCA_001499735.1 | 610332 | 610332 | Thiocapsa sp. KS1 | KS1 | Proteobacteria | LN848258.1 |
| 1031 | GCA_000188175.1 | 626939 | 626940 | Phascolarctobacterium succinatutens YIT 12067 | YIT 12067 | Firmicutes | GL830854.1 |
| 1032 | GCA_000307475.1 | 658661 | 658661 | Parabacteroides sp. D25 | D25 | Bacteroidetes | JH976502.1 |
| 1033 | GCA_001305515.1 | 665126 | 665126 | Prosthecomicrobium hirschii | 16 | Proteobacteria | LIYW01000001.1 |
| 1034 | GCA_001579845.1 | 674703 | 674703 | Rhodoplanes sp. Z2-YC6860 | YC6860 | Proteobacteria | CP007440.1 |
| 1035 | GCA_001077885.1 | 680026 | 680026 | Photobacterium swingsii | CAIM 1393 | Proteobacteria | LELC01000014.1 |
| 1036 | GCA_000253255.1 | 702113 | 702113 | Novosphingobium sp. PP1Y | PP1Y | Proteobacteria | FR856862.1 |
| 1037 | GCA_000253255.1 | 702113 | 702113 | Novosphingobium sp. PP1Y | PP1Y | Proteobacteria | FR856862.1 |
| 1038 | GCA_000024465.1 | 488538 | 767892 | Candidatus Puniceispirillum marinum IMCC1322 | IMCC1322 | Proteobacteria | CP001751.1 |
| 1039 | GCA_000422025.1 | 886559 | 886559 | Geobacillus sp. WSUCF1 | WSUCF1 | Firmicutes | ATCO01000102.1 |
| 1040 | GCA_001580035.1 | 936474 | 936474 | Sphingobium sp. 22B | 22B | Proteobacteria | LTAB01000001.1 |
| 1041 | GCA_000178975.2 | 1198114 | 940615 | Granulicella tundricola MP5ACTX9 | MP5ACTX9 | Acidobacteria | CP002480.1 |
| 1042 | GCA_000422205.1 | 941449 | 941449 | Desulfovibrio sp. X2 | X2 | Proteobacteria | ATHV01000015.1 |
| 1043 | GCA_000498695.1 | 977905 | 977905 | Bacillus sp. 17376 | 17376 | Firmicutes | KI547189.1 |
| 1044 | GCA_000801085.1 | 1076549 | 1076549 | Pantoea rodasii | ND03 | Proteobacteria | JTJJ01000016.1 |
| 1045 | GCA_000474655.1 | 1231725 | 1089444 | Dickeya solani D s0432-1 | D s0432-1 | Proteobacteria | AMWE01000004.1 |
| 1046 | GCA_000803195.1 | 1089444 | 1089444 | Dickeya solani | M005 | Proteobacteria | JSXD01000001.1 |
| 1047 | GCA_000972705.2 | 1637645 | 1118279 | Limnoraphis robusta CS-951 | CS-951 | Cyanobacteria | LATL02000068.1 |
| 1048 | GCA_001517305.1 | 1137284 | 1137284 | Marinomonas fungiae | JCM 18476 | Proteobacteria | CYHG01000005.1 |
| 1049 | GCA_000282175.1 | 1144323 | 1144323 | Pseudomonas sp. GM17 | GM17 | Proteobacteria | AKJU01000007.1 |
| 1050 | GCA_000282315.2 | 1144708 | 1144708 | Pseudomonas sp. GM41(2012) | GM41(2012) | Proteobacteria | AKJN02000007.1 |
| 1051 | GCA_000264335.1 | 1162282 | 1162282 | Rhodanobacter sp. 115 | 115 | Proteobacteria | AJXS01000176.1 |
| 1052 | GCA_000407765.1 | 1169321 | 1169321 | Escherichia sp. KTE114 | KTE114 | Proteobacteria | KE136626.1 |
| 1053 | GCA_000350705.1 | 1169331 | 1169331 | Escherichia sp. KTE11 | KTE11 | Proteobacteria | KB732246.1 |
| 1054 | GCA_000407925.1 | 1169349 | 1169349 | Escherichia sp. KTE31 | KTE31 | Proteobacteria | KE136722.1 |
| 1055 | GCA_001550165.1 | 1176302 | 1176302 | Sphingobium sp. AM | AM | Proteobacteria | LRUK01000005.1 |
| 1056 | GCA_000408325.1 | 1182659 | 1182659 | Escherichia sp. KTE52 | KTE52 | Proteobacteria | KE138680.1 |
| 1057 | GCA_000398905.1 | 1182695 | 1182695 | Klebsiella sp. KTE92 | KTE92 | Proteobacteria | KB976100.1 |
| 1058 | GCA_000408525.1 | 1182697 | 1182697 | Escherichia sp. KTE96 | KTE96 | Proteobacteria | KE137149.1 |
| 1059 | GCA_000408805.1 | 1182732 | 1182732 | Escherichia sp. KTE159 | KTE159 | Proteobacteria | KE137292.1 |
| 1060 | GCA_000316175.1 | 1207075 | 1207075 | Pseudomonas sp. UW4 | UW4 | Proteobacteria | CP003880.1 |
| 1061 | GCA_000801955.1 | 1217052 | 1217052 | Ralstonia sp. A12 | A12 | Proteobacteria | JSZO01000004.1 |
| 1062 | GCA_000369405.1 | 1217707 | 1217707 | Acinetobacter sp. ANC 3929 | ANC 3929 | Proteobacteria | KB849994.1 |
| 1063 | GCA_000342045.1 | 1244869 | 1244869 | Magnetospirillum caucaseum | SO-1 | Proteobacteria | AONQ01000075.1 |
| 1064 | GCA_000437815.1 | 1262687 | 1262687 | Acidaminococcus sp. CAG:542 | | Firmicutes | FR902027.1 |
| 1065 | GCA_000434475.1 | 1262870 | 1262870 | Dialister sp. CAG:486 | | Firmicutes | FR879630.1 |
| 1066 | GCA_000495795.1 | 1282360 | 1282360 | Asticcacaulis sp. AC460 | AC460 | Proteobacteria | AWGD01000018.1 |
| 1067 | GCA_000495835.1 | 1282361 | 1282361 | Asticcacaulis sp. AC402 | AC402 | Proteobacteria | AWGC01000023.1 |
| 1068 | GCA_000738435.1 | 666509 | 1284658 | Planktomarina temperata RCA23 | RCA23 | Proteobacteria | CP003984.1 |
| 1069 | GCA_001314555.1 | 1298881 | 1298881 | Idiomarinaceae bacterium HL-53 | | Proteobacteria | LIHO01000009.1 |
| 1070 | GCA_001458075.1 | 1298881 | 1298881 | Idiomarinaceae bacterium HL-53 | HL-53 | Proteobacteria | LN899469.1 |
| 1071 | GCA_000493055.1 | 1329826 | 1329826 | Enterobacter sp. MGH 22 | MGH 22 | Proteobacteria | KI535662.1 |
| 1072 | GCA_000416315.1 | 1330035 | 1330035 | Osedax symbiont Rs2 | | Proteobacteria | ASZI01000003.1 |
| 1073 | GCA_000445145.1 | 1114964 | 1332080 | Sphingobium baderi LL03 | LL03 | Proteobacteria | ATIB01000079.1 |
| 1074 | GCA_001046655.1 | 1114964 | 1332080 | Sphingobium baderi LL03 | LL03 | Proteobacteria | KQ130471.1 |
| 1075 | GCA_000445995.2 | 1345697 | 1345697 | Geobacillus sp. JF8 | JF8 | Firmicutes | CP006254.2 |
| 1076 | GCA_000788395.1 | 1348114 | 1348114 | Pseudoalteromonas sp. OCN003 | OCN003 | Proteobacteria | CP009888.1 |
| 1077 | GCA_001581925.1 | 1356306 | 1356306 | Ferrovum sp. PN-J185 | PN-J185 | Proteobacteria | LQZA01000004.1 |
| 1078 | GCA_001263175.1 | 1391653 | 1391653 | Vulgatibacter incomptus | DSM 27710 | Proteobacteria | CP012332.1 |
| 1079 | GCA_000475355.1 | 1396859 | 1396859 | Marinobacter sp. C1S70 | C1S70 | Proteobacteria | AXBW01000091.1 |
| 1080 | GCA_000475415.1 | 1397528 | 1397528 | Halomonas sp. PBN3 | PBN3 | Proteobacteria | AXCA01000185.1 |
| 1081 | GCA_001580565.1 | 1399969 | 1399969 | Burkholderia megalochromosomata | JC2949 | Proteobacteria | LRBF01000261.1 |
| 1082 | GCA_001028775.2 | 1406431 | 1406431 | Massilia sp. WF1 | WF1 | Proteobacteria | LELH02000007.1 |
| 1083 | GCA_000524665.1 | 1435973 | 1435973 | Alcanivorax sp. 97CO-5 | 97CO-5 | Proteobacteria | KI965903.1 |
| 1084 | GCA_000585055.1 | 1454003 | 1454003 | Candidatus Accumulibacter sp. BA-92 | | Proteobacteria | JEMX01000010.1 |
| 1085 | GCA_000648925.1 | 1458357 | 1458357 | Burkholderia jiangsuensis | MP-1 | Proteobacteria | JFHF01000072.1 |
| 1086 | GCA_000828915.1 | 1458426 | 1458426 | Comamonadaceae bacterium B1 | B1 | Proteobacteria | AP014569.1 |
| 1087 | GCA_001368815.1 | 1462524 | 1462524 | Paraliobacillus sp. PM-2 | PM-2 | Firmicutes | CTEI01000001.1 |
| 1088 | GCA_000828975.1 | 1469502 | 1469502 | Burkholderiales bacterium GJ-E10 | GJ-E10 | Proteobacteria | AP014683.1 |
| 1089 | GCA_000611145.2 | 1470558 | 1470558 | Cupriavidus sp. SK-3 | SK-3 | Proteobacteria | JFJV02000088.1 |
| 1090 | GCA_001402345.1 | 1481663 | 1481663 | Vibrio metoecus | YB5B06 | Proteobacteria | LBGQ01000030.1 |
| 1091 | GCA_001402675.1 | 1481663 | 1481663 | Vibrio metoecus | YB5B04 | Proteobacteria | LBGP01000018.1 |
| 1092 | GCA_000731675.1 | 1495066 | 1495066 | Pseudomonas sp. WCS358 | WCS358 | Proteobacteria | JMIT01000003.1 |
| 1093 | GCA_000732325.1 | 1499968 | 1499968 | Paenibacillus sp. TCA20 | TCA20 | Firmicutes | BBIW01000009.1 |
| 1094 | GCA_001529965.1 | 1503055 | 1503055 | Burkholderia territorii | MSMB1301WGS | Proteobacteria | LPEQ01000007.1 |
| 1095 | GCA_001530725.1 | 1503055 | 1503055 | Burkholderia territorii | MSMB1502WGS | Proteobacteria | LPFQ01000127.1 |
| 1096 | GCA_001530925.1 | 1503055 | 1503055 | Burkholderia territorii | MSMB1840WGS | Proteobacteria | LPGS01000070.1 |
| 1097 | GCA_000734975.2 | 1504981 | 1504981 | Halomonas sp. KO116 | KO116 | Proteobacteria | CP011052.1 |
| 1098 | GCA_000824845.1 | 1505933 | 1505933 | Mesorhizobium sp. ORS3359 | | Proteobacteria | CCNC01000071.1 |
| 1099 | GCA_000824805.1 | 1505946 | 1505946 | Mesorhizobium sp. SOD10 | | Proteobacteria | CCNA01000056.1 |
| 1100 | GCA_000802135.1 | 1531958 | 1531958 | Desulfosporosinus sp. BICA1-9 | | Firmicutes | JUEE01000226.1 |
| 1101 | GCA_000757485.1 | 1532557 | 1532557 | Achromobacter sp. RTa | RTa | Proteobacteria | JPYO01000042.1 |
| 1102 | GCA_000764205.1 | 1535422 | 1535422 | Thalassotalea sp. ND16A | ND16A | Proteobacteria | JQDZ01000100.1 |
| 1103 | GCA_001267535.1 | 1560201 | 1560201 | Erwinia iniecta | B120 | Proteobacteria | JRXE01000012.1 |
| 1104 | GCA_001267545.1 | 1560201 | 1560201 | Erwinia iniecta | B149 | Proteobacteria | JRXF01000008.1 |
| 1105 | GCA_000788125.1 | 1561068 | 1561068 | Acinetobacter sp. neg1 | neg1 | Proteobacteria | JSZD01000006.1 |
| 1106 | GCA_001411475.1 | 1563157 | 1563157 | Pseudomonas endophytica | BSTT44 | Proteobacteria | LLWH01000196.1 |
| 1107 | GCA_000934545.1 | 1565605 | 1565605 | Rhodocyclaceae bacterium PG1-Ca6 | PG1-Ca6 | Proteobacteria | CP010554.1 |
| 1108 | GCA_000831325.1 | 1572758 | 1572758 | Thauera sp. SWB20 | SWB20 | Proteobacteria | JTDM01000020.1 |
| 1109 | GCA_001455145.1 | 1307442 | 1583098 | Fusobacterium hwasookii ChDC F174 | ChDC F174 | Fusobacteria | CP013331.1 |
| 1110 | GCA_000836735.1 | 1588629 | 1588629 | Aeromonas sp. L_1B5_3 | L_1B5_3 | Proteobacteria | JXIR01000008.1 |
| 1111 | GCA_001439745.1 | 1615675 | 1615675 | Pseudomonas sp. DSM 28142 | DSM 28142 | Proteobacteria | JYLP01000005.1 |
| 1112 | GCA_001548095.1 | 1615909 | 1615909 | Geminocystis sp. NIES-3708 | NIES-3708 | Cyanobacteria | AP014815.1 |
| 1113 | GCA_000802035.2 | 1619235 | 1619235 | Pseudomonas sp. BICA1-14 | | Proteobacteria | JUEC02000002.1 |
| 1114 | GCA_000958445.1 | 1619246 | 1619246 | Enterobacter sp. 42202 | 42202 | Proteobacteria | JZYH01000003.1 |
| 1115 | GCA_000955795.1 | 1619951 | 1619951 | Burkholderiaceae bacterium 26 | 26 | Proteobacteria | JYOB01000010.1 |
| 1116 | GCA_000960545.1 | 1620393 | 1620393 | Vibrio sp. S457-15 | S457-15 | Proteobacteria | JYOQ01000119.1 |
| 1117 | GCA_000960425.1 | 1620394 | 1620394 | Vibrio sp. S512-13 | S512-13 | Proteobacteria | JYOR01000079.1 |
| 1118 | GCA_001011155.1 | 1620421 | 1620421 | Hoeflea sp. IMCC20628 | IMCC20628 | Proteobacteria | CP011479.1 |
| 1119 | GCA_001044505.1 | 1628278 | 1628278 | Nitrospina sp. SCGC_AAA799_A02 | | Nitrospinae | JZKI01000044.1 |
| 1120 | GCA_000961835.1 | 1629711 | 1629711 | Pseudomonas sp. BRH_c35 | | Proteobacteria | LADX01000225.1 |
| 1121 | GCA_000961805.1 | 1629714 | 1629714 | Peptococcaceae bacterium BRH_c23 | | Firmicutes | LADV01000103.1 |
| 1122 | GCA_001011715.1 | 1643812 | 1643812 | Enterobacter sp. GN02174 | GN02174 | Proteobacteria | LDCI01000011.1 |
| 1123 | GCA_001023195.1 | 1643814 | 1643814 | Enterobacter sp. GN02204 | GN02204 | Proteobacteria | LEEQ01000037.1 |
| 1124 | GCA_001011975.1 | 1643815 | 1643815 | Enterobacter sp. GN02225 | GN02225 | Proteobacteria | LDCL01000065.1 |
| 1125 | GCA_001077815.1 | 1648404 | 1648404 | Erythrobacter sp. s21-N3 | s21-N3 | Proteobacteria | CP011310.1 |
| 1126 | GCA_001023235.1 | 1659705 | 1659705 | Enterobacter sp. GN02275 | GN02275 | Proteobacteria | LEEK01000036.1 |
| 1127 | GCA_001022355.1 | 1659709 | 1659709 | Enterobacter sp. GN02366 | GN02366 | Proteobacteria | LEEC01000026.1 |
| 1128 | GCA_001022445.2 | 1659710 | 1659710 | Enterobacter sp. GN02454 | GN02454 | Proteobacteria | LEDW02000013.1 |
| 1129 | GCA_001022495.2 | 1659711 | 1659711 | Enterobacter sp. GN02457 | GN02457 | Proteobacteria | LEDV02000004.1 |
| 1130 | GCA_001022995.1 | 1659720 | 1659720 | Enterobacter sp. GN03191 | GN03191 | Proteobacteria | LECY01000030.1 |
| 1131 | GCA_001293045.1 | 1678678 | 1678678 | Burkholderia sp. HB1 | HB1 | Proteobacteria | CP012192.1 |
| 1132 | GCA_001412125.1 | 1699078 | 1699078 | Geobacillus sp. PA-3 | PA-3 | Firmicutes | LIDX01000059.1 |
| 1133 | GCA_001593285.1 | 1699622 | 1699622 | Psychrobacter sp. P2G3 | P2G3 | Proteobacteria | CP012529.1 |
| 1134 | GCA_001271345.1 | 1702325 | 1702325 | Chelatococcus sp. CO-6 | CO-6 | Proteobacteria | CP012398.1 |
| 1135 | GCA_001412595.1 | 1707785 | 1707785 | Massilia sp. WG5 | WG5 | Proteobacteria | CP012640.1 |
| 1136 | GCA_001458295.1 | 1715692 | 1715692 | Ruegeria sp. CECT 5091 | CECT 5091 | Proteobacteria | CYUD01000002.1 |
| 1137 | GCA_001458215.1 | 1715693 | 1715693 | Phaeobacter sp. CECT 7735 | CECT 7735 | Proteobacteria | CYTW01000001.1 |
| 1138 | GCA_001458695.1 | 1715989 | 1715989 | Candidatus Nitrospira inopinata | | Nitrospirae | LN885086.1 |
| 1139 | GCA_001529285.1 | 1729582 | 1729582 | Pseudomonas sp. TAA207 | TAA207 | Proteobacteria | LLWJ01000066.1 |
| 1140 | GCA_001529305.1 | 1729583 | 1729583 | Pseudomonas sp. TAD18 | TAD18 | Proteobacteria | LLWI01000076.1 |
| 1141 | GCA_001516045.1 | 1734396 | 1734396 | Desulfosporosinus sp. BRH_c37 | | Firmicutes | LOEW01000087.1 |
| 1142 | GCA_001421235.1 | 1735675 | 1735675 | Rhizobium sp. Leaf202 | Leaf202 | Proteobacteria | LMKD01000014.1 |
| 1143 | GCA_001421635.1 | 1735692 | 1735692 | Sphingomonas sp. Leaf25 | Leaf25 | Proteobacteria | LMKU01000030.1 |
| 1144 | GCA_001421985.1 | 1736231 | 1736231 | Rhizobium sp. Leaf68 | Leaf68 | Proteobacteria | LMLQ01000014.1 |
| 1145 | GCA_001423405.1 | 1736264 | 1736264 | Methylobacterium sp. Leaf123 | Leaf123 | Proteobacteria | LMNS01000004.1 |
| 1146 | GCA_001424265.1 | 1736280 | 1736280 | Acidovorax sp. Leaf160 | Leaf160 | Proteobacteria | LMOV01000023.1 |
| 1147 | GCA_001423245.1 | 1736336 | 1736336 | Aureimonas sp. Leaf324 | Leaf324 | Proteobacteria | LMOH01000012.1 |
| 1148 | GCA_001424045.1 | 1736355 | 1736355 | Rhizobium sp. Leaf371 | Leaf371 | Proteobacteria | LMQB01000026.1 |
| 1149 | GCA_001424985.1 | 1736429 | 1736429 | Rhizobium sp. Root1212 | Root1212 | Proteobacteria | LMDA01000022.1 |
| 1150 | GCA_001426805.1 | 1736462 | 1736462 | Brevundimonas sp. Root1423 | Root1423 | Proteobacteria | LMFL01000003.1 |
| 1151 | GCA_001429215.1 | 1736505 | 1736505 | Acidovorax sp. Root267 | Root267 | Proteobacteria | LMJC01000005.1 |
| 1152 | GCA_001428925.1 | 1736506 | 1736506 | Rhizobium sp. Root268 | Root268 | Proteobacteria | LMJD01000023.1 |
| 1153 | GCA_001424925.1 | 1736515 | 1736515 | Pseudomonas sp. Root329 | Root329 | Proteobacteria | LMCV01000007.1 |
| 1154 | GCA_001426345.1 | 1736537 | 1736537 | Devosia sp. Root436 | Root436 | Proteobacteria | LMEM01000015.1 |
| 1155 | GCA_001429505.1 | 1736544 | 1736544 | Bosea sp. Root483D1 | Root483D1 | Proteobacteria | LMJW01000003.1 |
| 1156 | GCA_001427465.1 | 1736566 | 1736566 | Pseudomonas sp. Root569 | Root569 | Proteobacteria | LMGQ01000003.1 |
| 1157 | GCA_001427825.1 | 1736569 | 1736569 | Brevundimonas sp. Root608 | Root608 | Proteobacteria | LMGT01000001.1 |
| 1158 | GCA_001429725.1 | 1736592 | 1736592 | Rhizobium sp. Root708 | Root708 | Proteobacteria | LMHV01000043.1 |
| 1159 | GCA_001414205.1 | 1737624 | 1737624 | Geobacillus sp. Sah69 | Sah69 | Firmicutes | LLKS01000066.1 |
| 1160 | GCA_001542405.1 | 1755240 | 1755240 | Rhizobium sp. BR10423 | BR10423 | Proteobacteria | LNCD01000088.1 |
| 1161 | GCA_001506075.1 | 1761910 | 1761910 | Vibrio sp. MEBiC08052 | MEBiC08052 | Proteobacteria | KQ947475.1 |
| 1162 | GCA_001469895.1 | 1766621 | 1766621 | Pseudoalteromonas sp. XI10 | XI10 | Proteobacteria | LOPY01000025.1 |
| 1163 | GCA_001544695.1 | 1777135 | 1777135 | Burkholderia sp. LMG 29317 | | Proteobacteria | FCOM01000073.1 |
| 1164 | GCA_900044055.1 | 1777138 | 1777138 | Burkholderia sp. LMG 29320 | | Proteobacteria | FCOX01000009.1 |
| 1165 | GCA_900044055.1 | 1777138 | 1777138 | Burkholderia sp. LMG 29320 | | Proteobacteria | FCOX01000002.1 |
| 1166 | GCA_900044055.1 | 1777138 | 1777138 | Burkholderia sp. LMG 29320 | | Proteobacteria | FCOX01000040.1 |
| 1167 | GCA_001544915.1 | 1777141 | 1777141 | Burkholderia sp. LMG 29323 | | Proteobacteria | FCOE01000003.1 |
| 1168 | GCA_001545035.1 | 1777143 | 1777143 | Burkholderia sp. LMG 29325 | | Proteobacteria | FCOJ01000099.1 |
| 1169 | GCA_001577625.1 | 1785949 | 1785949 | Halobacteroidaceae bacterium T328-2 | | Firmicutes | LSBO01000115.1 |
| 1170 | GCA_001581915.1 | 1789004 | 1789004 | Ferrovum sp. Z-31 | Z-31 | Proteobacteria | LRRD01000049.1 |
| 1171 | GCA_000286655.1 | 1216470 | 1812935 | Enterobacter sp. SST3 | SST3 | Proteobacteria | ALNS01000022.1 |
| 1172 | GCA_000467655.2 | 1334630 | 1812935 | Enterobacter cloacae EC_38VIM1 | EC_38VIM1 | Proteobacteria | ATHX01000012.1 |
| 1173 | GCA_000534155.1 | 1400152 | 1812935 | Enterobacter cloacae UCI 39 | UCI 39 | Proteobacteria | KI973119.1 |
| 1174 | GCA_001592395.1 | 1813182 | 1813182 | Geobacillus sp. JS12 | JS12 | Firmicutes | CP014749.1 |
| 1175 | GCA_000024525.1 | 504472 | 108 | Spirosoma linguale DSM 74 | DSM 74 | Bacteroidetes | CP001770.1 |
| 1176 | GCA_000253755.2 | 887281 | 195 | Campylobacter coli 7--1 | 7--1 | Proteobacteria | AIMZ01000005.1 |
| 1177 | GCA_000253935.2 | 887284 | 195 | Campylobacter coli 67-8 | 67-8 | Proteobacteria | AINI01000046.1 |
| 1178 | GCA_000254035.2 | 887304 | 195 | Campylobacter coli LMG 23341 | LMG 23341 | Proteobacteria | AINN01000049.1 |
| 1179 | GCA_000254055.2 | 887305 | 195 | Campylobacter coli LMG 23342 | LMG 23342 | Proteobacteria | AIN001000051.1 |
| 1180 | GCA_001416745.1 | 195 | 195 | Campylobacter coli | CVM N42205 | Proteobacteria | LBEO01000037.1 |
| 1181 | GCA_001418825.1 | 1440776 | 195 | Campylobacter coli CVM 41904 | CVM 41904 | Proteobacteria | JAJL01000029.1 |
| 1182 | GCA_001419395.1 | 1440016 | 195 | Campylobacter coli CVM 41963 | CVM 41963 | Proteobacteria | JAJR01000050.1 |
| 1183 | GCA_001441815.1 | 195 | 195 | Campylobacter coli | CVM N3506 | Proteobacteria | JOUR01000007.1 |
| 1184 | GCA_001442405.1 | 195 | 195 | Campylobacter coli | CVM N14840 | Proteobacteria | JOVV01000015.1 |
| 1185 | GCA_000705275.1 | 91352 | 198 | Campylobacter hyointestinalis subsp. hyointestinalis | DSM 19053 | Proteobacteria | JHQP01000002.1 |
| 1186 | GCA_000701165.2 | 1395570 | 292 | Burkholderia cepacia JBK9 | JBK9 | Proteobacteria | CP013730.1 |
| 1187 | GCA_001543265.1 | 296 | 296 | Pseudomonas fragi | P121 | Proteobacteria | CP013861.1 |
| 1188 | GCA_900048915.1 | 446 | 446 | Legionella pneumophila | 2531STDY5467317 | Proteobacteria | FJAM01000003.1 |
| 1189 | GCA_900051685.1 | 446 | 446 | Legionella pneumophila | 2531STDY5467385 | Proteobacteria | FJCH01000002.1 |
| 1190 | GCA_900052085.1 | 446 | 446 | Legionella pneumophila | 2531STDY5467299 | Proteobacteria | FJAW01000009.1 |
| 1191 | GCA_900059955.1 | 446 | 446 | Legionella pneumophila | 2531STDY5467397 | Proteobacteria | FJDI01000005.1 |
| 1192 | GCA_900060365.1 | 446 | 446 | Legionella pneumophila | 2531STDY5467373 | Proteobacteria | FJDE01000004.1 |
| 1193 | GCA_900061515.1 | 446 | 446 | Legionella pneumophila | 2531STDY5467344 | Proteobacteria | FJCG01000004.1 |
| 1194 | GCA_900061575.1 | 446 | 446 | Legionella pneumophila | 2531STDY5467389 | Proteobacteria | FJCV01000005.1 |
| 1195 | GCA_900070165.1 | 446 | 446 | Legionella pneumophila | 2531STDY5467373 | Proteobacteria | FJNL01000004.1 |
| 1196 | GCA_000176095.1 | 638315 | 450 | Legionella longbeachae D-4968 | D-4968 | Proteobacteria | ACZG01000001.1 |
| 1197 | GCA_000092265.1 | 1236608 | 480 | Moraxella catarrhalis BBH18 | BBH18 | Proteobacteria | CP002005.1 |
| 1198 | GCA_000192905.2 | 857581 | 480 | Moraxella catarrhalis 7169 | 7169 | Proteobacteria | AERC01000010.1 |
| 1199 | GCA_000192925.2 | 857579 | 480 | Moraxella catarrhalis 103P14B1 | 103P14B1 | Proteobacteria | AERE01000083.1 |
| 1200 | GCA_000192945.2 | 857578 | 480 | Moraxella catarrhalis 46P47B1 | 46P47B1 | Proteobacteria | AERF01000047.1 |
| 1201 | GCA_000192965.2 | 857577 | 480 | Moraxella catarrhalis 12P80B1 | 12P80B1 | Proteobacteria | AERG01000021.1 |
| 1202 | GCA_000192985.2 | 857576 | 480 | Moraxella catarrhalis BC1 | BC1 | Proteobacteria | AERH01000031.1 |
| 1203 | GCA_000193005.2 | 857575 | 480 | Moraxella catarrhalis BC7 | BC7 | Proteobacteria | AERI01000026.1 |
| 1204 | GCA_000193045.2 | 857573 | 480 | Moraxella catarrhalis CO72 | CO72 | Proteobacteria | AERK01000003.1 |
| 1205 | GCA_000193065.2 | 857572 | 480 | Moraxella catarrhalis 101P30B1 | 101P30B1 | Proteobacteria | AEPC01000015.1 |
| 1206 | GCA_000302495.1 | 749219 | 480 | Moraxella catarrhalis RH4 | RH4 | Proteobacteria | AMSO01000008.1 |
| 1207 | GCA_000766665.1 | 480 | 480 | Moraxella catarrhalis | 25239 | Proteobacteria | CP007669.1 |
| 1208 | GCA_001281005.1 | 546 | 546 | Citrobacter freundii | P10159 | Proteobacteria | CP012554.1 |
| 1209 | GCA_000952375.1 | 550 | 550 | Enterobacter cloacae | MNCRE12 | Proteobacteria | JYME01000006.1 |
| 1210 | GCA_001005095.1 | 553 | 553 | Pantoea ananatis | MR5 | Proteobacteria | LBFU01000095.1 |
| 1211 | GCA_000738105.1 | 180957 | 554 | Pectobacterium carotovorum subsp. brasiliense | CFIA1009 | Proteobacteria | JPSN01000016.1 |
| 1212 | GCA_000808235.1 | 180957 | 554 | Pectobacterium carotovorum subsp. brasiliense | YCD21 | Proteobacteria | JUJJ01000006.1 |
| 1213 | GCA_000006665.1 | 155864 | 562 | Escherichia coli O157:H7 str. EDL933 | EDL933 | Proteobacteria | AE005174.2 |
| 1214 | GCA_000008865.1 | 386585 | 562 | Escherichia coli O157:H7 str. Sakai | Sakai substr. RIMD 0509952 | Proteobacteria | BA000007.2 |
| 1215 | GCA_000019385.1 | 481805 | 562 | Escherichia coli ATCC 8739 | ATCC 8739 | Proteobacteria | CP000946.1 |
| 1216 | GCA_000019645.1 | 439855 | 562 | Escherichia coli SMS-3-5 | SMS-3-5 | Proteobacteria | CP000970.1 |
| 1217 | GCA_000021125.1 | 444450 | 562 | Escherichia coli O157:H7 str. EC4115 | EC4115 | Proteobacteria | CP001164.1 |
| 1218 | GCA_000022225.1 | 544404 | 562 | Escherichia coli O157:H7 str. TW14359 | TW14359 | Proteobacteria | CP001368.1 |
| 1219 | GCA_000025165.1 | 701177 | 562 | Escherichia coli O55:H7 str. CB9615 | CB9615 | Proteobacteria | CP001846.1 |
| 1220 | GCA_000155125.1 | 502346 | 562 | Escherichia coli O157:H7 str. TW14588 | TW14588 | Proteobacteria | CM000662.1 |
| 1221 | GCA_000164335.1 | 749547 | 562 | Escherichia coli MS 187-1 | MS 187-1 | Proteobacteria | GG772497.1 |
| 1222 | GCA_000171915.1 | 444451 | 562 | Escherichia coli O157:H7 str. EC4196 | EC4196 | Proteobacteria | ABHO01000006.1 |
| 1223 | GCA_000171935.1 | 444452 | 562 | Escherichia coli O157:H7 str. EC4113 | EC4113 | Proteobacteria | ABHP01000015.1 |
| 1224 | GCA_000171955.1 | 444453 | 562 | Escherichia coli O157:H7 str. EC4076 | EC4076 | Proteobacteria | ABHQ01000017.1 |
| 1225 | GCA_000171975.1 | 478004 | 562 | Escherichia coli O157:H7 str. EC4401 | EC4401 | Proteobacteria | ABHR01000005.1 |
| 1226 | GCA_000171995.1 | 478005 | 562 | Escherichia coli O157:H7 str. EC4486 | EC4486 | Proteobacteria | ABHS01000002.1 |
| 1227 | GCA_000172015.1 | 478006 | 562 | Escherichia coli O157:H7 str. EC4501 | EC4501 | Proteobacteria | ABHT01000004.1 |
| 1228 | GCA_000172035.1 | 478008 | 562 | Escherichia coli O157:H7 str. EC869 | EC869 | Proteobacteria | ABHU01000001.1 |
| 1229 | GCA_000172055.1 | 478007 | 562 | Escherichia coli O157:H7 str. EC508 | EC508 | Proteobacteria | ABHW01000003.1 |
| 1230 | GCA_000176615.2 | 656437 | 562 | Escherichia coli TA143 | TA143 | Proteobacteria | GL884236.1 |
| 1231 | GCA_000181735.1 | 444447 | 562 | Escherichia coli O157:H7 str. EC4206 | EC4206 | Proteobacteria | ABHK02000001.1 |
| 1232 | GCA_000181755.1 | 444448 | 562 | Escherichia coli O157:H7 str. EC4045 | EC4045 | Proteobacteria | ABHL02000001.1 |
| 1233 | GCA_000181775.1 | 444449 | 562 | Escherichia coli O157:H7 str. EC4042 | EC4042 | Proteobacteria | ABHM02000001.1 |
| 1234 | GCA_000187285.4 | 926026 | 562 | Escherichia coli O157:H7 str. G5101 | G5101 | Proteobacteria | AETX01000114.1 |
| 1235 | GCA_000187305.2 | 926027 | 562 | Escherichia coli O157:H-str. 493-89 | 493-89 | Proteobacteria | AETY01000104.1 |
| 1236 | GCA_000187325.2 | 926028 | 562 | Escherichia coli O157:H-str. H 2687 | H 2687 | Proteobacteria | AETZ01000110.1 |
| 1237 | GCA_000187365.2 | 926030 | 562 | Escherichia coli O55:H7 str. USDA 5905 | USDA 5905 | Proteobacteria | AEUB01000059.1 |
| 1238 | GCA_000187385.2 | 926032 | 562 | Escherichia coli O157:H7 str. LSU-61 | LSU-61 | Proteobacteria | AEUC01000091.1 |
| 1239 | GCA_000192665.2 | 997824 | 562 | Escherichia coli O157:H7 str. 1044 | 1044 | Proteobacteria | AERP01000018.1 |
| 1240 | GCA_000192685.2 | 997825 | 562 | Escherichia coli O157:H7 str. 1125 | 1125 | Proteobacteria | AERR01000012.1 |
| 1241 | GCA_000193955.2 | 941435 | 562 | Escherichia coli O157:H7 str. EC1212 | EC1212 | Proteobacteria | AERQ01000011.1 |
| 1242 | GCA_000245515.1 | 1048689 | 562 | Escherichia coli O55:H7 str. RM12579 | RM12579 | Proteobacteria | CP003109.1 |
| 1243 | GCA_000249375.2 | 868149 | 562 | Escherichia coli DEC4A | DEC4A | Proteobacteria | AIFK01000052.1 |
| 1244 | GCA_000249395.2 | 868150 | 562 | Escherichia coli DEC4B | DEC4B | Proteobacteria | AIFL01000076.1 |
| 1245 | GCA_000249495.2 | 868155 | 562 | Escherichia coli DEC5A | DEC5A | Proteobacteria | AIFQ01000037.1 |
| 1246 | GCA_000249535.2 | 868157 | 562 | Escherichia coli DEC5C | DEC5C | Proteobacteria | AIFS01000052.1 |
| 1247 | GCA_000249555.2 | 868158 | 562 | Escherichia coli DEC5D | DEC5D | Proteobacteria | AIFT01000001.1 |
| 1248 | GCA_000261145.1 | 656421 | 562 | Escherichia coli M919 | M919 | Proteobacteria | JH659569.1 |
| 1249 | GCA_000262125.1 | 741093 | 562 | Escherichia coli Xuzhou21 | Xuzhou21 | Proteobacteria | CP001925.1 |
| 1250 | GCA_000267005.2 | 1005471 | 562 | Escherichia coli FDA505 | FDA505 | Proteobacteria | JH692596.1 |
| 1251 | GCA_000267025.1 | 1005535 | 562 | Escherichia coli EC1738 | EC1738 | Proteobacteria | AKMN01000003.1 |
| 1252 | GCA_000267045.1 | 1005536 | 562 | Escherichia coli EC1734 | EC1734 | Proteobacteria | AKMO01000001.1 |
| 1253 | GCA_000267065.1 | 1005520 | 562 | Escherichia coli TW09109 | TW09109 | Proteobacteria | AKLY01000005.1 |
| 1254 | GCA_000267085.1 | 1005497 | 562 | Escherichia coli PA22 | PA22 | Proteobacteria | AKLI01000001.1 |
| 1255 | GCA_000267105.1 | 1005508 | 562 | Escherichia coli PA40 | PA40 | Proteobacteria | AKLQ01000001.1 |
| 1256 | GCA_000267125.1 | 1005515 | 562 | Escherichia coli TW06591 | TW06591 | Proteobacteria | AKLT01000044.1 |
| 1257 | GCA_000267145.1 | 1005517 | 562 | Escherichia coli TW10246 | TW10246 | Proteobacteria | AKLV01000003.1 |
| 1258 | GCA_000267165.1 | 1005518 | 562 | Escherichia coli TW11039 | TW11039 | Proteobacteria | AKLW01000006.1 |
| 1259 | GCA_000267185.1 | 1005522 | 562 | Escherichia coli TW10119 | TW10119 | Proteobacteria | AKMA01000001.1 |
| 1260 | GCA_000267205.2 | 1005548 | 562 | Escherichia coli EC1863 | EC1863 | Proteobacteria | JH692972.1 |
| 1261 | GCA_000267225.2 | 1005540 | 562 | Escherichia coli EC1845 | EC1845 | Proteobacteria | JH693448.1 |
| 1262 | GCA_000267245.2 | 1005534 | 562 | Escherichia coli EC4448 | EC4448 | Proteobacteria | JH693935.1 |
| 1263 | GCA_000267265.2 | 1005533 | 562 | Escherichia coli EC4437 | EC4437 | Proteobacteria | JH694340.1 |
| 1264 | GCA_000267285.2 | 1005532 | 562 | Escherichia coli EC4436 | EC4436 | Proteobacteria | JH694746.1 |
| 1265 | GCA_000267305.2 | 1005531 | 562 | Escherichia coli EC4439 | EC4439 | Proteobacteria | JH697080.1 |
| 1266 | GCA_000267325.1 | 1005530 | 562 | Escherichia coli EC4402 | EC4402 | Proteobacteria | JH697727.1 |
| 1267 | GCA_000267345.2 | 1005529 | 562 | Escherichia coli EC4013 | EC4013 | Proteobacteria | JH698305.1 |
| 1268 | GCA_000267365.2 | 1005528 | 562 | Escherichia coli EC4422 | EC4422 | Proteobacteria | JH695870.1 |
| 1269 | GCA_000267385.2 | 1005527 | 562 | Escherichia coli EC4421 | EC4421 | Proteobacteria | JH696600.1 |
| 1270 | GCA_000267405.2 | 1005526 | 562 | Escherichia coli TW14301 | TW14301 | Proteobacteria | JH695863.1 |
| 1271 | GCA_000267425.2 | 1005525 | 562 | Escherichia coli TW14313 | TW14313 | Proteobacteria | JH695399.1 |
| 1272 | GCA_000267445.2 | 1005524 | 562 | Escherichia coli EC4196 | EC4196 | Proteobacteria | JH699193.1 |
| 1273 | GCA_000267465.2 | 1005523 | 562 | Escherichia coli EC4203 | EC4203 | Proteobacteria | JH699677.1 |
| 1274 | GCA_000267485.2 | 1005473 | 562 | Escherichia coli FDA517 | FDA517 | Proteobacteria | JH701994.1 |
| 1275 | GCA_000267505.2 | 1005475 | 562 | Escherichia coli FRIK1996 | FRIK1996 | Proteobacteria | JH698283.1 |
| 1276 | GCA_000267525.2 | 1005476 | 562 | Escherichia coli FRIK1985 | FRIK1985 | Proteobacteria | JH701532.1 |
| 1277 | GCA_000267585.2 | 1005521 | 562 | Escherichia coli TW09195 | TW09195 | Proteobacteria | JH700736.1 |
| 1278 | GCA_000267605.2 | 1005519 | 562 | Escherichia coli TW09098 | TW09098 | Proteobacteria | JH702452.1 |
| 1279 | GCA_000267625.2 | 1005516 | 562 | Escherichia coli TW07945 | TW07945 | Proteobacteria | JH702467.1 |
| 1280 | GCA_000267645.2 | 1005510 | 562 | Escherichia coli PA42 | PA42 | Proteobacteria | JH702836.1 |
| 1281 | GCA_000267665.2 | 1005509 | 562 | Escherichia coli PA41 | PA41 | Proteobacteria | JH703744.1 |
| 1282 | GCA_000267685.2 | 1005507 | 562 | Escherichia coli PA39 | PA39 | Proteobacteria | JH704563.1 |
| 1283 | GCA_000267705.2 | 1005504 | 562 | Escherichia coli PA33 | PA33 | Proteobacteria | JH705112.1 |
| 1284 | GCA_000267725.2 | 1005503 | 562 | Escherichia coli PA32 | PA32 | Proteobacteria | JH705678.1 |
| 1285 | GCA_000267745.2 | 1005502 | 562 | Escherichia coli PA31 | PA31 | Proteobacteria | JH707077.1 |
| 1286 | GCA_000267765.2 | 1005501 | 562 | Escherichia coli PA28 | PA28 | Proteobacteria | JH705685.1 |
| 1287 | GCA_000267785.2 | 1005500 | 562 | Escherichia coli PA25 | PA25 | Proteobacteria | JH706538.1 |
| 1288 | GCA_000267805.2 | 1005499 | 562 | Escherichia coli PA24 | PA24 | Proteobacteria | JH707528.1 |
| 1289 | GCA_000267825.2 | 1005496 | 562 | Escherichia coli PA15 | PA15 | Proteobacteria | JH707559.1 |
| 1290 | GCA_000267845.2 | 1005495 | 562 | Escherichia coli PA14 | PA14 | Proteobacteria | JH708600.1 |
| 1291 | GCA_000267865.2 | 1005494 | 562 | Escherichia coli PA10 | PA10 | Proteobacteria | JH709066.1 |
| 1292 | GCA_000267885.2 | 1005493 | 562 | Escherichia coli PA9 | PA9 | Proteobacteria | JH709102.1 |
| 1293 | GCA_000267905.2 | 1005490 | 562 | Escherichia coli PA5 | PA5 | Proteobacteria | JH709975.1 |
| 1294 | GCA_000267925.2 | 1005488 | 562 | Escherichia coli PA3 | PA3 | Proteobacteria | JH711390.1 |
| 1295 | GCA_000267945.2 | 1005481 | 562 | Escherichia coli 93-001 | 93-001 | Proteobacteria | JH710997.1 |
| 1296 | GCA_000267965.2 | 1005478 | 562 | Escherichia coli FRIK1990 | FRIK1990 | Proteobacteria | JH710503.1 |
| 1297 | GCA_000302715.1 | 1005483 | 562 | Escherichia coli FRIK920 | FRIK920 | Proteobacteria | AMTP01000126.1 |
| 1298 | GCA_000302735.1 | 1005491 | 562 | Escherichia coli PA7 | PA7 | Proteobacteria | AMTQ01000008.1 |
| 1299 | GCA_000303235.2 | 1005441 | 562 | Escherichia coli 0.1304 | 0.1304 | Proteobacteria | JH943332.1 |
| 1300 | GCA_000303275.2 | 1005482 | 562 | Escherichia coli FRIK523 | FRIK523 | Proteobacteria | JH943936.1 |
| 1301 | GCA_000303295.2 | 1005486 | 562 | Escherichia coli NE098 | NE098 | Proteobacteria | JH946265.1 |
| 1302 | GCA_000303315.2 | 1005554 | 562 | Escherichia coli EC1870 | EC1870 | Proteobacteria | JH945214.1 |
| 1303 | GCA_000303335.2 | 1005553 | 562 | Escherichia coli EC1869 | EC1869 | Proteobacteria | JH946714.1 |
| 1304 | GCA_000303355.2 | 1005552 | 562 | Escherichia coli EC1868 | EC1868 | Proteobacteria | JH944350.1 |
| 1305 | GCA_000303375.2 | 1005551 | 562 | Escherichia coli EC1866 | EC1866 | Proteobacteria | JH944315.1 |
| 1306 | GCA_000303415.2 | 1005549 | 562 | Escherichia coli EC1864 | EC1864 | Proteobacteria | JH945870.1 |
| 1307 | GCA_000303435.2 | 1005547 | 562 | Escherichia coli EC1862 | EC1862 | Proteobacteria | JH952466.1 |
| 1308 | GCA_000303455.2 | 1005546 | 562 | Escherichia coli EC1856 | EC1856 | Proteobacteria | JH952880.1 |
| 1309 | GCA_000303475.2 | 1005545 | 562 | Escherichia coli EC1850 | EC1850 | Proteobacteria | JH952886.1 |
| 1310 | GCA_000303495.2 | 1005544 | 562 | Escherichia coli EC1849 | EC1849 | Proteobacteria | JH953696.1 |
| 1311 | GCA_000303515.2 | 1005543 | 562 | Escherichia coli EC1848 | EC1848 | Proteobacteria | JH955442.1 |
| 1312 | GCA_000303535.2 | 1005542 | 562 | Escherichia coli EC1847 | EC1847 | Proteobacteria | JH963080.1 |
| 1313 | GCA_000303555.2 | 1005541 | 562 | Escherichia coli EC1846 | EC1846 | Proteobacteria | JH956315.1 |
| 1314 | GCA_000303575.2 | 1005539 | 562 | Escherichia coli EC1737 | EC1737 | Proteobacteria | JH963529.1 |
| 1315 | GCA_000303595.2 | 1005538 | 562 | Escherichia coli EC1736 | EC1736 | Proteobacteria | JH965238.1 |
| 1316 | GCA_000303615.2 | 1005537 | 562 | Escherichia coli EC1735 | EC1735 | Proteobacteria | JH958312.1 |
| 1317 | GCA_000303675.2 | 1005506 | 562 | Escherichia coli PA38 | PA38 | Proteobacteria | JH966117.1 |
| 1318 | GCA_000303695.2 | 1005505 | 562 | Escherichia coli PA34 | PA34 | Proteobacteria | JH963946.1 |
| 1319 | GCA_000303715.2 | 1005474 | 562 | Escherichia coli FDA506 | FDA506 | Proteobacteria | JH964536.1 |
| 1320 | GCA_000303735.2 | 1005472 | 562 | Escherichia coli FDA507 | FDA507 | Proteobacteria | JH963945.1 |
| 1321 | GCA_000303755.2 | 1005470 | 562 | Escherichia coli FDA504 | FDA504 | Proteobacteria | JH961871.1 |
| 1322 | GCA_000303775.2 | 1005477 | 562 | Escherichia coli FRIK1999 | FRIK1999 | Proteobacteria | JH962623.1 |
| 1323 | GCA_000303795.2 | 1005480 | 562 | Escherichia coli FRIK1997 | FRIK1997 | Proteobacteria | JH961362.1 |
| 1324 | GCA_000303815.2 | 1005485 | 562 | Escherichia coli NE1487 | NE1487 | Proteobacteria | JH957512.1 |
| 1325 | GCA_000303835.2 | 1005484 | 562 | Escherichia coli NE037 | NE037 | Proteobacteria | JH960043.1 |
| 1326 | GCA_000303855.2 | 1005479 | 562 | Escherichia coli FRIK2001 | FRIK2001 | Proteobacteria | JH960978.1 |
| 1327 | GCA_000303875.2 | 1005489 | 562 | Escherichia coli PA4 | PA4 | Proteobacteria | JH960549.1 |
| 1328 | GCA_000303895.2 | 1005498 | 562 | Escherichia coli PA23 | PA23 | Proteobacteria | JH959990.1 |
| 1329 | GCA_000303915.2 | 1005514 | 562 | Escherichia coli PA49 | PA49 | Proteobacteria | JH959133.1 |
| 1330 | GCA_000303935.2 | 1005511 | 562 | Escherichia coli PA45 | PA45 | Proteobacteria | JH958691.1 |
| 1331 | GCA_000303955.2 | 1005555 | 562 | Escherichia coli TT12B | TT12B | Proteobacteria | JH957216.1 |
| 1332 | GCA_000303975.2 | 1005557 | 562 | Escherichia coli MA6 | MA6 | Proteobacteria | JH956821.1 |
| 1333 | GCA_000303995.2 | 1005558 | 562 | Escherichia coli 5905 | 5905 | Proteobacteria | JH958373.1 |
| 1334 | GCA_000304015.2 | 1005559 | 562 | Escherichia coli CB7326 | CB7326 | Proteobacteria | JH956766.1 |
| 1335 | GCA_000304035.2 | 1005560 | 562 | Escherichia coli EC96038 | EC96038 | Proteobacteria | JH955436.1 |
| 1336 | GCA_000304055.2 | 1005561 | 562 | Escherichia coli 5412 | 5412 | Proteobacteria | JH954949.1 |
| 1337 | GCA_000304815.2 | 1005450 | 562 | Escherichia coli 3.4870 | 3.4870 | Proteobacteria | JH970627.1 |
| 1338 | GCA_000304835.2 | 1005463 | 562 | Escherichia coli 8.0416 | 8.0416 | Proteobacteria | AMTN01000133.1 |
| 1339 | GCA_000304855.2 | 1005469 | 562 | Escherichia coli 10.0821 | 10.0821 | Proteobacteria | AMTO01000004.1 |
| 1340 | GCA_000304875.2 | 1005452 | 562 | Escherichia coli 5.2239 | 5.2239 | Proteobacteria | JH970990.1 |
| 1341 | GCA_000305155.2 | 1005455 | 562 | Escherichia coli 6.0172 | 6.0172 | Proteobacteria | JH970109.1 |
| 1342 | GCA_000305375.2 | 1005461 | 562 | Escherichia coli 8.0586 | 8.0586 | Proteobacteria | JH969648.1 |
| 1343 | GCA_000305395.2 | 1005460 | 562 | Escherichia coli 8.2524 | 8.2524 | Proteobacteria | JH969044.1 |
| 1344 | GCA_000305415.2 | 1005466 | 562 | Escherichia coli 10.0833 | 10.0833 | Proteobacteria | JH969098.1 |
| 1345 | GCA_000305435.2 | 1005467 | 562 | Escherichia coli 10.0869 | 10.0869 | Proteobacteria | JH968727.1 |
| 1346 | GCA_000305455.2 | 1005397 | 562 | Escherichia coli 88.0221 | 88.0221 | Proteobacteria | JH968005.1 |
| 1347 | GCA_000316325.2 | 1005396 | 562 | Escherichia coli 88.1467 | 88.1467 | Proteobacteria | KB000019.1 |
| 1348 | GCA_000316345.2 | 1005398 | 562 | Escherichia coli 88.1042 | 88.1042 | Proteobacteria | KB006081.1 |
| 1349 | GCA_000316365.2 | 1005399 | 562 | Escherichia coli 89.0511 | 89.0511 | Proteobacteria | KB007266.1 |
| 1350 | GCA_000316385.2 | 1005400 | 562 | Escherichia coli 90.0091 | 90.0091 | Proteobacteria | KB007294.1 |
| 1351 | GCA_000316405.2 | 1005401 | 562 | Escherichia coli 90.0039 | 90.0039 | Proteobacteria | KB006791.1 |
| 1352 | GCA_000316425.2 | 1005402 | 562 | Escherichia coli 90.2281 | 90.2281 | Proteobacteria | KB005715.1 |
| 1353 | GCA_000316445.2 | 1005403 | 562 | Escherichia coli 93.0055 | 93.0055 | Proteobacteria | KB004131.1 |
| 1354 | GCA_000316465.1 | 1005404 | 562 | Escherichia coli 93.0056 | 93.0056 | Proteobacteria | KB004997.1 |
| 1355 | GCA_000316485.1 | 1005405 | 562 | Escherichia coli 94.0618 | 94.0618 | Proteobacteria | KB005707.1 |
| 1356 | GCA_000316505.2 | 1005420 | 562 | Escherichia coli 97.0007 | 97.0007 | Proteobacteria | ANMC01000275.1 |
| 1357 | GCA_000316545.2 | 1005422 | 562 | Escherichia coli 99.0678 | 99.0678 | Proteobacteria | ANME01000013.1 |
| 1358 | GCA_000316565.2 | 1005424 | 562 | Escherichia coli 99.0713 | 99.0713 | Proteobacteria | ANMF01000001.1 |
| 1359 | GCA_000316705.2 | 1005421 | 562 | Escherichia coli 99.0672 | 99.0672 | Proteobacteria | KB004968.1 |
| 1360 | GCA_000316725.2 | 1005418 | 562 | Escherichia coli 97.1742 | 97.1742 | Proteobacteria | KB004341.1 |
| 1361 | GCA_000316745.2 | 1005416 | 562 | Escherichia coli 97.0003 | 97.0003 | Proteobacteria | JH999738.1 |
| 1362 | GCA_000316765.2 | 1005415 | 562 | Escherichia coli 96.0107 | 96.0107 | Proteobacteria | KB003449.1 |
| 1363 | GCA_000316785.2 | 1005412 | 562 | Escherichia coli 96.0939 | 96.0939 | Proteobacteria | KB003084.1 |
| 1364 | GCA_000316805.2 | 1005413 | 562 | Escherichia coli 96.0932 | 96.0932 | Proteobacteria | KB003092.1 |
| 1365 | GCA_000316825.2 | 1005411 | 562 | Escherichia coli 96.0427 | 96.0427 | Proteobacteria | KB002687.1 |
| 1366 | GCA_000316845.2 | 1005406 | 562 | Escherichia coli 95.0183 | 95.0183 | Proteobacteria | KB002150.1 |
| 1367 | GCA_000316865.2 | 1005407 | 562 | Escherichia coli 95.1288 | 95.1288 | Proteobacteria | KB001319.1 |
| 1368 | GCA_000316885.2 | 1005408 | 562 | Escherichia coli 95.0943 | 95.0943 | Proteobacteria | KB000789.1 |
| 1369 | GCA_000316905.2 | 1005410 | 562 | Escherichia coli 96.0428 | 96.0428 | Proteobacteria | KB000504.1 |
| 1370 | GCA_000318425.2 | 1005414 | 562 | Escherichia coli 96.0109 | 96.0109 | Proteobacteria | KB009454.1 |
| 1371 | GCA_000318445.2 | 1005419 | 562 | Escherichia coli 97.0010 | 97.0010 | Proteobacteria | KB008877.1 |
| 1372 | GCA_000326965.1 | 1169382 | 562 | Escherichia coli KTE125 | KTE125 | Proteobacteria | KB732191.1 |
| 1373 | GCA_000334975.2 | 1005433 | 562 | Escherichia coli 99.0815 | 99.0815 | Proteobacteria | AODZ01000274.1 |
| 1374 | GCA_000334995.2 | 1005430 | 562 | Escherichia coli 99.0816 | 99.0816 | Proteobacteria | AOEA01000217.1 |
| 1375 | GCA_000335015.2 | 1005437 | 562 | Escherichia coli 99.1793 | 99.1793 | Proteobacteria | AOEF01000014.1 |
| 1376 | GCA_000335035.2 | 1005436 | 562 | Escherichia coli 99.1805 | 99.1805 | Proteobacteria | AOEG01000281.1 |
| 1377 | GCA_000335055.2 | 1051353 | 562 | Escherichia coli ATCC 700728 | ATCC 700728 | Proteobacteria | AOEH01000126.1 |
| 1378 | GCA_000335075.2 | 1005512 | 562 | Escherichia coli PA47 | PA47 | Proteobacteria | AOEM01000157.1 |
| 1379 | GCA_000335095.2 | 1005513 | 562 | Escherichia coli PA48 | PA48 | Proteobacteria | AOEN01000122.1 |
| 1380 | GCA_000335115.1 | 1051348 | 562 | Escherichia coli 7.1982 | 7.1982 | Proteobacteria | AOEP01000011.1 |
| 1381 | GCA_000335135.1 | 1005439 | 562 | Escherichia coli 99.1781 | 99.1781 | Proteobacteria | AOEQ01000012.1 |
| 1382 | GCA_000335155.2 | 1005435 | 562 | Escherichia coli 99.1762 | 99.1762 | Proteobacteria | AOER01000006.1 |
| 1383 | GCA_000335175.2 | 1051352 | 562 | Escherichia coli PA35 | PA35 | Proteobacteria | AOES01000151.1 |
| 1384 | GCA_000335195.2 | 1051347 | 562 | Escherichia coli 3.4880 | 3.4880 | Proteobacteria | AOET01000122.1 |
| 1385 | GCA_000335215.2 | 1005423 | 562 | Escherichia coli 99.0670 | 99.0670 | Proteobacteria | AOEV01000013.1 |
| 1386 | GCA_000335235.2 | 1005434 | 562 | Escherichia coli 99.0814 | 99.0814 | Proteobacteria | AODY01000209.1 |
| 1387 | GCA_000335255.2 | 1005432 | 562 | Escherichia coli 99.0839 | 99.0839 | Proteobacteria | AOEB01000180.1 |
| 1388 | GCA_000335275.2 | 1005431 | 562 | Escherichia coli 99.0848 | 99.0848 | Proteobacteria | AOEC01000227.1 |
| 1389 | GCA_000335295.2 | 1005440 | 562 | Escherichia coli 99.1753 | 99.1753 | Proteobacteria | AOED01000247.1 |
| 1390 | GCA_000335315.2 | 1005438 | 562 | Escherichia coli 99.1775 | 99.1775 | Proteobacteria | AOEE01000251.1 |
| 1391 | GCA_000335335.2 | 1051351 | 562 | Escherichia coli PA19 | PA19 | Proteobacteria | AOEJ01000133.1 |
| 1392 | GCA_000335355.2 | 1005487 | 562 | Escherichia coli PA2 | PA2 | Proteobacteria | AOEL01000002.1 |
| 1393 | GCA_000335415.2 | 1051349 | 562 | Escherichia coli PA11 | PA11 | Proteobacteria | AOEI01000002.1 |
| 1394 | GCA_000335435.2 | 1051350 | 562 | Escherichia coli PA13 | PA13 | Proteobacteria | AOEK01000001.1 |
| 1395 | GCA_000335455.2 | 1005492 | 562 | Escherichia coli PA8 | PA8 | Proteobacteria | AOEO01000008.1 |
| 1396 | GCA_000340455.2 | 1081887 | 562 | Escherichia coli 09BKT078844 | 09BKT078844 | Proteobacteria | KB453231.1 |
| 1397 | GCA_000350025.2 | 1090930 | 562 | Escherichia coli ONT:H33 str. C48/93 | C48/93 | Proteobacteria | AHAX01000074.1 |
| 1398 | GCA_000350045.2 | 1090929 | 562 | Escherichia coli O127:H27 str. C43/90 | C43/90 | Proteobacteria | AHAW01000071.1 |
| 1399 | GCA_000351625.1 | 1182673 | 562 | Escherichia coli KTE66 | KTE66 | Proteobacteria | KB732762.1 |
| 1400 | GCA_000351985.1 | 1182733 | 562 | Escherichia coli KTE161 | KTE161 | Proteobacteria | KB732934.1 |
| 1401 | GCA_000352325.1 | 1182657 | 562 | Escherichia coli KTE50 | KTE50 | Proteobacteria | KB733431.1 |
| 1402 | GCA_000352965.1 | 1181748 | 562 | Escherichia coli KTE202 | KTE202 | Proteobacteria | KB733186.1 |
| 1403 | GCA_000357685.2 | 1125651 | 562 | Escherichia coli P0304799.3 | P0304799.3 | Proteobacteria | APZX01000029.1 |
| 1404 | GCA_000456685.1 | 1280993 | 562 | Escherichia coli HVH 43 (4-2173468) | HVH 43 (4-2173468) | Proteobacteria | KE699249.1 |
| 1405 | GCA_000456705.1 | 1280994 | 562 | Escherichia coli HVH 44 (4-2298570) | HVH 44 (4-2298570) | Proteobacteria | KE699258.1 |
| 1406 | GCA_000458705.1 | 1281109 | 562 | Escherichia coli HVH 182 (4-0985554) | HVH 182 (4-0985554) | Proteobacteria | KE700608.1 |
| 1407 | GCA_000458915.1 | 1281120 | 562 | Escherichia coli HVH 193 (4-3331423) | HVH 193 (4-3331423) | Proteobacteria | KE700785.1 |
| 1408 | GCA_000460315.1 | 1281191 | 562 | Escherichia coli UMEA 3144-1 | UMEA 3144-1 | Proteobacteria | KE701670.1 |
| 1409 | GCA_000460355.1 | 1281194 | 562 | Escherichia coli UMEA 3151-1 | UMEA 3151-1 | Proteobacteria | KE701689.1 |
| 1410 | GCA_000461915.2 | 1151226 | 562 | Escherichia coli B26-2 | B26-2 | Proteobacteria | AVQV01000001.1 |
| 1411 | GCA_000461935.2 | 1081889 | 562 | Escherichia coli 09BKT076207 | 09BKT076207 | Proteobacteria | AVQR01000067.1 |
| 1412 | GCA_000461955.2 | 1151213 | 562 | Escherichia coli B102 | B102 | Proteobacteria | AVQS01000008.1 |
| 1413 | GCA_000461975.2 | 1151219 | 562 | Escherichia coli B29-1 | B29-1 | Proteobacteria | AVQY01000001.1 |
| 1414 | GCA_000461995.2 | 1151214 | 562 | Escherichia coli B107 | B107 | Proteobacteria | AVQT01000005.1 |
| 1415 | GCA_000462025.2 | 1151225 | 562 | Escherichia coli B26-1 | B26-1 | Proteobacteria | AVQU01000001.1 |
| 1416 | GCA_000462045.2 | 1151217 | 562 | Escherichia coli B28-1 | B28-1 | Proteobacteria | AVQW01000010.1 |
| 1417 | GCA_000462065.2 | 1151222 | 562 | Escherichia coli B36-2 | B36-2 | Proteobacteria | AVRB01000001.1 |
| 1418 | GCA_000462085.2 | 1151215 | 562 | Escherichia coli B7-1 | B7-1 | Proteobacteria | AVRC01000049.1 |
| 1419 | GCA_000462105.2 | 1151220 | 562 | Escherichia coli B29-2 | B29-2 | Proteobacteria | AVQZ01000120.1 |
| 1420 | GCA_000462125.2 | 1151221 | 562 | Escherichia coli B36-1 | B36-1 | Proteobacteria | AVRA01000107.1 |
| 1421 | GCA_000462145.2 | 1081891 | 562 | Escherichia coli T1282_01 | T1282_01 | Proteobacteria | AVRM01000132.1 |
| 1422 | GCA_000462165.2 | 1081893 | 562 | Escherichia coli T924_01 | T924_01 | Proteobacteria | AVRP01000002.1 |
| 1423 | GCA_000462185.2 | 1151237 | 562 | Escherichia coli B15 | B15 | Proteobacteria | AVSB01000112.1 |
| 1424 | GCA_000462225.2 | 1207035 | 562 | Escherichia coli 14A | 14A | Proteobacteria | AVRQ01000005.1 |
| 1425 | GCA_000462245.2 | 1207038 | 562 | Escherichia coli 2886-75 | 2886-75 | Proteobacteria | AVRR01000001.1 |
| 1426 | GCA_000462265.2 | 1081896 | 562 | Escherichia coli T1840_97 | T1840_97 | Proteobacteria | AVRN01000121.1 |
| 1427 | GCA_000462305.2 | 1081888 | 562 | Escherichia coli 08BKT055439 | 08BKT055439 | Proteobacteria | AVRI01000134.1 |
| 1428 | GCA_000462325.2 | 1081895 | 562 | Escherichia coli 08BKT77219 | 08BKT77219 | Proteobacteria | AVRJ01000125.1 |
| 1429 | GCA_000462345.2 | 1081894 | 562 | Escherichia coli 09BKT024447 | 09BKT024447 | Proteobacteria | AVRK01000010.1 |
| 1430 | GCA_000462365.2 | 1081890 | 562 | Escherichia coli Bd5610_99 | Bd5610_99 | Proteobacteria | AVRL01000137.1 |
| 1431 | GCA_000462385.2 | 1081892 | 562 | Escherichia coli T234_00 | T234_00 | Proteobacteria | AVRO01000124.1 |
| 1432 | GCA_000462405.2 | 1151216 | 562 | Escherichia coli B7-2 | B7-2 | Proteobacteria | AVRD01000050.1 |
| 1433 | GCA_000462425.2 | 1151231 | 562 | Escherichia coli B93 | B93 | Proteobacteria | AVRE01000046.1 |
| 1434 | GCA_000462445.2 | 1151232 | 562 | Escherichia coli B94 | B94 | Proteobacteria | AVRF01000052.1 |
| 1435 | GCA_000462465.2 | 1151233 | 562 | Escherichia coli B95 | B95 | Proteobacteria | AVRG01000053.1 |
| 1436 | GCA_000462485.2 | 1151234 | 562 | Escherichia coli B103 | B103 | Proteobacteria | AVRS01000001.1 |
| 1437 | GCA_000462505.2 | 1151243 | 562 | Escherichia coli B104 | B104 | Proteobacteria | AVRT01000005.1 |
| 1438 | GCA_000462525.2 | 1151247 | 562 | Escherichia coli B105 | B105 | Proteobacteria | AVRU01000005.1 |
| 1439 | GCA_000462545.2 | 1151248 | 562 | Escherichia coli B106 | B106 | Proteobacteria | AVRV01000001.1 |
| 1440 | GCA_000462565.2 | 550673 | 562 | Escherichia coli B108 | B108 | Proteobacteria | AVRW01000007.1 |
| 1441 | GCA_000462585.2 | 1151244 | 562 | Escherichia coli B109 | B109 | Proteobacteria | AVRX01000001.1 |
| 1442 | GCA_000462605.2 | 1151249 | 562 | Escherichia coli B112 | B112 | Proteobacteria | AVRY01000010.1 |
| 1443 | GCA_000462625.2 | 1151250 | 562 | Escherichia coli B113 | B113 | Proteobacteria | AVRZ01000133.1 |
| 1444 | GCA_000462645.2 | 1151251 | 562 | Escherichia coli B114 | B114 | Proteobacteria | AVSA01000001.1 |
| 1445 | GCA_000462665.2 | 1151238 | 562 | Escherichia coli B17 | B17 | Proteobacteria | AVSC01000121.1 |
| 1446 | GCA_000462685.2 | 1151227 | 562 | Escherichia coli B40-1 | B40-1 | Proteobacteria | AVSD01000010.1 |
| 1447 | GCA_000462705.2 | 1151228 | 562 | Escherichia coli B40-2 | B40-2 | Proteobacteria | AVSE01000003.1 |
| 1448 | GCA_000462725.2 | 1151246 | 562 | Escherichia coli B49-2 | B49-2 | Proteobacteria | AVSF01000006.1 |
| 1449 | GCA_000462745.2 | 1151224 | 562 | Escherichia coli B5-2 | B5-2 | Proteobacteria | AVSG01000001.1 |
| 1450 | GCA_000462765.2 | 1151239 | 562 | Escherichia coli B83 | B83 | Proteobacteria | AVSH01000001.1 |
| 1451 | GCA_000462785.2 | 1151240 | 562 | Escherichia coli B84 | B84 | Proteobacteria | AVSI01000012.1 |
| 1452 | GCA_000462805.2 | 1151241 | 562 | Escherichia coli B85 | B85 | Proteobacteria | AVSJ01000007.1 |
| 1453 | GCA_000462825.2 | 1151242 | 562 | Escherichia coli B86 | B86 | Proteobacteria | AVSK01000136.1 |
| 1454 | GCA_000462845.2 | 1151235 | 562 | Escherichia coli B89 | B89 | Proteobacteria | AVSL01000001.1 |
| 1455 | GCA_000462865.2 | 1151236 | 562 | Escherichia coli B90 | B90 | Proteobacteria | AVSM01000129.1 |
| 1456 | GCA_000462885.2 | 1207037 | 562 | Escherichia coli Tx1686 | Tx1686 | Proteobacteria | AVSN01000001.1 |
| 1457 | GCA_000462905.2 | 1207036 | 562 | Escherichia coli Tx3800 | Tx3800 | Proteobacteria | AVSO01000014.1 |
| 1458 | GCA_000473725.2 | 1389955 | 562 | Escherichia coli ATCC 35150 | ATCC 35150 | Proteobacteria | AWXM02000046.1 |
| 1459 | GCA_000477495.2 | 1151218 | 562 | Escherichia coli B28-2 | B28-2 | Proteobacteria | AVQX01000012.1 |
| 1460 | GCA_000488355.1 | 1268982 | 562 | Escherichia coli 907672 | 907672 | Proteobacteria | KI531258.1 |
| 1461 | GCA_000492235.1 | 1328450 | 562 | Escherichia coli BIDMC 39 | BIDMC 39 | Proteobacteria | KI535383.1 |
| 1462 | GCA_000494995.1 | 1281069 | 562 | Escherichia coli HVH 136 (4-5970458) | HVH 136 (4-5970458) | Proteobacteria | KI538714.1 |
| 1463 | GCA_000496345.2 | 1404261 | 562 | Escherichia coli ATCC BAA-2192 | ATCC BAA-2192 | Proteobacteria | AYGW02000190.1 |
| 1464 | GCA_000498255.1 | 1097579 | 562 | Escherichia coli P4-96 | P4-96 | Proteobacteria | AHHO01000034.1 |
| 1465 | GCA_000498275.1 | 1117111 | 562 | Escherichia coli P4-NR | P4-NR | Proteobacteria | AHHP01000046.1 |
| 1466 | GCA_000520035.1 | 1248902 | 562 | Escherichia coli O145:H28 str. RM13514 | RM13514 | Proteobacteria | CP006027.1 |
| 1467 | GCA_000601155.1 | 1444132 | 562 | Escherichia coli 1-110-08_S3_C1 | 1-110-08_S3_C1 | Proteobacteria | JHDN01000003.1 |
| 1468 | GCA_000601175.1 | 1444160 | 562 | Escherichia coli 1-110-08_S3_C2 | 1-110-08_S3_C2 | Proteobacteria | JHDM01000091.1 |
| 1469 | GCA_000601335.1 | 1444190 | 562 | Escherichia coli 1-110-08_S3_C3 | 1-110-08_S3_C3 | Proteobacteria | JHDL01000001.1 |
| 1470 | GCA_000614085.2 | 1446647 | 562 | Escherichia coli O157:H7 str. 2011EL-2288 | 2011EL-2288 | Proteobacteria | JHKE01000007.1 |
| 1471 | GCA_000614255.1 | 1446644 | 562 | Escherichia coli O157:H7 str. 2011EL-2114 | 2011EL-2114 | Proteobacteria | JHKH01000002.1 |
| 1472 | GCA_000614305.2 | 1446645 | 562 | Escherichia coli O157:H7 str. 2011EL-2286 | 2011EL-2286 | Proteobacteria | JHKG01000013.1 |
| 1473 | GCA_000614345.2 | 1446650 | 562 | Escherichia coli O157:H7 str. 2011EL-2312 | 2011EL-2312 | Proteobacteria | JHKB01000003.1 |
| 1474 | GCA_000614405.2 | 1446646 | 562 | Escherichia coli O157:H7 str. 2011EL-2287 | 2011EL-2287 | Proteobacteria | JHKF01000001.1 |
| 1475 | GCA_000614645.2 | 1446643 | 562 | Escherichia coli O157:H7 str. 2011EL-2113 | 2011EL-2113 | Proteobacteria | JHKI01000015.1 |
| 1476 | GCA_000614685.2 | 1446648 | 562 | Escherichia coli O157:H7 str. 2011EL-2289 | 2011EL-2289 | Proteobacteria | JHKD01000001.1 |
| 1477 | GCA_000614805.2 | 1446656 | 562 | Escherichia coli O157:H7 str. F7350 | F7350 | Proteobacteria | JHJN01000036.1 |
| 1478 | GCA_000614885.2 | 1446622 | 562 | Escherichia coli O157:H7 str. 2010C-4979C1 | 2010C-4979C1 | Proteobacteria | JHMK01000017.1 |
| 1479 | GCA_000614965.1 | 1446619 | 562 | Escherichia coli O157:H7 str. 2009EL1705 | 2009EL1705 | Proteobacteria | JHGE01000007.1 |
| 1480 | GCA_000615015.1 | 1446621 | 562 | Escherichia coli O157:H7 str. 2009EL2109 | 2009EL2109 | Proteobacteria | JHGC01000001.1 |
| 1481 | GCA_000615085.1 | 1446587 | 562 | Escherichia coli O145:NM str. 2010C-3507 | 2010C-3507 | Proteobacteria | JHFW01000006.1 |
| 1482 | GCA_000615145.1 | 1446589 | 562 | Escherichia coli O145:NM str. 2010C-3509 | 2010C-3509 | Proteobacteria | JHFU01000107.1 |
| 1483 | GCA_000615175.1 | 1446590 | 562 | Escherichia coli O145:NM str. 2010C-3510 | 2010C-3510 | Proteobacteria | JHFT01000001.1 |
| 1484 | GCA_000615225.2 | 1446591 | 562 | Escherichia coli O145:NM str. 2010C-3511 | 2010C-3511 | Proteobacteria | JHFS01000035.1 |
| 1485 | GCA_000615265.1 | 1446592 | 562 | Escherichia coli O145:NM str. 2010C-3516 | 2010C-3516 | Proteobacteria | JHFR01000094.1 |
| 1486 | GCA_000615305.1 | 1446593 | 562 | Escherichia coli O145:NM str. 2010C-3517 | 2010C-3517 | Proteobacteria | JHFQ01000117.1 |
| 1487 | GCA_000615345.1 | 1446594 | 562 | Escherichia coli O145:NM str. 2010C-3518 | 2010C-3518 | Proteobacteria | JHFP01000105.1 |
| 1488 | GCA_000615385.1 | 1446595 | 562 | Escherichia coli O145:NM str. 2010C-3521 | 2010C-3521 | Proteobacteria | JHFO01000022.1 |
| 1489 | GCA_000615415.2 | 1446596 | 562 | Escherichia coli O145:NM str. 2010C-3526 | 2010C-3526 | Proteobacteria | JHFN01000018.1 |
| 1490 | GCA_000615695.1 | 1446633 | 562 | Escherichia coli O157:H7 str. 2011EL-2101 | 2011EL-2101 | Proteobacteria | JHKS01000001.1 |
| 1491 | GCA_000615745.2 | 1446634 | 562 | Escherichia coli O157:H7 str. 2011EL-2103 | 2011EL-2103 | Proteobacteria | JHKR01000031.1 |
| 1492 | GCA_000615785.2 | 1446635 | 562 | Escherichia coli O157:H7 str. 2011EL-2104 | 2011EL-2104 | Proteobacteria | JHKQ01000016.1 |
| 1493 | GCA_000615815.2 | 1446636 | 562 | Escherichia coli O157:H7 str. 2011EL-2105 | 2011EL-2105 | Proteobacteria | JHKP01000014.1 |
| 1494 | GCA_000615865.2 | 1446637 | 562 | Escherichia coli O157:H7 str. 2011EL-2106 | 2011EL-2106 | Proteobacteria | JHKO01000009.1 |
| 1495 | GCA_000615925.2 | 1446638 | 562 | Escherichia coli O157:H7 str. 2011EL-2107 | 2011EL-2107 | Proteobacteria | JHKN01000006.1 |
| 1496 | GCA_000615965.2 | 1446639 | 562 | Escherichia coli O157:H7 str. 2011EL-2108 | 2011EL-2108 | Proteobacteria | JHKM01000031.1 |
| 1497 | GCA_000616005.2 | 1446640 | 562 | Escherichia coli O157:H7 str. 2011EL-2109 | 2011EL-2109 | Proteobacteria | JHKL01000015.1 |
| 1498 | GCA_000616035.2 | 1446641 | 562 | Escherichia coli O157:H7 str. 2011EL-2111 | 2011EL-2111 | Proteobacteria | JHKK01000003.1 |
| 1499 | GCA_000616075.2 | 1446642 | 562 | Escherichia coli O157:H7 str. 2011EL-2112 | 2011EL-2112 | Proteobacteria | JHKJ01000005.1 |
| 1500 | GCA_000616365.1 | 1446623 | 562 | Escherichia coli O157:H7 str. 2011EL-1107 | 2011EL-1107 | Proteobacteria | JHLK01000001.1 |
| 1501 | GCA_000616405.2 | 1446624 | 562 | Escherichia coli O157:H7 str. 2011EL-2090 | 2011EL-2090 | Proteobacteria | JHLI01000033.1 |
| 1502 | GCA_000616425.2 | 1446625 | 562 | Escherichia coli O157:H7 str. 2011EL-2091 | 2011EL-2091 | Proteobacteria | JHLH01000026.1 |
| 1503 | GCA_000616445.2 | 1446626 | 562 | Escherichia coli O157:H7 str. 2011EL-2092 | 2011EL-2092 | Proteobacteria | JHLG01000030.1 |
| 1504 | GCA_000616465.2 | 1446627 | 562 | Escherichia coli O157:H7 str. 2011EL-2093 | 2011EL-2093 | Proteobacteria | JHLF01000012.1 |
| 1505 | GCA_000616485.2 | 1446628 | 562 | Escherichia coli O157:H7 str. 2011EL-2094 | 2011EL-2094 | Proteobacteria | JHLE01000001.1 |
| 1506 | GCA_000616505.2 | 1446629 | 562 | Escherichia coli O157:H7 str. 2011EL-2096 | 2011EL-2096 | Proteobacteria | JHLD01000033.1 |
| 1507 | GCA_000616525.2 | 1446630 | 562 | Escherichia coli O157:H7 str. 2011EL-2097 | 2011EL-2097 | Proteobacteria | JHLC01000005.1 |
| 1508 | GCA_000616545.2 | 1446631 | 562 | Escherichia coli O157:H7 str. 2011EL-2098 | 2011EL-2098 | Proteobacteria | JHLB01000003.1 |
| 1509 | GCA_000616585.2 | 1446613 | 562 | Escherichia coli O157:H7 str. 08-3037 | 08-3037 | Proteobacteria | JHKZ01000011.1 |
| 1510 | GCA_000616605.2 | 1446614 | 562 | Escherichia coli O157:H7 str. 08-3527 | 08-3527 | Proteobacteria | JHKY01000032.1 |
| 1511 | GCA_000616645.2 | 1446615 | 562 | Escherichia coli O157:H7 str. 08-4169 | 08-4169 | Proteobacteria | JHKW01000004.1 |
| 1512 | GCA_000616665.2 | 1446586 | 562 | Escherichia coli O145:NM str. 08-4270 | 08-4270 | Proteobacteria | JHKV01000030.1 |
| 1513 | GCA_000616705.2 | 1446632 | 562 | Escherichia coli O157:H7 str. 2011EL-2099 | 2011EL-2099 | Proteobacteria | JHKT01000015.1 |
| 1514 | GCA_000616745.1 | 1446692 | 562 | Escherichia coli O157:H7 str. K5806 | K5806 | Proteobacteria | JHHZ01000001.1 |
| 1515 | GCA_000617345.1 | 1446585 | 562 | Escherichia coli O145:NM str. 06-3484 | 06-3484 | Proteobacteria | JHNN01000002.1 |
| 1516 | GCA_000617385.1 | 1446745 | 562 | Escherichia coli O55:H7 str. 06-3555 | 06-3555 | Proteobacteria | JHNL01000009.1 |
| 1517 | GCA_000617445.2 | 1446609 | 562 | Escherichia coli O157:H7 str. 06-3745 | 06-3745 | Proteobacteria | JHNI01000020.1 |
| 1518 | GCA_000617665.2 | 1446611 | 562 | Escherichia coli O157:H7 str. 07-3091 | 07-3091 | Proteobacteria | JHNF01000007.1 |
| 1519 | GCA_000617705.2 | 1446610 | 562 | Escherichia coli O157:H7 str. 06-4039 | 06-4039 | Proteobacteria | JHNG01000005.1 |
| 1520 | GCA_000617725.2 | 1446612 | 562 | Escherichia coli O157:H7 str. 07-3391 | 07-3391 | Proteobacteria | JHNE01000001.1 |
| 1521 | GCA_000617765.2 | 1446597 | 562 | Escherichia coli O145:NM str. 2010C-4557C2 | 2010C-4557C2 | Proteobacteria | JHNA01000067.1 |
| 1522 | GCA_000617965.1 | 1446680 | 562 | Escherichia coli O157:H7 str. K4405 | K4405 | Proteobacteria | JHIN01000100.1 |
| 1523 | GCA_000618025.1 | 1446663 | 562 | Escherichia coli O157:H7 str. K1420 | K1420 | Proteobacteria | JHJF01000008.1 |
| 1524 | GCA_000618045.1 | 1446653 | 562 | Escherichia coli O157:H7 str. F6749 | F6749 | Proteobacteria | JHJQ01000001.1 |
| 1525 | GCA_000618065.2 | 1446658 | 562 | Escherichia coli O157:H7 str. F7384 | F7384 | Proteobacteria | JHJL01000002.1 |
| 1526 | GCA_000618105.2 | 1446652 | 562 | Escherichia coli O157:H7 str. F6142 | F6142 | Proteobacteria | JHJT01000009.1 |
| 1527 | GCA_000618185.1 | 1446660 | 562 | Escherichia coli O157:H7 str. G5303 | G5303 | Proteobacteria | JHJI01000027.1 |
| 1528 | GCA_000618225.2 | 1446657 | 562 | Escherichia coli O157:H7 str. F7377 | F7377 | Proteobacteria | JHJM01000002.1 |
| 1529 | GCA_000618245.1 | 1446661 | 562 | Escherichia coli O157:H7 str. H2495 | H2495 | Proteobacteria | JHJH01000020.1 |
| 1530 | GCA_000618265.2 | 1446655 | 562 | Escherichia coli O157:H7 str. F6751 | F6751 | Proteobacteria | JHJO01000004.1 |
| 1531 | GCA_000618285.2 | 1446662 | 562 | Escherichia coli O157:H7 str. H2498 | H2498 | Proteobacteria | JHJG01000003.1 |
| 1532 | GCA_000618305.2 | 1446654 | 562 | Escherichia coli O157:H7 str. F6750 | F6750 | Proteobacteria | JHJP01000010.1 |
| 1533 | GCA_000618325.1 | 1446667 | 562 | Escherichia coli O157:H7 str. K1796 | K1796 | Proteobacteria | JHJA01000003.1 |
| 1534 | GCA_000618345.1 | 1446668 | 562 | Escherichia coli O157:H7 str. K1845 | K1845 | Proteobacteria | JHIZ01000038.1 |
| 1535 | GCA_000618385.1 | 1446666 | 562 | Escherichia coli O157:H7 str. K1795 | K1795 | Proteobacteria | JHJB01000012.1 |
| 1536 | GCA_000618445.1 | 1446669 | 562 | Escherichia coli O157:H7 str. K1921 | K1921 | Proteobacteria | JHIY01000012.1 |
| 1537 | GCA_000618465.1 | 1446670 | 562 | Escherichia coli O157:H7 str. K1927 | K1927 | Proteobacteria | JHIX01000108.1 |
| 1538 | GCA_000618485.1 | 1446671 | 562 | Escherichia coli O157:H7 str. K2188 | K2188 | Proteobacteria | JHIW01000103.1 |
| 1539 | GCA_000618505.1 | 1446672 | 562 | Escherichia coli O157:H7 str. K2191 | K2191 | Proteobacteria | JHIV01000063.1 |
| 1540 | GCA_000618525.1 | 1446675 | 562 | Escherichia coli O157:H7 str. K2581 | K2581 | Proteobacteria | JHIS01000013.1 |
| 1541 | GCA_000618545.1 | 1446676 | 562 | Escherichia coli O157:H7 str. K2622 | K2622 | Proteobacteria | JHIR01000010.1 |
| 1542 | GCA_000618565.1 | 1446677 | 562 | Escherichia coli O157:H7 str. K2845 | K2845 | Proteobacteria | JHIQ01000033.1 |
| 1543 | GCA_000618585.1 | 1446678 | 562 | Escherichia coli O157:H7 str. K2854 | K2854 | Proteobacteria | JHIP01000003.1 |
| 1544 | GCA_000618605.1 | 1446679 | 562 | Escherichia coli O157:H7 str. K4396 | K4396 | Proteobacteria | JHIO01000002.1 |
| 1545 | GCA_000618625.1 | 1446681 | 562 | Escherichia coli O157:H7 str. K4406 | K4406 | Proteobacteria | JHIM01000001.1 |
| 1546 | GCA_000618665.1 | 1446674 | 562 | Escherichia coli O157:H7 str. K2324 | K2324 | Proteobacteria | JHIT01000105.1 |
| 1547 | GCA_000618685.1 | 1446682 | 562 | Escherichia coli O157:H7 str. K4527 | K4527 | Proteobacteria | JHIL01000001.1 |
| 1548 | GCA_000618745.1 | 1446683 | 562 | Escherichia coli O157:H7 str. K5418 | K5418 | Proteobacteria | JHII01000001.1 |
| 1549 | GCA_000618765.1 | 1446684 | 562 | Escherichia coli O157:H7 str. K5448 | K5448 | Proteobacteria | JHIH01000007.1 |
| 1550 | GCA_000618785.1 | 1446685 | 562 | Escherichia coli O157:H7 str. K5449 | K5449 | Proteobacteria | JHIG01000002.1 |
| 1551 | GCA_000618805.1 | 1446686 | 562 | Escherichia coli O157:H7 str. K5453 | K5453 | Proteobacteria | JHIF01000066.1 |
| 1552 | GCA_000618825.1 | 1446688 | 562 | Escherichia coli O157:H7 str. K5467 | K5467 | Proteobacteria | JHID01000001.1 |
| 1553 | GCA_000618845.1 | 1446689 | 562 | Escherichia coli O157:H7 str. K5602 | K5602 | Proteobacteria | JHIC01000015.1 |
| 1554 | GCA_000618865.1 | 1446690 | 562 | Escherichia coli O157:H7 str. K5607 | K5607 | Proteobacteria | JHIB01000088.1 |
| 1555 | GCA_000618885.1 | 1446687 | 562 | Escherichia coli O157:H7 str. K5460 | K5460 | Proteobacteria | JHIE01000002.1 |
| 1556 | GCA_000618925.2 | 1446697 | 562 | Escherichia coli O157:H7 str. K7140 | K7140 | Proteobacteria | JHHK01000016.1 |
| 1557 | GCA_000618945.2 | 1446649 | 562 | Escherichia coli O157:H7 str. 2011EL-2290 | 2011EL-2290 | Proteobacteria | JHKC01000008.1 |
| 1558 | GCA_000618985.2 | 1446651 | 562 | Escherichia coli O157:H7 str. 2011EL-2313 | 2011EL-2313 | Proteobacteria | JHKA01000028.1 |
| 1559 | GCA_000619045.2 | 1446617 | 562 | Escherichia coli O157:H7 str. 2009C-4258 | 2009C-4258 | Proteobacteria | JHGQ01000007.1 |
| 1560 | GCA_000619145.1 | 1446618 | 562 | Escherichia coli O157:H7 str. 2009EL1449 | 2009EL1449 | Proteobacteria | JHGF01000005.1 |
| 1561 | GCA_000619165.1 | 1446620 | 562 | Escherichia coli O157:H7 str. 2009EL1913 | 2009EL1913 | Proteobacteria | JHGD01000001.1 |
| 1562 | GCA_000619185.1 | 1446588 | 562 | Escherichia coli O145:NM str. 2010C-3508 | 2010C-3508 | Proteobacteria | JHFV01000110.1 |
| 1563 | GCA_000619365.1 | 1446693 | 562 | Escherichia coli O157:H7 str. K5852 | K5852 | Proteobacteria | JHHY01000003.1 |
| 1564 | GCA_000619385.1 | 1446694 | 562 | Escherichia coli O157:H7 str. K6590 | K6590 | Proteobacteria | JHHX01000008.1 |
| 1565 | GCA_000619405.1 | 1446695 | 562 | Escherichia coli O157:H7 str. K6676 | K6676 | Proteobacteria | JHHW01000001.1 |
| 1566 | GCA_000619425.1 | 1446696 | 562 | Escherichia coli O157:H7 str. K6687 | K6687 | Proteobacteria | JHHV01000121.1 |
| 1567 | GCA_000619445.1 | 1446691 | 562 | Escherichia coli O157:H7 str. K5609 | K5609 | Proteobacteria | JHIA01000021.1 |
| 1568 | GCA_000619665.1 | 1446616 | 562 | Escherichia coli O157:H7 str. 08-4529 | 08-4529 | Proteobacteria | JHHI01000009.1 |
| 1569 | GCA_000619685.2 | 1446698 | 562 | Escherichia coli O157:NM str. 08-4540 | 08-4540 | Proteobacteria | JHHH01000020.1 |
| 1570 | GCA_000627435.1 | 1444135 | 562 | Escherichia coli 1-250-04_S3_C1 | 1-250-04_S3_C1 | Proteobacteria | JJLU01000053.1 |
| 1571 | GCA_000627455.1 | 1444162 | 562 | Escherichia coli 1-182-04_S3_C2 | 1-182-04_S3_C2 | Proteobacteria | JJLT01000250.1 |
| 1572 | GCA_000627475.1 | 1444191 | 562 | Escherichia coli 1-182-04_S3_C3 | 1-182-04_S3_C3 | Proteobacteria | JJLS01000230.1 |
| 1573 | GCA_000627965.1 | 1444134 | 562 | Escherichia coli 1-182-04_S3_C1 | 1-182-04_S3_C1 | Proteobacteria | JJLV01000176.1 |
| 1574 | GCA_000632555.1 | 1446606 | 562 | Escherichia coli O157: str. 2010EL-2044 | 2010EL-2044 | Proteobacteria | JHME01000103.1 |
| 1575 | GCA_000632655.1 | 1446607 | 562 | Escherichia coli O157: str. 2010EL-2045 | 2010EL-2045 | Proteobacteria | JHMD01000001.1 |
| 1576 | GCA_000671295.1 | 1248823 | 562 | Escherichia coli O145:H28 str. RM12581 | RM12581 | Proteobacteria | CP007136.1 |
| 1577 | GCA_000687105.1 | 1444147 | 562 | Escherichia coli 2-005-03_S3_C2 | 2-005-03_S3_C2 | Proteobacteria | JMGT01000075.1 |
| 1578 | GCA_000687125.1 | 1444037 | 562 | Escherichia coli 2-011-08_S1_C1 | 2-011-08_S1_C1 | Proteobacteria | JMGQ01000091.1 |
| 1579 | GCA_000695155.1 | 1078035 | 562 | Escherichia coli O145:H28 str. 4865/96 | 4865/96 | Proteobacteria | JHEY01000012.1 |
| 1580 | GCA_000695175.1 | 562 | 562 | Escherichia coli | MI10-01 | Proteobacteria | JHEZ01000002.1 |
| 1581 | GCA_000700285.1 | 1444059 | 562 | Escherichia coli 3-475-03_S1_C1 | 3-475-03_S1_C1 | Proteobacteria | JNMJ01000048.1 |
| 1582 | GCA_000704005.1 | 1444151 | 562 | Escherichia coli 2-177-06_S3_C2 | 2-177-06_S3_C2 | Proteobacteria | JNQF01000030.1 |
| 1583 | GCA_000711415.1 | 1444071 | 562 | Escherichia coli 2-316-03_S1_C2 | 2-316-03_S1_C2 | Proteobacteria | JOMX01000159.1 |
| 1584 | GCA_000711475.1 | 1444042 | 562 | Escherichia coli 2-316-03_S1_C1 | 2-316-03_S1_C1 | Proteobacteria | JOMW01000194.1 |
| 1585 | GCA_000713175.1 | 1444281 | 562 | Escherichia coli 6-175-07_S4_C3 | 6-175-07_S4_C3 | Proteobacteria | JORK01000060.1 |
| 1586 | GCA_000713255.1 | 1444227 | 562 | Escherichia coli 6-537-08_S4_C1 | 6-537-08_S4_C1 | Proteobacteria | JORS01000112.1 |
| 1587 | GCA_000713605.1 | 1444257 | 562 | Escherichia coli 6-537-08_S4_C2 | 6-537-08_S4_C2 | Proteobacteria | JOSG01000027.1 |
| 1588 | GCA_000713745.1 | 1444179 | 562 | Escherichia coli 2-177-06_S3_C3 | 2-177-06_S3_C3 | Proteobacteria | JOSO01000008.1 |
| 1589 | GCA_000713815.1 | 1444163 | 562 | Escherichia coli 1-250-04_S3_C2 | 1-250-04_S3_C2 | Proteobacteria | JOSR01000197.1 |
| 1590 | GCA_000713905.1 | 1444087 | 562 | Escherichia coli 3-475-03_S1_C2 | 3-475-03_S1_C2 | Proteobacteria | JOQC01000025.1 |
| 1591 | GCA_000713985.1 | 1444196 | 562 | Escherichia coli 4-203-08_S3_C3 | 4-203-08_S3_C3 | Proteobacteria | JOQH01000040.1 |
| 1592 | GCA_000714055.1 | 1444171 | 562 | Escherichia coli 4-203-08_S3_C2 | 4-203-08_S3_C2 | Proteobacteria | JOQK01000042.1 |
| 1593 | GCA_000714385.1 | 1444226 | 562 | Escherichia coli 6-175-07_S4_C1 | 6-175-07_S4_C1 | Proteobacteria | JORB01000108.1 |
| 1594 | GCA_000714415.1 | 1444255 | 562 | Escherichia coli 6-175-07_S4_C2 | 6-175-07_S4_C2 | Proteobacteria | JORC01000054.1 |
| 1595 | GCA_000730345.1 | 1328859 | 562 | Escherichia coli O157:H7 str. SS17 | SS17 | Proteobacteria | CP008805.1 |
| 1596 | GCA_000732965.1 | 155864 | 562 | Escherichia coli O157:H7 str. EDL933 | EDL933 | Proteobacteria | CP008957.1 |
| 1597 | GCA_000797775.1 | 562 | 562 | Escherichia coli | CVM N34322PS | Proteobacteria | JUCY01000038.1 |
| 1598 | GCA_000798235.1 | 562 | 562 | Escherichia coli | CVM N36834PS | Proteobacteria | JUCF01000078.1 |
| 1599 | GCA_000798415.1 | 562 | 562 | Escherichia coli | CVM N34557PS | Proteobacteria | JUCU01000037.1 |
| 1600 | GCA_000803705.1 | 1330457 | 562 | Escherichia coli O157:H7 str. SS52 | SS52 | Proteobacteria | CP010304.1 |
| 1601 | GCA_000819265.1 | 562 | 562 | Escherichia coli | CVM N38428PS | Proteobacteria | JWYX01000074.1 |
| 1602 | GCA_000934865.1 | 562 | 562 | Escherichia coli | ATCC 35150 | Proteobacteria | JXUS01000117.1 |
| 1603 | GCA_000935075.1 | 562 | 562 | Escherichia coli | ATCC 35150 NalR | Proteobacteria | JYIO01000082.1 |
| 1604 | GCA_000953765.1 | 562 | 562 | Escherichia coli | MCI_507 | Proteobacteria | JZSD01000085.1 |
| 1605 | GCA_000965565.1 | 562 | 562 | Escherichia coli | St. Olav172 | Proteobacteria | JZDY01000017.1 |
| 1606 | GCA_000965655.1 | 562 | 562 | Escherichia coli | St. Olav173 | Proteobacteria | JZDZ01000061.1 |
| 1607 | GCA_000978815.1 | 83334 | 562 | Escherichia coli O157:H7 | 7.1_Anguil | Proteobacteria | LAZD01000130.1 |
| 1608 | GCA_000978845.1 | 83334 | 562 | Escherichia coli O157:H7 | Rafaela_II | Proteobacteria | LAYW01000314.1 |
| 1609 | GCA_000986635.1 | 562 | 562 | Escherichia coli | C1-057 | Proteobacteria | LAZO01000001.1 |
| 1610 | GCA_001006425.1 | 83334 | 562 | Escherichia coli O157:H7 | HB74 | Proteobacteria | LCWU01000234.1 |
| 1611 | GCA_001012075.1 | 562 | 562 | Escherichia coli | CFSAN026805 | Proteobacteria | LDCU01000029.1 |
| 1612 | GCA_001191125.1 | 562 | 562 | Escherichia coli | CFSAN026804 | Proteobacteria | LGZD01000035.1 |
| 1613 | GCA_001191185.1 | 562 | 562 | Escherichia coli | CFSAN026847 | Proteobacteria | LGZE01000020.1 |
| 1614 | GCA_001191195.1 | 562 | 562 | Escherichia coli | CFSAN026846 | Proteobacteria | LGZI01000146.1 |
| 1615 | GCA_001191525.1 | 562 | 562 | Escherichia coli | CFSAN026848 | Proteobacteria | LHAB01000019.1 |
| 1616 | GCA_001277695.1 | 562 | 562 | Escherichia coli | 503225_aEPEC | Proteobacteria | CYAV01000099.1 |
| 1617 | GCA_001281685.1 | 562 | 562 | Escherichia coli | STEC 771 | Proteobacteria | LGAZ01000005.1 |
| 1618 | GCA_001281725.1 | 562 | 562 | Escherichia coli | STEC 2868 | Proteobacteria | LGBJ01000009.1 |
| 1619 | GCA_001281755.1 | 562 | 562 | Escherichia coli | E09/224 | Proteobacteria | LGBP01000024.1 |
| 1620 | GCA_001281775.1 | 562 | 562 | Escherichia coli | STEC 989 | Proteobacteria | LGBA01000013.1 |
| 1621 | GCA_001281795.1 | 562 | 562 | Escherichia coli | STEC 994 | Proteobacteria | LGBB01000045.1 |
| 1622 | GCA_001281815.1 | 562 | 562 | Escherichia coli | STEC 1109 | Proteobacteria | LGBC01000012.1 |
| 1623 | GCA_001281845.1 | 562 | 562 | Escherichia coli | STEC 2075 | Proteobacteria | LGBD01000011.1 |
| 1624 | GCA_001281855.1 | 562 | 562 | Escherichia coli | STEC 2112 | Proteobacteria | LGBE01000001.1 |
| 1625 | GCA_001281885.1 | 562 | 562 | Escherichia coli | STEC 2257 | Proteobacteria | LGBF01000023.1 |
| 1626 | GCA_001281905.1 | 562 | 562 | Escherichia coli | STEC 2410 | Proteobacteria | LGBG01000006.1 |
| 1627 | GCA_001281915.1 | 562 | 562 | Escherichia coli | STEC 2821 | Proteobacteria | LGBI01000140.1 |
| 1628 | GCA_001281925.1 | 562 | 562 | Escherichia coli | STEC 2667 | Proteobacteria | LGBH01000007.1 |
| 1629 | GCA_001281965.1 | 562 | 562 | Escherichia coli | E09/10 | Proteobacteria | LGBK01000008.1 |
| 1630 | GCA_001281985.1 | 562 | 562 | Escherichia coli | EPEC 287 | Proteobacteria | LGBL01000025.1 |
| 1631 | GCA_001281995.1 | 562 | 562 | Escherichia coli | EPEC 393 | Proteobacteria | LGBM01000019.1 |
| 1632 | GCA_001282025.1 | 562 | 562 | Escherichia coli | EPEC 1572 | Proteobacteria | LGBN01000001.1 |
| 1633 | GCA_001282035.1 | 562 | 562 | Escherichia coli | EPEC 1669 | Proteobacteria | LGBO01000067.1 |
| 1634 | GCA_001282065.1 | 562 | 562 | Escherichia coli | STEC 2820 | Proteobacteria | LGBQ01000003.1 |
| 1635 | GCA_001297975.1 | 562 | 562 | Escherichia coli | STEC 343 | Proteobacteria | LDOZ01000007.1 |
| 1636 | GCA_001297985.1 | 562 | 562 | Escherichia coli | STEC 623 | Proteobacteria | LFUB01000011.1 |
| 1637 | GCA_001297995.1 | 562 | 562 | Escherichia coli | STEC 605 | Proteobacteria | LFUA01000020.1 |
| 1638 | GCA_001307215.1 | 83334 | 562 | Escherichia coli O157:H7 | WS4202 | Proteobacteria | CP012802.1 |
| 1639 | GCA_001309715.1 | 562 | 562 | Escherichia coli | PARC447 | Proteobacteria | LECJ01000192.1 |
| 1640 | GCA_001309815.1 | 562 | 562 | Escherichia coli | 03-6430 | Proteobacteria | LEAB01000117.1 |
| 1641 | GCA_001309835.1 | 562 | 562 | Escherichia coli | PARC449 | Proteobacteria | LEAC01000125.1 |
| 1642 | GCA_001309885.1 | 562 | 562 | Escherichia coli | CO6CE900 | Proteobacteria | LEAE01000148.1 |
| 1643 | GCA_001309895.1 | 562 | 562 | Escherichia coli | CO6CE1353 | Proteobacteria | LEAF01000141.1 |
| 1644 | GCA_001309905.1 | 562 | 562 | Escherichia coli | CO6CE1943 | Proteobacteria | LEAG01000046.1 |
| 1645 | GCA_001309925.1 | 562 | 562 | Escherichia coli | CO6CE2940 | Proteobacteria | LEAH01000084.1 |
| 1646 | GCA_001309965.1 | 562 | 562 | Escherichia coli | CO283 | Proteobacteria | LEAI01000013.1 |
| 1647 | GCA_001309985.1 | 562 | 562 | Escherichia coli | 1935 | Proteobacteria | LEAD01000163.1 |
| 1648 | GCA_001309995.1 | 562 | 562 | Escherichia coli | E0122 | Proteobacteria | LEAJ01000145.1 |
| 1649 | GCA_001310005.1 | 562 | 562 | Escherichia coli | LCDC7236 | Proteobacteria | LEAK01000079.1 |
| 1650 | GCA_001440045.1 | 83334 | 562 | Escherichia coli O157:H7 | G10 | Proteobacteria | LMXL01000097.1 |
| 1651 | GCA_001484305.1 | 562 | 562 | Escherichia coli | AY63 | Proteobacteria | LLYF01000048.1 |
| 1652 | GCA_001484355.1 | 562 | 562 | Escherichia coli | AY71 | Proteobacteria | LLYJ01000063.1 |
| 1653 | GCA_001519775.1 | 562 | 562 | Escherichia coli | GN02140 | Proteobacteria | LQSF01000099.1 |
| 1654 | GCA_001519815.1 | 562 | 562 | Escherichia coli | GN02298 | Proteobacteria | LQSX01000125.1 |
| 1655 | GCA_001519835.1 | 562 | 562 | Escherichia coli | GN02290 | Proteobacteria | LQSW01000169.1 |
| 1656 | GCA_001520115.1 | 562 | 562 | Escherichia coli | GN02343 | Proteobacteria | LQTC01000029.1 |
| 1657 | GCA_001520235.1 | 562 | 562 | Escherichia coli | GN02514 | Proteobacteria | LQUF01000146.1 |
| 1658 | GCA_001520275.1 | 562 | 562 | Escherichia coli | GN02359 | Proteobacteria | LQTG01000260.1 |
| 1659 | GCA_001520435.1 | 562 | 562 | Escherichia coli | GN02430 | Proteobacteria | LQTU01000172.1 |
| 1660 | GCA_001520495.1 | 562 | 562 | Escherichia coli | GN02426 | Proteobacteria | LQTS01000163.1 |
| 1661 | GCA_001520575.1 | 562 | 562 | Escherichia coli | GN02674 | Proteobacteria | LQVA01000248.1 |
| 1662 | GCA_001520835.1 | 562 | 562 | Escherichia coli | GN02707 | Proteobacteria | LQVE01000001.1 |
| 1663 | GCA_001520935.1 | 562 | 562 | Escherichia coli | GN03218 | Proteobacteria | LQVQ01000300.1 |
| 1664 | GCA_001520995.1 | 562 | 562 | Escherichia coli | GN02953 | Proteobacteria | LQVM01000164.1 |
| 1665 | GCA_001558995.1 | 562 | 562 | Escherichia coli | JEONG-1266 | Proteobacteria | CP014314.1 |
| 1666 | GCA_001571675.1 | 562 | 562 | Escherichia coli | UC5 | Proteobacteria | LRXT01000038.1 |
| 1667 | GCA_001575305.1 | 562 | 562 | Escherichia coli | G19 | Proteobacteria | LONY01000024.1 |
| 1668 | GCA_001576035.1 | 562 | 562 | Escherichia coli | G27 | Proteobacteria | LOOY01000033.1 |
| 1669 | GCA_001576325.1 | 562 | 562 | Escherichia coli | G28 | Proteobacteria | LOOZ01000046.1 |
| 1670 | GCA_000607265.1 | 1409787 | 571 | Klebsiella oxytoca G54 | G54 | Proteobacteria | KK097710.1 |
| 1671 | GCA_001078255.1 | 883124 | 571 | Klebsiella oxytoca 10-5249 | 10-5249 | Proteobacteria | KQ235791.1 |
| 1672 | GCA_000493135.1 | 1328363 | 573 | Klebsiella pneumoniae MGH 18 | MGH 18 | Proteobacteria | KI535680.1 |
| 1673 | GCA_000694715.1 | 1438797 | 573 | Klebsiella pneumoniae MGH 74 | MGH 74 | Proteobacteria | KK737643.1 |
| 1674 | GCA_001033505.1 | 573 | 573 | Klebsiella pneumoniae | MGH84 | Proteobacteria | KQ089360.1 |
| 1675 | GCA_001441285.1 | 573 | 573 | Klebsiella pneumoniae | B86 | Proteobacteria | UCD01000021.1 |
| 1676 | GCA_001536385.1 | 615 | 615 | Serratia marcescens | 2880STDY5682927 | Proteobacteria | FCJI01000002.1 |
| 1677 | GCA_001536405.1 | 615 | 615 | Serratia marcescens | 2880STDY5682928 | Proteobacteria | FCJJ01000003.1 |
| 1678 | GCA_001536505.1 | 615 | 615 | Serratia marcescens | 2880STDY5682857 | Proteobacteria | FCHL01000002.1 |
| 1679 | GCA_001536765.1 | 615 | 615 | Serratia marcescens | 2880STDY5682859 | Proteobacteria | FCHI01000002.1 |
| 1680 | GCA_001536965.1 | 615 | 615 | Serratia marcescens | 2880STDY5682942 | Proteobacteria | FCJX01000002.1 |
| 1681 | GCA_001537105.1 | 615 | 615 | Serratia marcescens | 2880STDY5683024 | Proteobacteria | FCGC01000003.1 |
| 1682 | GCA_001537305.1 | 615 | 615 | Serratia marcescens | 2880STDY5682930 | Proteobacteria | FCML01000002.1 |
| 1683 | GCA_001538765.1 | 615 | 615 | Serratia marcescens | 2880STDY5682826 | Proteobacteria | FCGQ01000002.1 |
| 1684 | GCA_001538825.1 | 615 | 615 | Serratia marcescens | 2880STDY5682883 | Proteobacteria | FCIK01000002.1 |
| 1685 | GCA_001539245.1 | 615 | 615 | Serratia marcescens | 2880STDY5682921 | Proteobacteria | FCJF01000002.1 |
| 1686 | GCA_001539385.1 | 615 | 615 | Serratia marcescens | 2880STDY5682913 | Proteobacteria | FCIZ01000003.1 |
| 1687 | GCA_001539425.1 | 615 | 615 | Serratia marcescens | 2880STDY5682877 | Proteobacteria | FCIC01000003.1 |
| 1688 | GCA_001539605.1 | 615 | 615 | Serratia marcescens | 2880STDY5682984 | Proteobacteria | FCLJ01000003.1 |
| 1689 | GCA_001539765.1 | 615 | 615 | Serratia marcescens | 2880STDY5682858 | Proteobacteria | FCHM01000002.1 |
| 1690 | GCA_001539905.1 | 615 | 615 | Serratia marcescens | 2880STDY5682961 | Proteobacteria | FCKL01000002.1 |
| 1691 | GCA_001540085.1 | 615 | 615 | Serratia marcescens | 2880STDY5682925 | Proteobacteria | FCMJ01000002.1 |
| 1692 | GCA_001540185.1 | 615 | 615 | Serratia marcescens | 2880STDY5682832 | Proteobacteria | FCGT01000003.1 |
| 1693 | GCA_001220145.1 | 630 | 630 | Yersinia enterocolitica | YE38/03 | Proteobacteria | CTKL01000007.1 |
| 1694 | GCA_001116865.1 | 631 | 631 | Yersinia intermedia | 58735 | Proteobacteria | CQER01000002.1 |
| 1695 | GCA_001010935.1 | 663 | 663 | Vibrio alginolyticus | V2 | Proteobacteria | LCSG01000013.1 |
| 1696 | GCA_001262735.1 | 669 | 669 | Vibrio harveyi | VH2 | Proteobacteria | LGYS01000041.1 |
| 1697 | GCA_001471575.1 | 669 | 669 | Vibrio harveyi | LMG 4044 | Proteobacteria | LOSK01000001.1 |
| 1698 | GCA_000707125.1 | 670 | 670 | Vibrio parahaemolyticus | CFSAN007445 | Proteobacteria | JNTC01000018.1 |
| 1699 | GCA_000786865.1 | 670 | 670 | Vibrio parahaemolyticus | 09.5357 | Proteobacteria | JTGT01000603.1 |
| 1700 | GCA_000877715.1 | 1288794 | 670 | Vibrio parahaemolyticus EN9701072 | EN9701072 | Proteobacteria | AOPI01000067.1 |
| 1701 | GCA_000877755.1 | 1288789 | 670 | Vibrio parahaemolyticus 3644 | 3644 | Proteobacteria | AOPD01000386.1 |
| 1702 | GCA_000960655.1 | 670 | 670 | Vibrio parahaemolyticus | 09-3217 | Proteobacteria | JZAQ01000061.1 |
| 1703 | GCA_001006195.1 | 670 | 670 | Vibrio parahaemolyticus | 10-4255 | Proteobacteria | JYJT01000016.1 |
| 1704 | GCA_001268045.1 | 670 | 670 | Vibrio parahaemolyticus | S456-5 | Proteobacteria | LFWN01000091.1 |
| 1705 | GCA_001270155.1 | 670 | 670 | Vibrio parahaemolyticus | S439-9 | Proteobacteria | LFZA01000015.1 |
| 1706 | GCA_001273575.1 | 670 | 670 | Vibrio parahaemolyticus | ISF-29-3 | Proteobacteria | LFYM01000016.1 |
| 1707 | GCA_001559805.1 | 670 | 670 | Vibrio parahaemolyticus | A4EZ700 | Proteobacteria | LOBT01000012.1 |
| 1708 | GCA_001595575.1 | 670 | 670 | Vibrio parahaemolyticus | A4EZ724 | Proteobacteria | LOHO01000038.1 |
| 1709 | GCA_000338875.1 | 1259812 | 674 | Vibrio mimicus CAIM 602 | CAIM 602 | Proteobacteria | AOMO01000034.1 |
| 1710 | GCA_000154025.1 | 410291 | 680 | Vibrio campbellii HY01 | HY01 | Proteobacteria | DS179487.1 |
| 1711 | GCA_000178495.1 | 228399 | 715 | Actinobacillus pleuropneumoniae serovar 1 str. 4074 | 4074 | Proteobacteria | ADOD01000018.1 |
| 1712 | GCA_000178575.1 | 754258 | 715 | Actinobacillus pleuropneumoniae serovar 9 str. CVJ13261 | CVJ13261 | Proteobacteria | ADOI01000037.1 |
| 1713 | GCA_000178615.1 | 754260 | 715 | Actinobacillus pleuropneumoniae serovar 11 str. 56153 | 56153 | Proteobacteria | ADOK01000019.1 |
| 1714 | GCA_000011785.1 | 205914 | 731 | Haemophilus somnus 129PT | 129PT | Proteobacteria | CP000436.1 |
| 1715 | GCA_000598725.1 | 1339306 | 817 | Bacteroides fragilis str. 3719 T6 | 3719 T6 | Bacteroidetes | JGEH01000041.1 |
| 1716 | GCA_000598745.1 | 1339324 | 817 | Bacteroides fragilis str. S24L26 | S24L26 | Bacteroidetes | JGEN01000046.1 |
| 1717 | GCA_000599005.1 | 1339323 | 817 | Bacteroides fragilis str. S24L15 | S24L15 | Bacteroidetes | JGEM01000110.1 |
| 1718 | GCA_000599325.1 | 1339325 | 817 | Bacteroides fragilis str. S24L34 | S24L34 | Bacteroidetes | JGEO01000038.1 |
| 1719 | GCA_001286525.1 | 817 | 817 | Bacteroides fragilis | BE1 | Bacteroidetes | LN877293.1 |
| 1720 | GCA_000699745.1 | 1339341 | 823 | Parabacteroides distasonis str. 3776 Po2 i | 3776 Po2 i | Bacteroidetes | JNHL01000154.1 |
| 1721 | GCA_000699785.1 | 1339342 | 823 | Parabacteroides distasonis str. 3776 D15 i | 3776 D15 i | Bacteroidetes | JNHK01000087.1 |
| 1722 | GCA_000699805.1 | 1339343 | 823 | Parabacteroides distasonis str. 3776 D15 iv | 3776 D15 iv | Bacteroidetes | JNHU01000002.1 |
| 1723 | GCA_001296085.1 | 76859 | 851 | Fusobacterium nucleatum subsp. animalis | KCOM 1279 | Fusobacteria | CP012713.1 |
| 1724 | GCA_001546435.1 | 851 | 851 | Fusobacterium nucleatum | MJR7757B | Fusobacteria | KQ956653.1 |
| 1725 | GCA_000163935.1 | 469621 | 860 | Fusobacterium periodonticum 1_1_41FAA | 1_1_41FAA | Fusobacteria | GG770381.1 |
| 1726 | GCA_000143225.1 | 757424 | 964 | Herbaspirillum seropedicae SmR1 | SmR1 | Proteobacteria | CP002039.1 |
| 1727 | GCA_001467505.1 | 28083 | 28083 | Legionella birminghamensis | CDC#1407-AL-14 | Proteobacteria | LNXT01000030.1 |
| 1728 | GCA_000300175.1 | 1004787 | 28108 | Alteromonas macleodii str. ‘Balearic Sea AD45’ | Balearic Sea AD45 | Proteobacteria | CP003873.1 |
| 1729 | GCA_000176155.1 | 675813 | 28172 | Vibrio metschnikovii CIP 69.14 | CIP 69.14 | Proteobacteria | ACZO01000003.1 |
| 1730 | GCA_000723805.1 | 1238449 | 28173 | Vibrio nigripulchritudo SO65 | SO65 | Proteobacteria | LK391963.1 |
| 1731 | GCA_001050595.1 | 1238430 | 28173 | Vibrio nigripulchritudo AM115 | AM115 | Proteobacteria | CANT01000061.1 |
| 1732 | GCA_001050655.1 | 1238441 | 28173 | Vibrio nigripulchritudo FTn2 | FTn2 | Proteobacteria | CANW01000040.1 |
| 1733 | GCA_001050675.1 | 1238445 | 28173 | Vibrio nigripulchritudo Pon4 | Pon4 | Proteobacteria | CAOA01000095.1 |
| 1734 | GCA_000764185.1 | 28229 | 28229 | Colwellia psychrerythraea | GAB14E | Proteobacteria | JQEC01000001.1 |
| 1735 | GCA_000182585.2 | 536230 | 28450 | Burkholderia pseudomallei MSHR346 | MSHR346 | Proteobacteria | ACOJ01000001.1 |
| 1736 | GCA_000756105.1 | 28450 | 28450 | Burkholderia pseudomallei | MSHR346 | Proteobacteria | CP008763.1 |
| 1737 | GCA_000757105.1 | 28450 | 28450 | Burkholderia pseudomallei | BDT | Proteobacteria | KN150939.1 |
| 1738 | GCA_000770435.1 | 1437000 | 28450 | Burkholderia pseudomallei MSHR1153 | MSHR1153 | Proteobacteria | CP009272.1 |
| 1739 | GCA_000774165.1 | 1435990 | 28450 | Burkholderia pseudomallei MSHR543 | MSHR543 | Proteobacteria | KN322990.1 |
| 1740 | GCA_000774325.1 | 1434206 | 28450 | Burkholderia pseudomallei MSHR4503 | MSHR4503 | Proteobacteria | KN323005.1 |
| 1741 | GCA_000774385.1 | 1434192 | 28450 | Burkholderia pseudomallei MSHR3951 | MSHR3951 | Proteobacteria | KN323013.1 |
| 1742 | GCA_000774475.1 | 1434927 | 28450 | Burkholderia pseudomallei MSHR3964 | MSHR3964 | Proteobacteria | KN323023.1 |
| 1743 | GCA_000774575.1 | 1434203 | 28450 | Burkholderia pseudomallei MSHR3960 | MSHR3960 | Proteobacteria | KN323029.1 |
| 1744 | GCA_000775095.1 | 1439861 | 28450 | Burkholderia pseudomallei TSV5 | TSV5 | Proteobacteria | JQGY01000129.1 |
| 1745 | GCA_000775105.1 | 1439859 | 28450 | Burkholderia pseudomallei TSV32 | TSV32 | Proteobacteria | JQHT01000033.1 |
| 1746 | GCA_000959185.1 | 1249475 | 28450 | Burkholderia pseudomallei MSHR840 | MSHR840 | Proteobacteria | CP009474.1 |
| 1747 | GCA_000696465.1 | 29471 | 29471 | Pectobacterium atrosepticum | JG10-08 | Proteobacteria | CP007744.1 |
| 1748 | GCA_000740965.1 | 29471 | 29471 | Pectobacterium atrosepticum | 21A | Proteobacteria | CP009125.1 |
| 1749 | GCA_001038685.1 | 1076138 | 29471 | Pectobacterium atrosepticum ICMP 1526 | ICMP 1526 | Proteobacteria | ALIV01000021.1 |
| 1750 | GCA_000764325.1 | 29495 | 29495 | Vibrio navarrensis | ATCC 51183 | Proteobacteria | JMCG01000001.1 |
| 1751 | GCA_000153205.1 | 314278 | 35797 | Nitrococcus mobilis Nb-231 | Nb-231 | Proteobacteria | CH672427.1 |
| 1752 | GCA_000238375.3 | 1117314 | 43655 | Pseudoalteromonas citrea DSM 8771 | NCIMB 1889 | Proteobacteria | AHBZ02000108.1 |
| 1753 | GCA_000238375.3 | 1117314 | 43655 | Pseudoalteromonas citrea DSM 8771 | NCIMB 1889 | Proteobacteria | AHBZ02000100.1 |
| 1754 | GCA_000238315.3 | 1117317 | 43662 | Pseudoalteromonas piscicida JCM 20779 | JCM 20779 | Proteobacteria | AHCC02000002.1 |
| 1755 | GCA_001467795.1 | 45067 | 45067 | Legionella lansingensis | ATCC 49751 | Proteobacteria | LNYI01000004.1 |
| 1756 | GCA_000175195.1 | 637911 | 51047 | Actinobacillus minor NM305 | NM305 | Proteobacteria | ACQL01000154.1 |
| 1757 | GCA_000807415.4 | 61645 | 61645 | Enterobacter asburiae | 35734 | Proteobacteria | CP012162.1 |
| 1758 | GCA_000956965.1 | 61645 | 61645 | Enterobacter asburiae | 35618 | Proteobacteria | JZZI01000011.1 |
| 1759 | GCA_001022755.1 | 61645 | 61645 | Enterobacter asburiae | GN02692 | Proteobacteria | LEDI01000011.1 |
| 1760 | GCA_000786255.1 | 66269 | 66269 | Pantoea stewartii | M009 | Proteobacteria | JRWI01000007.1 |
| 1761 | GCA_000803205.1 | 66269 | 66269 | Pantoea stewartii | M073a | Proteobacteria | JSXF01000009.1 |
| 1762 | GCA_000023545.1 | 579405 | 69223 | Dickeya paradisiaca Ech703 | Ech703 | Proteobacteria | CP001654.1 |
| 1763 | GCA_000153425.1 | 314280 | 74109 | Photobacterium profundum 3TCK | 3TCK | Proteobacteria | CH724134.1 |
| 1764 | GCA_001449005.1 | 75105 | 75105 | Paraburkholderia caribensis | MWAP64 | Proteobacteria | CP013103.1 |
| 1765 | GCA_000755725.1 | 95486 | 95486 | Burkholderia cenocepacia | DDS 22E-1 | Proteobacteria | CP007784.1 |
| 1766 | GCA_001467585.1 | 1212489 | 96228 | Legionella drozanskii LLAP-1 | ATCC 700990 | Proteobacteria | LNXY01000001.1 |
| 1767 | GCA_001527015.1 | 101571 | 101571 | Burkholderia ubonensis | MSMB1806WGS | Proteobacteria | LPBH01000095.1 |
| 1768 | GCA_001527185.1 | 101571 | 101571 | Burkholderia ubonensis | MSMB1800WGS | Proteobacteria | LPBC01000010.1 |
| 1769 | GCA_001528025.1 | 101571 | 101571 | Burkholderia ubonensis | MSMB2007WGS | Proteobacteria | LPBW01000043.1 |
| 1770 | GCA_001528325.1 | 101571 | 101571 | Burkholderia ubonensis | MSMB2013WGS | Proteobacteria | LPCC01000068.1 |
| 1771 | GCA_001528445.1 | 101571 | 101571 | Burkholderia ubonensis | MSMB2024WGS | Proteobacteria | LPCJ01000090.1 |
| 1772 | GCA_001529565.1 | 101571 | 101571 | Burkholderia ubonensis | MSMB2022WGS | Proteobacteria | LPCI01000021.1 |
| 1773 | GCA_001531605.1 | 101571 | 101571 | Burkholderia ubonensis | MSMB2104WGS | Proteobacteria | LPHJ01000073.1 |
| 1774 | GCA_001532205.1 | 101571 | 101571 | Burkholderia ubonensis | MSMB2110WGS | Proteobacteria | LPHP01000067.1 |
| 1775 | GCA_001532445.1 | 101571 | 101571 | Burkholderia ubonensis | MSMB2192WGS | Proteobacteria | LPIO01000050.1 |
| 1776 | GCA_001532455.1 | 101571 | 101571 | Burkholderia ubonensis | MSMB2191WGS | Proteobacteria | LPIN01000075.1 |
| 1777 | GCA_001532465.1 | 101571 | 101571 | Burkholderia ubonensis | MSMB2193WGS | Proteobacteria | LPIP01000082.1 |
| 1778 | GCA_001534475.1 | 101571 | 101571 | Burkholderia ubonensis | MSMB2019WGS | Proteobacteria | LPND01000106.1 |
| 1779 | GCA_001539165.1 | 101571 | 101571 | Burkholderia ubonensis | MSMB1490WGS | Proteobacteria | LPFP01000003.1 |
| 1780 | GCA_000769475.1 | 111105 | 111105 | Porphyromonas gulae | COT-052 OH3498 | Bacteroidetes | KN300394.1 |
| 1781 | GCA_000024725.1 | 472759 | 133539 | Nitrosococcus halophilus Nc 4 | Nc 4 | Proteobacteria | CP001798.1 |
| 1782 | GCA_000183725.1 | 709032 | 148813 | Sulfuricurvum kujiense DSM 16994 | DSM 16994 | Proteobacteria | CP002355.1 |
| 1783 | GCA_000412335.2 | 566551 | 158484 | Cedecea davisae DSM 4568 | DSM 4568 | Proteobacteria | KE161030.1 |
| 1784 | GCA_001596815.1 | 162157 | 162157 | Pseudoalteromonas spiralis | DSM 16099 | Proteobacteria | LVCN01000040.1 |
| 1785 | GCA_001465295.1 | 1315283 | 166935 | Pseudoalteromonas translucida KMM 520 | KMM 520 | Proteobacteria | CP011035.1 |
| 1786 | GCA_001274855.1 | 170661 | 170661 | Vibrio xuii | DSM 17185 | Proteobacteria | LHPK01000025.1 |
| 1787 | GCA_000755505.1 | 178606 | 178606 | Leptospirillum ferriphilum | DSM 14647 | Nitrospirae | JPGK01000006.1 |
| 1788 | GCA_000967895.1 | 698738 | 188908 | Oleispira antarctica RB-8 | | Proteobacteria | FO203512.1 |
| 1789 | GCA_000091465.1 | 575788 | 212663 | Vibrio tasmaniensis LGP32 | LGP32 | Proteobacteria | FM954972.2 |
| 1790 | GCA_001298715.1 | 235205 | 235205 | Bathymodiolus azoricus thioautotrophic gill symbiont | BazSymA | Proteobacteria | CDSC01000438.1 |
| 1791 | GCA_001048515.1 | 246167 | 246167 | Vibrio crassostreae | J5-20 | Proteobacteria | CCKB01000061.1 |
| 1792 | GCA_001368855.1 | 246167 | 246167 | Vibrio crassostreae | J2-9 | Proteobacteria | LK934305.1 |
| 1793 | GCA_000273235.1 | 997887 | 291644 | Bacteroides salyersiae CL02T12C01 | CL02T12C01 | Bacteroidetes | JH724309.1 |
| 1794 | GCA_000422245.1 | 1121439 | 293256 | Desulfovibrio alkalitolerans DSM 16529 | DSM 16529 | Proteobacteria | ATHI01000027.1 |
| 1795 | GCA_000310145.2 | 303682 | 303682 | Thauera sp. 28 | 28 | Proteobacteria | AMXA01000025.1 |
| 1796 | GCA_000153005.1 | 314290 | 314290 | Vibrio sp. MED222 | MED222 | Proteobacteria | CH902607.1 |
| 1797 | GCA_000241185.2 | 386429 | 386429 | Pseudoalteromonas sp. BSi20495 | BSi20495 | Proteobacteria | BADY01000203.1 |
| 1798 | GCA_000156355.1 | 637616 | 392484 | Methylophaga thiooxydans DMS010 | DMS010 | Proteobacteria | GG657892.1 |
| 1799 | GCA_001525985.1 | 488446 | 488446 | Burkholderia latens | RF32-BP12 | Proteobacteria | LOTQ01000014.1 |
| 1800 | GCA_000467165.1 | 1219077 | 512649 | Vibrio azureus NBRC 104587 | NBRC 104587 | Proteobacteria | BATL01000040.1 |
| 1801 | GCA_000179655.1 | 517433 | 517433 | Pantoea sp. aB | aB | Proteobacteria | AEDL01000002.1 |
| 1802 | GCA_000950415.1 | 553611 | 553611 | Photobacterium leiognathi | ATCC 25521 | Proteobacteria | JZSK01000008.1 |
| 1803 | GCA_000969825.1 | 1203610 | 574930 | Parabacteroides gordonii MS-1 | MS-1 | Bacteroidetes | KQ033921.1 |
| 1804 | GCA_000265075.1 | 1189621 | 590849 | Nitritalea halalkaliphila LW7 | LW7 | Bacteroidetes | AJYA01000079.1 |
| 1805 | GCA_000176215.1 | 675810 | 675810 | Vibrio sp. RC341 | RC341 | Proteobacteria | ACZT01000026.1 |
| 1806 | GCA_000176715.1 | 675815 | 675815 | Vibrio sp. RC586 | RC586 | Proteobacteria | ADBD01000008.1 |
| 1807 | GCA_000224655.1 | 693988 | 693988 | Bilophila sp. 4_1_30 | 4_1_30 | Proteobacteria | JH114231.1 |
| 1808 | GCA_000785575.1 | 701175 | 701175 | Vibrio caribbeanicus | T14 | Proteobacteria | JRWR01000004.1 |
| 1809 | GCA_000755345.1 | 754436 | 754436 | Photobacterium aphoticum | JCM 19237 | Proteobacteria | BBMN01000003.1 |
| 1810 | GCA_000320365.1 | 1230338 | 765840 | Moraxella macacae 0408225 | 0408225 | Proteobacteria | ANIN01000001.1 |
| 1811 | GCA_000211855.3 | 983544 | 983544 | Lacinutrix sp. 5H-3-7-4 | 5H-3-7-4 | Bacteroidetes | CP002825.1 |
| 1812 | GCA_000305755.2 | 992012 | 992012 | Vibrio sp. HENC-03 | HENC-03 | Proteobacteria | JH976122.1 |
| 1813 | GCA_000333895.2 | 1056512 | 1056512 | Grimontia indica | AK16 | Proteobacteria | ANFM02000072.1 |
| 1814 | GCA_000722635.1 | 1137799 | 1137799 | Endozoicomonas numazuensis | DSM 25634 | Proteobacteria | JOKH01000001.1 |
| 1815 | GCA_000276965.1 | 1177931 | 1177931 | Thiovulum sp. ES | ES | Proteobacteria | AKKQ01000015.1 |
| 1816 | GCA_001541335.1 | 1194427 | 1194427 | Vibrio toranzoniae | Vb 10.8 | Proteobacteria | LMXU01000011.1 |
| 1817 | GCA_000802255.1 | 1348852 | 1348852 | Mumia flava | MUSC 201 | Actinobacteria | JTDJ01000134.1 |
| 1818 | GCA_000743945.1 | 1072685 | 1472345 | Basilea psittacipulmonis DSM 24701 | DSM 24701 | Proteobacteria | CP009238.1 |
| 1819 | GCA_000830185.1 | 1539064 | 1539064 | Sulfurovum sp. FS06-10 | | Proteobacteria | JQIR01000120.1 |
| 1820 | GCA_000830175.1 | 1539065 | 1539065 | Sulfurovum sp. FS08-3 | | Proteobacteria | JQIS01000009.1 |
| 1821 | GCA_000292935.1 | 1216362 | 1583098 | Fusobacterium hwasookii ChDC F128 | ChDC F128 | Fusobacteria | ALVD01000001.1 |
| 1822 | GCA_000807225.1 | 1583100 | 1583100 | Myroides sp. A21 | A21 | Bacteroidetes | CP010327.1 |
| 1823 | GCA_001431295.1 | 1590043 | 1590043 | Coxiellaceae bacterium HT99 | HT99 | Proteobacteria | LKAJ01000001.1 |
| 1824 | GCA_001188205.1 | 1647102 | 1647102 | Vibrio sp. VPAP30 | VPAP30 | Proteobacteria | LBLS01000036.1 |
| 1825 | GCA_000695255.1 | 1654360 | 1654360 | Photobacterium galatheae | S2753 | Proteobacteria | JMIB01000002.1 |
| 1826 | GCA_001011075.1 | 1656220 | 1656220 | Serratia sp. TEL | TEL | Proteobacteria | LDEG01000006.1 |
| 1827 | GCA_001401805.1 | 1723758 | 1723758 | Pseudoalteromonas sp. P1-25 | P1-25 | Proteobacteria | LKDW01000016.1 |
| 1828 | GCA_001421885.1 | 1736221 | 1736221 | Pseudomonas sp. Leaf48 | Leaf48 | Proteobacteria | LMLH01000030.1 |
| 1829 | GCA_001544875.1 | 1777139 | 1777139 | Burkholderia sp. LMG 29321 | | Proteobacteria | FCOA01000023.1 |
| 1830 | GCA_001537265.1 | 1805637 | 1805637 | Serratia sp. 2880STDY5682895 | 2880STDY5682895 | Proteobacteria | FCJL01000002.1 |

(Part B)

| | | | | | | M | | | | Q | | | | U |
|---|---|---|---|---|---|---|---|---|---|---|---|---|---|---|
| | | | | | | ZorA | | | | ZorB | | | | ZorC |
| | | I | J | K | L | protein | N | O | P | protein | R | S | T | protein |
| | H | #genes | ZorA | PRT SEQ | DNA SEQ | length | ZorB | PRT SEQ | DNA SEQ | length | ZorC | PRT SEQ | DNA SEQ | length |
| 1 | Type | identified | protein_accession | ID NO: | ID NO: | (aa) | protein_accession | ID NO: | ID NO: | (aa) | protein_accession | ID NO: | ID NO: | (aa) |
| 2 | I | 3 | ABS66238.1 | 78 | 6649 | 704 | ABS66239.1 | 79 | 6650 | 296 | ABS66240.1 | 80 | 6651 | 469 |
| 3 | I | 4 | KGH31560.1 | 81 | 6652 | 705 | KGH31559.1 | 82 | 6653 | 248 | KGH31558.1 | 83 | 6654 | 575 |
| 4 | I | 4 | ABR84348.1 | 85 | 6656 | 708 | ABR81630.1 | 86 | 6657 | 254 | ABR85988.1 | 87 | 6658 | 648 |
| 5 | I | 4 | EIE46557.1 | 89 | 6660 | 708 | EIE46558.1 | 90 | 6661 | 254 | EIE46559.1 | 91 | 6662 | 670 |
| 6 | I | 4 | EKA35841.1 | 93 | 6664 | 731 | EKA35840.1 | 94 | 6665 | 245 | EKA35839.1 | 95 | 6666 | 528 |
| 7 | I | 4 | EKA51673.1 | 97 | 6668 | 731 | EKA51672.1 | 98 | 6669 | 245 | EKA51671.1 | 99 | 6670 | 528 |
| 8 | I | 4 | EOQ78914.1 | 101 | 6672 | 714 | EOQ78913.1 | 102 | 6673 | 245 | EOQ78912.1 | 103 | 6674 | 547 |
| 9 | I | 3 | EQL43276.1 | 105 | 6676 | 708 | EQL43277.1 | 106 | 6677 | 254 | EQL43278.1 | 107 | 6678 | 417 |
| 10 | I | 4 | ERY08923.1 | 108 | 6679 | 708 | ERY08922.1 | 109 | 6680 | 254 | ERY08921.1 | 110 | 6681 | 670 |
| 11 | I | 4 | ERY16790.1 | 112 | 6683 | 731 | ERY16789.1 | 113 | 6684 | 245 | ERY16788.1 | 114 | 6685 | 558 |
| 12 | I | 4 | ERY21334.1 | 116 | 6687 | 708 | ERY21333.1 | 117 | 6688 | 254 | ERY21332.1 | 118 | 6689 | 670 |
| 13 | I | 4 | ERV56557.1 | 120 | 6691 | 708 | ERV56556.1 | 121 | 6692 | 254 | ERV56555.1 | 122 | 6693 | 670 |
| 14 | I | 4 | ERX20611.1 | 124 | 6695 | 731 | ERX20610.1 | 125 | 6696 | 245 | ERX20609.1 | 126 | 6697 | 558 |
| 15 | I | 4 | ERX27344.1 | 128 | 6699 | 731 | ERX27343.1 | 129 | 6700 | 245 | ERX27342.1 | 130 | 6701 | 558 |
| 16 | I | 4 | ERZ22541.1 | 132 | 6703 | 731 | ERZ22540.1 | 133 | 6704 | 245 | ERZ22539.1 | 134 | 6705 | 558 |
| 17 | I | 4 | ERX75596.1 | 136 | 6707 | 731 | ERX75595.1 | 137 | 6708 | 245 | ERX75594.1 | 138 | 6709 | 558 |
| 18 | I | 4 | ESR70192.1 | 140 | 6711 | 731 | ESR70191.1 | 141 | 6712 | 245 | ESR70190.1 | 142 | 6713 | 558 |
| 19 | I | 4 | ETU86359.1 | 144 | 6715 | 708 | ETU86358.1 | 145 | 6716 | 254 | ETU86357.1 | 146 | 6717 | 670 |
| 20 | I | 4 | CDI94249.1 | 148 | 6719 | 708 | CDI94248.1 | 149 | 6720 | 254 | CDI94247.1 | 150 | 6721 | 255 |
| 21 | I | 4 | CDI95166.1 | 152 | 6723 | 731 | CDI95167.1 | 153 | 6724 | 245 | CDI95168.1 | 154 | 6725 | 547 |
| 22 | I | 4 | EVT82482.1 | 156 | 6727 | 708 | EVT82481.1 | 157 | 6728 | 254 | EVT82480.1 | 158 | 6729 | 663 |
| 23 | I | 4 | EYU03497.1 | 160 | 6731 | 731 | EYU03498.1 | 161 | 6732 | 245 | EYU03499.1 | 162 | 6733 | 558 |
| 24 | I | 4 | EZN45278.1 | 164 | 6735 | 781 | EZN45279.1 | 165 | 6736 | 247 | EZN45280.1 | 166 | 6737 | 723 |
| 25 | I | 4 | EZO27044.1 | 168 | 6739 | 708 | EZO27045.1 | 169 | 6740 | 254 | EZO27046.1 | 170 | 6741 | 640 |
| 26 | I | 4 | EZP05708.1 | 172 | 6743 | 708 | EZP05709.1 | 173 | 6744 | 254 | EZP05710.1 | 174 | 6745 | 640 |
| 27 | I | 4 | CDH74042.1 | 176 | 6747 | 708 | CDH74041.1 | 177 | 6748 | 254 | CDH74040.1 | 178 | 6749 | 670 |
| 28 | I | 4 | CDH70661.1 | 180 | 6751 | 731 | CDH70662.1 | 181 | 6752 | 245 | CDH70663.1 | 182 | 6753 | 547 |
| 29 | I | 4 | KEA10735.1 | 184 | 6755 | 708 | KEA10736.1 | 185 | 6756 | 254 | KEA10737.1 | 186 | 6757 | 670 |
| 30 | I | 4 | AJF50277.1 | 188 | 6759 | 731 | AJF50276.1 | 189 | 6760 | 245 | AJF50275.1 | 190 | 6761 | 547 |
| 31 | I | 4 | AKE69360.1 | 192 | 6763 | 731 | AKE69361.1 | 193 | 6764 | 245 | AKE69362.1 | 194 | 6765 | 547 |
| 32 | I | 4 | AKE72978.1 | 196 | 6767 | 708 | AKE72977.1 | 197 | 6768 | 254 | AKE72976.1 | 198 | 6769 | 670 |
| 33 | I | 4 | CRQ30662.1 | 200 | 6771 | 708 | CRQ30646.1 | 201 | 6772 | 254 | CRQ30630.1 | 202 | 6773 | 670 |
| 34 | I | 4 | CRQ14001.1 | 204 | 6775 | 731 | CRQ14037.1 | 205 | 6776 | 245 | CRQ14055.1 | 206 | 6777 | 547 |
| 35 | I | 4 | CRQ20930.1 | 208 | 6779 | 708 | CRQ20903.1 | 209 | 6780 | 254 | CRQ20878.1 | 210 | 6781 | 670 |
| 36 | I | 4 | CRP04583.1 | 212 | 6783 | 731 | CRP04548.1 | 213 | 6784 | 245 | CRP04515.1 | 214 | 6785 | 547 |
| 37 | I | 4 | CRQ05457.1 | 216 | 6787 | 731 | CRQ05470.1 | 217 | 6788 | 245 | CRQ05489.1 | 218 | 6789 | 547 |
| 38 | I | 4 | CRP94057.1 | 220 | 6791 | 708 | CRP94029.1 | 221 | 6792 | 254 | CRP94009.1 | 222 | 6793 | 670 |
| 39 | I | 4 | CRP94866.1 | 224 | 6795 | 708 | CRP94849.1 | 225 | 6796 | 254 | CRP94824.1 | 226 | 6797 | 670 |
| 40 | I | 4 | CRQ51053.1 | 228 | 6799 | 731 | CRQ51040.1 | 229 | 6800 | 245 | CRQ51031.1 | 230 | 6801 | 547 |
| 41 | I | 4 | CRS01042.1 | 232 | 6803 | 708 | CRS01058.1 | 233 | 6804 | 254 | CRS01074.1 | 234 | 6805 | 670 |
| 42 | I | 4 | CRX34600.1 | 236 | 6807 | 708 | CRX34599.1 | 237 | 6808 | 254 | CRX34598.1 | 238 | 6809 | 670 |
| 43 | I | 4 | CRX35811.1 | 240 | 6811 | 731 | CRX35810.1 | 241 | 6812 | 245 | CRX35809.1 | 242 | 6813 | 547 |
| 44 | I | 4 | CRN87107.1 | 244 | 6815 | 731 | CRN87087.1 | 245 | 6816 | 245 | CRN87069.1 | 246 | 6817 | 547 |
| 45 | I | 4 | CRQ28236.1 | 248 | 6819 | 731 | CRQ28254.1 | 249 | 6820 | 245 | CRQ28266.1 | 250 | 6821 | 547 |
| 46 | I | 4 | CRQ21539.1 | 252 | 6823 | 708 | CRQ21557.1 | 253 | 6824 | 254 | CRQ21576.1 | 254 | 6825 | 670 |
| 47 | I | 4 | CRN79596.1 | 256 | 6827 | 708 | CRN79621.1 | 257 | 6828 | 254 | CRN79649.1 | 258 | 6829 | 670 |
| 48 | I | 4 | CRO17466.1 | 260 | 6831 | 731 | CRO17426.1 | 261 | 6832 | 245 | CRO17380.1 | 262 | 6833 | 547 |
| 49 | I | 4 | CRW80533.1 | 264 | 6835 | 708 | CRW80527.1 | 265 | 6836 | 254 | CRW80520.1 | 266 | 6837 | 670 |
| 50 | I | 4 | CRW81746.1 | 268 | 6839 | 731 | CRW81753.1 | 269 | 6840 | 245 | CRW81763.1 | 270 | 6841 | 547 |
| 51 | I | 4 | CRS64348.1 | 272 | 6843 | 731 | CRS64342.1 | 273 | 6844 | 245 | CRS64337.1 | 274 | 6845 | 547 |
| 52 | I | 4 | CRS61289.1 | 276 | 6847 | 708 | CRS61288.1 | 277 | 6848 | 254 | CRS61287.1 | 278 | 6849 | 670 |
| 53 | I | 4 | CRX10287.1 | 280 | 6851 | 731 | CRX10279.1 | 281 | 6852 | 245 | CRX10272.1 | 282 | 6853 | 547 |
| 54 | I | 4 | CRX00557.1 | 284 | 6855 | 708 | CRX00549.1 | 285 | 6856 | 254 | CRX00541.1 | 286 | 6857 | 670 |
| 55 | I | 4 | CRW55933.1 | 288 | 6859 | 731 | CRW55913.1 | 289 | 6860 | 245 | CRW55893.1 | 290 | 6861 | 547 |
| 56 | I | 4 | CRX16431.1 | 292 | 6863 | 708 | CRX16423.1 | 293 | 6864 | 254 | CRX16416.1 | 294 | 6865 | 670 |
| 57 | I | 4 | CRP10808.1 | 296 | 6867 | 708 | CRP10838.1 | 297 | 6868 | 254 | CRP10876.1 | 298 | 6869 | 670 |
| 58 | I | 4 | CRP41275.1 | 300 | 6871 | 731 | CRP41308.1 | 301 | 6872 | 245 | CRP41345.1 | 302 | 6873 | 547 |
| 59 | I | 4 | CRP14749.1 | 304 | 6875 | 708 | CRP14725.1 | 305 | 6876 | 254 | CRP14706.1 | 306 | 6877 | 670 |
| 60 | I | 4 | CRP47753.1 | 308 | 6879 | 731 | CRP47733.1 | 309 | 6880 | 245 | CRP47704.1 | 310 | 6881 | 547 |
| 61 | I | 4 | CRO88348.1 | 312 | 6883 | 731 | CRO88299.1 | 313 | 6884 | 245 | CRO88247.1 | 314 | 6885 | 547 |
| 62 | I | 4 | CRO42842.1 | 316 | 6887 | 708 | CRO42772.1 | 317 | 6888 | 254 | CRO42732.1 | 318 | 6889 | 670 |
| 63 | I | 4 | CRN87606.1 | 320 | 6891 | 731 | CRN87577.1 | 321 | 6892 | 245 | CRN87556.1 | 322 | 6893 | 547 |
| 64 | I | 4 | CRN66199.1 | 324 | 6895 | 708 | CRN66218.1 | 325 | 6896 | 254 | CRN66246.1 | 326 | 6897 | 670 |
| 65 | I | 4 | CRP41066.1 | 328 | 6899 | 708 | CRP41088.1 | 329 | 6900 | 254 | CRP41112.1 | 330 | 6901 | 670 |
| 66 | I | 4 | CRP68499.1 | 332 | 6903 | 731 | CRP68477.1 | 333 | 6904 | 245 | CRP68458.1 | 334 | 6905 | 547 |
| 67 | I | 4 | CRP76330.1 | 336 | 6907 | 708 | CRP76294.1 | 337 | 6908 | 254 | CRP76259.1 | 338 | 6909 | 670 |
| 68 | I | 4 | CRQ24549.1 | 340 | 6911 | 731 | CRQ24529.1 | 341 | 6912 | 245 | CRQ24511.1 | 342 | 6913 | 547 |
| 69 | I | 4 | CRP82373.1 | 344 | 6915 | 731 | CRP82350.1 | 345 | 6916 | 245 | CRP82329.1 | 346 | 6917 | 547 |
| 70 | I | 4 | CRP61046.1 | 348 | 6919 | 708 | CRP61016.1 | 349 | 6920 | 254 | CRP60987.1 | 350 | 6921 | 670 |
| 71 | I | 4 | CRP29707.1 | 352 | 6923 | 731 | CRP29680.1 | 353 | 6924 | 245 | CRP29649.1 | 354 | 6925 | 547 |
| 72 | I | 4 | CRO50770.1 | 356 | 6927 | 708 | CRO50854.1 | 357 | 6928 | 254 | CRO50880.1 | 358 | 6929 | 670 |
| 73 | I | 3 | CRP19911.1 | 360 | 6931 | 731 | CRP19885.1 | 361 | 6932 | 245 | CRP19855.1 | 362 | 6933 | 547 |
| 74 | I | 4 | CRP88471.1 | 363 | 6934 | 708 | CRP88447.1 | 364 | 6935 | 254 | CRP88424.1 | 365 | 6936 | 670 |
| 75 | I | 4 | CRP42118.1 | 367 | 6938 | 708 | CRP42092.1 | 368 | 6939 | 254 | CRP42069.1 | 369 | 6940 | 670 |
| 76 | I | 4 | CRP91193.1 | 371 | 6942 | 731 | CRP91170.1 | 372 | 6943 | 245 | CRP91145.1 | 373 | 6944 | 547 |
| 77 | I | 4 | CRN61579.1 | 375 | 6946 | 708 | CRN61562.1 | 376 | 6947 | 254 | CRN61546.1 | 377 | 6948 | 670 |
| 78 | I | 4 | CRN91417.1 | 379 | 6950 | 731 | CRN91437.1 | 380 | 6951 | 245 | CRN91483.1 | 381 | 6952 | 547 |
| 79 | I | 4 | CRP44694.1 | 383 | 6954 | 731 | CRP44734.1 | 384 | 6955 | 245 | CRP44770.1 | 385 | 6956 | 547 |
| 80 | I | 4 | CRP16339.1 | 387 | 6958 | 708 | CRP16291.1 | 388 | 6959 | 254 | CRP16258.1 | 389 | 6960 | 670 |
| 81 | I | 4 | CRP57045.1 | 391 | 6962 | 708 | CRP57076.1 | 392 | 6963 | 254 | CRP57102.1 | 393 | 6964 | 670 |
| 82 | I | 4 | CRP83731.1 | 395 | 6966 | 731 | CRP83754.1 | 396 | 6967 | 245 | CRP83780.1 | 397 | 6968 | 547 |
| 83 | I | 4 | CRO13767.1 | 399 | 6970 | 708 | CRO13733.1 | 400 | 6971 | 254 | CRO13695.1 | 401 | 6972 | 670 |
| 84 | I | 4 | CRO55633.1 | 403 | 6974 | 731 | CRO55573.1 | 404 | 6975 | 245 | CRO55551.1 | 405 | 6976 | 547 |
| 85 | I | 4 | CRO41585.1 | 407 | 6978 | 731 | CRO41607.1 | 408 | 6979 | 245 | CRO41618.1 | 409 | 6980 | 547 |
| 86 | I | 4 | CRO12578.1 | 411 | 6982 | 708 | CRO12630.1 | 412 | 6983 | 254 | CRO12724.1 | 413 | 6984 | 670 |
| 87 | I | 4 | CRP86193.1 | 415 | 6986 | 731 | CRP86228.1 | 416 | 6987 | 245 | CRP86261.1 | 417 | 6988 | 547 |
| 88 | I | 4 | CRP43660.1 | 419 | 6990 | 708 | CRP43627.1 | 420 | 6991 | 254 | CRP43600.1 | 421 | 6992 | 670 |
| 89 | I | 4 | CRP83380.1 | 423 | 6994 | 731 | CRP83353.1 | 424 | 6995 | 245 | CRP83330.1 | 425 | 6996 | 547 |
| 90 | I | 4 | CRP15070.1 | 427 | 6998 | 708 | CRP15101.1 | 428 | 6999 | 254 | CRP15132.1 | 429 | 7000 | 670 |
| 91 | I | 4 | CRP60638.1 | 431 | 7002 | 708 | CRP60613.1 | 432 | 7003 | 254 | CRP60586.1 | 433 | 7004 | 670 |
| 92 | I | 4 | CRQ10821.1 | 435 | 7006 | 731 | CRQ10804.1 | 436 | 7007 | 245 | CRQ10786.1 | 437 | 7008 | 547 |
| 93 | I | 4 | CRP54994.1 | 439 | 7010 | 731 | CRP54888.1 | 440 | 7011 | 245 | CRP54862.1 | 441 | 7012 | 547 |
| 94 | I | 4 | CRP76342.1 | 443 | 7014 | 708 | CRP76468.1 | 444 | 7015 | 254 | CRP76497.1 | 445 | 7016 | 670 |
| 95 | I | 4 | CRP45935.1 | 447 | 7018 | 731 | CRP45955.1 | 448 | 7019 | 245 | CRP45983.1 | 449 | 7020 | 547 |
| 96 | I | 4 | CRP23202.1 | 451 | 7022 | 708 | CRP23176.1 | 452 | 7023 | 254 | CRP23144.1 | 453 | 7024 | 670 |
| 97 | I | 4 | CRP65371.1 | 455 | 7026 | 708 | CRP65407.1 | 456 | 7027 | 254 | CRP65439.1 | 457 | 7028 | 670 |
| 98 | I | 4 | CRP93880.1 | 459 | 7030 | 731 | CRP93850.1 | 460 | 7031 | 245 | CRP93825.1 | 461 | 7032 | 547 |
| 99 | I | 4 | CRQ27494.1 | 463 | 7034 | 708 | CRQ27510.1 | 464 | 7035 | 254 | CRQ27528.1 | 465 | 7036 | 670 |
| 100 | I | 4 | CRQ56582.1 | 467 | 7038 | 731 | CRQ56568.1 | 468 | 7039 | 245 | CRQ56555.1 | 469 | 7040 | 547 |
| 101 | I | 4 | CRP80430.1 | 471 | 7042 | 731 | CRP80455.1 | 472 | 7043 | 245 | CRP80479.1 | 473 | 7044 | 547 |
| 102 | I | 4 | CRP36068.1 | 475 | 7046 | 708 | CRP36044.1 | 476 | 7047 | 254 | CRP36016.1 | 477 | 7048 | 670 |
| 103 | I | 4 | CRO87098.1 | 479 | 7050 | 708 | CRO87131.1 | 480 | 7051 | 254 | CRO87170.1 | 481 | 7052 | 670 |
| 104 | I | 4 | CRP11508.1 | 483 | 7054 | 731 | CRP11471.1 | 484 | 7055 | 245 | CRP11443.1 | 485 | 7056 | 547 |
| 105 | I | 4 | CRP24964.1 | 487 | 7058 | 731 | CRP24937.1 | 488 | 7059 | 245 | CRP24910.1 | 489 | 7060 | 547 |
| 106 | I | 4 | CRO90638.1 | 491 | 7062 | 708 | CRO90673.1 | 492 | 7063 | 254 | CRO90698.1 | 493 | 7064 | 670 |
| 107 | I | 4 | CRP17905.1 | 495 | 7066 | 731 | CRP17871.1 | 496 | 7067 | 245 | CRP17834.1 | 497 | 7068 | 547 |
| 108 | I | 4 | CRO58804.1 | 499 | 7070 | 708 | CRO58845.1 | 500 | 7071 | 254 | CRO58885.1 | 501 | 7072 | 670 |
| 109 | I | 4 | CRP27039.1 | 503 | 7074 | 708 | CRP27013.1 | 504 | 7075 | 254 | CRP26989.1 | 505 | 7076 | 670 |
| 110 | I | 4 | CRP96092.1 | 507 | 7078 | 731 | CRP96112.1 | 508 | 7079 | 245 | CRP96135.1 | 509 | 7080 | 547 |
| 111 | I | 4 | CRN60140.1 | 511 | 7082 | 708 | CRN60167.1 | 512 | 7083 | 254 | CRN60197.1 | 513 | 7084 | 670 |
| 112 | I | 4 | CRO00267.1 | 515 | 7086 | 731 | CRO00240.1 | 516 | 7087 | 245 | CRO00221.1 | 517 | 7088 | 547 |
| 113 | I | 4 | CRO92615.1 | 519 | 7090 | 731 | CRO92586.1 | 520 | 7091 | 245 | CRO92548.1 | 521 | 7092 | 547 |
| 114 | I | 4 | CRO70145.1 | 523 | 7094 | 708 | CRO70186.1 | 524 | 7095 | 254 | CRO70227.1 | 525 | 7096 | 670 |
| 115 | I | 4 | CRP22981.1 | 527 | 7098 | 708 | CRP22953.1 | 528 | 7099 | 254 | CRP22919.1 | 529 | 7100 | 670 |
| 116 | I | 4 | CRP50679.1 | 531 | 7102 | 731 | CRP50614.1 | 532 | 7103 | 245 | CRP50550.1 | 533 | 7104 | 547 |
| 117 | I | 4 | CRO39184.1 | 535 | 7106 | 731 | CRO39213.1 | 536 | 7107 | 245 | CRO39248.1 | 537 | 7108 | 547 |
| 118 | I | 4 | CRO06753.1 | 539 | 7110 | 708 | CRO06788.1 | 540 | 7111 | 254 | CRO06822.1 | 541 | 7112 | 670 |
| 119 | I | 4 | CRP41965.1 | 543 | 7114 | 731 | CRP42029.1 | 544 | 7115 | 245 | CRP42062.1 | 545 | 7116 | 547 |
| 120 | I | 4 | CRP09067.1 | 547 | 7118 | 708 | CRP09046.1 | 548 | 7119 | 254 | CRP09026.1 | 549 | 7120 | 670 |
| 121 | I | 4 | CRQ57015.1 | 551 | 7122 | 731 | CRQ57008.1 | 552 | 7123 | 245 | CRQ57001.1 | 553 | 7124 | 547 |
| 122 | I | 4 | CRQ59344.1 | 555 | 7126 | 708 | CRQ59358.1 | 556 | 7127 | 254 | CRQ59370.1 | 557 | 7128 | 670 |
| 123 | I | 4 | CRQ91414.1 | 559 | 7130 | 731 | CRQ91399.1 | 560 | 7131 | 245 | CRQ91388.1 | 561 | 7132 | 547 |
| 124 | I | 4 | CRQ84133.1 | 563 | 7134 | 708 | CRQ84121.1 | 564 | 7135 | 254 | CRQ84110.1 | 565 | 7136 | 670 |
| 125 | I | 4 | CRQ52280.1 | 567 | 7138 | 731 | CRQ52265.1 | 568 | 7139 | 245 | CRQ52253.1 | 569 | 7140 | 547 |
| 126 | I | 4 | CRQ54273.1 | 571 | 7142 | 708 | CRQ54285.1 | 572 | 7143 | 254 | CRQ54295.1 | 573 | 7144 | 670 |
| 127 | I | 4 | CRQ62274.1 | 575 | 7146 | 731 | CRQ62260.1 | 576 | 7147 | 245 | CRQ62248.1 | 577 | 7148 | 547 |
| 128 | I | 4 | CRQ81707.1 | 579 | 7150 | 708 | CRQ81699.1 | 580 | 7151 | 254 | CRQ81693.1 | 581 | 7152 | 670 |
| 129 | I | 4 | CRQ17118.1 | 583 | 7154 | 708 | CRQ17143.1 | 584 | 7155 | 254 | CRQ17167.1 | 585 | 7156 | 670 |
| 130 | I | 3 | CRQ37524.1 | 587 | 7158 | 731 | | | | | CRQ37557.1 | 588 | 7159 | 547 |
| 131 | I | 4 | CRO85949.1 | 590 | 7161 | 731 | CRO85973.1 | 591 | 7162 | 245 | CRO86006.1 | 592 | 7163 | 547 |
| 132 | I | 4 | CRQ40696.1 | 594 | 7165 | 708 | CRQ40681.1 | 595 | 7166 | 254 | CRQ40665.1 | 596 | 7167 | 670 |
| 133 | I | 4 | CRQ91532.1 | 598 | 7169 | 731 | CRQ91543.1 | 599 | 7170 | 245 | CRQ91554.1 | 600 | 7171 | 547 |
| 134 | I | 4 | CRQ79081.1 | 602 | 7173 | 708 | CRQ79071.1 | 603 | 7174 | 254 | CRQ79060.1 | 604 | 7175 | 670 |
| 135 | I | 4 | CRR29704.1 | 606 | 7177 | 731 | CRR29682.1 | 607 | 7178 | 245 | CRR29660.1 | 608 | 7179 | 547 |
| 136 | I | 4 | CRR29108.1 | 610 | 7181 | 708 | CRR29090.1 | 611 | 7182 | 254 | CRR29070.1 | 612 | 7183 | 670 |
| 137 | I | 4 | CRR72780.1 | 614 | 7185 | 708 | CRR72789.1 | 615 | 7186 | 254 | CRR72803.1 | 616 | 7187 | 670 |
| 138 | I | 4 | CRR80244.1 | 618 | 7189 | 731 | CRR80233.1 | 619 | 7190 | 245 | CRR80220.1 | 620 | 7191 | 547 |
| 139 | I | 4 | CRR16521.1 | 622 | 7193 | 731 | CRR16537.1 | 623 | 7194 | 245 | CRR16555.1 | 624 | 7195 | 547 |
| 140 | I | 4 | CRR21620.1 | 626 | 7197 | 708 | CRR21592.1 | 627 | 7198 | 254 | CRR21570.1 | 628 | 7199 | 670 |
| 141 | I | 4 | CRQ92468.1 | 630 | 7201 | 731 | CRQ92458.1 | 631 | 7202 | 245 | CRQ92450.1 | 632 | 7203 | 547 |
| 142 | I | 4 | CRQ86065.1 | 634 | 7205 | 708 | CRQ86078.1 | 635 | 7206 | 254 | CRQ86084.1 | 636 | 7207 | 670 |
| 143 | I | 4 | CRQ59609.1 | 638 | 7209 | 731 | CRQ59620.1 | 639 | 7210 | 245 | CRQ59636.1 | 640 | 7211 | 547 |
| 144 | I | 4 | CRQ56245.1 | 642 | 7213 | 708 | CRQ56252.1 | 643 | 7214 | 254 | CRQ56261.1 | 644 | 7215 | 670 |
| 145 | I | 4 | CRR63837.1 | 646 | 7217 | 731 | CRR63852.1 | 647 | 7218 | 245 | CRR63868.1 | 648 | 7219 | 547 |
| 146 | I | 4 | CRR21775.1 | 650 | 7221 | 708 | CRR21754.1 | 651 | 7222 | 254 | CRR21733.1 | 652 | 7223 | 670 |
| 147 | I | 3 | CRO81150.1 | 654 | 7225 | 731 | CRO81176.1 | 655 | 7226 | 245 | CRO81209.1 | 656 | 7227 | 547 |
| 148 | I | 4 | CRP93376.1 | 657 | 7228 | 708 | CRP93350.1 | 658 | 7229 | 254 | CRP93318.1 | 659 | 7230 | 670 |
| 149 | I | 4 | CRR90631.1 | 661 | 7232 | 708 | CRR90638.1 | 662 | 7233 | 254 | CRR90645.1 | 663 | 7234 | 670 |
| 150 | I | 4 | CRS00747.1 | 665 | 7236 | 731 | CRS00755.1 | 666 | 7237 | 245 | CRS00761.1 | 667 | 7238 | 547 |
| 151 | I | 4 | CRR57318.1 | 669 | 7240 | 708 | CRR57304.1 | 670 | 7241 | 254 | CRR57289.1 | 671 | 7242 | 670 |
| 152 | I | 4 | CRR67521.1 | 673 | 7244 | 731 | CRR67533.1 | 674 | 7245 | 245 | CRR67546.1 | 675 | 7246 | 547 |
| 153 | I | 4 | CRR87278.1 | 677 | 7248 | 708 | CRR87267.1 | 678 | 7249 | 254 | CRR87255.1 | 679 | 7250 | 670 |
| 154 | I | 4 | CRS01331.1 | 681 | 7252 | 731 | CRS01339.1 | 682 | 7253 | 245 | CRS01359.1 | 683 | 7254 | 547 |
| 155 | I | 4 | CRX14782.1 | 685 | 7256 | 731 | CRX14787.1 | 686 | 7257 | 245 | CRX14795.1 | 687 | 7258 | 547 |
| 156 | I | 4 | CRX13592.1 | 689 | 7260 | 708 | CRX13600.1 | 690 | 7261 | 254 | CRX13607.1 | 691 | 7262 | 670 |
| 157 | I | 4 | CRX26819.1 | 693 | 7264 | 708 | CRX26816.1 | 694 | 7265 | 254 | CRX26813.1 | 695 | 7266 | 670 |
| 158 | I | 3 | CRX28035.1 | 697 | 7268 | 731 | CRX28038.1 | 698 | 7269 | 245 | CRX28039.1 | 699 | 7270 | 547 |
| 159 | I | 4 | CRP16698.1 | 700 | 7271 | 708 | CRP16667.1 | 701 | 7272 | 254 | CRP16635.1 | 702 | 7273 | 670 |
| 160 | I | 4 | CRP62245.1 | 704 | 7275 | 731 | CRP62208.1 | 705 | 7276 | 245 | CRP62175.1 | 706 | 7277 | 547 |
| 161 | I | 4 | CRO03605.1 | 708 | 7279 | 708 | CRO03569.1 | 709 | 7280 | 254 | CRO03532.1 | 710 | 7281 | 670 |
| 162 | I | 4 | CRO33501.1 | 712 | 7283 | 731 | CRO33459.1 | 713 | 7284 | 245 | CRO33417.1 | 714 | 7285 | 547 |
| 163 | I | 4 | CRS11181.1 | 716 | 7287 | 708 | CRS11171.1 | 717 | 7288 | 254 | CRS11162.1 | 718 | 7289 | 670 |
| 164 | I | 4 | CRS17573.1 | 720 | 7291 | 731 | CRS17567.1 | 721 | 7292 | 245 | CRS17562.1 | 722 | 7293 | 547 |
| 165 | I | 4 | CRR97327.1 | 724 | 7295 | 708 | CRR97346.1 | 725 | 7296 | 254 | CRR97362.1 | 726 | 7297 | 670 |
| 166 | I | 4 | CRS12883.1 | 728 | 7299 | 731 | CRS12896.1 | 729 | 7300 | 245 | CRS12909.1 | 730 | 7301 | 547 |
| 167 | I | 4 | CRP70706.1 | 732 | 7303 | 708 | CRP70732.1 | 733 | 7304 | 254 | CRP70763.1 | 734 | 7305 | 670 |
| 168 | I | 4 | CRO21159.1 | 736 | 7307 | 731 | CRO21133.1 | 737 | 7308 | 245 | CRO21108.1 | 738 | 7309 | 547 |
| 169 | I | 4 | CRO99304.1 | 740 | 7311 | 708 | CRO99327.1 | 741 | 7312 | 254 | CRO99358.1 | 742 | 7313 | 670 |
| 170 | I | 4 | CRP25119.1 | 744 | 7315 | 731 | CRP25093.1 | 745 | 7316 | 245 | CRP25069.1 | 746 | 7317 | 547 |
| 171 | I | 4 | CRP38742.1 | 748 | 7319 | 731 | CRP38712.1 | 749 | 7320 | 245 | CRP38676.1 | 750 | 7321 | 547 |
| 172 | I | 4 | CRP11637.1 | 752 | 7323 | 708 | CRP11607.1 | 753 | 7324 | 254 | CRP11576.1 | 754 | 7325 | 670 |
| 173 | I | 4 | CRP98506.1 | 756 | 7327 | 731 | CRP98537.1 | 757 | 7328 | 245 | CRP98562.1 | 758 | 7329 | 547 |
| 174 | I | 4 | CRP72954.1 | 760 | 7331 | 708 | CRP72921.1 | 761 | 7332 | 254 | CRP72892.1 | 762 | 7333 | 670 |
| 175 | I | 4 | CRX06558.1 | 764 | 7335 | 708 | CRX06566.1 | 765 | 7336 | 254 | CRX06574.1 | 766 | 7337 | 670 |
| 176 | I | 4 | CRX13417.1 | 768 | 7339 | 731 | CRX13424.1 | 769 | 7340 | 245 | CRX13432.1 | 770 | 7341 | 547 |
| 177 | I | 4 | CRR85713.1 | 772 | 7343 | 708 | CRR85702.1 | 773 | 7344 | 254 | CRR85691.1 | 774 | 7345 | 670 |
| 178 | I | 4 | CRR95325.1 | 776 | 7347 | 731 | CRR95318.1 | 777 | 7348 | 245 | CRR95310.1 | 778 | 7349 | 547 |
| 179 | I | 4 | CRR86767.1 | 780 | 7351 | 731 | CRR86753.1 | 781 | 7352 | 245 | CRR86739.1 | 782 | 7353 | 547 |
| 180 | I | 4 | CRR89272.1 | 784 | 7355 | 708 | CRR89280.1 | 785 | 7356 | 254 | CRR89292.1 | 786 | 7357 | 670 |
| 181 | I | 4 | CRS01732.1 | 788 | 7359 | 708 | CRS01741.1 | 789 | 7360 | 254 | CRS01755.1 | 790 | 7361 | 670 |
| 182 | I | 4 | CRS11345.1 | 792 | 7363 | 731 | CRS11336.1 | 793 | 7364 | 245 | CRS11327.1 | 794 | 7365 | 547 |
| 183 | I | 4 | CRR80918.1 | 796 | 7367 | 708 | CRR80905.1 | 797 | 7368 | 254 | CRR80897.1 | 798 | 7369 | 670 |
| 184 | I | 4 | CRR92387.1 | 800 | 7371 | 731 | CRR92379.1 | 801 | 7372 | 245 | CRR92370.1 | 802 | 7373 | 547 |
| 185 | I | 4 | CRR30277.1 | 804 | 7375 | 731 | CRR30230.1 | 805 | 7376 | 245 | CRR30212.1 | 806 | 7377 | 547 |
| 186 | I | 4 | CRS13870.1 | 808 | 7379 | 708 | CRS13874.1 | 809 | 7380 | 254 | CRS13879.1 | 810 | 7381 | 670 |
| 187 | I | 4 | CRS13774.1 | 812 | 7383 | 731 | CRS13765.1 | 813 | 7384 | 245 | CRS13757.1 | 814 | 7385 | 547 |
| 188 | I | 4 | CRR98672.1 | 816 | 7387 | 708 | CRR98685.1 | 817 | 7388 | 254 | CRR98700.1 | 818 | 7389 | 670 |
| 189 | I | 4 | CRS06208.1 | 820 | 7391 | 708 | CRS06197.1 | 821 | 7392 | 254 | CRS06186.1 | 822 | 7393 | 670 |
| 190 | I | 4 | CRS13959.1 | 824 | 7395 | 731 | CRS13968.1 | 825 | 7396 | 245 | CRS13976.1 | 826 | 7397 | 547 |
| 191 | I | 4 | CRW73950.1 | 828 | 7399 | 708 | CRW73964.1 | 829 | 7400 | 254 | CRW73981.1 | 830 | 7401 | 670 |
| 192 | I | 4 | CRX24327.1 | 832 | 7403 | 731 | CRX24332.1 | 833 | 7404 | 245 | CRX24337.1 | 834 | 7405 | 547 |
| 193 | I | 4 | CRX24419.1 | 836 | 7407 | 731 | CRX24414.1 | 837 | 7408 | 245 | CRX24410.1 | 838 | 7409 | 547 |
| 194 | I | 4 | CRX17855.1 | 840 | 7411 | 708 | CRX17846.1 | 841 | 7412 | 254 | CRX17835.1 | 842 | 7413 | 670 |
| 195 | I | 4 | CRR62909.1 | 844 | 7415 | 731 | CRR62897.1 | 845 | 7416 | 245 | CRR62885.1 | 846 | 7417 | 547 |
| 196 | I | 4 | CRX06842.1 | 848 | 7419 | 708 | CRX06835.1 | 849 | 7420 | 254 | CRX06827.1 | 850 | 7421 | 670 |
| 197 | I | 4 | CRX13728.1 | 852 | 7423 | 731 | CRX13735.1 | 853 | 7424 | 245 | CRX13742.1 | 854 | 7425 | 547 |
| 198 | I | 4 | CRR17604.1 | 856 | 7427 | 731 | CRR17580.1 | 857 | 7428 | 245 | CRR17565.1 | 858 | 7429 | 547 |
| 199 | I | 4 | CRQ30116.1 | 860 | 7431 | 708 | CRQ30103.1 | 861 | 7432 | 254 | CRQ30089.1 | 862 | 7433 | 670 |
| 200 | I | 4 | CRR51933.1 | 864 | 7435 | 731 | CRR51916.1 | 865 | 7436 | 245 | CRR51899.1 | 866 | 7437 | 547 |
| 201 | I | 4 | CRQ97183.1 | 868 | 7439 | 708 | CRQ97164.1 | 869 | 7440 | 254 | CRQ97143.1 | 870 | 7441 | 670 |
| 202 | I | 4 | KQJ58852.1 | 872 | 7443 | 708 | KQJ58851.1 | 873 | 7444 | 254 | KQJ58850.1 | 874 | 7445 | 670 |
| 203 | I | 4 | KRU98874.1 | 876 | 7447 | 731 | KRU98873.1 | 877 | 7448 | 245 | KRU98872.1 | 878 | 7449 | 558 |
| 204 | I | 4 | KRV03410.1 | 880 | 7451 | 731 | KRV03411.1 | 881 | 7452 | 245 | KRV03412.1 | 882 | 7453 | 558 |
| 205 | I | 4 | KRU83200.1 | 884 | 7455 | 731 | KRU83199.1 | 885 | 7456 | 245 | KRU83198.1 | 886 | 7457 | 558 |
| 206 | I | 4 | KRU92657.1 | 888 | 7459 | 731 | KRU92656.1 | 889 | 7460 | 245 | KRU92655.1 | 890 | 7461 | 558 |
| 207 | I | 4 | KSD25189.1 | 892 | 7463 | 708 | KSD25190.1 | 893 | 7464 | 254 | KSD25191.1 | 894 | 7465 | 670 |
| 208 | I | 4 | KSD74108.1 | 896 | 7467 | 708 | KSD74107.1 | 897 | 7468 | 254 | KSD74106.1 | 898 | 7469 | 721 |
| 209 | I | 4 | KSD60218.1 | 900 | 7471 | 708 | KSD60219.1 | 901 | 7472 | 254 | KSD60220.1 | 902 | 7473 | 670 |
| 210 | I | 4 | KSD87958.1 | 904 | 7475 | 731 | KSD87957.1 | 905 | 7476 | 245 | KSD87956.1 | 906 | 7477 | 547 |
| 211 | I | 4 | KSD88699.1 | 908 | 7479 | 708 | KSD88700.1 | 909 | 7480 | 254 | KSD88701.1 | 910 | 7481 | 670 |
| 212 | I | 4 | KSD50146.1 | 912 | 7483 | 731 | KSD50145.1 | 913 | 7484 | 245 | KSD50144.1 | 914 | 7485 | 547 |
| 213 | I | 4 | KSD56745.1 | 916 | 7487 | 708 | KSD56744.1 | 917 | 7488 | 254 | KSD56743.1 | 918 | 7489 | 670 |
| 214 | I | 4 | KSE06419.1 | 920 | 7491 | 708 | KSE06418.1 | 921 | 7492 | 254 | KSE06417.1 | 922 | 7493 | 670 |
| 215 | I | 4 | KSD97264.1 | 924 | 7495 | 731 | KSD97265.1 | 925 | 7496 | 245 | KSD97266.1 | 926 | 7497 | 547 |
| 216 | I | 4 | KSE55326.1 | 928 | 7499 | 731 | KSE55325.1 | 929 | 7500 | 245 | KSE55324.1 | 930 | 7501 | 547 |
| 217 | I | 4 | KSE57194.1 | 932 | 7503 | 708 | KSE57195.1 | 933 | 7504 | 254 | KSE57196.1 | 934 | 7505 | 670 |
| 218 | I | 4 | KSE67397.1 | 936 | 7507 | 731 | KSE67396.1 | 937 | 7508 | 245 | KSE67395.1 | 938 | 7509 | 547 |
| 219 | I | 4 | KSE22580.1 | 940 | 7511 | 731 | KSE22579.1 | 941 | 7512 | 245 | KSE22578.1 | 942 | 7513 | 547 |
| 220 | I | 4 | KSE22789.1 | 944 | 7515 | 708 | KSE22790.1 | 945 | 7516 | 254 | KSE22791.1 | 946 | 7517 | 670 |
| 221 | I | 4 | KSG55970.1 | 948 | 7519 | 708 | KSG55971.1 | 949 | 7520 | 254 | KSG55972.1 | 950 | 7521 | 670 |
| 222 | I | 4 | KSH11345.1 | 952 | 7523 | 708 | KSH11346.1 | 953 | 7524 | 254 | KSH11347.1 | 954 | 7525 | 670 |
| 223 | I | 4 | KSC39038.1 | 956 | 7527 | 731 | KSC39037.1 | 957 | 7528 | 245 | KSC39036.1 | 958 | 7529 | 558 |
| 224 | I | 4 | KSC26153.1 | 960 | 7531 | 731 | KSC26154.1 | 961 | 7532 | 245 | KSC26155.1 | 962 | 7533 | 547 |
| 225 | I | 4 | KSC92702.1 | 964 | 7535 | 708 | KSC92703.1 | 965 | 7536 | 254 | KSC92704.1 | 966 | 7537 | 670 |
| 226 | I | 4 | KSD59501.1 | 968 | 7539 | 708 | KSD59502.1 | 969 | 7540 | 254 | KSD59503.1 | 970 | 7541 | 670 |
| 227 | I | 4 | KSD58176.1 | 972 | 7543 | 731 | KSD58175.1 | 973 | 7544 | 245 | KSD58174.1 | 974 | 7545 | 547 |
| 228 | I | 4 | KSE83336.1 | 976 | 7547 | 708 | KSE83337.1 | 977 | 7548 | 254 | KSE83338.1 | 978 | 7549 | 670 |
| 229 | I | 4 | KSI47359.1 | 980 | 7551 | 731 | KSI47360.1 | 981 | 7552 | 245 | KSI47361.1 | 982 | 7553 | 547 |
| 230 | I | 4 | KSI07558.1 | 984 | 7555 | 731 | KSI07557.1 | 985 | 7556 | 245 | KSI07556.1 | 986 | 7557 | 547 |
| 231 | I | 4 | KSJ10824.1 | 988 | 7559 | 708 | KSJ10823.1 | 989 | 7560 | 254 | KSJ10822.1 | 990 | 7561 | 670 |
| 232 | I | 4 | KSJ26235.1 | 992 | 7563 | 708 | KSJ26234.1 | 993 | 7564 | 254 | KSJ26233.1 | 994 | 7565 | 670 |
| 233 | I | 4 | KSJ98813.1 | 996 | 7567 | 731 | KSJ98814.1 | 997 | 7568 | 245 | KSJ98815.1 | 998 | 7569 | 558 |
| 234 | I | 4 | KSK91641.1 | 1000 | 7571 | 731 | KSK91642.1 | 1001 | 7572 | 245 | KSK91643.1 | 1002 | 7573 | 547 |
| 235 | I | 4 | KSL06910.1 | 1004 | 7575 | 731 | KSL06911.1 | 1005 | 7576 | 245 | KSL06912.1 | 1006 | 7577 | 558 |
| 236 | I | 4 | KSM47321.1 | 1008 | 7579 | 731 | KSM47320.1 | 1009 | 7580 | 245 | KSM47319.1 | 1010 | 7581 | 558 |
| 237 | I | 4 | KSM41525.1 | 1012 | 7583 | 708 | KSM41524.1 | 1013 | 7584 | 254 | KSM41523.1 | 1014 | 7585 | 721 |
| 238 | I | 4 | KSN32759.1 | 1016 | 7587 | 731 | KSN32760.1 | 1017 | 7588 | 245 | KSN32761.1 | 1018 | 7589 | 547 |
| 239 | I | 4 | KSN33320.1 | 1020 | 7591 | 708 | KSN33321.1 | 1021 | 7592 | 254 | KSN33322.1 | 1022 | 7593 | 670 |
| 240 | I | 4 | KSN27912.1 | 1024 | 7595 | 731 | KSN27911.1 | 1025 | 7596 | 245 | KSN27910.1 | 1026 | 7597 | 547 |
| 241 | I | 4 | KSN02517.1 | 1028 | 7599 | 708 | KSN02518.1 | 1029 | 7600 | 254 | KSN02519.1 | 1030 | 7601 | 640 |
| 242 | I | 4 | KSN94642.1 | 1032 | 7603 | 731 | KSN94643.1 | 1033 | 7604 | 245 | KSN94644.1 | 1034 | 7605 | 558 |
| 243 | I | 4 | KSN59773.1 | 1036 | 7607 | 708 | KSN59774.1 | 1037 | 7608 | 254 | KSN59775.1 | 1038 | 7609 | 670 |
| 244 | I | 4 | KSN68235.1 | 1040 | 7611 | 731 | KSN68236.1 | 1041 | 7612 | 245 | KSN68237.1 | 1042 | 7613 | 547 |
| 245 | I | 4 | KSO78871.1 | 1044 | 7615 | 731 | KSO78872.1 | 1045 | 7616 | 245 | KSO78873.1 | 1046 | 7617 | 558 |
| 246 | I | 4 | KSO73926.1 | 1048 | 7619 | 731 | KSO73925.1 | 1049 | 7620 | 245 | KSO73924.1 | 1050 | 7621 | 547 |
| 247 | I | 4 | KSO74314.1 | 1052 | 7623 | 708 | KSO74313.1 | 1053 | 7624 | 254 | KSO74312.1 | 1054 | 7625 | 670 |
| 248 | I | 4 | KSO93081.1 | 1056 | 7627 | 708 | KSO93082.1 | 1057 | 7628 | 254 | KSO93083.1 | 1058 | 7629 | 670 |
| 249 | I | 4 | KSO91845.1 | 1060 | 7631 | 731 | KSO91844.1 | 1061 | 7632 | 245 | KSO91843.1 | 1062 | 7633 | 547 |
| 250 | I | 4 | KSP60331.1 | 1064 | 7635 | 708 | KSP60332.1 | 1065 | 7636 | 254 | KSP60333.1 | 1066 | 7637 | 670 |
| 251 | I | 4 | KSP82596.1 | 1068 | 7639 | 782 | KSP82595.1 | 1069 | 7640 | 247 | KSP82594.1 | 1070 | 7641 | 723 |
| 252 | I | 4 | KSQ11856.1 | 1072 | 7643 | 731 | KSQ11855.1 | 1073 | 7644 | 245 | KSQ11854.1 | 1074 | 7645 | 558 |
| 253 | I | 4 | KSN68769.1 | 1076 | 7647 | 731 | KSN68770.1 | 1077 | 7648 | 245 | KSN68771.1 | 1078 | 7649 | 558 |
| 254 | I | 4 | KSO40824.1 | 1080 | 7651 | 708 | KSO40825.1 | 1081 | 7652 | 254 | KSO40826.1 | 1082 | 7653 | 721 |
| 255 | I | 4 | KSQ48400.1 | 1084 | 7655 | 708 | KSQ48399.1 | 1085 | 7656 | 254 | KSQ48398.1 | 1086 | 7657 | 670 |
| 256 | I | 4 | KSQ47084.1 | 1088 | 7659 | 731 | KSQ47083.1 | 1089 | 7660 | 245 | KSQ47082.1 | 1090 | 7661 | 547 |
| 257 | I | 4 | KSQ03908.1 | 1092 | 7663 | 708 | KSQ03907.1 | 1093 | 7664 | 254 | KSQ03906.1 | 1094 | 7665 | 670 |
| 258 | I | 4 | KSQ01968.1 | 1096 | 7667 | 731 | KSQ01967.1 | 1097 | 7668 | 245 | KSQ01966.1 | 1098 | 7669 | 547 |
| 259 | I | 4 | KSR61594.1 | 1100 | 7671 | 708 | KSR61593.1 | 1101 | 7672 | 254 | KSR61592.1 | 1102 | 7673 | 721 |
| 260 | I | 4 | KSR90896.1 | 1104 | 7675 | 708 | KSR90897.1 | 1105 | 7676 | 254 | KSR90898.1 | 1106 | 7677 | 670 |
| 261 | I | 4 | KSR87673.1 | 1108 | 7679 | 731 | KSR87674.1 | 1109 | 7680 | 245 | KSR87675.1 | 1110 | 7681 | 558 |
| 262 | I | 4 | KSR56106.1 | 1112 | 7683 | 731 | KSR56105.1 | 1113 | 7684 | 245 | KSR56104.1 | 1114 | 7685 | 547 |
| 263 | I | 4 | KSR68843.1 | 1116 | 7687 | 708 | KSR68842.1 | 1117 | 7688 | 254 | KSR68841.1 | 1118 | 7689 | 670 |
| 264 | I | 4 | KSS83648.1 | 1120 | 7691 | 708 | KSS83647.1 | 1121 | 7692 | 254 | KSS83646.1 | 1122 | 7693 | 670 |
| 265 | I | 4 | KSS82297.1 | 1124 | 7695 | 731 | KSS82296.1 | 1125 | 7696 | 245 | KSS82295.1 | 1126 | 7697 | 547 |
| 266 | I | 4 | KSS65852.1 | 1128 | 7699 | 731 | KSS65851.1 | 1129 | 7700 | 245 | KSS65850.1 | 1130 | 7701 | 547 |
| 267 | I | 4 | KSS71074.1 | 1132 | 7703 | 708 | KSS71073.1 | 1133 | 7704 | 254 | KSS71072.1 | 1134 | 7705 | 670 |
| 268 | I | 4 | KSS83671.1 | 1136 | 7707 | 731 | KSS83670.1 | 1137 | 7708 | 245 | KSS83669.1 | 1138 | 7709 | 547 |
| 269 | I | 4 | KSS97189.1 | 1140 | 7711 | 708 | KSS97188.1 | 1141 | 7712 | 254 | KSS97187.1 | 1142 | 7713 | 670 |
| 270 | I | 4 | KSS68542.1 | 1144 | 7715 | 731 | KSS68541.1 | 1145 | 7716 | 245 | KSS68540.1 | 1146 | 7717 | 547 |
| 271 | I | 4 | KSS64139.1 | 1148 | 7719 | 708 | KSS64138.1 | 1149 | 7720 | 254 | KSS64137.1 | 1150 | 7721 | 670 |
| 272 | I | 4 | KST02401.1 | 1152 | 7723 | 708 | KST02402.1 | 1153 | 7724 | 254 | KST02403.1 | 1154 | 7725 | 670 |
| 273 | I | 4 | KST01506.1 | 1156 | 7727 | 731 | KST01505.1 | 1157 | 7728 | 245 | KST01504.1 | 1158 | 7729 | 547 |
| 274 | I | 4 | KST09053.1 | 1160 | 7731 | 708 | KST09052.1 | 1161 | 7732 | 254 | KST09051.1 | 1162 | 7733 | 670 |
| 275 | I | 4 | KST07356.1 | 1164 | 7735 | 731 | KST07355.1 | 1165 | 7736 | 245 | KST07354.1 | 1166 | 7737 | 547 |
| 276 | I | 4 | KSR39888.1 | 1168 | 7739 | 708 | KSR39889.1 | 1169 | 7740 | 254 | KSR39890.1 | 1170 | 7741 | 670 |
| 277 | I | 4 | KST03849.1 | 1172 | 7743 | 731 | KST03848.1 | 1173 | 7744 | 245 | KST03847.1 | 1174 | 7745 | 547 |
| 278 | I | 4 | KST05251.1 | 1176 | 7747 | 708 | KST05250.1 | 1177 | 7748 | 254 | KST05249.1 | 1178 | 7749 | 670 |
| 279 | I | 4 | KSS85815.1 | 1180 | 7751 | 708 | KSS85816.1 | 1181 | 7752 | 254 | KSS85817.1 | 1182 | 7753 | 670 |
| 280 | I | 4 | KSS83938.1 | 1184 | 7755 | 731 | KSS83937.1 | 1185 | 7756 | 245 | KSS83936.1 | 1186 | 7757 | 547 |
| 281 | I | 4 | KTF54396.1 | 1188 | 7759 | 708 | KTF54397.1 | 1189 | 7760 | 254 | KTF54398.1 | 1190 | 7761 | 670 |
| 282 | I | 4 | KTF49811.1 | 1192 | 7763 | 731 | KTF49810.1 | 1193 | 7764 | 245 | KTF49809.1 | 1194 | 7765 | 547 |
| 283 | I | 4 | KTK55766.1 | 1196 | 7767 | 782 | KTK55767.1 | 1197 | 7768 | 247 | KTK55768.1 | 1198 | 7769 | 723 |
| 284 | I | 4 | ALZ13984.1 | 1200 | 7771 | 782 | ALZ13983.1 | 1201 | 7772 | 247 | ALZ13982.1 | 1202 | 7773 | 723 |
| 285 | I | 4 | ALY33856.1 | 1204 | 7775 | 731 | ALY33855.1 | 1205 | 7776 | 245 | ALY33854.1 | 1206 | 7777 | 558 |
| 286 | I | 4 | ALY39460.1 | 1208 | 7779 | 731 | ALY39461.1 | 1209 | 7780 | 245 | ALY39462.1 | 1210 | 7781 | 547 |
| 287 | I | 4 | ALY43157.1 | 1212 | 7783 | 708 | ALY43156.1 | 1213 | 7784 | 254 | ALY43155.1 | 1214 | 7785 | 670 |
| 288 | I | 3 | KWR99692.1 | 1216 | 7787 | 731 | KWR99691.1 | 1217 | 7788 | 245 | KWR99690.1 | 1218 | 7789 | 547 |
| 289 | I | 3 | KWZ69450.1 | 1219 | 7790 | 708 | KWZ69449.1 | 1220 | 7791 | 254 | | | | |
| 290 | I | 4 | KXG16565.1 | 1222 | 7793 | 708 | KXG16566.1 | 1223 | 7794 | 254 | KXG16567.1 | 1224 | 7795 | 670 |
| 291 | I | 4 | KYO75360.1 | 1226 | 7797 | 708 | KYO75361.1 | 1227 | 7798 | 254 | KYO75362.1 | 1228 | 7799 | 670 |
| 292 | I | 3 | KIS47213.1 | 1230 | 7801 | 670 | KIS48415.1 | 1231 | 7802 | 131 | | | | |
| 293 | I | 4 | KVA56588.1 | 1233 | 7804 | 670 | KVA56589.1 | 1234 | 7805 | 241 | KVA56590.1 | 1235 | 7806 | 545 |
| 294 | I | 4 | KVC33765.1 | 1237 | 7808 | 670 | KVC33766.1 | 1238 | 7809 | 241 | KVC33767.1 | 1239 | 7810 | 545 |
| 295 | I | 4 | AEV65174.1 | 1241 | 7812 | 608 | AEV65173.1 | 1242 | 7813 | 247 | AEV65172.1 | 1243 | 7814 | 542 |
| 296 | I | 4 | KGE64068.1 | 1245 | 7816 | 730 | KGE64069.1 | 1246 | 7817 | 247 | KGE64070.1 | 1247 | 7818 | 542 |
| 297 | I | 4 | KWV80506.1 | 1249 | 7820 | 781 | KWV80505.1 | 1250 | 7821 | 248 | KWV80504.1 | 1251 | 7822 | 704 |
| 298 | I | 4 | ABQ80738.1 | 1253 | 7824 | 730 | ABQ80737.1 | 1254 | 7825 | 247 | ABQ80736.1 | 1255 | 7826 | 541 |
| 299 | I | 4 | AFK68697.1 | 1257 | 7828 | 730 | AFK68696.1 | 1258 | 7829 | 247 | AFK68695.1 | 1259 | 7830 | 541 |
| 300 | I | 4 | EMR48530.1 | 1261 | 7832 | 781 | EMR48531.1 | 1262 | 7833 | 254 | EMR48532.1 | 1263 | 7834 | 681 |
| 301 | I | 4 | AGA73017.1 | 1265 | 7836 | 730 | AGA73018.1 | 1266 | 7837 | 247 | AGA73019.1 | 1267 | 7838 | 542 |
| 302 | I | 4 | KTC24575.1 | 1269 | 7840 | 782 | KTC24464.1 | 1270 | 7841 | 247 | KTC24463.1 | 1271 | 7842 | 626 |
| 303 | I | 4 | ABP79163.1 | 1273 | 7844 | 783 | ABP79164.1 | 1274 | 7845 | 254 | ABP79165.1 | 1275 | 7846 | 210 |
| 304 | I | 4 | AEA83397.1 | 1277 | 7848 | 781 | AEA83398.1 | 1278 | 7849 | 254 | AEA83399.1 | 1279 | 7850 | 751 |
| 305 | I | 4 | EHY79730.1 | 1281 | 7852 | 781 | EHY79731.1 | 1282 | 7853 | 254 | EHY79732.1 | 1283 | 7854 | 751 |
| 306 | I | 4 | AFM32806.1 | 1285 | 7856 | 781 | AFM32807.1 | 1286 | 7857 | 254 | AFM32808.1 | 1287 | 7858 | 752 |
| 307 | I | 4 | EWC39447.1 | 1289 | 7860 | 682 | EWC39446.1 | 1290 | 7861 | 245 | EWC39445.1 | 1291 | 7862 | 558 |
| 308 | I | 3 | EPL62183.1 | 1293 | 7864 | 781 | EPL62184.1 | 1294 | 7865 | 254 | | | | |
| 309 | I | 4 | EPM44374.1 | 1296 | 7867 | 659 | EPM44375.1 | 1297 | 7868 | 247 | EPM44377.1 | 1298 | 7869 | 378 |
| 310 | I | 4 | EPN29003.1 | 1300 | 7871 | 659 | EPN29004.1 | 1301 | 7872 | 247 | EPN29005.1 | 1302 | 7873 | 518 |
| 311 | I | 4 | EPN47277.1 | 1304 | 7875 | 659 | EPN47278.1 | 1305 | 7876 | 247 | EPN47280.1 | 1306 | 7877 | 378 |
| 312 | I | 4 | EPN38583.1 | 1308 | 7879 | 659 | EPN38584.1 | 1309 | 7880 | 247 | EPN38585.1 | 1310 | 7881 | 545 |
| 313 | I | 4 | EPN31613.1 | 1312 | 7883 | 659 | EPN31614.1 | 1313 | 7884 | 247 | EPN31616.1 | 1314 | 7885 | 378 |
| 314 | I | 4 | EPN22775.1 | 1316 | 7887 | 659 | EPN22776.1 | 1317 | 7888 | 247 | EPN22777.1 | 1318 | 7889 | 545 |
| 315 | I | 4 | EPN13939.1 | 1320 | 7891 | 659 | EPN13938.1 | 1321 | 7892 | 247 | EPN13936.1 | 1322 | 7893 | 378 |
| 316 | I | 4 | EPM64842.1 | 1324 | 7895 | 659 | EPM64843.1 | 1325 | 7896 | 247 | EPM64844.1 | 1326 | 7897 | 545 |
| 317 | I | 4 | KFE44523.1 | 1328 | 7899 | 730 | KFE44522.1 | 1329 | 7900 | 247 | KFE44521.1 | 1330 | 7901 | 542 |
| 318 | I | 4 | KTC49637.1 | 1332 | 7903 | 730 | KTC49636.1 | 1333 | 7904 | 247 | KTC49752.1 | 1334 | 7905 | 545 |
| 319 | I | 4 | AAM40747.1 | 1336 | 7907 | 629 | AAM40748.1 | 1337 | 7908 | 238 | AAM40749.1 | 1338 | 7909 | 491 |
| 320 | I | 4 | AAY49837.1 | 1340 | 7911 | 629 | AAY49836.1 | 1341 | 7912 | 238 | AAY49835.1 | 1342 | 7913 | 491 |
| 321 | I | 4 | AKS16757.1 | 1344 | 7915 | 629 | AKS16756.1 | 1345 | 7916 | 238 | AKS18353.1 | 1346 | 7917 | 491 |
| 322 | I | 4 | ACP24372.1 | 1348 | 7919 | 481 | ACP24373.1 | 1349 | 7920 | 309 | ACP24374.1 | 1350 | 7921 | 437 |
| 323 | I | 3 | KUM25652.1 | 1352 | 7923 | 675 | KUM25651.1 | 1353 | 7924 | 323 | KUM25650.1 | 1354 | 7925 | 413 |
| 324 | I | 4 | KUM27288.1 | 1355 | 7926 | 723 | KUM27287.1 | 1356 | 7927 | 302 | KUM27286.1 | 1357 | 7928 | 460 |
| 325 | I | 4 | CDZ72588.1 | 1359 | 7930 | 677 | CDZ72587.1 | 1360 | 7931 | 326 | CDZ72586.1 | 1361 | 7932 | 389 |
| 326 | I | 4 | ACK84139.1 | 1363 | 7934 | 685 | ACK84140.1 | 1364 | 7935 | 296 | ACK84141.1 | 1365 | 7936 | 438 |
| 327 | I | 4 | CAH15308.1 | 1367 | 7938 | 657 | CAH15307.1 | 1368 | 7939 | 234 | CAH15306.1 | 1369 | 7940 | 482 |
| 328 | I | 4 | CCD05132.1 | 1371 | 7942 | 636 | CCD05131.1 | 1372 | 7943 | 234 | CCD05130.1 | 1373 | 7944 | 482 |
| 329 | I | 4 | CZL99121.1 | 1375 | 7946 | 636 | CZL99087.1 | 1376 | 7947 | 234 | CZL99058.1 | 1377 | 7948 | 482 |
| 330 | I | 4 | CZN28597.1 | 1379 | 7950 | 636 | CZN28565.1 | 1380 | 7951 | 234 | CZN28532.1 | 1381 | 7952 | 482 |
| 331 | I | 4 | CZP40404.1 | 1383 | 7954 | 636 | CZP40292.1 | 1384 | 7955 | 234 | CZP40266.1 | 1385 | 7956 | 482 |
| 332 | I | 4 | CZP31110.1 | 1387 | 7958 | 636 | CZP31151.1 | 1388 | 7959 | 234 | CZP31189.1 | 1389 | 7960 | 482 |
| 333 | I | 4 | CZP19884.1 | 1391 | 7962 | 636 | CZP19847.1 | 1392 | 7963 | 234 | CZP19810.1 | 1393 | 7964 | 482 |
| 334 | I | 4 | CZN56655.1 | 1395 | 7966 | 636 | CZN56617.1 | 1396 | 7967 | 234 | CZN56586.1 | 1397 | 7968 | 482 |
| 335 | I | 4 | CZN22035.1 | 1399 | 7970 | 636 | CZN21995.1 | 1400 | 7971 | 234 | CZN21949.1 | 1401 | 7972 | 482 |
| 336 | I | 4 | CZP49453.1 | 1403 | 7974 | 636 | CZP49417.1 | 1404 | 7975 | 234 | CZP49379.1 | 1405 | 7976 | 482 |
| 337 | I | 4 | CZP60974.1 | 1407 | 7978 | 636 | CZP61042.1 | 1408 | 7979 | 234 | CZP61132.1 | 1409 | 7980 | 482 |
| 338 | I | 4 | CZN58239.1 | 1411 | 7982 | 636 | CZN58276.1 | 1412 | 7983 | 234 | CZN58324.1 | 1413 | 7984 | 482 |
| 339 | I | 4 | CZO62381.1 | 1415 | 7986 | 636 | CZO62416.1 | 1416 | 7987 | 234 | CZO62452.1 | 1417 | 7988 | 482 |
| 340 | I | 4 | CZO85409.1 | 1419 | 7990 | 636 | CZO85444.1 | 1420 | 7991 | 234 | CZO85483.1 | 1421 | 7992 | 482 |
| 341 | I | 4 | CZN18702.1 | 1423 | 7994 | 636 | CZN18741.1 | 1424 | 7995 | 234 | CZN18776.1 | 1425 | 7996 | 482 |
| 342 | I | 4 | CZO33191.1 | 1427 | 7998 | 636 | CZO33228.1 | 1428 | 7999 | 234 | CZO33267.1 | 1429 | 8000 | 482 |
| 343 | I | 4 | CZN48685.1 | 1431 | 8002 | 636 | CZN48726.1 | 1432 | 8003 | 234 | CZN48784.1 | 1433 | 8004 | 482 |
| 344 | I | 4 | CZO35301.1 | 1435 | 8006 | 636 | CZO35341.1 | 1436 | 8007 | 234 | CZO35376.1 | 1437 | 8008 | 482 |
| 345 | I | 4 | CZL93468.1 | 1439 | 8010 | 636 | CZL93499.1 | 1440 | 8011 | 234 | CZL93535.1 | 1441 | 8012 | 482 |
| 346 | I | 4 | CZH31955.1 | 1443 | 8014 | 636 | CZH31923.1 | 1444 | 8015 | 234 | CZH31901.1 | 1445 | 8016 | 482 |
| 347 | I | 4 | CZG09013.1 | 1447 | 8018 | 636 | CZG09061.1 | 1448 | 8019 | 234 | CZG09117.1 | 1449 | 8020 | 482 |
| 348 | I | 4 | CZO58196.1 | 1451 | 8022 | 636 | CZO58161.1 | 1452 | 8023 | 234 | CZO58116.1 | 1453 | 8024 | 482 |
| 349 | I | 4 | CZP31281.1 | 1455 | 8026 | 636 | CZP31240.1 | 1456 | 8027 | 234 | CZP31204.1 | 1457 | 8028 | 482 |
| 350 | I | 4 | CZP25054.1 | 1459 | 8030 | 636 | CZP25088.1 | 1460 | 8031 | 234 | CZP25128.1 | 1461 | 8032 | 482 |
| 351 | I | 4 | CZO87032.1 | 1463 | 8034 | 636 | CZO87064.1 | 1464 | 8035 | 234 | CZO87079.1 | 1465 | 8036 | 482 |
| 352 | I | 4 | CZP12610.1 | 1467 | 8038 | 636 | CZP12634.1 | 1468 | 8039 | 234 | CZP12658.1 | 1469 | 8040 | 482 |
| 353 | I | 4 | CZO76824.1 | 1471 | 8042 | 636 | CZO76768.1 | 1472 | 8043 | 234 | CZO76725.1 | 1473 | 8044 | 482 |
| 354 | I | 4 | CZM76075.1 | 1475 | 8046 | 636 | CZM76043.1 | 1476 | 8047 | 234 | CZM76014.1 | 1477 | 8048 | 482 |
| 355 | I | 4 | CZM80398.1 | 1479 | 8050 | 636 | CZM80434.1 | 1480 | 8051 | 234 | CZM80464.1 | 1481 | 8052 | 482 |
| 356 | I | 4 | CZO03095.1 | 1483 | 8054 | 636 | CZO03125.1 | 1484 | 8055 | 234 | CZO03159.1 | 1485 | 8056 | 482 |
| 357 | I | 4 | CZO99703.1 | 1487 | 8058 | 636 | CZO99672.1 | 1488 | 8059 | 234 | CZO99644.1 | 1489 | 8060 | 482 |
| 358 | I | 4 | CZN78011.1 | 1491 | 8062 | 636 | CZN77981.1 | 1492 | 8063 | 234 | CZN77962.1 | 1493 | 8064 | 482 |
| 359 | I | 4 | CZO69823.1 | 1495 | 8066 | 636 | CZO69863.1 | 1496 | 8067 | 234 | CZO69902.1 | 1497 | 8068 | 482 |
| 360 | I | 4 | CZO98643.1 | 1499 | 8070 | 636 | CZO98681.1 | 1500 | 8071 | 234 | CZO98721.1 | 1501 | 8072 | 482 |
| 361 | I | 4 | CZN87164.1 | 1503 | 8074 | 636 | CZN87203.1 | 1504 | 8075 | 234 | CZN87237.1 | 1505 | 8076 | 482 |
| 362 | I | 4 | CZO29078.1 | 1507 | 8078 | 636 | CZO29056.1 | 1508 | 8079 | 234 | CZO29002.1 | 1509 | 8080 | 482 |
| 363 | I | 4 | CZO58157.1 | 1511 | 8082 | 636 | CZO58193.1 | 1512 | 8083 | 234 | CZO58228.1 | 1513 | 8084 | 482 |
| 364 | I | 4 | CZM99522.1 | 1515 | 8086 | 636 | CZM99497.1 | 1516 | 8087 | 234 | CZM99482.1 | 1517 | 8088 | 482 |
| 365 | I | 4 | CZN97533.1 | 1519 | 8090 | 636 | CZN97560.1 | 1520 | 8091 | 234 | CZN97585.1 | 1521 | 8092 | 482 |
| 366 | I | 4 | CZN56114.1 | 1523 | 8094 | 636 | CZN56138.1 | 1524 | 8095 | 234 | CZN56241.1 | 1525 | 8096 | 482 |
| 367 | I | 4 | CZP07429.1 | 1527 | 8098 | 636 | CZP07390.1 | 1528 | 8099 | 234 | CZP07358.1 | 1529 | 8100 | 482 |
| 368 | I | 4 | CZP63511.1 | 1531 | 8102 | 636 | CZP63546.1 | 1532 | 8103 | 234 | CZP63581.1 | 1533 | 8104 | 482 |
| 369 | I | 4 | CZM58627.1 | 1535 | 8106 | 636 | CZM58593.1 | 1536 | 8107 | 234 | CZM58562.1 | 1537 | 8108 | 482 |
| 370 | I | 4 | CZN95768.1 | 1539 | 8110 | 636 | CZN95715.1 | 1540 | 8111 | 234 | CZN95664.1 | 1541 | 8112 | 482 |
| 371 | I | 4 | CZN53092.1 | 1543 | 8114 | 636 | CZN53126.1 | 1544 | 8115 | 234 | CZN53175.1 | 1545 | 8116 | 482 |
| 372 | I | 4 | CZN21729.1 | 1547 | 8118 | 636 | CZN21768.1 | 1548 | 8119 | 234 | CZN21791.1 | 1549 | 8120 | 482 |
| 373 | I | 4 | CZO54055.1 | 1551 | 8122 | 636 | CZO54008.1 | 1552 | 8123 | 234 | CZO53982.1 | 1553 | 8124 | 482 |
| 374 | I | 4 | CZO83037.1 | 1555 | 8126 | 636 | CZO83063.1 | 1556 | 8127 | 234 | CZO83078.1 | 1557 | 8128 | 482 |
| 375 | I | 4 | CZM80662.1 | 1559 | 8130 | 636 | CZM80631.1 | 1560 | 8131 | 234 | CZM80598.1 | 1561 | 8132 | 482 |
| 376 | I | 4 | CZN76327.1 | 1563 | 8134 | 636 | CZN76305.1 | 1564 | 8135 | 234 | CZN76257.1 | 1565 | 8136 | 482 |
| 377 | I | 4 | CZN17181.1 | 1567 | 8138 | 636 | CZN17217.1 | 1568 | 8139 | 234 | CZN17250.1 | 1569 | 8140 | 482 |
| 378 | I | 4 | CZN08820.1 | 1571 | 8142 | 636 | CZN08778.1 | 1572 | 8143 | 234 | CZN08740.1 | 1573 | 8144 | 482 |
| 379 | I | 4 | CZN07776.1 | 1575 | 8146 | 636 | CZN07744.1 | 1576 | 8147 | 234 | CZN07717.1 | 1577 | 8148 | 482 |
| 380 | I | 4 | CZN26973.1 | 1579 | 8150 | 636 | CZN27020.1 | 1580 | 8151 | 234 | CZN27059.1 | 1581 | 8152 | 482 |
| 381 | I | 4 | CZO91605.1 | 1583 | 8154 | 636 | CZO91570.1 | 1584 | 8155 | 234 | CZO91532.1 | 1585 | 8156 | 482 |
| 382 | I | 4 | CZN16140.1 | 1587 | 8158 | 636 | CZN16106.1 | 1588 | 8159 | 234 | CZN16089.1 | 1589 | 8160 | 482 |
| 383 | I | 4 | CZN39081.1 | 1591 | 8162 | 636 | CZN39046.1 | 1592 | 8163 | 234 | CZN38988.1 | 1593 | 8164 | 482 |
| 384 | I | 4 | CZI18710.1 | 1595 | 8166 | 636 | CZI18679.1 | 1596 | 8167 | 234 | CZI18647.1 | 1597 | 8168 | 482 |
| 385 | I | 4 | CZL86382.1 | 1599 | 8170 | 636 | CZL86343.1 | 1600 | 8171 | 234 | CZL86298.1 | 1601 | 8172 | 482 |
| 386 | I | 4 | CZM41589.1 | 1603 | 8174 | 636 | CZM41618.1 | 1604 | 8175 | 234 | CZM41656.1 | 1605 | 8176 | 482 |
| 387 | I | 4 | CZM78595.1 | 1607 | 8178 | 636 | CZM78547.1 | 1608 | 8179 | 234 | CZM78507.1 | 1609 | 8180 | 482 |
| 388 | I | 4 | CZM56824.1 | 1611 | 8182 | 636 | CZM56782.1 | 1612 | 8183 | 234 | CZM56749.1 | 1613 | 8184 | 482 |
| 389 | I | 4 | CZM61973.1 | 1615 | 8186 | 636 | CZM62010.1 | 1616 | 8187 | 234 | CZM62034.1 | 1617 | 8188 | 482 |
| 390 | I | 4 | CZM06139.1 | 1619 | 8190 | 636 | CZM06106.1 | 1620 | 8191 | 234 | CZM06061.1 | 1621 | 8192 | 482 |
| 391 | I | 4 | CZM97949.1 | 1623 | 8194 | 636 | CZM97974.1 | 1624 | 8195 | 234 | CZM97996.1 | 1625 | 8196 | 482 |
| 392 | I | 4 | CZN32008.1 | 1627 | 8198 | 636 | CZN32037.1 | 1628 | 8199 | 234 | CZN32065.1 | 1629 | 8200 | 482 |
| 393 | I | 4 | CZN27707.1 | 1631 | 8202 | 636 | CZN27733.1 | 1632 | 8203 | 234 | CZN27771.1 | 1633 | 8204 | 482 |
| 394 | I | 4 | CZM96765.1 | 1635 | 8206 | 636 | CZM96741.1 | 1636 | 8207 | 234 | CZM96707.1 | 1637 | 8208 | 482 |
| 395 | I | 4 | CZN17300.1 | 1639 | 8210 | 636 | CZN17329.1 | 1640 | 8211 | 234 | CZN17356.1 | 1641 | 8212 | 482 |
| 396 | I | 4 | CZN17894.1 | 1643 | 8214 | 636 | CZN17862.1 | 1644 | 8215 | 234 | CZN17835.1 | 1645 | 8216 | 482 |
| 397 | I | 4 | CZN51335.1 | 1647 | 8218 | 636 | CZN51299.1 | 1648 | 8219 | 234 | CZN51263.1 | 1649 | 8220 | 482 |
| 398 | I | 4 | CZN80164.1 | 1651 | 8222 | 636 | CZN80114.1 | 1652 | 8223 | 234 | CZN80081.1 | 1653 | 8224 | 482 |
| 399 | I | 4 | CZN83467.1 | 1655 | 8226 | 636 | CZN83507.1 | 1656 | 8227 | 234 | CZN83551.1 | 1657 | 8228 | 482 |
| 400 | I | 4 | CZN87990.1 | 1659 | 8230 | 636 | CZN87946.1 | 1660 | 8231 | 234 | CZN87903.1 | 1661 | 8232 | 482 |
| 401 | I | 4 | CZN93946.1 | 1663 | 8234 | 636 | CZN93993.1 | 1664 | 8235 | 234 | CZN94035.1 | 1665 | 8236 | 482 |
| 402 | I | 4 | CZO07075.1 | 1667 | 8238 | 636 | CZO07110.1 | 1668 | 8239 | 234 | CZO07154.1 | 1669 | 8240 | 482 |
| 403 | I | 4 | CZO12027.1 | 1671 | 8242 | 636 | CZO11987.1 | 1672 | 8243 | 234 | CZO11952.1 | 1673 | 8244 | 482 |
| 404 | I | 4 | CZO09452.1 | 1675 | 8246 | 636 | CZO09406.1 | 1676 | 8247 | 234 | CZO09365.1 | 1677 | 8248 | 482 |
| 405 | I | 4 | CZN88093.1 | 1679 | 8250 | 636 | CZN88057.1 | 1680 | 8251 | 234 | CZN88014.1 | 1681 | 8252 | 482 |
| 406 | I | 4 | CZO32095.1 | 1683 | 8254 | 636 | CZO32135.1 | 1684 | 8255 | 234 | CZO32185.1 | 1685 | 8256 | 482 |
| 407 | I | 4 | CZO07325.1 | 1687 | 8258 | 636 | CZO07290.1 | 1688 | 8259 | 234 | CZO07266.1 | 1689 | 8260 | 482 |
| 408 | I | 4 | CZO04199.1 | 1691 | 8262 | 636 | CZO04172.1 | 1692 | 8263 | 234 | CZO04137.1 | 1693 | 8264 | 482 |
| 409 | I | 4 | CZN90628.1 | 1695 | 8266 | 636 | CZN90659.1 | 1696 | 8267 | 234 | CZN90697.1 | 1697 | 8268 | 482 |
| 410 | I | 4 | CZP18446.1 | 1699 | 8270 | 636 | CZP18413.1 | 1700 | 8271 | 234 | CZP18376.1 | 1701 | 8272 | 482 |
| 411 | I | 4 | CZP26391.1 | 1703 | 8274 | 636 | CZP26289.1 | 1704 | 8275 | 234 | CZP26260.1 | 1705 | 8276 | 482 |
| 412 | I | 4 | CZP25516.1 | 1707 | 8278 | 636 | CZP25483.1 | 1708 | 8279 | 234 | CZP25450.1 | 1709 | 8280 | 482 |
| 413 | I | 4 | CZN32104.1 | 1711 | 8282 | 636 | CZN32073.1 | 1712 | 8283 | 234 | CZN32054.1 | 1713 | 8284 | 482 |
| 414 | I | 4 | CZO49179.1 | 1715 | 8286 | 636 | CZO49222.1 | 1716 | 8287 | 234 | CZO49269.1 | 1717 | 8288 | 482 |
| 415 | I | 4 | CZO32890.1 | 1719 | 8290 | 636 | CZO32855.1 | 1720 | 8291 | 234 | CZO32827.1 | 1721 | 8292 | 482 |
| 416 | I | 4 | CZO62310.1 | 1723 | 8294 | 636 | CZO62353.1 | 1724 | 8295 | 234 | CZO62389.1 | 1725 | 8296 | 482 |
| 417 | I | 4 | CZO58294.1 | 1727 | 8298 | 636 | CZO58318.1 | 1728 | 8299 | 234 | CZO58349.1 | 1729 | 8300 | 482 |
| 418 | I | 4 | CZO85873.1 | 1731 | 8302 | 636 | CZO85828.1 | 1732 | 8303 | 234 | CZO85797.1 | 1733 | 8304 | 482 |
| 419 | I | 4 | CZP51088.1 | 1735 | 8306 | 636 | CZP51125.1 | 1736 | 8307 | 234 | CZP51157.1 | 1737 | 8308 | 482 |
| 420 | I | 4 | CZO57150.1 | 1739 | 8310 | 636 | CZO57187.1 | 1740 | 8311 | 234 | CZO57213.1 | 1741 | 8312 | 482 |
| 421 | I | 4 | CZO45304.1 | 1743 | 8314 | 636 | CZO45268.1 | 1744 | 8315 | 234 | CZO45218.1 | 1745 | 8316 | 482 |
| 422 | I | 4 | CZO91199.1 | 1747 | 8318 | 636 | CZO91233.1 | 1748 | 8319 | 234 | CZO91266.1 | 1749 | 8320 | 482 |
| 423 | I | 4 | CZN53802.1 | 1751 | 8322 | 636 | CZN53843.1 | 1752 | 8323 | 234 | CZN53877.1 | 1753 | 8324 | 482 |
| 424 | I | 4 | CZN51375.1 | 1755 | 8326 | 636 | CZN51423.1 | 1756 | 8327 | 234 | CZN51467.1 | 1757 | 8328 | 482 |
| 425 | I | 4 | CZO76010.1 | 1759 | 8330 | 636 | CZO76045.1 | 1760 | 8331 | 234 | CZO76083.1 | 1761 | 8332 | 482 |
| 426 | I | 4 | CZR30116.1 | 1763 | 8334 | 636 | CZR30113.1 | 1764 | 8335 | 234 | CZR30109.1 | 1765 | 8336 | 482 |
| 427 | I | 4 | KTD18860.1 | 1767 | 8338 | 634 | KTD18861.1 | 1768 | 8339 | 234 | KTD18862.1 | 1769 | 8340 | 482 |
| 428 | I | 3 | EMU26880.1 | 1771 | 8342 | 686 | EMU26879.1 | 1772 | 8343 | 243 | EMU26878.1 | 1773 | 8344 | 456 |
| 429 | I | 3 | EMT95386.1 | 1774 | 8345 | 686 | EMT95385.1 | 1775 | 8346 | 243 | EMT95384.1 | 1776 | 8347 | 456 |
| 430 | I | 4 | EMT94539.1 | 1777 | 8348 | 686 | EMT94538.1 | 1778 | 8349 | 243 | EMT94537.1 | 1779 | 8350 | 456 |
| 431 | I | 3 | EMU11117.1 | 1781 | 8352 | 686 | EMU11116.1 | 1782 | 8353 | 243 | EMU11115.1 | 1783 | 8354 | 387 |
| 432 | I | 4 | EMU02182.1 | 1784 | 8355 | 686 | EMU02181.1 | 1785 | 8356 | 243 | EMU02180.1 | 1786 | 8357 | 456 |
| 433 | I | 4 | EXB30082.1 | 1788 | 8359 | 686 | EXB30083.1 | 1789 | 8360 | 243 | EXB30084.1 | 1790 | 8361 | 466 |
| 434 | I | 4 | EXB35593.1 | 1792 | 8363 | 686 | EXB35594.1 | 1793 | 8364 | 243 | EXB35595.1 | 1794 | 8365 | 466 |
| 435 | I | 4 | EXB05632.1 | 1796 | 8367 | 686 | EXB05631.1 | 1797 | 8368 | 243 | EXB05630.1 | 1798 | 8369 | 466 |
| 436 | I | 4 | EXB92756.1 | 1800 | 8371 | 686 | EXB92873.1 | 1801 | 8372 | 243 | EXB92651.1 | 1802 | 8373 | 466 |
| 437 | I | 4 | EXB73471.1 | 1804 | 8375 | 686 | EXB73472.1 | 1805 | 8376 | 243 | EXB73473.1 | 1806 | 8377 | 466 |
| 438 | I | 4 | EXE59934.1 | 1808 | 8379 | 686 | EXE59933.1 | 1809 | 8380 | 243 | EXE59932.1 | 1810 | 8381 | 471 |
| 439 | I | 4 | EXE71111.1 | 1812 | 8383 | 688 | EXE71113.1 | 1813 | 8384 | 200 | EXE71114.1 | 1814 | 8385 | 466 |
| 440 | I | 4 | KCX96450.1 | 1816 | 8387 | 686 | KCX96449.1 | 1817 | 8388 | 243 | KCX96448.1 | 1818 | 8389 | 466 |
| 441 | I | 4 | KHO17164.1 | 1820 | 8391 | 686 | KHO17163.1 | 1821 | 8392 | 243 | KHO17162.1 | 1822 | 8393 | 456 |
| 442 | I | 4 | KLT90624.1 | 1824 | 8395 | 686 | KLT90642.1 | 1825 | 8396 | 243 | KLT90662.1 | 1826 | 8397 | 456 |
| 443 | I | 4 | KRI43455.1 | 1828 | 8399 | 688 | KRI43456.1 | 1829 | 8400 | 243 | KRI43503.1 | 1830 | 8401 | 457 |
| 444 | I | 4 | KRJ35152.1 | 1832 | 8403 | 686 | KRJ35151.1 | 1833 | 8404 | 243 | KRJ35150.1 | 1834 | 8405 | 466 |
| 445 | I | 4 | AMN00863.1 | 1836 | 8407 | 686 | AMN00864.1 | 1837 | 8408 | 243 | AMN00865.1 | 1838 | 8409 | 466 |
| 446 | I | 4 | KDB58749.1 | 1840 | 8411 | 662 | KDB58628.1 | 1841 | 8412 | 234 | KDB58574.1 | 1842 | 8413 | 570 |
| 447 | I | 4 | KDD86366.1 | 1844 | 8415 | 669 | KDD86358.1 | 1845 | 8416 | 234 | KDD86345.1 | 1846 | 8417 | 570 |
| 448 | I | 4 | ACV76373.1 | 1848 | 8419 | 675 | ACV76374.1 | 1849 | 8420 | 273 | ACV76375.1 | 1850 | 8421 | 433 |
| 449 | I | 4 | AEI38596.1 | 1852 | 8423 | 675 | AEI38595.1 | 1853 | 8424 | 273 | AEI38594.1 | 1854 | 8425 | 433 |
| 450 | I | 4 | KTJ39354.1 | 1856 | 8427 | 729 | KTJ39355.1 | 1857 | 8428 | 246 | KTJ39356.1 | 1858 | 8429 | 559 |
| 451 | I | 4 | KUQ09076.1 | 1860 | 8431 | 851 | KUQ09077.1 | 1861 | 8432 | 245 | KUQ09078.1 | 1862 | 8433 | 597 |
| 452 | I | 4 | KYN64186.1 | 1864 | 8435 | 678 | KYN64185.1 | 1865 | 8436 | 287 | KYN64184.1 | 1866 | 8437 | 441 |
| 453 | I | 4 | AFP68831.1 | 1868 | 8439 | 729 | AFP68830.1 | 1869 | 8440 | 245 | AFP68829.1 | 1870 | 8441 | 70 |
| 454 | I | 4 | ESS59441.1 | 1872 | 8443 | 729 | ESS59449.1 | 1873 | 8444 | 208 | ESS59443.1 | 1874 | 8445 | 560 |
| 455 | I | 4 | EUL88641.1 | 1876 | 8447 | 711 | EUL88642.1 | 1877 | 8448 | 245 | EUL88643.1 | 1878 | 8449 | 560 |
| 456 | I | 4 | KDF77544.1 | 1880 | 8451 | 711 | KDF77543.1 | 1881 | 8452 | 245 | KDF77542.1 | 1882 | 8453 | 560 |
| 457 | I | 4 | AIX56040.1 | 1884 | 8455 | 729 | AIX56041.1 | 1885 | 8456 | 245 | AIX56042.1 | 1886 | 8457 | 504 |
| 458 | I | 4 | KJW77580.1 | 1888 | 8459 | 851 | KJW77579.1 | 1889 | 8460 | 245 | KJW77578.1 | 1890 | 8461 | 597 |
| 459 | I | 4 | KJX05616.1 | 1892 | 8463 | 851 | KJX05615.1 | 1893 | 8464 | 245 | KJX05614.1 | 1894 | 8465 | 597 |
| 460 | I | 3 | | | | | KPS87963.1 | 1896 | 8467 | 245 | KPS87962.1 | 1897 | 8468 | 560 |
| 461 | I | 3 | | | | | KRS24832.1 | 1899 | 8470 | 245 | KRS24833.1 | 1900 | 8471 | 560 |
| 462 | I | 4 | KUQ03195.1 | 1902 | 8473 | 729 | KUQ03194.1 | 1903 | 8474 | 245 | KUQ03193.1 | 1904 | 8475 | 560 |
| 463 | I | 4 | BAK13750.1 | 1906 | 8477 | 678 | BAK13749.1 | 1907 | 8478 | 287 | BAK13748.1 | 1908 | 8479 | 441 |
| 464 | I | 4 | CCF11168.1 | 1910 | 8481 | 678 | CCF11169.1 | 1911 | 8482 | 287 | CCF11170.1 | 1912 | 8483 | 356 |
| 465 | I | 4 | AFR04653.1 | 1914 | 8485 | 729 | AFR04654.1 | 1915 | 8486 | 246 | AFR04655.1 | 1916 | 8487 | 560 |
| 466 | I | 4 | KHS69362.1 | 1918 | 8489 | 729 | KHS69298.1 | 1919 | 8490 | 246 | KHS69299.1 | 1920 | 8491 | 560 |
| 467 | I | 4 | KHT02545.1 | 1922 | 8493 | 729 | KHT02546.1 | 1923 | 8494 | 246 | KHT02547.1 | 1924 | 8495 | 560 |
| 468 | I | 4 | KHT03993.1 | 1926 | 8497 | 729 | KHT03964.1 | 1927 | 8498 | 246 | KHT03965.1 | 1928 | 8499 | 560 |
| 469 | I | 4 | ABV17222.1 | 1930 | 8501 | 739 | ABV17786.1 | 1931 | 8502 | 246 | ABV16709.1 | 1932 | 8503 | 567 |
| 470 | I | 4 | EIP59422.1 | 1934 | 8505 | 729 | EIP59419.1 | 1935 | 8506 | 246 | EIP59433.1 | 1936 | 8507 | 483 |
| 471 | I | 4 | EIN79902.1 | 1938 | 8509 | 729 | EIN79901.1 | 1939 | 8510 | 246 | EIN79900.1 | 1940 | 8511 | 504 |
| 472 | I | 4 | EKK37352.1 | 1942 | 8513 | 729 | EKK37353.1 | 1943 | 8514 | 246 | EKK37354.1 | 1944 | 8515 | 504 |
| 473 | I | 4 | EKW33219.1 | 1946 | 8517 | 729 | EKW33218.1 | 1947 | 8518 | 246 | EKW33217.1 | 1948 | 8519 | 402 |
| 474 | I | 4 | ELW24564.1 | 1950 | 8521 | 729 | ELW24563.1 | 1951 | 8522 | 246 | ELW24562.1 | 1952 | 8523 | 483 |
| 475 | I | 4 | ELV55444.1 | 1954 | 8525 | 704 | ELV55443.1 | 1955 | 8526 | 246 | ELV55442.1 | 1956 | 8527 | 391 |
| 476 | I | 4 | ELV58670.1 | 1958 | 8529 | 729 | ELV58672.1 | 1959 | 8530 | 246 | ELV58675.1 | 1960 | 8531 | 483 |
| 477 | I | 4 | ELV27737.1 | 1962 | 8533 | 729 | ELV27736.1 | 1963 | 8534 | 246 | ELV27735.1 | 1964 | 8535 | 504 |
| 478 | I | 4 | ELE34850.1 | 1966 | 8537 | 729 | ELE34849.1 | 1967 | 8538 | 246 | ELE34848.1 | 1968 | 8539 | 560 |
| 479 | I | 4 | ELF60007.1 | 1970 | 8541 | 729 | ELF60008.1 | 1971 | 8542 | 246 | ELF60009.1 | 1972 | 8543 | 560 |
| 480 | I | 4 | ENC42752.1 | 1974 | 8545 | 729 | ENC42751.1 | 1975 | 8546 | 246 | ENC42750.1 | 1976 | 8547 | 504 |
| 481 | I | 4 | ENC49345.1 | 1978 | 8549 | 729 | ENC49344.1 | 1979 | 8550 | 246 | ENC49343.1 | 1980 | 8551 | 504 |
| 482 | I | 4 | ENC65372.1 | 1982 | 8553 | 665 | ENC65371.1 | 1983 | 8554 | 246 | ENC65370.1 | 1984 | 8555 | 504 |
| 483 | I | 4 | ENC60227.1 | 1986 | 8557 | 729 | ENC60226.1 | 1987 | 8558 | 246 | ENC60225.1 | 1988 | 8559 | 504 |
| 484 | I | 4 | ENC64694.1 | 1990 | 8561 | 729 | ENC64693.1 | 1991 | 8562 | 246 | ENC64692.1 | 1992 | 8563 | 504 |
| 485 | I | 4 | ENC77391.1 | 1994 | 8565 | 729 | ENC77390.1 | 1995 | 8566 | 246 | ENC77389.1 | 1996 | 8567 | 504 |
| 486 | I | 4 | ENC83691.1 | 1998 | 8569 | 729 | ENC83703.1 | 1999 | 8570 | 246 | ENC83675.1 | 2000 | 8571 | 504 |
| 487 | I | 4 | ENC86715.1 | 2002 | 8573 | 729 | ENC86714.1 | 2003 | 8574 | 246 | ENC86713.1 | 2004 | 8575 | 504 |
| 488 | I | 4 | ENE16651.1 | 2006 | 8577 | 729 | ENE16656.1 | 2007 | 8578 | 246 | ENE16652.1 | 2008 | 8579 | 560 |
| 489 | I | 4 | ENC77075.1 | 2010 | 8581 | 729 | ENC77074.1 | 2011 | 8582 | 246 | ENC77073.1 | 2012 | 8583 | 504 |
| 490 | I | 4 | EOQ56570.1 | 2014 | 8585 | 851 | EOQ56569.1 | 2015 | 8586 | 244 | EOQ56568.1 | 2016 | 8587 | 595 |
| 491 | I | 4 | ERB06047.1 | 2018 | 8589 | 729 | ERB06046.1 | 2019 | 8590 | 246 | ERB06045.1 | 2020 | 8591 | 560 |
| 492 | I | 4 | EQV94532.1 | 2022 | 8593 | 851 | EQV94533.1 | 2023 | 8594 | 244 | EQV94534.1 | 2024 | 8595 | 595 |
| 493 | I | 4 | EQV96721.1 | 2026 | 8597 | 729 | EQV96722.1 | 2027 | 8598 | 246 | EQV96723.1 | 2028 | 8599 | 560 |
| 494 | I | 4 | ERB23472.1 | 2030 | 8601 | 729 | ERB23473.1 | 2031 | 8602 | 246 | ERB23474.1 | 2032 | 8603 | 560 |
| 495 | I | 4 | ERA25533.1 | 2034 | 8605 | 729 | ERA25534.1 | 2035 | 8606 | 246 | ERA25535.1 | 2036 | 8607 | 560 |
| 496 | I | 4 | ERB97875.1 | 2038 | 8609 | 729 | ERB97874.1 | 2039 | 8610 | 246 | ERB97873.1 | 2040 | 8611 | 483 |
| 497 | I | 4 | ERB87466.1 | 2042 | 8613 | 729 | ERB87465.1 | 2043 | 8614 | 246 | ERB87464.1 | 2044 | 8615 | 483 |
| 498 | I | 4 | ERB73282.1 | 2046 | 8617 | 729 | ERB73281.1 | 2047 | 8618 | 246 | ERB73280.1 | 2048 | 8619 | 483 |
| 499 | I | 4 | ERB84327.1 | 2050 | 8621 | 729 | ERB84433.1 | 2051 | 8622 | 246 | ERB84435.1 | 2052 | 8623 | 483 |
| 500 | I | 4 | ERD03133.1 | 2054 | 8625 | 729 | ERD03126.1 | 2055 | 8626 | 246 | ERD03124.1 | 2056 | 8627 | 504 |
| 501 | I | 3 | | | | | ERD02933.1 | 2058 | 8629 | 175 | ERD02932.1 | 2059 | 8630 | 307 |
| 502 | I | 4 | ERD21118.1 | 2061 | 8632 | 729 | ERD21117.1 | 2062 | 8633 | 246 | ERD21116.1 | 2063 | 8634 | 483 |
| 503 | I | 4 | ERD19184.1 | 2065 | 8636 | 729 | ERD19183.1 | 2066 | 8637 | 246 | ERD19182.1 | 2067 | 8638 | 483 |
| 504 | I | 4 | ERD72949.1 | 2069 | 8640 | 729 | ERD72951.1 | 2070 | 8641 | 246 | ERD72947.1 | 2071 | 8642 | 483 |
| 505 | I | 4 | ERD66562.1 | 2073 | 8644 | 729 | ERD66561.1 | 2074 | 8645 | 246 | ERD66560.1 | 2075 | 8646 | 504 |
| 506 | I | 4 | ERD75978.1 | 2077 | 8648 | 729 | ERD75977.1 | 2078 | 8649 | 246 | ERD75976.1 | 2079 | 8650 | 483 |
| 507 | I | 4 | ERD83534.1 | 2081 | 8652 | 729 | ERD83533.1 | 2082 | 8653 | 246 | ERD83532.1 | 2083 | 8654 | 483 |
| 508 | I | 4 | ERD92971.1 | 2085 | 8656 | 729 | ERD92973.1 | 2086 | 8657 | 246 | ERD92974.1 | 2087 | 8658 | 483 |
| 509 | I | 4 | ERD99050.1 | 2089 | 8660 | 729 | ERD99051.1 | 2090 | 8661 | 246 | ERD99052.1 | 2091 | 8662 | 483 |
| 510 | I | 4 | ERD98127.1 | 2093 | 8664 | 729 | ERD98126.1 | 2094 | 8665 | 246 | ERD98125.1 | 2095 | 8666 | 504 |
| 511 | I | 4 | AHM42039.1 | 2097 | 8668 | 729 | AHM42040.1 | 2098 | 8669 | 246 | AHM42041.1 | 2099 | 8670 | 560 |
| 512 | I | 4 | AHM46674.1 | 2101 | 8672 | 729 | AHM46675.1 | 2102 | 8673 | 246 | AHM46676.1 | 2103 | 8674 | 560 |
| 513 | I | 4 | AHM51229.1 | 2105 | 8676 | 729 | AHM51230.1 | 2106 | 8677 | 246 | AHM51231.1 | 2107 | 8678 | 560 |
| 514 | I | 4 | EYD87612.1 | 2109 | 8680 | 698 | EYD87621.1 | 2110 | 8681 | 245 | EYD87618.1 | 2111 | 8682 | 595 |
| 515 | I | 4 | EYW22456.1 | 2113 | 8684 | 729 | EYW22455.1 | 2114 | 8685 | 246 | EYW22454.1 | 2115 | 8686 | 560 |
| 516 | I | 4 | EYW31324.1 | 2117 | 8688 | 729 | EYW31323.1 | 2118 | 8689 | 246 | EYW31322.1 | 2119 | 8690 | 560 |
| 517 | I | 4 | EYV86555.1 | 2121 | 8692 | 729 | EYV86554.1 | 2122 | 8693 | 246 | EYV86553.1 | 2123 | 8694 | 560 |
| 518 | I | 4 | EYW71956.1 | 2125 | 8696 | 729 | EYW71957.1 | 2126 | 8697 | 246 | EYW71958.1 | 2127 | 8698 | 560 |
| 519 | I | 4 | EYW62757.1 | 2129 | 8700 | 729 | EYW62758.1 | 2130 | 8701 | 246 | EYW62759.1 | 2131 | 8702 | 560 |
| 520 | I | 4 | EYW60244.1 | 2133 | 8704 | 729 | EYW60243.1 | 2134 | 8705 | 246 | EYW60242.1 | 2135 | 8706 | 560 |
| 521 | I | 4 | EYW56544.1 | 2137 | 8708 | 729 | EYW56543.1 | 2138 | 8709 | 246 | EYW56542.1 | 2139 | 8710 | 560 |
| 522 | I | 4 | EYW47186.1 | 2141 | 8712 | 729 | EYW47185.1 | 2142 | 8713 | 246 | EYW47184.1 | 2143 | 8714 | 560 |
| 523 | I | 4 | EYW47506.1 | 2145 | 8716 | 729 | EYW47505.1 | 2146 | 8717 | 246 | EYW47504.1 | 2147 | 8718 | 560 |
| 524 | I | 4 | EYW43756.1 | 2149 | 8720 | 729 | EYW43757.1 | 2150 | 8721 | 246 | EYW43758.1 | 2151 | 8722 | 560 |
| 525 | I | 4 | EYW40414.1 | 2153 | 8724 | 729 | EYW40415.1 | 2154 | 8725 | 246 | EYW40416.1 | 2155 | 8726 | 560 |
| 526 | I | 4 | EYW30112.1 | 2157 | 8728 | 729 | EYW30111.1 | 2158 | 8729 | 246 | EYW30110.1 | 2159 | 8730 | 560 |
| 527 | I | 4 | EYY79851.1 | 2161 | 8732 | 729 | EYY79852.1 | 2162 | 8733 | 246 | EYY79853.1 | 2163 | 8734 | 560 |
| 528 | I | 4 | EZB10673.1 | 2165 | 8736 | 729 | EZB10672.1 | 2166 | 8737 | 246 | EZB10671.1 | 2167 | 8738 | 560 |
| 529 | I | 4 | EZE32940.1 | 2169 | 8740 | 729 | EZE32941.1 | 2170 | 8741 | 246 | EZE32942.1 | 2171 | 8742 | 560 |
| 530 | I | 4 | KDZ82638.1 | 2173 | 8744 | 729 | KDZ82652.1 | 2174 | 8745 | 246 | KDZ82648.1 | 2175 | 8746 | 560 |
| 531 | I | 4 | KHG75769.1 | 2177 | 8748 | 729 | KHG75768.1 | 2178 | 8749 | 246 | KHG75767.1 | 2179 | 8750 | 560 |
| 532 | I | 4 | KHG79503.1 | 2181 | 8752 | 729 | KHG79502.1 | 2182 | 8753 | 246 | KHG79501.1 | 2183 | 8754 | 560 |
| 533 | I | 4 | KOZ37432.1 | 2185 | 8756 | 729 | KOZ37431.1 | 2186 | 8757 | 246 | KOZ37430.1 | 2187 | 8758 | 560 |
| 534 | I | 4 | KOZ53466.1 | 2189 | 8760 | 729 | KOZ53465.1 | 2190 | 8761 | 246 | KOZ53464.1 | 2191 | 8762 | 560 |
| 535 | I | 4 | KOZ92709.1 | 2193 | 8764 | 729 | KOZ92708.1 | 2194 | 8765 | 246 | KOZ92707.1 | 2195 | 8766 | 560 |
| 536 | I | 4 | CTV73490.1 | 2197 | 8768 | 729 | CTV73519.1 | 2198 | 8769 | 246 | CTV73555.1 | 2199 | 8770 | 560 |
| 537 | I | 4 | CTY75965.1 | 2201 | 8772 | 729 | CTY75938.1 | 2202 | 8773 | 246 | CTY75914.1 | 2203 | 8774 | 560 |
| 538 | I | 4 | KPH47568.1 | 2205 | 8776 | 729 | KPH47567.1 | 2206 | 8777 | 246 | KPH47566.1 | 2207 | 8778 | 560 |
| 539 | I | 4 | KPH29388.1 | 2209 | 8780 | 729 | KPH29389.1 | 2210 | 8781 | 246 | KPH29390.1 | 2211 | 8782 | 560 |
| 540 | I | 4 | KPO40054.1 | 2213 | 8784 | 729 | KPO40055.1 | 2214 | 8785 | 246 | KPO40056.1 | 2215 | 8786 | 560 |
| 541 | I | 4 | KPP40484.1 | 2217 | 8788 | 729 | KPP40485.1 | 2218 | 8789 | 246 | KPP40486.1 | 2219 | 8790 | 560 |
| 542 | I | 4 | KQI75364.1 | 2221 | 8792 | 729 | KQI75363.1 | 2222 | 8793 | 246 | KQI75362.1 | 2223 | 8794 | 560 |
| 543 | I | 4 | KST33199.1 | 2225 | 8796 | 729 | KST33200.1 | 2226 | 8797 | 246 | KST33201.1 | 2227 | 8798 | 560 |
| 544 | I | 4 | KUV50206.1 | 2229 | 8800 | 729 | KUV50205.1 | 2230 | 8801 | 246 | KUV50204.1 | 2231 | 8802 | 560 |
| 545 | I | 4 | KUT58773.1 | 2233 | 8804 | 729 | KUT58774.1 | 2234 | 8805 | 246 | KUT58775.1 | 2235 | 8806 | 560 |
| 546 | I | 4 | KXL70397.1 | 2237 | 8808 | 729 | KXL70398.1 | 2238 | 8809 | 246 | KXL70399.1 | 2239 | 8810 | 560 |
| 547 | I | 4 | KXM39825.1 | 2241 | 8812 | 729 | KXM39826.1 | 2242 | 8813 | 246 | KXM39827.1 | 2243 | 8814 | 560 |
| 548 | I | 4 | KXM53390.1 | 2245 | 8816 | 729 | KXM53391.1 | 2246 | 8817 | 246 | KXM53392.1 | 2247 | 8818 | 560 |
| 549 | I | 4 | KXN00948.1 | 2249 | 8820 | 729 | KXN00949.1 | 2250 | 8821 | 246 | KXN00950.1 | 2251 | 8822 | 560 |
| 550 | I | 4 | KXQ06776.1 | 2253 | 8824 | 729 | KXQ06777.1 | 2254 | 8825 | 246 | KXQ06778.1 | 2255 | 8826 | 560 |
| 551 | I | 4 | KXQ54353.1 | 2257 | 8828 | 729 | KXQ54354.1 | 2258 | 8829 | 246 | KXQ54355.1 | 2259 | 8830 | 560 |
| 552 | I | 4 | KXR15706.1 | 2261 | 8832 | 729 | KXR15705.1 | 2262 | 8833 | 246 | KXR15704.1 | 2263 | 8834 | 560 |
| 553 | I | 4 | KXQ76400.1 | 2265 | 8836 | 729 | KXQ76401.1 | 2266 | 8837 | 246 | KXQ76402.1 | 2267 | 8838 | 560 |
| 554 | I | 4 | KXQ99883.1 | 2269 | 8840 | 729 | KXQ99884.1 | 2270 | 8841 | 246 | KXQ99885.1 | 2271 | 8842 | 560 |
| 555 | I | 4 | KXR88728.1 | 2273 | 8844 | 729 | KXR88729.1 | 2274 | 8845 | 246 | KXR88730.1 | 2275 | 8846 | 560 |
| 556 | I | 4 | KXR78157.1 | 2277 | 8848 | 729 | KXR78156.1 | 2278 | 8849 | 246 | KXR78155.1 | 2279 | 8850 | 560 |
| 557 | I | 4 | EGC96566.1 | 2281 | 8852 | 716 | EGC96565.1 | 2282 | 8853 | 246 | EGC96564.1 | 2283 | 8854 | 560 |
| 558 | I | 4 | GAB54113.1 | 2285 | 8856 | 729 | GAB54114.1 | 2286 | 8857 | 246 | GAB54115.1 | 2287 | 8858 | 560 |
| 559 | I | 4 | EHM44110.1 | 2289 | 8860 | 729 | EHM44109.1 | 2290 | 8861 | 246 | EHM44108.1 | 2291 | 8862 | 560 |
| 560 | I | 4 | EKB79928.1 | 2293 | 8864 | 729 | EKB79929.1 | 2294 | 8865 | 247 | EKB79930.1 | 2295 | 8866 | 560 |
| 561 | I | 4 | EKB69927.1 | 2297 | 8868 | 729 | EKB69926.1 | 2298 | 8869 | 246 | EKB69925.1 | 2299 | 8870 | 560 |
| 562 | I | 4 | EMH92817.1 | 2301 | 8872 | 711 | EMH92791.1 | 2302 | 8873 | 246 | EMH92827.1 | 2303 | 8874 | 483 |
| 563 | I | 4 | EMH90435.1 | 2305 | 8876 | 729 | EMH90438.1 | 2306 | 8877 | 246 | EMH90437.1 | 2307 | 8878 | 560 |
| 564 | I | 4 | EPA89068.1 | 2309 | 8880 | 701 | EPA89053.1 | 2310 | 8881 | 247 | EPA89066.1 | 2311 | 8882 | 560 |
| 565 | I | 4 | EPO98337.1 | 2313 | 8884 | 701 | EPO98352.1 | 2314 | 8885 | 246 | EPO98313.1 | 2315 | 8886 | 560 |
| 566 | I | 4 | ERN60891.1 | 2317 | 8888 | 711 | ERN60892.1 | 2318 | 8889 | 247 | ERN60893.1 | 2319 | 8890 | 560 |
| 567 | I | 4 | ESM66670.1 | 2321 | 8892 | 729 | ESM66669.1 | 2322 | 8893 | 247 | ESM66668.1 | 2323 | 8894 | 560 |
| 568 | I | 3 | CDL16831.1 | 2325 | 8896 | 497 | CDL16832.1 | 2326 | 8897 | 247 | CDL16833.1 | 2327 | 8898 | 560 |
| 569 | I | 4 | EWE84467.1 | 2328 | 8899 | 729 | EWE84468.1 | 2329 | 8900 | 246 | EWE84469.1 | 2330 | 8901 | 560 |
| 570 | I | 4 | EWE89858.1 | 2332 | 8903 | 729 | EWE89859.1 | 2333 | 8904 | 247 | EWE89860.1 | 2334 | 8905 | 560 |
| 571 | I | 4 | EZQ78636.1 | 2336 | 8907 | 729 | EZQ78637.1 | 2337 | 8908 | 247 | EZQ78638.1 | 2338 | 8909 | 560 |
| 572 | I | 4 | EZR23958.1 | 2340 | 8911 | 729 | EZR23959.1 | 2341 | 8912 | 247 | EZR23960.1 | 2342 | 8913 | 560 |
| 573 | I | 4 | KDK71110.1 | 2344 | 8915 | 729 | KDK71111.1 | 2345 | 8916 | 247 | KDK71112.1 | 2346 | 8917 | 560 |
| 574 | I | 4 | KDL50055.1 | 2348 | 8919 | 729 | KDL50056.1 | 2349 | 8920 | 247 | KDL50057.1 | 2350 | 8921 | 560 |
| 575 | I | 4 | KEF24231.1 | 2352 | 8923 | 729 | KEF24232.1 | 2353 | 8924 | 247 | KEF24233.1 | 2354 | 8925 | 560 |
| 576 | I | 4 | AIG86121.1 | 2356 | 8927 | 711 | AIG86120.1 | 2357 | 8928 | 247 | AIG86119.1 | 2358 | 8929 | 521 |
| 577 | I | 4 | AIT02041.1 | 2360 | 8931 | 729 | AIT02042.1 | 2361 | 8932 | 247 | AIT02043.1 | 2362 | 8933 | 560 |
| 578 | I | 4 | KGK55644.1 | 2364 | 8935 | 729 | KGK55905.1 | 2365 | 8936 | 246 | KGK55643.1 | 2366 | 8937 | 560 |
| 579 | I | 4 | KHF56285.1 | 2368 | 8939 | 729 | KHF56286.1 | 2369 | 8940 | 247 | KHF56287.1 | 2370 | 8941 | 560 |
| 580 | I | 4 | CEO84459.1 | 2372 | 8943 | 729 | CEO84460.1 | 2373 | 8944 | 247 | CEO84461.1 | 2374 | 8945 | 560 |
| 581 | I | 4 | KLZ85284.1 | 2376 | 8947 | 729 | KLZ85285.1 | 2377 | 8948 | 247 | KLZ85286.1 | 2378 | 8949 | 560 |
| 582 | I | 4 | KME72626.1 | 2380 | 8951 | 729 | KME72627.1 | 2381 | 8952 | 246 | KME72628.1 | 2382 | 8953 | 560 |
| 583 | I | 4 | KMG80267.1 | 2384 | 8955 | 729 | KMG80268.1 | 2385 | 8956 | 247 | KMG80269.1 | 2386 | 8957 | 560 |
| 584 | I | 4 | KMH33138.1 | 2388 | 8959 | 729 | KMH33139.1 | 2389 | 8960 | 247 | KMH33140.1 | 2390 | 8961 | 560 |
| 585 | I | 4 | KMH45006.1 | 2392 | 8963 | 729 | KMH45007.1 | 2393 | 8964 | 247 | KMH45008.1 | 2394 | 8965 | 560 |
| 586 | I | 4 | KMH61874.1 | 2396 | 8967 | 729 | KMH61875.1 | 2397 | 8968 | 247 | KMH61876.1 | 2398 | 8969 | 560 |
| 587 | I | 4 | KMH74805.1 | 2400 | 8971 | 729 | KMH74806.1 | 2401 | 8972 | 247 | KMH74807.1 | 2402 | 8973 | 560 |
| 588 | I | 4 | KMH92291.1 | 2404 | 8975 | 729 | KMH92292.1 | 2405 | 8976 | 247 | KMH92293.1 | 2406 | 8977 | 560 |
| 589 | I | 4 | KMH82199.1 | 2408 | 8979 | 729 | KMH82198.1 | 2409 | 8980 | 246 | KMH82197.1 | 2410 | 8981 | 560 |
| 590 | I | 4 | KMI35044.1 | 2412 | 8983 | 729 | KMI35043.1 | 2413 | 8984 | 246 | KMI35042.1 | 2414 | 8985 | 560 |
| 591 | I | 4 | KMJ00751.1 | 2416 | 8987 | 729 | KMJ00752.1 | 2417 | 8988 | 247 | KMJ00753.1 | 2418 | 8989 | 560 |
| 592 | I | 4 | KMX47009.1 | 2420 | 8991 | 729 | KMX47010.1 | 2421 | 8992 | 247 | KMX47011.1 | 2422 | 8993 | 560 |
| 593 | I | 4 | ALH85688.1 | 2424 | 8995 | 729 | ALH88375.1 | 2425 | 8996 | 246 | ALH85687.1 | 2426 | 8997 | 560 |
| 594 | I | 4 | KPR26030.1 | 2428 | 8999 | 729 | KPR26088.1 | 2429 | 9000 | 246 | KPR26029.1 | 2430 | 9001 | 560 |
| 595 | I | 4 | KSW78890.1 | 2432 | 9003 | 851 | KSW78889.1 | 2433 | 9004 | 245 | KSW78888.1 | 2434 | 9005 | 627 |
| 596 | I | 4 | ALP77147.1 | 2436 | 9007 | 729 | ALP81045.1 | 2437 | 9008 | 246 | ALP77148.1 | 2438 | 9009 | 560 |
| 597 | I | 4 | KSZ25786.1 | 2440 | 9011 | 729 | KSZ25847.1 | 2441 | 9012 | 246 | KSZ25785.1 | 2442 | 9013 | 560 |
| 598 | I | 4 | AMA16471.1 | 2444 | 9015 | 729 | AMA19153.1 | 2445 | 9016 | 246 | AMA16470.1 | 2446 | 9017 | 560 |
| 599 | I | 4 | KXO21002.1 | 2448 | 9019 | 729 | KXO21035.1 | 2449 | 9020 | 246 | KXO21003.1 | 2450 | 9021 | 560 |
| 600 | I | 4 | KYL54018.1 | 2452 | 9023 | 729 | KYL54030.1 | 2453 | 9024 | 246 | KYL54017.1 | 2454 | 9025 | 560 |
| 601 | I | 4 | KYM08970.1 | 2456 | 9027 | 729 | KYM08978.1 | 2457 | 9028 | 246 | KYM08971.1 | 2458 | 9029 | 560 |
| 602 | I | 4 | KYL42995.1 | 2460 | 9031 | 729 | KYL43003.1 | 2461 | 9032 | 246 | KYL42996.1 | 2462 | 9033 | 560 |
| 603 | I | 4 | KYL42676.1 | 2464 | 9035 | 729 | KYL42684.1 | 2465 | 9036 | 246 | KYL42677.1 | 2466 | 9037 | 560 |
| 604 | I | 4 | KYL71102.1 | 2468 | 9039 | 729 | KYL71114.1 | 2469 | 9040 | 246 | KYL71101.1 | 2470 | 9041 | 560 |
| 605 | I | 4 | KYL53998.1 | 2472 | 9043 | 729 | KYL54010.1 | 2473 | 9044 | 246 | KYL53997.1 | 2474 | 9045 | 560 |
| 606 | I | 4 | KYM33518.1 | 2476 | 9047 | 729 | KYM33585.1 | 2477 | 9048 | 246 | KYM33517.1 | 2478 | 9049 | 560 |
| 607 | I | 4 | KYL73344.1 | 2480 | 9051 | 729 | KYL73352.1 | 2481 | 9052 | 246 | KYL73345.1 | 2482 | 9053 | 560 |
| 608 | I | 4 | KYL53874.1 | 2484 | 9055 | 729 | KYL53882.1 | 2485 | 9056 | 246 | KYL53875.1 | 2486 | 9057 | 560 |
| 609 | I | 4 | KYM21786.1 | 2488 | 9059 | 729 | KYM21794.1 | 2489 | 9060 | 246 | KYM21787.1 | 2490 | 9061 | 560 |
| 610 | I | 4 | KYM07148.1 | 2492 | 9063 | 729 | KYM07160.1 | 2493 | 9064 | 246 | KYM07147.1 | 2494 | 9065 | 560 |
| 611 | I | 4 | KYM09278.1 | 2496 | 9067 | 729 | KYM09290.1 | 2497 | 9068 | 246 | KYM09277.1 | 2498 | 9069 | 560 |
| 612 | I | 4 | KYL81720.1 | 2500 | 9071 | 729 | KYL81728.1 | 2501 | 9072 | 246 | KYL81721.1 | 2502 | 9073 | 560 |
| 613 | I | 4 | KYL90348.1 | 2504 | 9075 | 729 | KYL90356.1 | 2505 | 9076 | 246 | KYL90349.1 | 2506 | 9077 | 560 |
| 614 | I | 4 | KYM24956.1 | 2508 | 9079 | 729 | KYM24969.1 | 2509 | 9080 | 246 | KYM24955.1 | 2510 | 9081 | 560 |
| 615 | I | 4 | CQJ58381.1 | 2512 | 9083 | 678 | CQJ58386.1 | 2513 | 9084 | 287 | CQJ58391.1 | 2514 | 9085 | 442 |
| 616 | I | 4 | CFV22988.1 | 2516 | 9087 | 678 | CFV22985.1 | 2517 | 9088 | 287 | CFV22982.1 | 2518 | 9089 | 442 |
| 617 | I | 4 | CNI05577.1 | 2520 | 9091 | 678 | CNI05611.1 | 2521 | 9092 | 287 | CNI05642.1 | 2522 | 9093 | 442 |
| 618 | I | 4 | AHV33806.1 | 2524 | 9095 | 686 | AHV33807.1 | 2525 | 9096 | 255 | AHV33808.1 | 2526 | 9097 | 686 |
| 619 | I | 4 | KOG92701.1 | 2528 | 9099 | 686 | KOG92700.1 | 2529 | 9100 | 255 | KOG92699.1 | 2530 | 9101 | 686 |
| 620 | I | 4 | KRW58412.1 | 2532 | 9103 | 682 | KRW58411.1 | 2533 | 9104 | 236 | KRW58410.1 | 2534 | 9105 | 567 |
| 621 | I | 4 | AAF94913.1 | 2536 | 9107 | 706 | AAF94912.1 | 2537 | 9108 | 244 | AAF94911.1 | 2538 | 9109 | 483 |
| 622 | I | 4 | ABQ21745.1 | 2540 | 9111 | 706 | ABQ19942.1 | 2541 | 9112 | 244 | ABQ20511.1 | 2542 | 9113 | 483 |
| 623 | I | 4 | ACP06009.1 | 2544 | 9115 | 706 | ACP06008.1 | 2545 | 9116 | 244 | ACP06007.1 | 2546 | 9117 | 483 |
| 624 | I | 4 | ACP09874.1 | 2548 | 9119 | 706 | ACP09873.1 | 2549 | 9120 | 244 | ACP09872.1 | 2550 | 9121 | 483 |
| 625 | I | 3 | ACQ60772.1 | 2552 | 9123 | 706 | ACQ60773.1 | 2553 | 9124 | 244 | ACQ60774.1 | 2554 | 9125 | 483 |
| 626 | I | 4 | EFH78549.1 | 2555 | 9126 | 706 | EFH78550.1 | 2556 | 9127 | 244 | EFH78551.1 | 2557 | 9128 | 483 |
| 627 | I | 3 | | | | | EAZ72428.1 | 2559 | 9130 | 244 | EAZ72422.1 | 2560 | 9131 | 483 |
| 628 | I | 4 | EAZ78581.1 | 2562 | 9133 | 706 | EAZ78546.1 | 2563 | 9134 | 244 | EAZ78565.1 | 2564 | 9135 | 483 |
| 629 | I | 4 | AET26859.1 | 2566 | 9137 | 706 | AET26858.1 | 2567 | 9138 | 244 | AET26857.1 | 2568 | 9139 | 483 |
| 630 | I | 4 | KNH51113.1 | 2570 | 9141 | 706 | KNH51114.1 | 2571 | 9142 | 244 | KNH51115.1 | 2572 | 9143 | 483 |
| 631 | I | 4 | KNA61358.1 | 2574 | 9145 | 706 | KNA61359.1 | 2575 | 9146 | 244 | KNA61360.1 | 2576 | 9147 | 483 |
| 632 | I | 4 | EEO08431.1 | 2578 | 9149 | 706 | EEO08430.1 | 2579 | 9150 | 244 | EEO08429.1 | 2580 | 9151 | 483 |
| 633 | I | 4 | EEO16534.1 | 2582 | 9153 | 706 | EEO16533.1 | 2583 | 9154 | 244 | EEO16532.1 | 2584 | 9155 | 483 |
| 634 | I | 4 | EEO20559.1 | 2586 | 9157 | 706 | EEO20560.1 | 2587 | 9158 | 244 | EEO20561.1 | 2588 | 9159 | 483 |
| 635 | I | 4 | EET92687.1 | 2590 | 9161 | 706 | EET92688.1 | 2591 | 9162 | 244 | EET92689.1 | 2592 | 9163 | 483 |
| 636 | I | 4 | EEY40708.1 | 2594 | 9165 | 706 | EEY40707.1 | 2595 | 9166 | 244 | EEY40706.1 | 2596 | 9167 | 483 |
| 637 | I | 4 | EEY47283.1 | 2598 | 9169 | 687 | EEY47282.1 | 2599 | 9170 | 244 | EEY47281.1 | 2600 | 9171 | 483 |
| 638 | I | 4 | EGQ97277.1 | 2602 | 9173 | 687 | EGQ97276.1 | 2603 | 9174 | 244 | EGQ97275.1 | 2604 | 9175 | 483 |
| 639 | I | 4 | EGQ98251.1 | 2606 | 9177 | 706 | EGQ98250.1 | 2607 | 9178 | 244 | EGQ98249.1 | 2608 | 9179 | 483 |
| 640 | I | 4 | EGS48435.1 | 2610 | 9181 | 706 | EGS48434.1 | 2611 | 9182 | 244 | EGS48433.1 | 2612 | 9183 | 483 |
| 641 | I | 4 | EGS47646.1 | 2614 | 9185 | 706 | EGS47645.1 | 2615 | 9186 | 244 | EGS47644.1 | 2616 | 9187 | 483 |
| 642 | I | 4 | EGS47807.1 | 2618 | 9189 | 706 | EGS47806.1 | 2619 | 9190 | 244 | EGS47805.1 | 2620 | 9191 | 483 |
| 643 | I | 4 | EGS62508.1 | 2622 | 9193 | 687 | EGS62507.1 | 2623 | 9194 | 244 | EGS62506.1 | 2624 | 9195 | 483 |
| 644 | I | 4 | EGS70775.1 | 2626 | 9197 | 706 | EGS70774.1 | 2627 | 9198 | 244 | EGS70773.1 | 2628 | 9199 | 483 |
| 645 | I | 4 | EHH71591.1 | 2630 | 9201 | 706 | EHH71590.1 | 2631 | 9202 | 244 | EHH71589.1 | 2632 | 9203 | 483 |
| 646 | I | 4 | EHH83258.1 | 2634 | 9205 | 706 | EHH83257.1 | 2635 | 9206 | 244 | EHH83256.1 | 2636 | 9207 | 483 |
| 647 | I | 4 | EHH87250.1 | 2638 | 9209 | 706 | EHH87249.1 | 2639 | 9210 | 244 | EHH87248.1 | 2640 | 9211 | 483 |
| 648 | I | 4 | EHH97392.1 | 2642 | 9213 | 706 | EHH97391.1 | 2643 | 9214 | 244 | EHH97390.1 | 2644 | 9215 | 483 |
| 649 | I | 4 | EHI04662.1 | 2646 | 9217 | 706 | EHI05345.1 | 2647 | 9218 | 218 | EHI05392.1 | 2648 | 9219 | 483 |
| 650 | I | 4 | EHI04020.1 | 2650 | 9221 | 706 | EHI04019.1 | 2651 | 9222 | 244 | EHI04018.1 | 2652 | 9223 | 214 |
| 651 | I | 4 | EHH99557.1 | 2654 | 9225 | 706 | EHH99556.1 | 2655 | 9226 | 244 | EHH99555.1 | 2656 | 9227 | 472 |
| 652 | I | 4 | EHH93201.1 | 2658 | 9229 | 706 | EHH93200.1 | 2659 | 9230 | 244 | EHH93199.1 | 2660 | 9231 | 483 |
| 653 | I | 4 | EHH82145.1 | 2662 | 9233 | 706 | EHH82144.1 | 2663 | 9234 | 244 | EHH82143.1 | 2664 | 9235 | 483 |
| 654 | I | 4 | EHH72367.1 | 2666 | 9237 | 706 | EHH72366.1 | 2667 | 9238 | 244 | EHH72365.1 | 2668 | 9239 | 483 |
| 655 | I | 4 | EHH76760.1 | 2670 | 9241 | 706 | EHH76759.1 | 2671 | 9242 | 244 | EHH76758.1 | 2672 | 9243 | 483 |
| 656 | I | 4 | AFC58582.1 | 2674 | 9245 | 706 | AFC58581.1 | 2675 | 9246 | 244 | AFC58580.1 | 2676 | 9247 | 483 |
| 657 | I | 4 | EJH73152.1 | 2678 | 9249 | 706 | EJH73151.1 | 2679 | 9250 | 244 | EJH73150.1 | 2680 | 9251 | 483 |
| 658 | I | 4 | EJH69792.1 | 2682 | 9253 | 706 | EJH69791.1 | 2683 | 9254 | 244 | EJH69790.1 | 2684 | 9255 | 483 |
| 659 | I | 4 | EJH28006.1 | 2686 | 9257 | 706 | EJH28005.1 | 2687 | 9258 | 218 | EJH28004.1 | 2688 | 9259 | 483 |
| 660 | I | 4 | EJH27267.1 | 2690 | 9261 | 706 | EJH27423.1 | 2691 | 9262 | 244 | EJH27099.1 | 2692 | 9263 | 483 |
| 661 | I | 4 | EJH29363.1 | 2694 | 9265 | 706 | EJH29362.1 | 2695 | 9266 | 218 | EJH29361.1 | 2696 | 9267 | 451 |
| 662 | I | 4 | EJH38300.1 | 2698 | 9269 | 706 | EJH38299.1 | 2699 | 9270 | 244 | EJH38298.1 | 2700 | 9271 | 483 |
| 663 | I | 4 | EJH70293.1 | 2702 | 9273 | 706 | EJH70292.1 | 2703 | 9274 | 244 | EJH70291.1 | 2704 | 9275 | 483 |
| 664 | I | 4 | EJH44250.1 | 2706 | 9277 | 706 | EJH44249.1 | 2707 | 9278 | 218 | EJH44248.1 | 2708 | 9279 | 483 |
| 665 | I | 4 | EJH55113.1 | 2710 | 9281 | 706 | EJH55112.1 | 2711 | 9282 | 244 | EJH55111.1 | 2712 | 9283 | 483 |
| 666 | I | 4 | EJH55194.1 | 2714 | 9285 | 706 | EJH55227.1 | 2715 | 9286 | 218 | EJH55313.1 | 2716 | 9287 | 483 |
| 667 | I | 4 | EJH83358.1 | 2718 | 9289 | 706 | EJH83357.1 | 2719 | 9290 | 244 | EJH83356.1 | 2720 | 9291 | 483 |
| 668 | I | 4 | EJH85693.1 | 2722 | 9293 | 706 | EJH85692.1 | 2723 | 9294 | 244 | EJH85691.1 | 2724 | 9295 | 483 |
| 669 | I | 4 | EJH80829.1 | 2726 | 9297 | 706 | EJH80828.1 | 2727 | 9298 | 244 | EJH80827.1 | 2728 | 9299 | 483 |
| 670 | I | 4 | EJH40245.1 | 2730 | 9301 | 706 | EJH40244.1 | 2731 | 9302 | 244 | EJH40243.1 | 2732 | 9303 | 483 |
| 671 | I | 4 | EKG51169.1 | 2734 | 9305 | 706 | EKG51168.1 | 2735 | 9306 | 244 | EKG51167.1 | 2736 | 9307 | 483 |
| 672 | I | 4 | EKG45548.1 | 2738 | 9309 | 706 | EKG45547.1 | 2739 | 9310 | 244 | EKG45546.1 | 2740 | 9311 | 483 |
| 673 | I | 4 | EKG69364.1 | 2742 | 9313 | 706 | EKG69363.1 | 2743 | 9314 | 244 | EKG69362.1 | 2744 | 9315 | 483 |
| 674 | I | 4 | EKG78207.1 | 2746 | 9317 | 706 | EKG78206.1 | 2747 | 9318 | 244 | EKG78205.1 | 2748 | 9319 | 483 |
| 675 | I | 4 | EKG79527.1 | 2750 | 9321 | 687 | EKG79526.1 | 2751 | 9322 | 244 | EKG79525.1 | 2752 | 9323 | 483 |
| 676 | I | 4 | EKG89065.1 | 2754 | 9325 | 687 | EKG89064.1 | 2755 | 9326 | 218 | EKG89063.1 | 2756 | 9327 | 483 |
| 677 | I | 4 | EKK80943.1 | 2758 | 9329 | 706 | EKK80942.1 | 2759 | 9330 | 244 | EKK80941.1 | 2760 | 9331 | 483 |
| 678 | I | 4 | EKK97423.1 | 2762 | 9333 | 687 | EKK97422.1 | 2763 | 9334 | 244 | EKK97421.1 | 2764 | 9335 | 483 |
| 679 | I | 4 | EKL07579.1 | 2766 | 9337 | 318 | EKL07578.1 | 2767 | 9338 | 244 | EKL07615.1 | 2768 | 9339 | 265 |
| 680 | I | 4 | EKL26689.1 | 2770 | 9341 | 706 | EKL26688.1 | 2771 | 9342 | 244 | EKL26687.1 | 2772 | 9343 | 483 |
| 681 | I | 4 | EKL25950.1 | 2774 | 9345 | 706 | EKL25949.1 | 2775 | 9346 | 244 | EKL25948.1 | 2776 | 9347 | 483 |
| 682 | I | 4 | EKL86050.1 | 2778 | 9349 | 706 | EKL86049.1 | 2779 | 9350 | 244 | EKL86048.1 | 2780 | 9351 | 483 |
| 683 | I | 4 | EKM09914.1 | 2782 | 9353 | 706 | EKM09901.1 | 2783 | 9354 | 244 | EKM09801.1 | 2784 | 9355 | 483 |
| 684 | I | 4 | EKL86446.1 | 2786 | 9357 | 687 | EKL86445.1 | 2787 | 9358 | 244 | EKL86444.1 | 2788 | 9359 | 483 |
| 685 | I | 4 | EKM18416.1 | 2790 | 9361 | 687 | EKM18415.1 | 2791 | 9362 | 244 | EKM18414.1 | 2792 | 9363 | 483 |
| 686 | I | 4 | ELT24501.1 | 2794 | 9365 | 687 | ELT24500.1 | 2795 | 9366 | 218 | ELT24499.1 | 2796 | 9367 | 451 |
| 687 | I | 4 | ELT39817.1 | 2798 | 9369 | 706 | ELT39816.1 | 2799 | 9370 | 244 | ELT39815.1 | 2800 | 9371 | 483 |
| 688 | I | 4 | ELS74167.1 | 2802 | 9373 | 706 | ELS74166.1 | 2803 | 9374 | 244 | ELS74165.1 | 2804 | 9375 | 483 |
| 689 | I | 4 | ELS81598.1 | 2806 | 9377 | 687 | ELS81597.1 | 2807 | 9378 | 244 | ELS81596.1 | 2808 | 9379 | 483 |
| 690 | I | 4 | ELS88997.1 | 2810 | 9381 | 706 | ELS88996.1 | 2811 | 9382 | 244 | ELS88995.1 | 2812 | 9383 | 483 |
| 691 | I | 4 | ELS96628.1 | 2814 | 9385 | 706 | ELS96627.1 | 2815 | 9386 | 244 | ELS96626.1 | 2816 | 9387 | 483 |
| 692 | I | 4 | ELT03894.1 | 2818 | 9389 | 706 | ELT03893.1 | 2819 | 9390 | 244 | ELT03892.1 | 2820 | 9391 | 483 |
| 693 | I | 4 | ELT10277.1 | 2822 | 9393 | 687 | ELT10276.1 | 2823 | 9394 | 244 | ELT10275.1 | 2824 | 9395 | 483 |
| 694 | I | 4 | ELT32501.1 | 2826 | 9397 | 706 | ELT32500.1 | 2827 | 9398 | 244 | ELT32499.1 | 2828 | 9399 | 483 |
| 695 | I | 4 | EMB02074.1 | 2830 | 9401 | 706 | EMB02075.1 | 2831 | 9402 | 244 | EMB02076.1 | 2832 | 9403 | 483 |
| 696 | I | 4 | EMP84497.1 | 2834 | 9405 | 706 | EMP84506.1 | 2835 | 9406 | 244 | EMP84573.1 | 2836 | 9407 | 483 |
| 697 | I | 4 | EMP97717.1 | 2838 | 9409 | 687 | EMP97716.1 | 2839 | 9410 | 244 | EMP97715.1 | 2840 | 9411 | 483 |
| 698 | I | 4 | EMP95638.1 | 2842 | 9413 | 706 | EMP95637.1 | 2843 | 9414 | 244 | EMP95636.1 | 2844 | 9415 | 483 |
| 699 | I | 4 | EMQ03274.1 | 2846 | 9417 | 706 | EMQ03273.1 | 2847 | 9418 | 244 | EMQ03272.1 | 2848 | 9419 | 483 |
| 700 | I | 4 | EMQ04749.1 | 2850 | 9421 | 687 | EMQ04748.1 | 2851 | 9422 | 244 | EMQ04747.1 | 2852 | 9423 | 483 |
| 701 | I | 4 | EMQ11843.1 | 2854 | 9425 | 687 | EMQ11842.1 | 2855 | 9426 | 244 | EMQ11841.1 | 2856 | 9427 | 483 |
| 702 | I | 4 | EMQ11497.1 | 2858 | 9429 | 706 | EMQ11496.1 | 2859 | 9430 | 244 | EMQ11495.1 | 2860 | 9431 | 483 |
| 703 | I | 4 | EMQ16257.1 | 2862 | 9433 | 687 | EMQ16256.1 | 2863 | 9434 | 244 | EMQ16255.1 | 2864 | 9435 | 483 |
| 704 | I | 4 | EMQ22003.1 | 2866 | 9437 | 706 | EMQ22002.1 | 2867 | 9438 | 244 | EMQ22001.1 | 2868 | 9439 | 483 |
| 705 | I | 4 | EMQ27293.1 | 2870 | 9441 | 706 | EMQ27292.1 | 2871 | 9442 | 244 | EMQ27291.1 | 2872 | 9443 | 483 |
| 706 | I | 4 | EMQ26220.1 | 2874 | 9445 | 706 | EMQ26219.1 | 2875 | 9446 | 244 | EMQ26218.1 | 2876 | 9447 | 483 |
| 707 | I | 4 | EMQ32320.1 | 2878 | 9449 | 706 | EMQ32319.1 | 2879 | 9450 | 244 | EMQ32318.1 | 2880 | 9451 | 483 |
| 708 | I | 4 | EMQ37900.1 | 2882 | 9453 | 706 | EMQ37899.1 | 2883 | 9454 | 218 | EMQ37898.1 | 2884 | 9455 | 483 |
| 709 | I | 4 | EMQ51395.1 | 2886 | 9457 | 706 | EMQ51394.1 | 2887 | 9458 | 244 | EMQ51393.1 | 2888 | 9459 | 483 |
| 710 | I | 4 | EMQ53996.1 | 2890 | 9461 | 706 | EMQ53995.1 | 2891 | 9462 | 244 | EMQ53994.1 | 2892 | 9463 | 483 |
| 711 | I | 4 | EMQ39198.1 | 2894 | 9465 | 687 | EMQ39197.1 | 2895 | 9466 | 244 | EMQ39196.1 | 2896 | 9467 | 483 |
| 712 | I | 4 | EMQ68296.1 | 2898 | 9469 | 687 | EMQ68295.1 | 2899 | 9470 | 244 | EMQ68294.1 | 2900 | 9471 | 483 |
| 713 | I | 4 | EMQ62929.1 | 2902 | 9473 | 687 | EMQ62928.1 | 2903 | 9474 | 244 | EMQ62927.1 | 2904 | 9475 | 483 |
| 714 | I | 4 | EMQ43439.1 | 2906 | 9477 | 706 | EMQ43438.1 | 2907 | 9478 | 244 | EMQ43437.1 | 2908 | 9479 | 483 |
| 715 | I | 4 | EMQ47715.1 | 2910 | 9481 | 706 | EMQ47714.1 | 2911 | 9482 | 244 | EMQ47713.1 | 2912 | 9483 | 483 |
| 716 | I | 4 | EWM32711.1 | 2914 | 9485 | 706 | EWM32710.1 | 2915 | 9486 | 244 | EWM32709.1 | 2916 | 9487 | 483 |
| 717 | I | 4 | KEA49020.1 | 2918 | 9489 | 706 | KEA49019.1 | 2919 | 9490 | 244 | KEA49018.1 | 2920 | 9491 | 483 |
| 718 | I | 3 | KEH05440.1 | 2922 | 9493 | 706 | KEH05439.1 | 2923 | 9494 | 244 | KEH05438.1 | 2924 | 9495 | 483 |
| 719 | I | 4 | KEH80152.1 | 2925 | 9496 | 706 | KEH80153.1 | 2926 | 9497 | 244 | KEH80154.1 | 2927 | 9498 | 483 |
| 720 | I | 4 | KEH82623.1 | 2929 | 9500 | 706 | KEH82624.1 | 2930 | 9501 | 244 | KEH82625.1 | 2931 | 9502 | 483 |
| 721 | I | 3 | KFE04003.1 | 2933 | 9504 | 569 | KFE04002.1 | 2934 | 9505 | 244 | KFE04000.1 | 2935 | 9506 | 483 |
| 722 | I | 3 | KFE07491.1 | 2936 | 9507 | 569 | KFE07489.1 | 2937 | 9508 | 244 | KFE07492.1 | 2938 | 9509 | 483 |
| 723 | I | 4 | KFE03707.1 | 2939 | 9510 | 687 | KFE03742.1 | 2940 | 9511 | 244 | KFE03727.1 | 2941 | 9512 | 483 |
| 724 | I | 4 | KFE20316.1 | 2943 | 9514 | 687 | KFE20291.1 | 2944 | 9515 | 244 | KFE20317.1 | 2945 | 9516 | 483 |
| 725 | I | 4 | KFZ34215.1 | 2947 | 9518 | 706 | KFZ34214.1 | 2948 | 9519 | 244 | KFZ34213.1 | 2949 | 9520 | 483 |
| 726 | I | 4 | AIT29756.1 | 2951 | 9522 | 706 | AIT29755.1 | 2952 | 9523 | 244 | AIT29754.1 | 2953 | 9524 | 483 |
| 727 | I | 4 | KHE18844.1 | 2955 | 9526 | 706 | KHE18843.1 | 2956 | 9527 | 244 | KHE18842.1 | 2957 | 9528 | 483 |
| 728 | I | 4 | KHE21916.1 | 2959 | 9530 | 706 | KHE21917.1 | 2960 | 9531 | 244 | KHE21918.1 | 2961 | 9532 | 483 |
| 729 | I | 4 | BAP03192.1 | 2963 | 9534 | 706 | BAP03191.1 | 2964 | 9535 | 244 | BAP03190.1 | 2965 | 9536 | 483 |
| 730 | I | 4 | KJD16371.1 | 2967 | 9538 | 706 | KJD16372.1 | 2968 | 9539 | 244 | KJD16373.1 | 2969 | 9540 | 483 |
| 731 | I | 4 | KJJ52420.1 | 2971 | 9542 | 706 | KJJ52419.1 | 2972 | 9543 | 244 | KJJ52418.1 | 2973 | 9544 | 483 |
| 732 | I | 4 | KJJ54929.1 | 2975 | 9546 | 706 | KJJ54928.1 | 2976 | 9547 | 244 | KJJ54927.1 | 2977 | 9548 | 483 |
| 733 | I | 4 | KJR76013.1 | 2979 | 9550 | 706 | KJR76012.1 | 2980 | 9551 | 244 | KJR76011.1 | 2981 | 9552 | 483 |
| 734 | I | 4 | KJS92997.1 | 2983 | 9554 | 706 | KJS92996.1 | 2984 | 9555 | 244 | KJS92995.1 | 2985 | 9556 | 483 |
| 735 | I | 4 | AKA00225.1 | 2987 | 9558 | 706 | AKA00224.1 | 2988 | 9559 | 244 | AKA00223.1 | 2989 | 9560 | 483 |
| 736 | I | 4 | KJW14527.1 | 2991 | 9562 | 706 | KJW14526.1 | 2992 | 9563 | 244 | KJW14525.1 | 2993 | 9564 | 483 |
| 737 | I | 4 | KJX83381.1 | 2995 | 9566 | 706 | KJX83382.1 | 2996 | 9567 | 244 | KJX83383.1 | 2997 | 9568 | 483 |
| 738 | I | 4 | KKP13603.1 | 2999 | 9570 | 687 | KKP13602.1 | 3000 | 9571 | 218 | KKP13601.1 | 3001 | 9572 | 483 |
| 739 | I | 4 | KKP11543.1 | 3003 | 9574 | 706 | KKP11542.1 | 3004 | 9575 | 244 | KKP11541.1 | 3005 | 9576 | 472 |
| 740 | I | 4 | KKP10397.1 | 3007 | 9578 | 706 | KKP10398.1 | 3008 | 9579 | 218 | KKP10399.1 | 3009 | 9580 | 472 |
| 741 | I | 4 | AKO75286.1 | 3011 | 9582 | 706 | AKO75285.1 | 3012 | 9583 | 244 | AKO75284.1 | 3013 | 9584 | 483 |
| 742 | I | 3 | | | | | CSC37237.1 | 3015 | 9586 | 244 | CSC37265.1 | 3016 | 9587 | 492 |
| 743 | I | 4 | CRZ83881.1 | 3018 | 9589 | 687 | CRZ83843.1 | 3019 | 9590 | 244 | CRZ83797.1 | 3020 | 9591 | 166 |
| 744 | I | 4 | CSE02212.1 | 3022 | 9593 | 687 | CSE02198.1 | 3023 | 9594 | 244 | CSE02182.1 | 3024 | 9595 | 483 |
| 745 | I | 4 | CRZ49596.1 | 3026 | 9597 | 687 | CRZ49592.1 | 3027 | 9598 | 244 | CRZ49589.1 | 3028 | 9599 | 483 |
| 746 | I | 4 | CSC16355.1 | 3030 | 9601 | 687 | CSC16391.1 | 3031 | 9602 | 244 | CSC16431.1 | 3032 | 9603 | 483 |
| 747 | I | 4 | CSB69082.1 | 3034 | 9605 | 584 | CSB69144.1 | 3035 | 9606 | 244 | CSB69175.1 | 3036 | 9607 | 483 |
| 748 | I | 4 | CSA28373.1 | 3038 | 9609 | 687 | CSA28411.1 | 3039 | 9610 | 244 | CSA28460.1 | 3040 | 9611 | 483 |
| 749 | I | 4 | CSB84212.1 | 3042 | 9613 | 683 | CSB84179.1 | 3043 | 9614 | 244 | CSB84126.1 | 3044 | 9615 | 166 |
| 750 | I | 4 | CSB63035.1 | 3046 | 9617 | 706 | CSB63063.1 | 3047 | 9618 | 244 | CSB63093.1 | 3048 | 9619 | 483 |
| 751 | I | 4 | CSA19108.1 | 3050 | 9621 | 687 | CSA19143.1 | 3051 | 9622 | 244 | CSA19174.1 | 3052 | 9623 | 483 |
| 752 | I | 4 | CSD58035.1 | 3054 | 9625 | 687 | CSD58068.1 | 3055 | 9626 | 244 | CSD58113.1 | 3056 | 9627 | 483 |
| 753 | I | 3 | CSB77636.1 | 3058 | 9629 | 706 | CSB77620.1 | 3059 | 9630 | 244 | CSB77591.1 | 3060 | 9631 | 265 |
| 754 | I | 4 | CSB47699.1 | 3061 | 9632 | 706 | CSB47717.1 | 3062 | 9633 | 244 | CSB47737.1 | 3063 | 9634 | 483 |
| 755 | I | 4 | CSA30864.1 | 3065 | 9636 | 687 | CSA30887.1 | 3066 | 9637 | 244 | CSA30916.1 | 3067 | 9638 | 483 |
| 756 | I | 4 | CSB56036.1 | 3069 | 9640 | 687 | CSB56072.1 | 3070 | 9641 | 244 | CSB56096.1 | 3071 | 9642 | 483 |
| 757 | I | 4 | CRZ98430.1 | 3073 | 9644 | 687 | CRZ98405.1 | 3074 | 9645 | 244 | CRZ98377.1 | 3075 | 9646 | 483 |
| 758 | I | 4 | CSA01223.1 | 3077 | 9648 | 521 | CSA01278.1 | 3078 | 9649 | 244 | CSA01305.1 | 3079 | 9650 | 174 |
| 759 | I | 4 | CSB97601.1 | 3081 | 9652 | 687 | CSB97580.1 | 3082 | 9653 | 244 | CSB97551.1 | 3083 | 9654 | 307 |
| 760 | I | 4 | CSC01831.1 | 3085 | 9656 | 687 | CSC01791.1 | 3086 | 9657 | 244 | CSC01763.1 | 3087 | 9658 | 483 |
| 761 | I | 4 | CRZ46095.1 | 3089 | 9660 | 706 | CRZ46097.1 | 3090 | 9661 | 244 | CRZ46104.1 | 3091 | 9662 | 93 |
| 762 | I | 4 | CSA07930.1 | 3093 | 9664 | 687 | CSA07897.1 | 3094 | 9665 | 244 | CSA07877.1 | 3095 | 9666 | 483 |
| 763 | I | 4 | CSC23820.1 | 3097 | 9668 | 687 | CSC23781.1 | 3098 | 9669 | 244 | CSC23752.1 | 3099 | 9670 | 483 |
| 764 | I | 3 | CSB05145.1 | 3101 | 9672 | 687 | CSB05176.1 | 3102 | 9673 | 244 | CSB05201.1 | 3103 | 9674 | 483 |
| 765 | I | 4 | CSE01515.1 | 3104 | 9675 | 687 | CSE01529.1 | 3105 | 9676 | 244 | CSE01548.1 | 3106 | 9677 | 483 |
| 766 | I | 3 | CSA08484.1 | 3108 | 9679 | 687 | CSA08454.1 | 3109 | 9680 | 244 | | | | |
| 767 | I | 4 | CRZ45176.1 | 3111 | 9682 | 687 | CRZ45172.1 | 3112 | 9683 | 244 | CRZ45168.1 | 3113 | 9684 | 483 |
| 768 | I | 4 | CSA06942.1 | 3115 | 9686 | 687 | CSA06965.1 | 3116 | 9687 | 244 | CSA06996.1 | 3117 | 9688 | 483 |
| 769 | I | 4 | CSA08863.1 | 3119 | 9690 | 687 | CSA08826.1 | 3120 | 9691 | 244 | CSA08791.1 | 3121 | 9692 | 483 |
| 770 | I | 4 | CSA15692.1 | 3123 | 9694 | 687 | CSA15667.1 | 3124 | 9695 | 244 | CSA15641.1 | 3125 | 9696 | 265 |
| 771 | I | 4 | CSA74473.1 | 3127 | 9698 | 706 | CSA74503.1 | 3128 | 9699 | 244 | CSA74529.1 | 3129 | 9700 | 166 |
| 772 | I | 3 | | | | | CSB88670.1 | 3131 | 9702 | 244 | CSB88619.1 | 3132 | 9703 | 333 |
| 773 | I | 4 | CSC80217.1 | 3134 | 9705 | 687 | CSC80194.1 | 3135 | 9706 | 244 | CSC80172.1 | 3136 | 9707 | 483 |
| 774 | I | 4 | CSB83682.1 | 3138 | 9709 | 687 | CSB83710.1 | 3139 | 9710 | 244 | CSB83780.1 | 3140 | 9711 | 483 |
| 775 | I | 3 | | | | | CSB56503.1 | 3142 | 9713 | 244 | CSB56524.1 | 3143 | 9714 | 483 |
| 776 | I | 4 | CSC85490.1 | 3145 | 9716 | 687 | CSC85465.1 | 3146 | 9717 | 244 | CSC85445.1 | 3147 | 9718 | 483 |
| 777 | I | 4 | CSB86358.1 | 3149 | 9720 | 706 | CSB86328.1 | 3150 | 9721 | 244 | CSB86302.1 | 3151 | 9722 | 265 |
| 778 | I | 4 | CSD13052.1 | 3153 | 9724 | 687 | CSD13079.1 | 3154 | 9725 | 244 | CSD13105.1 | 3155 | 9726 | 483 |
| 779 | I | 4 | CSD79475.1 | 3157 | 9728 | 687 | CSD79446.1 | 3158 | 9729 | 244 | CSD79419.1 | 3159 | 9730 | 483 |
| 780 | I | 4 | CSD86966.1 | 3161 | 9732 | 687 | CSD86944.1 | 3162 | 9733 | 244 | CSD86920.1 | 3163 | 9734 | 483 |
| 781 | I | 4 | CSA39609.1 | 3165 | 9736 | 687 | CSA39643.1 | 3166 | 9737 | 244 | CSA39681.1 | 3167 | 9738 | 483 |
| 782 | I | 4 | CSC76746.1 | 3169 | 9740 | 687 | CSC76722.1 | 3170 | 9741 | 244 | CSC76697.1 | 3171 | 9742 | 483 |
| 783 | I | 4 | CSA42744.1 | 3173 | 9744 | 687 | CSA42770.1 | 3174 | 9745 | 244 | CSA42798.1 | 3175 | 9746 | 483 |
| 784 | I | 4 | CSA52054.1 | 3177 | 9748 | 687 | CSA52090.1 | 3178 | 9749 | 244 | CSA52135.1 | 3179 | 9750 | 483 |
| 785 | I | 4 | CSD31909.1 | 3181 | 9752 | 687 | CSD31884.1 | 3182 | 9753 | 244 | CSD31863.1 | 3183 | 9754 | 483 |
| 786 | I | 4 | CSD17795.1 | 3185 | 9756 | 687 | CSD17820.1 | 3186 | 9757 | 244 | CSD17844.1 | 3187 | 9758 | 483 |
| 787 | I | 4 | CSD38760.1 | 3189 | 9760 | 687 | CSD38739.1 | 3190 | 9761 | 244 | CSD38713.1 | 3191 | 9762 | 483 |
| 788 | I | 4 | CSA26418.1 | 3193 | 9764 | 687 | CSA26383.1 | 3194 | 9765 | 244 | CSA26354.1 | 3195 | 9766 | 483 |
| 789 | I | 4 | CSA45804.1 | 3197 | 9768 | 706 | CSA45841.1 | 3198 | 9769 | 244 | CSA45878.1 | 3199 | 9770 | 483 |
| 790 | I | 4 | CSD96243.1 | 3201 | 9772 | 687 | CSD96273.1 | 3202 | 9773 | 244 | CSD96300.1 | 3203 | 9774 | 483 |
| 791 | I | 4 | CSA54123.1 | 3205 | 9776 | 687 | CSA54080.1 | 3206 | 9777 | 244 | CSA54039.1 | 3207 | 9778 | 483 |
| 792 | I | 3 | CSC37722.1 | 3209 | 9780 | 443 | CSC37773.1 | 3210 | 9781 | 244 | | | | |
| 793 | I | 4 | CSA88061.1 | 3212 | 9783 | 443 | CSA88093.1 | 3213 | 9784 | 244 | CSA88149.1 | 3214 | 9785 | 350 |
| 794 | I | 4 | CSA15119.1 | 3216 | 9787 | 706 | CSA15151.1 | 3217 | 9788 | 244 | CSA15173.1 | 3218 | 9789 | 107 |
| 795 | I | 3 | | | | | CSC98411.1 | 3220 | 9791 | 218 | CSC98455.1 | 3221 | 9792 | 199 |
| 796 | I | 4 | CRZ48558.1 | 3223 | 9794 | 687 | CRZ48557.1 | 3224 | 9795 | 244 | CRZ48553.1 | 3225 | 9796 | 307 |
| 797 | I | 3 | | | | | CSB25008.1 | 3227 | 9798 | 244 | CSB25021.1 | 3228 | 9799 | 360 |
| 798 | I | 4 | CSD98728.1 | 3230 | 9801 | 687 | CSD98712.1 | 3231 | 9802 | 244 | CSD98693.1 | 3232 | 9803 | 483 |
| 799 | I | 3 | | | | | CSA36905.1 | 3234 | 9805 | 244 | CSA36950.1 | 3235 | 9806 | 231 |
| 800 | I | 3 | CSA30693.1 | 3237 | 9808 | 706 | CSA30747.1 | 3238 | 9809 | 244 | CSA30798.1 | 3239 | 9810 | 483 |
| 801 | I | 4 | CSD70399.1 | 3240 | 9811 | 687 | CSD70430.1 | 3241 | 9812 | 244 | CSD70457.1 | 3242 | 9813 | 483 |
| 802 | I | 3 | | | | | CSD13971.1 | 3244 | 9815 | 244 | CSD13924.1 | 3245 | 9816 | 483 |
| 803 | I | 4 | CSD31814.1 | 3247 | 9818 | 687 | CSD31841.1 | 3248 | 9819 | 244 | CSD31862.1 | 3249 | 9820 | 483 |
| 804 | I | 4 | CSE18852.1 | 3251 | 9822 | 687 | CSE18836.1 | 3252 | 9823 | 244 | CSE18821.1 | 3253 | 9824 | 483 |
| 805 | I | 4 | CSD93125.1 | 3255 | 9826 | 687 | CSD93151.1 | 3256 | 9827 | 244 | CSD93175.1 | 3257 | 9828 | 483 |
| 806 | I | 4 | CSA21244.1 | 3259 | 9830 | 687 | CSA21199.1 | 3260 | 9831 | 244 | CSA21173.1 | 3261 | 9832 | 483 |
| 807 | I | 4 | CSA44863.1 | 3263 | 9834 | 715 | CSA44812.1 | 3264 | 9835 | 244 | CSA44762.1 | 3265 | 9836 | 265 |
| 808 | I | 4 | CSD30711.1 | 3267 | 9838 | 687 | CSD30681.1 | 3268 | 9839 | 244 | CSD30657.1 | 3269 | 9840 | 483 |
| 809 | I | 4 | CSD92444.1 | 3271 | 9842 | 687 | CSD92423.1 | 3272 | 9843 | 244 | CSD92407.1 | 3273 | 9844 | 483 |
| 810 | I | 4 | CSD99240.1 | 3275 | 9846 | 687 | CSD99267.1 | 3276 | 9847 | 244 | CSD99291.1 | 3277 | 9848 | 483 |
| 811 | I | 4 | CSA23088.1 | 3279 | 9850 | 687 | CSA23044.1 | 3280 | 9851 | 244 | CSA23002.1 | 3281 | 9852 | 483 |
| 812 | I | 4 | CSA49073.1 | 3283 | 9854 | 706 | CSA49123.1 | 3284 | 9855 | 244 | CSA49171.1 | 3285 | 9856 | 483 |
| 813 | I | 4 | CSC63545.1 | 3287 | 9858 | 478 | CSC63565.1 | 3288 | 9859 | 244 | CSC63589.1 | 3289 | 9860 | 134 |
| 814 | I | 4 | CRZ49242.1 | 3291 | 9862 | 687 | CRZ49246.1 | 3292 | 9863 | 244 | CRZ49252.1 | 3293 | 9864 | 483 |
| 815 | I | 4 | CSC03222.1 | 3295 | 9866 | 706 | CSC03177.1 | 3296 | 9867 | 244 | CSC03135.1 | 3297 | 9868 | 483 |
| 816 | I | 4 | CSD87325.1 | 3299 | 9870 | 687 | CSD87301.1 | 3300 | 9871 | 244 | CSD87274.1 | 3301 | 9872 | 483 |
| 817 | I | 4 | CSD21169.1 | 3303 | 9874 | 687 | CSD21190.1 | 3304 | 9875 | 244 | CSD21226.1 | 3305 | 9876 | 483 |
| 818 | I | 3 | CSC95321.1 | 3307 | 9878 | 687 | CSC95342.1 | 3308 | 9879 | 244 | CSC95365.1 | 3309 | 9880 | 492 |
| 819 | I | 4 | CSA26886.1 | 3310 | 9881 | 687 | CSA26825.1 | 3311 | 9882 | 244 | CSA26777.1 | 3312 | 9883 | 166 |
| 820 | I | 4 | CSB50406.1 | 3314 | 9885 | 687 | CSB50386.1 | 3315 | 9886 | 244 | CSB50354.1 | 3316 | 9887 | 483 |
| 821 | I | 4 | CSB24741.1 | 3318 | 9889 | 599 | CSB24761.1 | 3319 | 9890 | 244 | CSB24790.1 | 3320 | 9891 | 166 |
| 822 | I | 4 | CSB68001.1 | 3322 | 9893 | 687 | CSB68025.1 | 3323 | 9894 | 244 | CSB68050.1 | 3324 | 9895 | 483 |
| 823 | I | 4 | CSB16341.1 | 3326 | 9897 | 706 | CSB16315.1 | 3327 | 9898 | 244 | CSB16293.1 | 3328 | 9899 | 483 |
| 824 | I | 4 | CRZ89319.1 | 3330 | 9901 | 687 | CRZ89282.1 | 3331 | 9902 | 244 | CRZ89245.1 | 3332 | 9903 | 483 |
| 825 | I | 4 | CSD99897.1 | 3334 | 9905 | 687 | CSD99912.1 | 3335 | 9906 | 244 | CSD99928.1 | 3336 | 9907 | 483 |
| 826 | I | 4 | CSA40795.1 | 3338 | 9909 | 687 | CSA40831.1 | 3339 | 9910 | 244 | CSA40854.1 | 3340 | 9911 | 483 |
| 827 | I | 4 | CSC19419.1 | 3342 | 9913 | 687 | CSC19396.1 | 3343 | 9914 | 244 | CSC19370.1 | 3344 | 9915 | 483 |
| 828 | I | 4 | CSD27220.1 | 3346 | 9917 | 687 | CSD27192.1 | 3347 | 9918 | 244 | CSD27166.1 | 3348 | 9919 | 483 |
| 829 | I | 4 | CSA25112.1 | 3350 | 9921 | 687 | CSA25084.1 | 3351 | 9922 | 244 | CSA25048.1 | 3352 | 9923 | 483 |
| 830 | I | 4 | CSD33112.1 | 3354 | 9925 | 531 | CSD33079.1 | 3355 | 9926 | 244 | CSD33047.1 | 3356 | 9927 | 483 |
| 831 | I | 4 | CSD26002.1 | 3358 | 9929 | 687 | CSD25975.1 | 3359 | 9930 | 244 | CSD25966.1 | 3360 | 9931 | 483 |
| 832 | I | 4 | CSD38021.1 | 3362 | 9933 | 687 | CSD37998.1 | 3363 | 9934 | 244 | CSD37970.1 | 3364 | 9935 | 483 |
| 833 | I | 4 | CSD14687.1 | 3366 | 9937 | 687 | CSD14704.1 | 3367 | 9938 | 244 | CSD14728.1 | 3368 | 9939 | 483 |
| 834 | I | 3 | CSA18679.1 | 3370 | 9941 | 687 | CSA18640.1 | 3371 | 9942 | 244 | CSA18601.1 | 3372 | 9943 | 483 |
| 835 | I | 4 | CSD46955.1 | 3373 | 9944 | 687 | CSD46995.1 | 3374 | 9945 | 244 | CSD47023.1 | 3375 | 9946 | 483 |
| 836 | I | 4 | CRZ80473.1 | 3377 | 9948 | 716 | CRZ80451.1 | 3378 | 9949 | 244 | CRZ80418.1 | 3379 | 9950 | 483 |
| 837 | I | 4 | CSC19266.1 | 3381 | 9952 | 687 | CSC19248.1 | 3382 | 9953 | 244 | CSC19228.1 | 3383 | 9954 | 483 |
| 838 | I | 4 | CSA24075.1 | 3385 | 9956 | 687 | CSA24040.1 | 3386 | 9957 | 244 | CSA24013.1 | 3387 | 9958 | 483 |
| 839 | I | 4 | CSA07992.1 | 3389 | 9960 | 687 | CSA08026.1 | 3390 | 9961 | 244 | CSA08045.1 | 3391 | 9962 | 483 |
| 840 | I | 4 | CSB55819.1 | 3393 | 9964 | 578 | CSB55765.1 | 3394 | 9965 | 244 | CSB55741.1 | 3395 | 9966 | 483 |
| 841 | I | 4 | CSA25748.1 | 3397 | 9968 | 687 | CSA25793.1 | 3398 | 9969 | 244 | CSA25829.1 | 3399 | 9970 | 483 |
| 842 | I | 4 | CSD34768.1 | 3401 | 9972 | 687 | CSD34731.1 | 3402 | 9973 | 244 | CSD34701.1 | 3403 | 9974 | 483 |
| 843 | I | 4 | CSC58199.1 | 3405 | 9976 | 571 | CSC58139.1 | 3406 | 9977 | 244 | CSC58133.1 | 3407 | 9978 | 483 |
| 844 | I | 4 | CSA23793.1 | 3409 | 9980 | 706 | CSA23829.1 | 3410 | 9981 | 244 | CSA23867.1 | 3411 | 9982 | 483 |
| 845 | I | 4 | CSB25867.1 | 3413 | 9984 | 605 | CSB25856.1 | 3414 | 9985 | 244 | CSB25844.1 | 3415 | 9986 | 307 |
| 846 | I | 4 | CSD08489.1 | 3417 | 9988 | 687 | CSD08470.1 | 3418 | 9989 | 244 | CSD08448.1 | 3419 | 9990 | 483 |
| 847 | I | 4 | CSD25549.1 | 3421 | 9992 | 687 | CSD25570.1 | 3422 | 9993 | 244 | CSD25590.1 | 3423 | 9994 | 483 |
| 848 | I | 4 | CSD28514.1 | 3425 | 9996 | 687 | CSD28543.1 | 3426 | 9997 | 244 | CSD28572.1 | 3427 | 9998 | 483 |
| 849 | I | 4 | CSA45340.1 | 3429 | 10000 | 687 | CSA45303.1 | 3430 | 10001 | 244 | CSA45263.1 | 3431 | 10002 | 483 |
| 850 | I | 4 | CSD82595.1 | 3433 | 10004 | 687 | CSD82566.1 | 3434 | 10005 | 244 | CSD82541.1 | 3435 | 10006 | 483 |
| 851 | I | 4 | CSC20854.1 | 3437 | 10008 | 687 | CSC20817.1 | 3438 | 10009 | 244 | CSC20782.1 | 3439 | 10010 | 483 |
| 852 | I | 4 | CSC43426.1 | 3441 | 10012 | 712 | CSC43406.1 | 3442 | 10013 | 244 | CSC43375.1 | 3443 | 10014 | 483 |
| 853 | I | 4 | CSC06846.1 | 3445 | 10016 | 706 | CSC06871.1 | 3446 | 10017 | 244 | CSC06894.1 | 3447 | 10018 | 483 |
| 854 | I | 4 | CSB50546.1 | 3449 | 10020 | 706 | CSB50514.1 | 3450 | 10021 | 244 | CSB50503.1 | 3451 | 10022 | 483 |
| 855 | I | 4 | CSE01188.1 | 3453 | 10024 | 687 | CSE01165.1 | 3454 | 10025 | 244 | CSE01149.1 | 3455 | 10026 | 483 |
| 856 | I | 4 | CSB99258.1 | 3457 | 10028 | 687 | CSB99303.1 | 3458 | 10029 | 244 | CSB99336.1 | 3459 | 10030 | 483 |
| 857 | I | 3 | | | | | KOY92951.1 | 3461 | 10032 | 244 | KOY92950.1 | 3462 | 10033 | 483 |
| 858 | I | 4 | KOY92344.1 | 3464 | 10035 | 706 | KOY92343.1 | 3465 | 10036 | 244 | KOY92342.1 | 3466 | 10037 | 483 |
| 859 | I | 4 | KOY97240.1 | 3468 | 10039 | 706 | KOY97239.1 | 3469 | 10040 | 244 | KOY97238.1 | 3470 | 10041 | 483 |
| 860 | I | 4 | KOZ01032.1 | 3472 | 10043 | 706 | KOZ01031.1 | 3473 | 10044 | 244 | KOZ01030.1 | 3474 | 10045 | 483 |
| 861 | I | 4 | KPA03327.1 | 3476 | 10047 | 706 | KPA03326.1 | 3477 | 10048 | 244 | KPA03325.1 | 3478 | 10049 | 483 |
| 862 | I | 4 | ALJ63816.1 | 3480 | 10051 | 706 | ALJ63817.1 | 3481 | 10052 | 244 | ALJ63818.1 | 3482 | 10053 | 483 |
| 863 | I | 4 | KTL56325.1 | 3484 | 10055 | 706 | KTL56324.1 | 3485 | 10056 | 244 | KTL56323.1 | 3486 | 10057 | 483 |
| 864 | I | 3 | | | | | KUO35497.1 | 3488 | 10059 | 244 | KUO35496.1 | 3489 | 10060 | 483 |
| 865 | I | 3 | KUP87193.1 | 3491 | 10062 | 706 | KUP87194.1 | 3492 | 10063 | 244 | KUP87195.1 | 3493 | 10064 | 483 |
| 866 | I | 4 | KUP86906.1 | 3494 | 10065 | 706 | KUP86907.1 | 3495 | 10066 | 244 | KUP86908.1 | 3496 | 10067 | 483 |
| 867 | I | 4 | KUY44285.1 | 3498 | 10069 | 706 | KUY44286.1 | 3499 | 10070 | 244 | KUY44287.1 | 3500 | 10071 | 483 |
| 868 | I | 4 | KVI44905.1 | 3502 | 10073 | 706 | KVI44904.1 | 3503 | 10074 | 244 | KVI44903.1 | 3504 | 10075 | 483 |
| 869 | I | 4 | KWW48033.1 | 3506 | 10077 | 706 | KWW48034.1 | 3507 | 10078 | 244 | KWW48035.1 | 3508 | 10079 | 483 |
| 870 | I | 4 | EIG23809.1 | 3510 | 10081 | 728 | EIG23861.1 | 3511 | 10082 | 263 | EIG23836.1 | 3512 | 10083 | 507 |
| 871 | I | 4 | KGQ46272.1 | 3514 | 10085 | 677 | KGQ46273.1 | 3515 | 10086 | 298 | KGQ46274.1 | 3516 | 10087 | 479 |
| 872 | I | 4 | KGQ51096.1 | 3518 | 10089 | 677 | KGQ51097.1 | 3519 | 10090 | 298 | KGQ51098.1 | 3520 | 10091 | 479 |
| 873 | I | 4 | KGQ65037.1 | 3522 | 10093 | 677 | KGQ65036.1 | 3523 | 10094 | 298 | KGQ65035.1 | 3524 | 10095 | 479 |
| 874 | I | 4 | ACX76639.1 | 3526 | 10097 | 584 | ACX76638.1 | 3527 | 10098 | 243 | ACX76637.1 | 3528 | 10099 | 455 |
| 875 | I | 4 | ADL24842.1 | 3530 | 10101 | 584 | ADL27028.1 | 3531 | 10102 | 243 | ADL26078.1 | 3532 | 10103 | 455 |
| 876 | I | 4 | EEO43106.1 | 3534 | 10105 | 535 | EEO43107.2 | 3535 | 10106 | 207 | EEO43108.1 | 3536 | 10107 | 402 |
| 877 | I | 4 | EPC08247.1 | 3538 | 10109 | 535 | EPC08246.1 | 3539 | 10110 | 207 | EPC08245.1 | 3540 | 10111 | 402 |
| 878 | I | 4 | ERT42791.1 | 3542 | 10113 | 583 | ERT42790.1 | 3543 | 10114 | 207 | ERT42789.1 | 3544 | 10115 | 402 |
| 879 | I | 4 | KGE62641.1 | 3546 | 10117 | 583 | KGE62642.1 | 3547 | 10118 | 232 | KGE62643.1 | 3548 | 10119 | 401 |
| 880 | I | 4 | EFE87094.1 | 3550 | 10121 | 583 | EFE87095.1 | 3551 | 10122 | 232 | EFE87096.1 | 3552 | 10123 | 402 |
| 881 | I | 4 | ABM29947.1 | 3554 | 10125 | 677 | ABM29948.1 | 3555 | 10126 | 259 | ABM29949.1 | 3556 | 10127 | 455 |
| 882 | I | 4 | ADB47624.1 | 3558 | 10129 | 616 | ADB47623.1 | 3559 | 10130 | 235 | ADB47622.1 | 3560 | 10131 | 467 |
| 883 | I | 4 | ADE85046.1 | 3562 | 10133 | 681 | ADE85047.1 | 3563 | 10134 | 334 | ADE85048.1 | 3564 | 10135 | 444 |
| 884 | I | 4 | ETD02074.1 | 3566 | 10137 | 681 | ETD02075.1 | 3567 | 10138 | 334 | ETD02172.1 | 3568 | 10139 | 431 |
| 885 | I | 4 | ETD86671.1 | 3570 | 10141 | 681 | ETD86670.1 | 3571 | 10142 | 334 | ETD86702.1 | 3572 | 10143 | 444 |
| 886 | I | 4 | ETD77748.1 | 3574 | 10145 | 681 | ETD77749.1 | 3575 | 10146 | 334 | ETD77862.1 | 3576 | 10147 | 431 |
| 887 | I | 4 | ETE54106.1 | 3578 | 10149 | 681 | ETE54107.1 | 3579 | 10150 | 334 | ETE54205.1 | 3580 | 10151 | 431 |
| 888 | I | 3 | KKI99610.1 | 3582 | 10153 | 673 | KKI99609.1 | 3583 | 10154 | 248 | KKI99608.1 | 3584 | 10155 | 488 |
| 889 | I | 4 | KFI23089.1 | 3585 | 10156 | 701 | KFI23090.1 | 3586 | 10157 | 250 | KFI23091.1 | 3587 | 10158 | 476 |
| 890 | I | 4 | KMY56660.1 | 3589 | 10160 | 648 | KMY56661.1 | 3590 | 10161 | 223 | KMY56662.1 | 3591 | 10162 | 426 |
| 891 | I | 4 | KMY64903.1 | 3593 | 10164 | 648 | KMY64904.1 | 3594 | 10165 | 223 | KMY64905.1 | 3595 | 10166 | 426 |
| 892 | I | 4 | KYD35338.1 | 3597 | 10168 | 648 | KYD35337.1 | 3598 | 10169 | 223 | KYD35336.1 | 3599 | 10170 | 426 |
| 893 | I | 4 | GAD13408.1 | 3601 | 10172 | 460 | GAD13407.1 | 3602 | 10173 | 211 | GAD13406.1 | 3603 | 10174 | 426 |
| 894 | I | 3 | EMT39963.1 | 3605 | 10176 | 540 | EMT40032.1 | 3606 | 10177 | 230 | | | | |
| 895 | I | 3 | EGO65557.1 | 3608 | 10179 | 743 | EGO65558.1 | 3609 | 10180 | 232 | EGO65559.1 | 3610 | 10181 | 476 |
| 896 | I | 3 | EKF49049.1 | 3611 | 10182 | 411 | EKF49048.1 | 3612 | 10183 | 218 | | | | |
| 897 | I | 4 | BAL95138.1 | 3614 | 10185 | 667 | BAL95139.1 | 3615 | 10186 | 208 | BAL95140.1 | 3616 | 10187 | 565 |
| 898 | I | 4 | KTC75261.1 | 3618 | 10189 | 636 | KTC75262.1 | 3619 | 10190 | 234 | KTC75263.1 | 3620 | 10191 | 482 |
| 899 | I | 4 | EFF49971.1 | 3622 | 10193 | 667 | EFF49970.1 | 3623 | 10194 | 231 | EFF49969.1 | 3624 | 10195 | 616 |
| 900 | I | 4 | ABU75897.1 | 3626 | 10197 | 729 | ABU75896.1 | 3627 | 10198 | 246 | ABU75895.1 | 3628 | 10199 | 562 |
| 901 | I | 3 | | | | | EGL73326.1 | 3630 | 10201 | 246 | EGL73325.1 | 3631 | 10202 | 523 |
| 902 | I | 3 | CCK08186.1 | 3633 | 10204 | 259 | CCK08187.1 | 3634 | 10205 | 246 | CCK08188.1 | 3635 | 10206 | 562 |
| 903 | I | 4 | CCK02754.1 | 3636 | 10207 | 656 | CCK02755.1 | 3637 | 10208 | 246 | CCK02756.1 | 3638 | 10209 | 523 |
| 904 | I | 4 | CCO48375.1 | 3640 | 10211 | 706 | CCO48376.1 | 3641 | 10212 | 244 | CCO48377.1 | 3642 | 10213 | 482 |
| 905 | I | 4 | CCK80596.1 | 3644 | 10215 | 641 | CCK80597.1 | 3645 | 10216 | 250 | CCK80598.1 | 3646 | 10217 | 485 |
| 906 | I | 4 | KGD34430.1 | 3648 | 10219 | 667 | KGD34483.1 | 3649 | 10220 | 234 | KGD34420.1 | 3650 | 10221 | 573 |
| 907 | I | 4 | KGS74771.1 | 3652 | 10223 | 670 | KGS74845.1 | 3653 | 10224 | 241 | KGS74775.1 | 3654 | 10225 | 546 |
| 908 | I | 4 | KGW09067.1 | 3656 | 10227 | 667 | KGW09406.1 | 3657 | 10228 | 239 | KGW09097.1 | 3658 | 10229 | 454 |
| 909 | I | 4 | KGX47863.1 | 3660 | 10231 | 555 | KGX47852.1 | 3661 | 10232 | 234 | KGX47883.1 | 3662 | 10233 | 478 |
| 910 | I | 4 | KGX39518.1 | 3664 | 10235 | 667 | KGX39502.1 | 3665 | 10236 | 234 | KGX39650.1 | 3666 | 10237 | 573 |
| 911 | I | 4 | CPH56696.1 | 3668 | 10239 | 780 | CPH56659.1 | 3669 | 10240 | 241 | CPH56628.1 | 3670 | 10241 | 605 |
| 912 | I | 4 | KSB52477.1 | 3672 | 10243 | 729 | KSB52476.1 | 3673 | 10244 | 246 | KSB52475.1 | 3674 | 10245 | 560 |
| 913 | I | 3 | AEF17805.1 | 3676 | 10247 | 540 | AEF17804.1 | 3677 | 10248 | 230 | | | | |
| 914 | I | 4 | ENW17902.1 | 3679 | 10250 | 146 | ENW17901.1 | 3680 | 10251 | 243 | ENW17900.1 | 3681 | 10252 | 474 |
| 915 | I | 4 | ABO66647.1 | 3683 | 10254 | 626 | ABO66648.1 | 3684 | 10255 | 223 | ABO66649.1 | 3685 | 10256 | 426 |
| 916 | I | 3 | ACI99727.1 | 3687 | 10258 | 763 | ACI99728.1 | 3688 | 10259 | 314 | ACI99729.1 | 3689 | 10260 | 484 |
| 917 | I | 4 | ACS21194.1 | 3690 | 10261 | 667 | ACS21193.1 | 3691 | 10262 | 234 | ACS21192.1 | 3692 | 10263 | 574 |
| 918 | I | 3 | EIC29071.1 | 3694 | 10265 | 605 | EIC29072.1 | 3695 | 10266 | 231 | EIC29073.1 | 3696 | 10267 | 527 |
| 919 | I | 4 | EET81943.1 | 3697 | 10268 | 686 | EET81942.1 | 3698 | 10269 | 243 | EET81941.1 | 3699 | 10270 | 471 |
| 920 | I | 4 | ENU31377.1 | 3701 | 10272 | 300 | ENU31376.1 | 3702 | 10273 | 243 | ENU31375.1 | 3703 | 10274 | 456 |
| 921 | I | 4 | ALA59739.1 | 3705 | 10276 | 656 | ALA59738.1 | 3706 | 10277 | 240 | ALA59737.1 | 3707 | 10278 | 548 |
| 922 | I | 4 | AGB41055.1 | 3709 | 10280 | 652 | AGB41056.1 | 3710 | 10281 | 228 | AGB41057.1 | 3711 | 10282 | 417 |
| 923 | I | 4 | AEI93759.1 | 3713 | 10284 | 462 | AEI93760.1 | 3714 | 10285 | 323 | AEI93761.1 | 3715 | 10286 | 437 |
| 924 | I | 4 | CCU78667.1 | 3717 | 10288 | 654 | CCU78668.1 | 3718 | 10289 | 262 | CCU78669.1 | 3719 | 10290 | 398 |
| 925 | I | 4 | ERG17892.1 | 3721 | 10292 | 691 | ERG17893.1 | 3722 | 10293 | 247 | ERG17894.1 | 3723 | 10294 | 480 |
| 926 | I | 4 | ALF60586.1 | 3725 | 10296 | 688 | ALF60587.1 | 3726 | 10297 | 243 | ALF60588.1 | 3727 | 10298 | 457 |
| 927 | I | 3 | AEM78245.1 | 3729 | 10300 | 540 | AEM78246.1 | 3730 | 10301 | 230 | | | | |
| 928 | I | 4 | EFV93687.1 | 3732 | 10303 | 690 | EFV93688.1 | 3733 | 10304 | 236 | EFV93689.1 | 3734 | 10305 | 565 |
| 929 | I | 4 | KRI14520.1 | 3736 | 10307 | 688 | KRI14521.1 | 3737 | 10308 | 243 | KRI14522.1 | 3738 | 10309 | 457 |
| 930 | I | 4 | AEJ38288.1 | 3740 | 10311 | 647 | AEJ38287.1 | 3741 | 10312 | 210 | AEJ38286.1 | 3742 | 10313 | 398 |
| 931 | I | 4 | AEW03630.1 | 3744 | 10315 | 647 | AEW03629.1 | 3745 | 10316 | 229 | AEW03628.1 | 3746 | 10317 | 398 |
| 932 | I | 4 | KFX14697.1 | 3748 | 10319 | 729 | KFX14696.1 | 3749 | 10320 | 245 | KFX14695.1 | 3750 | 10321 | 560 |
| 933 | I | 4 | KKW93255.1 | 3752 | 10323 | 641 | KKW93256.1 | 3753 | 10324 | 242 | KKW94108.1 | 3754 | 10325 | 426 |
| 934 | I | 4 | KVX03061.1 | 3756 | 10327 | 723 | KVX03060.1 | 3757 | 10328 | 252 | KVX03059.1 | 3758 | 10329 | 565 |
| 935 | I | 4 | KJM54480.1 | 3760 | 10331 | 851 | KJM54479.1 | 3761 | 10332 | 245 | KJM54478.1 | 3762 | 10333 | 597 |
| 936 | I | 4 | KLF88330.1 | 3764 | 10335 | 729 | KLF88329.1 | 3765 | 10336 | 246 | KLF88328.1 | 3766 | 10337 | 560 |
| 937 | I | 4 | KLG16016.1 | 3768 | 10339 | 729 | KLG16015.1 | 3769 | 10340 | 246 | KLG16014.1 | 3770 | 10341 | 560 |
| 938 | I | 4 | KLP43536.1 | 3772 | 10343 | 729 | KLP43535.1 | 3773 | 10344 | 246 | KLP43534.1 | 3774 | 10345 | 560 |
| 939 | I | 4 | KTK05050.1 | 3776 | 10347 | 851 | KTK05049.1 | 3777 | 10348 | 245 | KTK05048.1 | 3778 | 10349 | 597 |
| 940 | I | 4 | KTJ30242.1 | 3780 | 10351 | 729 | KTJ30243.1 | 3781 | 10352 | 246 | KTJ30244.1 | 3782 | 10353 | 560 |
| 941 | I | 4 | KTI23428.1 | 3784 | 10355 | 851 | KTI23427.1 | 3785 | 10356 | 245 | KTI23426.1 | 3786 | 10357 | 597 |
| 942 | I | 4 | AKL12331.1 | 3788 | 10359 | 729 | AKL12332.1 | 3789 | 10360 | 246 | AKL12333.1 | 3790 | 10361 | 560 |
| 943 | I | 3 | AFZ43911.1 | 3792 | 10363 | 746 | AFZ43910.1 | 3793 | 10364 | 236 | AFZ43909.1 | 3794 | 10365 | 507 |
| 944 | I | 3 | ACK72258.1 | 3795 | 10366 | 456 | ACK72256.1 | 3796 | 10367 | 222 | ACK72255.1 | 3797 | 10368 | 501 |
| 945 | I | 4 | AJG24952.1 | 3798 | 10369 | 667 | AJG24951.1 | 3799 | 10370 | 53 | AJG24950.1 | 3800 | 10371 | 556 |
| 946 | I | 3 | EAW43011.1 | 3802 | 10373 | 656 | EAW43010.1 | 3803 | 10374 | 216 | EAW43009.1 | 3804 | 10375 | 464 |
| 947 | I | 3 | AHJ30056.1 | 3805 | 10376 | 635 | AHJ30057.1 | 3806 | 10377 | 216 | AHJ30058.1 | 3807 | 10378 | 464 |
| 948 | I | 4 | AJE15429.1 | 3808 | 10379 | 731 | AJE15428.1 | 3809 | 10380 | 245 | AJE15427.1 | 3810 | 10381 | 558 |
| 949 | I | 3 | CEJ44798.1 | 3812 | 10383 | 627 | CEJ44797.1 | 3813 | 10384 | 214 | CEJ44796.1 | 3814 | 10385 | 459 |
| 950 | I | 4 | EHO11882.1 | 3815 | 10386 | 509 | EHO11881.1 | 3816 | 10387 | 238 | EHO11883.1 | 3817 | 10388 | 475 |
| 951 | I | 4 | CAY72975.1 | 3819 | 10390 | 729 | CAY72976.1 | 3820 | 10391 | 245 | CAY72978.1 | 3821 | 10392 | 566 |
| 952 | I | 4 | CAX54367.1 | 3823 | 10394 | 729 | CAX54368.1 | 3824 | 10395 | 245 | CAX54369.1 | 3825 | 10396 | 566 |
| 953 | I | 4 | AGA90547.1 | 3827 | 10398 | 586 | AGA90548.1 | 3828 | 10399 | 283 | AGA90549.1 | 3829 | 10400 | 425 |
| 954 | I | 4 | CUH46419.1 | 3831 | 10402 | 681 | CUH46420.1 | 3832 | 10403 | 372 | CUH46421.1 | 3833 | 10404 | 449 |
| 955 | I | 4 | AMO80628.1 | 3835 | 10406 | 729 | AMO80629.1 | 3836 | 10407 | 247 | AMO80630.1 | 3837 | 10408 | 563 |
| 956 | I | 4 | AGP47378.1 | 3839 | 10410 | 572 | AGP47379.1 | 3840 | 10411 | 263 | AGP47380.1 | 3841 | 10412 | 443 |
| 957 | I | 4 | KIN78156.1 | 3843 | 10414 | 680 | KIN78155.1 | 3844 | 10415 | 367 | KIN78154.1 | 3845 | 10416 | 738 |
| 958 | I | 4 | AMS40143.1 | 3847 | 10418 | 651 | AMS40142.1 | 3848 | 10419 | 302 | AMS40141.1 | 3849 | 10420 | 461 |
| 959 | I | 4 | ABK50003.1 | 3851 | 10422 | 696 | ABK50004.1 | 3852 | 10423 | 243 | ABK50005.1 | 3853 | 10424 | 475 |
| 960 | I | 4 | CAP40556.1 | 3855 | 10426 | 680 | CAP40555.1 | 3856 | 10427 | 237 | CAP40554.1 | 3857 | 10428 | 558 |
| 961 | I | 4 | ERI29961.1 | 3859 | 10430 | 670 | ERI29880.1 | 3860 | 10431 | 241 | ERI29995.1 | 3861 | 10432 | 546 |
| 962 | I | 4 | EPZ86961.1 | 3863 | 10434 | 670 | EPZ86615.1 | 3864 | 10435 | 241 | EPZ86681.1 | 3865 | 10436 | 546 |
| 963 | I | 4 | KKI79474.1 | 3867 | 10438 | 670 | KKI79473.1 | 3868 | 10439 | 241 | KKI79472.1 | 3869 | 10440 | 546 |
| 964 | I | 4 | KVD94073.1 | 3871 | 10442 | 674 | KVD94072.1 | 3872 | 10443 | 236 | KVD94070.1 | 3873 | 10444 | 261 |
| 965 | I | 4 | KVT83333.1 | 3875 | 10446 | 667 | KVT83334.1 | 3876 | 10447 | 234 | KVT83335.1 | 3877 | 10448 | 576 |
| 966 | I | 4 | KVW62590.1 | 3879 | 10450 | 667 | KVW62589.1 | 3880 | 10451 | 234 | KVW62588.1 | 3881 | 10452 | 576 |
| 967 | I | 3 | AFZ37310.1 | 3883 | 10454 | 781 | AFZ37311.1 | 3884 | 10455 | 264 | AFZ37312.1 | 3885 | 10456 | 502 |
| 968 | I | 3 | ADD01957.1 | 3886 | 10457 | 540 | ADD01958.1 | 3887 | 10458 | 230 | | | | |
| 969 | I | 4 | AEG43650.1 | 3889 | 10460 | 541 | AEG43649.1 | 3890 | 10461 | 277 | AEG43648.1 | 3891 | 10462 | 514 |
| 970 | I | 4 | ACY51399.1 | 3893 | 10464 | 706 | ACY51400.1 | 3894 | 10465 | 244 | ACY51401.1 | 3895 | 10466 | 483 |
| 971 | I | 4 | EDN58079.1 | 3897 | 10468 | 706 | EDN58080.1 | 3898 | 10469 | 244 | EDN58081.1 | 3899 | 10470 | 483 |
| 972 | I | 4 | AIR88232.1 | 3901 | 10472 | 730 | AIR88231.1 | 3902 | 10473 | 247 | AIR88230.1 | 3903 | 10474 | 542 |
| 973 | I | 4 | ABC30363.1 | 3905 | 10476 | 666 | ABC30364.1 | 3906 | 10477 | 263 | ABC30365.1 | 3907 | 10478 | 493 |
| 974 | I | 4 | ALV90959.1 | 3909 | 10480 | 729 | ALV90958.1 | 3910 | 10481 | 245 | ALV90957.1 | 3911 | 10482 | 560 |
| 975 | I | 4 | EDL49433.1 | 3913 | 10484 | 641 | EDL49432.1 | 3914 | 10485 | 242 | EDL49431.1 | 3915 | 10486 | 429 |
| 976 | I | 4 | CAQ68802.1 | 3917 | 10488 | 663 | CAQ68801.1 | 3918 | 10489 | 252 | CAQ68800.1 | 3919 | 10490 | 554 |
| 977 | I | 4 | BAH37227.1 | 3921 | 10492 | 669 | BAH37228.1 | 3922 | 10493 | 230 | BAH37229.1 | 3923 | 10494 | 459 |
| 978 | I | 4 | KGU86620.1 | 3925 | 10496 | 730 | KGU86621.1 | 3926 | 10497 | 247 | KGU86622.1 | 3927 | 10498 | 542 |
| 979 | I | 3 | AFE04995.1 | 3929 | 10500 | 644 | | | | | AFE04997.1 | 3930 | 10501 | 464 |
| 980 | I | 4 | EHJ60585.1 | 3932 | 10503 | 641 | EHJ60586.1 | 3933 | 10504 | 242 | EHJ60587.1 | 3934 | 10505 | 458 |
| 981 | I | 4 | AIT79637.1 | 3936 | 10507 | 641 | AIT79636.1 | 3937 | 10508 | 242 | AIT79635.1 | 3938 | 10509 | 429 |
| 982 | I | 3 | CAV18535.1 | 3940 | 10511 | 688 | CAV18536.1 | 3941 | 10512 | 218 | CAV18537.1 | 3942 | 10513 | 625 |
| 983 | I | 4 | ADP10192.1 | 3943 | 10514 | 729 | ADP10191.1 | 3944 | 10515 | 245 | ADP10190.1 | 3945 | 10516 | 566 |
| 984 | I | 4 | ABM39550.1 | 3947 | 10518 | 816 | ABM39549.1 | 3948 | 10519 | 235 | ABM39548.1 | 3949 | 10520 | 602 |
| 985 | I | 4 | EIL89340.1 | 3951 | 10522 | 631 | EIL89341.1 | 3952 | 10523 | 236 | EIL89342.1 | 3953 | 10524 | 559 |
| 986 | I | 4 | GAC31728.1 | 3955 | 10526 | 692 | GAC31729.1 | 3956 | 10527 | 243 | GAC31730.1 | 3957 | 10528 | 475 |
| 987 | I | 3 | AFZ12767.1 | 3959 | 10530 | 726 | AFZ12766.1 | 3960 | 10531 | 239 | AFZ12765.1 | 3961 | 10532 | 474 |
| 988 | I | 4 | KFK00375.1 | 3962 | 10533 | 729 | KFK00374.1 | 3963 | 10534 | 246 | KFK00373.1 | 3964 | 10535 | 560 |
| 989 | I | 4 | CDT04278.1 | 3966 | 10537 | 704 | CDT04296.1 | 3967 | 10538 | 243 | CDT04305.1 | 3968 | 10539 | 483 |
| 990 | I | 4 | CDT11699.1 | 3970 | 10541 | 704 | CDT11706.1 | 3971 | 10542 | 243 | CDT11714.1 | 3972 | 10543 | 483 |
| 991 | I | 4 | KXV35460.1 | 3974 | 10545 | 672 | KXV35459.1 | 3975 | 10546 | 287 | KXV35477.1 | 3976 | 10547 | 425 |
| 992 | I | 4 | EAT06411.1 | 3978 | 10549 | 507 | EAT06417.1 | 3979 | 10550 | 272 | EAT06418.1 | 3980 | 10551 | 486 |
| 993 | I | 4 | BAQ44674.1 | 3982 | 10553 | 679 | BAQ44675.1 | 3983 | 10554 | 310 | BAQ44676.1 | 3984 | 10555 | 438 |
| 994 | I | 4 | CCE22484.1 | 3986 | 10557 | 642 | CCE22485.1 | 3987 | 10558 | 252 | CCE22486.1 | 3988 | 10559 | 498 |
| 995 | I | 4 | CEG51215.1 | 3990 | 10561 | 781 | CEG51216.1 | 3991 | 10562 | 254 | CEG51217.1 | 3992 | 10563 | 754 |
| 996 | I | 4 | EJI89226.1 | 3994 | 10565 | 729 | EJI89227.1 | 3995 | 10566 | 247 | EJI89228.1 | 3996 | 10567 | 567 |
| 997 | I | 4 | KDE37034.1 | 3998 | 10569 | 729 | KDE37033.1 | 3999 | 10570 | 247 | KDE37032.1 | 4000 | 10571 | 569 |
| 998 | I | 3 | AFZ51166.1 | 4002 | 10573 | 481 | AFZ51165.1 | 4003 | 10574 | 240 | AFZ51164.1 | 4004 | 10575 | 501 |
| 999 | I | 3 | GAE46380.1 | 4005 | 10576 | 629 | GAE46381.1 | 4006 | 10577 | 223 | | | | |
| 1000 | I | 4 | EAQ47302.1 | 4008 | 10579 | 680 | EAQ47301.1 | 4009 | 10580 | 367 | EAQ47300.1 | 4010 | 10581 | 741 |
| 1001 | I | 4 | EDP59419.1 | 4012 | 10583 | 706 | EDP59418.1 | 4013 | 10584 | 244 | EDP59417.1 | 4014 | 10585 | 483 |
| 1002 | I | 4 | CUH52012.1 | 4016 | 10587 | 486 | CUH52011.1 | 4017 | 10588 | 358 | CUH52010.1 | 4018 | 10589 | 436 |
| 1003 | I | 4 | CVK01182.1 | 4020 | 10591 | 844 | CVK01173.1 | 4021 | 10592 | 240 | CVK01163.1 | 4022 | 10593 | 658 |
| 1004 | I | 4 | ABE74734.1 | 4024 | 10595 | 688 | ABE74735.1 | 4025 | 10596 | 243 | ABE74736.1 | 4026 | 10597 | 473 |
| 1005 | I | 3 | CCW17770.1 | 4028 | 10599 | 549 | | | | | CCW17772.1 | 4029 | 10600 | 468 |
| 1006 | I | 3 | ABM05098.1 | 4031 | 10602 | 454 | ABM05096.1 | 4032 | 10603 | 220 | ABM05095.1 | 4033 | 10604 | 541 |
| 1007 | I | 4 | AFU46476.1 | 4034 | 10605 | 727 | AFU46477.1 | 4035 | 10606 | 255 | AFU46478.1 | 4036 | 10607 | 646 |
| 1008 | I | 4 | EZI30545.1 | 4038 | 10609 | 730 | EZI30546.1 | 4039 | 10610 | 247 | EZI30547.1 | 4040 | 10611 | 542 |
| 1009 | I | 3 | ADL55134.1 | 4042 | 10613 | 648 | ADL55135.1 | 4043 | 10614 | 238 | ADL55136.1 | 4044 | 10615 | 527 |
| 1010 | I | 4 | GAA77183.1 | 4045 | 10616 | 692 | GAA77182.1 | 4046 | 10617 | 243 | GAA77181.1 | 4047 | 10618 | 476 |
| 1011 | I | 4 | AMK16850.1 | 4049 | 10620 | 660 | AMK16851.1 | 4050 | 10621 | 236 | AMK16852.1 | 4051 | 10622 | 560 |
| 1012 | I | 3 | ADQ06821.1 | 4053 | 10624 | 539 | ADQ06820.1 | 4054 | 10625 | 241 | | | | |
| 1013 | I | 4 | EFN90481.1 | 4056 | 10627 | 460 | EFN90483.1 | 4057 | 10628 | 230 | EFN90478.1 | 4058 | 10629 | 459 |
| 1014 | I | 3 | | | | | KXB76242.1 | 4060 | 10631 | 230 | KXB76241.1 | 4061 | 10632 | 459 |
| 1015 | I | 4 | EPR18405.1 | 4063 | 10634 | 669 | EPR18406.1 | 4064 | 10635 | 242 | EPR18407.1 | 4065 | 10636 | 466 |
| 1016 | I | 4 | KMO18101.1 | 4067 | 10638 | 907 | KMO18102.1 | 4068 | 10639 | 260 | KMO18103.1 | 4069 | 10640 | 465 |
| 1017 | I | 3 | KER36348.1 | 4071 | 10642 | 641 | KER36349.1 | 4072 | 10643 | 242 | KER36350.1 | 4073 | 10644 | 466 |
| 1018 | I | 4 | ACT17070.1 | 4074 | 10645 | 666 | ACT17071.1 | 4075 | 10646 | 239 | ACT17072.1 | 4076 | 10647 | 556 |
| 1019 | I | 4 | KMW37149.1 | 4078 | 10649 | 667 | KMW37148.1 | 4079 | 10650 | 231 | KMW37147.1 | 4080 | 10651 | 616 |
| 1020 | I | 3 | | | | | CUB00791.1 | 4082 | 10653 | 322 | CUB00793.1 | 4083 | 10654 | 437 |
| 1021 | I | 4 | ADJ28737.1 | 4085 | 10656 | 700 | ADJ28736.1 | 4086 | 10657 | 250 | ADJ28735.1 | 4087 | 10658 | 477 |
| 1022 | I | 3 | | | | | AJR24432.1 | 4089 | 10660 | 236 | AJR24433.1 | 4090 | 10661 | 560 |
| 1023 | I | 4 | AJR25287.1 | 4092 | 10663 | 657 | AJR25288.1 | 4093 | 10664 | 236 | AJR25289.1 | 4094 | 10665 | 557 |
| 1024 | I | 4 | EHO63928.1 | 4096 | 10667 | 584 | EHO63911.1 | 4097 | 10668 | 222 | EHO63912.1 | 4098 | 10669 | 452 |
| 1025 | I | 4 | KVM95917.1 | 4100 | 10671 | 674 | KVM95916.1 | 4101 | 10672 | 236 | KVM95915.1 | 4102 | 10673 | 475 |
| 1026 | I | 4 | EDY06977.1 | 4104 | 10675 | 648 | EDY06976.1 | 4105 | 10676 | 223 | EDY06975.1 | 4106 | 10677 | 426 |
| 1027 | I | 3 | AMD01537.1 | 4108 | 10679 | 656 | AMD01536.1 | 4109 | 10680 | 254 | AMD01535.1 | 4110 | 10681 | 570 |
| 1028 | I | 4 | EHR42621.1 | 4111 | 10682 | 745 | EHR42622.1 | 4112 | 10683 | 263 | EHR42623.1 | 4113 | 10684 | 495 |
| 1029 | I | 4 | EHD22817.1 | 4115 | 10686 | 729 | EHD22818.1 | 4116 | 10687 | 246 | EHD22819.1 | 4117 | 10688 | 560 |
| 1030 | I | 4 | CRI66748.1 | 4119 | 10690 | 660 | CRI66749.1 | 4120 | 10691 | 242 | CRI66750.1 | 4121 | 10692 | 576 |
| 1031 | I | 4 | EFY05649.1 | 4123 | 10694 | 706 | EFY05648.1 | 4124 | 10695 | 244 | EFY05647.1 | 4125 | 10696 | 461 |
| 1032 | I | 4 | EKN30947.1 | 4127 | 10698 | 667 | EKN30946.1 | 4128 | 10699 | 231 | EKN30945.1 | 4129 | 10700 | 616 |
| 1033 | I | 4 | KPL51797.1 | 4131 | 10702 | 671 | KPL51798.1 | 4132 | 10703 | 288 | KPL51799.1 | 4133 | 10704 | 467 |
| 1034 | I | 3 | AMN39053.1 | 4135 | 10706 | 688 | | | | | AMN39055.1 | 4136 | 10707 | 481 |
| 1035 | I | 4 | KMV29900.1 | 4138 | 10709 | 605 | KMV29899.1 | 4139 | 10710 | 261 | KMV29898.1 | 4140 | 10711 | 468 |
| 1036 | I | 4 | CCA91254.1 | 4142 | 10713 | 612 | CCA91255.1 | 4143 | 10714 | 258 | CCA91256.1 | 4144 | 10715 | 433 |
| 1037 | I | 4 | CCA92387.1 | 4146 | 10717 | 641 | CCA92388.1 | 4147 | 10718 | 242 | CCA92389.1 | 4148 | 10719 | 458 |
| 1038 | I | 4 | ADE38421.1 | 4150 | 10721 | 656 | ADE38422.1 | 4151 | 10722 | 270 | ADE38423.1 | 4152 | 10723 | 462 |
| 1039 | I | 4 | EPR27897.1 | 4154 | 10725 | 648 | EPR27898.1 | 4155 | 10726 | 230 | EPR27899.1 | 4156 | 10727 | 426 |
| 1040 | I | 4 | KYC33906.1 | 4158 | 10729 | 657 | KYC33907.1 | 4159 | 10730 | 236 | KYC33908.1 | 4160 | 10731 | 557 |
| 1041 | I | 3 | ADW69601.1 | 4162 | 10733 | 650 | ADW69602.1 | 4163 | 10734 | 227 | ADW69603.1 | 4164 | 10735 | 445 |
| 1042 | I | 4 | EPR43451.1 | 4165 | 10736 | 571 | EPR43452.1 | 4166 | 10737 | 255 | EPR43453.1 | 4167 | 10738 | 454 |
| 1043 | I | 3 | ESU31843.1 | 4169 | 10740 | 629 | ESU31842.1 | 4170 | 10741 | 223 | | | | |
| 1044 | I | 4 | KHJ69401.1 | 4172 | 10743 | 729 | KHJ69400.1 | 4173 | 10744 | 245 | KHJ69399.1 | 4174 | 10745 | 560 |
| 1045 | I | 4 | ERO56341.1 | 4176 | 10747 | 729 | ERO56340.1 | 4177 | 10748 | 247 | ERO56339.1 | 4178 | 10749 | 561 |
| 1046 | I | 4 | KHN63194.1 | 4180 | 10751 | 729 | KHN63195.1 | 4181 | 10752 | 247 | KHN63196.1 | 4182 | 10753 | 561 |
| 1047 | I | 3 | KKD39674.1 | 4184 | 10755 | 733 | KKD39673.1 | 4185 | 10756 | 238 | KMW70735.1 | 4186 | 10757 | 384 |
| 1048 | I | 4 | CUB04084.1 | 4187 | 10758 | 621 | CUB04083.1 | 4188 | 10759 | 252 | CUB04082.1 | 4189 | 10760 | 571 |
| 1049 | I | 4 | EJM18419.1 | 4191 | 10762 | 730 | EJM18418.1 | 4192 | 10763 | 247 | EJM18417.1 | 4193 | 10764 | 541 |
| 1050 | I | 4 | EUB73632.1 | 4195 | 10766 | 771 | EUB73631.1 | 4196 | 10767 | 247 | EUB73630.1 | 4197 | 10768 | 652 |
| 1051 | I | 3 | EIL96364.1 | 4199 | 10770 | 625 | EIL96363.1 | 4200 | 10771 | 241 | EIL96362.1 | 4201 | 10772 | 523 |
| 1052 | I | 4 | EOU44970.1 | 4202 | 10773 | 851 | EOU44971.1 | 4203 | 10774 | 244 | EOU44972.1 | 4204 | 10775 | 595 |
| 1053 | I | 4 | ELC22340.1 | 4206 | 10777 | 851 | ELC22341.1 | 4207 | 10778 | 245 | ELC22342.1 | 4208 | 10779 | 595 |
| 1054 | I | 4 | EOU82992.1 | 4210 | 10781 | 851 | EOU82993.1 | 4211 | 10782 | 244 | EOU82994.1 | 4212 | 10783 | 595 |
| 1055 | I | 4 | KXU33094.1 | 4214 | 10785 | 657 | KXU33093.1 | 4215 | 10786 | 236 | KXU33092.1 | 4216 | 10787 | 550 |
| 1056 | I | 4 | EOV44196.1 | 4218 | 10789 | 851 | EOV44197.1 | 4219 | 10790 | 245 | EOV44198.1 | 4220 | 10791 | 595 |
| 1057 | I | 4 | EOQ55527.1 | 4222 | 10793 | 729 | EOQ55528.1 | 4223 | 10794 | 247 | EOQ55529.1 | 4224 | 10795 | 560 |
| 1058 | I | 4 | EOV91297.1 | 4226 | 10797 | 851 | EOV91298.1 | 4227 | 10798 | 245 | EOV91299.1 | 4228 | 10799 | 595 |
| 1059 | I | 4 | EOW68209.1 | 4230 | 10801 | 851 | EOW68210.1 | 4231 | 10802 | 245 | EOW68211.1 | 4232 | 10803 | 595 |
| 1060 | I | 4 | AFY17876.1 | 4234 | 10805 | 800 | AFY17877.1 | 4235 | 10806 | 247 | AFY17878.1 | 4236 | 10807 | 720 |
| 1061 | I | 4 | KHK57292.1 | 4238 | 10809 | 685 | KHK57293.1 | 4239 | 10810 | 236 | KHK57294.1 | 4240 | 10811 | 558 |
| 1062 | I | 4 | ENW78275.1 | 4242 | 10813 | 686 | ENW78276.1 | 4243 | 10814 | 243 | ENW78277.1 | 4244 | 10815 | 462 |
| 1063 | I | 4 | EME68216.1 | 4246 | 10817 | 827 | EME68215.1 | 4247 | 10818 | 251 | EME68214.1 | 4248 | 10819 | 457 |
| 1064 | I | 4 | CDE94534.1 | 4250 | 10821 | 616 | CDE94533.1 | 4251 | 10822 | 235 | CDE94532.1 | 4252 | 10823 | 467 |
| 1065 | I | 4 | CDA50128.1 | 4254 | 10825 | 657 | CDA50129.1 | 4255 | 10826 | 228 | CDA50130.1 | 4256 | 10827 | 437 |
| 1066 | I | 4 | ESQ90328.1 | 4258 | 10829 | 648 | ESQ90329.1 | 4259 | 10830 | 251 | ESQ90330.1 | 4260 | 10831 | 455 |
| 1067 | I | 4 | ESQ74514.1 | 4262 | 10833 | 662 | ESQ74515.1 | 4263 | 10834 | 267 | ESQ74516.1 | 4264 | 10835 | 464 |
| 1068 | I | 4 | AII86799.1 | 4266 | 10837 | 616 | AII86800.1 | 4267 | 10838 | 431 | AII86801.1 | 4268 | 10839 | 675 |
| 1069 | I | 4 | KPQ04149.1 | 4270 | 10841 | 692 | KPQ04148.1 | 4271 | 10842 | 243 | KPQ04147.1 | 4272 | 10843 | 475 |
| 1070 | I | 4 | CUS49192.1 | 4274 | 10845 | 692 | CUS49191.1 | 4275 | 10846 | 243 | CUS49190.1 | 4276 | 10847 | 475 |
| 1071 | I | 4 | ESN27965.1 | 4278 | 10849 | 711 | ESN27964.1 | 4279 | 10850 | 245 | ESN27963.1 | 4280 | 10851 | 560 |
| 1072 | I | 4 | EPJ56201.1 | 4282 | 10853 | 678 | EPJ56200.1 | 4283 | 10854 | 350 | EPJ56199.1 | 4284 | 10855 | 552 |
| 1073 | I | 4 | EQA99142.1 | 4286 | 10857 | 652 | EQA99141.1 | 4287 | 10858 | 250 | EQA99140.1 | 4288 | 10859 | 476 |
| 1074 | I | 4 | KMS61577.1 | 4290 | 10861 | 652 | KMS61417.1 | 4291 | 10862 | 250 | KMS61578.1 | 4292 | 10863 | 476 |
| 1075 | I | 4 | AGT31732.2 | 4294 | 10865 | 650 | AGT31733.1 | 4295 | 10866 | 223 | AGT31734.1 | 4296 | 10867 | 426 |
| 1076 | I | 4 | AIY66372.1 | 4298 | 10869 | 675 | AIY65737.1 | 4299 | 10870 | 247 | AIY65736.1 | 4300 | 10871 | 480 |
| 1077 | I | 4 | KXW55388.1 | 4302 | 10873 | 653 | KXW55387.1 | 4303 | 10874 | 249 | KXW55386.1 | 4304 | 10875 | 493 |
| 1078 | I | 4 | AKU92633.1 | 4306 | 10877 | 529 | AKU92632.1 | 4307 | 10878 | 238 | AKU92631.1 | 4308 | 10879 | 470 |
| 1079 | I | 3 | ERS81916.1 | 4310 | 10881 | 678 | ERS81915.1 | 4311 | 10882 | 263 | ERS81914.1 | 4312 | 10883 | 246 |
| 1080 | I | 3 | ERS83845.1 | 4313 | 10884 | 666 | | | | | ERS83848.1 | 4314 | 10885 | 578 |
| 1081 | I | 4 | KXU87120.1 | 4316 | 10887 | 897 | KXU87121.1 | 4317 | 10888 | 241 | KXU87122.1 | 4318 | 10889 | 597 |
| 1082 | I | 4 | KLU37751.1 | 4320 | 10891 | 667 | KLU37750.1 | 4321 | 10892 | 234 | KLU37749.1 | 4322 | 10893 | 578 |
| 1083 | I | 4 | EUC70211.1 | 4324 | 10895 | 632 | EUC70007.1 | 4325 | 10896 | 251 | EUC70008.1 | 4326 | 10897 | 508 |
| 1084 | I | 4 | EXI82583.1 | 4328 | 10899 | 679 | EXI82584.1 | 4329 | 10900 | 236 | EXI82585.1 | 4330 | 10901 | 573 |
| 1085 | I | 4 | KAK42943.1 | 4332 | 10903 | 785 | KAK42944.1 | 4333 | 10904 | 252 | KAK42945.1 | 4334 | 10905 | 618 |
| 1086 | I | 4 | BAO84440.1 | 4336 | 10907 | 644 | BAO84441.1 | 4337 | 10908 | 236 | BAO84442.1 | 4338 | 10909 | 609 |
| 1087 | I | 3 | CQR46611.1 | 4340 | 10911 | 629 | CQR46610.1 | 4341 | 10912 | 236 | | | | |
| 1088 | I | 4 | BAP87805.1 | 4343 | 10914 | 653 | BAP87806.1 | 4344 | 10915 | 237 | BAP87807.1 | 4345 | 10916 | 212 |
| 1089 | I | 4 | KDP87791.1 | 4347 | 10918 | 663 | KDP87792.1 | 4348 | 10919 | 252 | KDP87793.1 | 4349 | 10920 | 599 |
| 1090 | I | 4 | KQB03823.1 | 4351 | 10922 | 706 | KQB03824.1 | 4352 | 10923 | 244 | KQB03825.1 | 4353 | 10924 | 483 |
| 1091 | I | 4 | KQA99550.1 | 4355 | 10926 | 706 | KQA99549.1 | 4356 | 10927 | 244 | KQA99548.1 | 4357 | 10928 | 483 |
| 1092 | I | 4 | KEY85736.1 | 4359 | 10930 | 730 | KEY85735.1 | 4360 | 10931 | 247 | KEY85734.1 | 4361 | 10932 | 542 |
| 1093 | I | 4 | GAK41823.1 | 4363 | 10934 | 616 | GAK41824.1 | 4364 | 10935 | 258 | GAK41825.1 | 4365 | 10936 | 424 |
| 1094 | I | 4 | KVV58314.1 | 4367 | 10938 | 674 | KVV58315.1 | 4368 | 10939 | 236 | KVV58316.1 | 4369 | 10940 | 475 |
| 1095 | I | 4 | KVX28279.1 | 4371 | 10942 | 674 | KVX28280.1 | 4372 | 10943 | 236 | KVX28281.1 | 4373 | 10944 | 564 |
| 1096 | I | 4 | KVZ97547.1 | 4375 | 10946 | 674 | KVZ97546.1 | 4376 | 10947 | 236 | KVZ97545.1 | 4377 | 10948 | 475 |
| 1097 | I | 4 | AJY51021.1 | 4379 | 10950 | 711 | AJY51020.1 | 4380 | 10951 | 254 | AJY51019.1 | 4381 | 10952 | 530 |
| 1098 | I | 4 | CDX33063.1 | 4383 | 10954 | 723 | CDX33066.1 | 4384 | 10955 | 302 | CDX33069.1 | 4385 | 10956 | 460 |
| 1099 | I | 4 | CDX43778.1 | 4387 | 10958 | 723 | CDX43775.1 | 4388 | 10959 | 302 | CDX43772.1 | 4389 | 10960 | 460 |
| 1100 | I | 3 | KJS80656.1 | 4391 | 10962 | 700 | KJS80657.1 | 4392 | 10963 | 242 | | | | |
| 1101 | I | 4 | KGD90262.1 | 4394 | 10965 | 669 | KGD90263.1 | 4395 | 10966 | 234 | KGD90264.1 | 4396 | 10967 | 570 |
| 1102 | I | 3 | KGJ90758.1 | 4398 | 10969 | 595 | KGJ90759.1 | 4399 | 10970 | 261 | KGJ90760.1 | 4400 | 10971 | 390 |
| 1103 | I | 4 | KOC90088.1 | 4401 | 10972 | 729 | KOC90087.1 | 4402 | 10973 | 246 | KOC90086.1 | 4403 | 10974 | 560 |
| 1104 | I | 4 | KOC94084.1 | 4405 | 10976 | 729 | KOC94083.1 | 4406 | 10977 | 246 | KOC94082.1 | 4407 | 10978 | 560 |
| 1105 | I | 4 | KHF78369.1 | 4409 | 10980 | 687 | KHF78368.1 | 4410 | 10981 | 243 | KHF78367.1 | 4411 | 10982 | 472 |
| 1106 | I | 4 | KQB52476.1 | 4413 | 10984 | 730 | KQB52477.1 | 4414 | 10985 | 247 | KQB52478.1 | 4415 | 10986 | 549 |
| 1107 | I | 3 | | | | | AJP47988.1 | 4417 | 10988 | 236 | AJP47987.1 | 4418 | 10989 | 553 |
| 1108 | I | 4 | KIN89757.1 | 4420 | 10991 | 666 | KIN89556.1 | 4421 | 10992 | 235 | KIN89775.1 | 4422 | 10993 | 595 |
| 1109 | I | 4 | ALQ39732.1 | 4424 | 10995 | 583 | ALQ39733.1 | 4425 | 10996 | 232 | ALQ39734.1 | 4426 | 10997 | 402 |
| 1110 | I | 4 | KIQ83921.1 | 4428 | 10999 | 737 | KIQ83920.1 | 4429 | 11000 | 247 | KIQ83919.1 | 4430 | 11001 | 586 |
| 1111 | I | 4 | KRP95697.1 | 4432 | 11003 | 730 | KRP95696.1 | 4433 | 11004 | 247 | KRP95695.1 | 4434 | 11005 | 542 |
| 1112 | I | 3 | BAQ62924.1 | 4436 | 11007 | 772 | BAQ62925.1 | 4437 | 11008 | 222 | BAQ62926.1 | 4438 | 11009 | 503 |
| 1113 | I | 3 | KJS80968.1 | 4439 | 11010 | 698 | KJS80967.1 | 4440 | 11011 | 254 | KJS80966.1 | 4441 | 11012 | 752 |
| 1114 | I | 4 | KJM39259.1 | 4442 | 11013 | 729 | KJM39258.1 | 4443 | 11014 | 245 | KJM39257.1 | 4444 | 11015 | 504 |
| 1115 | I | 4 | KJJ99150.1 | 4446 | 11017 | 685 | KJJ99540.1 | 4447 | 11018 | 235 | KJJ99149.1 | 4448 | 11019 | 558 |
| 1116 | I | 4 | KJQ91383.1 | 4450 | 11021 | 706 | KJQ91384.1 | 4451 | 11022 | 244 | KJQ91385.1 | 4452 | 11023 | 483 |
| 1117 | I | 4 | KJQ87529.1 | 4454 | 11025 | 706 | KJQ87530.1 | 4455 | 11026 | 244 | KJQ87531.1 | 4456 | 11027 | 483 |
| 1118 | I | 4 | AKI01763.1 | 4458 | 11029 | 720 | AKI01764.1 | 4459 | 11030 | 302 | AKI01765.1 | 4460 | 11031 | 473 |
| 1119 | I | 3 | KMP10823.1 | 4462 | 11033 | 578 | | | | | KMP10824.1 | 4463 | 11034 | 471 |
| 1120 | I | 4 | KJS25182.1 | 4465 | 11036 | 781 | KJS25181.1 | 4466 | 11037 | 254 | KJS25180.1 | 4467 | 11038 | 754 |
| 1121 | I | 3 | KJS49376.1 | 4469 | 11040 | 700 | KJS49375.1 | 4470 | 11041 | 242 | | | | |
| 1122 | I | 4 | KLG11560.1 | 4472 | 11043 | 851 | KLG11561.1 | 4473 | 11044 | 245 | KLG11562.1 | 4474 | 11045 | 597 |
| 1123 | I | 4 | KLP25065.1 | 4476 | 11047 | 729 | KLP25066.1 | 4477 | 11048 | 245 | KLP25067.1 | 4478 | 11049 | 560 |
| 1124 | I | 4 | KLG16385.1 | 4480 | 11051 | 729 | KLG16384.1 | 4481 | 11052 | 245 | KLG16383.1 | 4482 | 11053 | 504 |
| 1125 | I | 4 | AKQ40863.1 | 4484 | 11055 | 641 | AKQ40862.1 | 4485 | 11056 | 242 | AKQ43011.1 | 4486 | 11057 | 440 |
| 1126 | I | 4 | KLR33911.1 | 4488 | 11059 | 729 | KLR33910.1 | 4489 | 11060 | 245 | KLR33909.1 | 4490 | 11061 | 560 |
| 1127 | I | 4 | KLQ90823.1 | 4492 | 11063 | 729 | KLQ90824.1 | 4493 | 11064 | 245 | KLQ90825.1 | 4494 | 11065 | 560 |
| 1128 | I | 4 | KYO07696.1 | 4496 | 11067 | 851 | KYO07695.1 | 4497 | 11068 | 245 | KYO07694.1 | 4498 | 11069 | 597 |
| 1129 | I | 3 | | | | | KYO16913.1 | 4500 | 11071 | 245 | KYO16912.1 | 4501 | 11072 | 560 |
| 1130 | I | 4 | KLP47189.1 | 4503 | 11074 | 729 | KLP47188.1 | 4504 | 11075 | 245 | KLP47187.1 | 4505 | 11076 | 560 |
| 1131 | I | 4 | ALE53304.1 | 4507 | 11078 | 674 | ALE53303.1 | 4508 | 11079 | 236 | ALE53302.1 | 4509 | 11080 | 564 |
| 1132 | I | 4 | KQB93617.1 | 4511 | 11082 | 648 | KQB93618.1 | 4512 | 11083 | 223 | KQB93619.1 | 4513 | 11084 | 426 |
| 1133 | I | 4 | AMN49377.1 | 4515 | 11086 | 688 | AMN49378.1 | 4516 | 11087 | 243 | AMN49379.1 | 4517 | 11088 | 473 |
| 1134 | I | 3 | ALA18584.1 | 4519 | 11090 | 715 | ALA18585.1 | 4520 | 11091 | 306 | ALA18586.1 | 4521 | 11092 | 432 |
| 1135 | I | 4 | ALK96263.1 | 4522 | 11093 | 667 | ALK96264.1 | 4523 | 11094 | 234 | ALK96265.1 | 4524 | 11095 | 578 |
| 1136 | I | 4 | CUJ89804.1 | 4526 | 11097 | 486 | CUJ89796.1 | 4527 | 11098 | 358 | CUJ89790.1 | 4528 | 11099 | 436 |
| 1137 | I | 4 | CUJ83670.1 | 4530 | 11101 | 686 | CUJ83678.1 | 4531 | 11102 | 371 | CUJ83691.1 | 4532 | 11103 | 447 |
| 1138 | I | 4 | CUQ65734.1 | 4534 | 11105 | 605 | CUQ65733.1 | 4535 | 11106 | 244 | CUQ65732.1 | 4536 | 11107 | 479 |
| 1139 | I | 4 | KVV05820.1 | 4538 | 11109 | 730 | KVV05821.1 | 4539 | 11110 | 247 | KVV05822.1 | 4540 | 11111 | 551 |
| 1140 | I | 4 | KVV04346.1 | 4542 | 11113 | 730 | KVV04345.1 | 4543 | 11114 | 247 | KVV04344.1 | 4544 | 11115 | 551 |
| 1141 | I | 4 | KUO77795.1 | 4546 | 11117 | 697 | KUO77796.1 | 4547 | 11118 | 242 | KUO77797.1 | 4548 | 11119 | 399 |
| 1142 | I | 4 | KQM30744.1 | 4550 | 11121 | 483 | KQM30743.1 | 4551 | 11122 | 310 | KQM30742.1 | 4552 | 11123 | 443 |
| 1143 | I | 4 | KQM97531.1 | 4554 | 11125 | 747 | KQM97532.1 | 4555 | 11126 | 227 | KQM97534.1 | 4556 | 11127 | 409 |
| 1144 | I | 4 | KQN80963.1 | 4558 | 11129 | 483 | KQN80962.1 | 4559 | 11130 | 310 | KQN80961.1 | 4560 | 11131 | 443 |
| 1145 | I | 4 | KQQ29436.1 | 4562 | 11133 | 679 | KQQ29437.1 | 4563 | 11134 | 296 | KQQ29438.1 | 4564 | 11135 | 438 |
| 1146 | I | 4 | KQR49970.1 | 4566 | 11137 | 685 | KQR49971.1 | 4567 | 11138 | 236 | KQR49972.1 | 4568 | 11139 | 445 |
| 1147 | I | 3 | KQQ86297.1 | 4570 | 11141 | 679 | KQQ86070.1 | 4571 | 11142 | 332 | KQQ86071.1 | 4572 | 11143 | 437 |
| 1148 | I | 4 | KQS63846.1 | 4573 | 11144 | 677 | KQS63847.1 | 4574 | 11145 | 326 | KQS63848.1 | 4575 | 11146 | 437 |
| 1149 | I | 4 | KQV35757.1 | 4577 | 11148 | 677 | KQV35758.1 | 4578 | 11149 | 326 | KQV35917.1 | 4579 | 11150 | 437 |
| 1150 | I | 4 | KQY95048.1 | 4581 | 11152 | 650 | KQY95047.1 | 4582 | 11153 | 249 | KQY95046.1 | 4583 | 11154 | 354 |
| 1151 | I | 4 | KRD25370.1 | 4585 | 11156 | 725 | KRD25371.1 | 4586 | 11157 | 255 | KRD25372.1 | 4587 | 11158 | 645 |
| 1152 | I | 4 | KRD25864.1 | 4589 | 11160 | 677 | KRD25865.1 | 4590 | 11161 | 326 | KRD26022.1 | 4591 | 11162 | 437 |
| 1153 | I | 4 | KQV20173.1 | 4593 | 11164 | 730 | KQV20174.1 | 4594 | 11165 | 247 | KQV20175.1 | 4595 | 11166 | 542 |
| 1154 | I | 4 | KQX34369.1 | 4597 | 11168 | 654 | KQX34248.1 | 4598 | 11169 | 311 | KQX34249.1 | 4599 | 11170 | 434 |
| 1155 | I | 4 | KRE22550.1 | 4601 | 11172 | 651 | KRE22551.1 | 4602 | 11173 | 306 | KRE22552.1 | 4603 | 11174 | 455 |
| 1156 | I | 4 | KRA26262.1 | 4605 | 11176 | 730 | KRA26261.1 | 4606 | 11177 | 247 | KRA26260.1 | 4607 | 11178 | 542 |
| 1157 | I | 4 | KRA28534.1 | 4609 | 11180 | 650 | KRA28533.1 | 4610 | 11181 | 249 | KRA28532.1 | 4611 | 11182 | 461 |
| 1158 | I | 4 | KRB49806.1 | 4613 | 11184 | 699 | KRB49805.1 | 4614 | 11185 | 314 | KRB49804.1 | 4615 | 11186 | 470 |
| 1159 | I | 4 | KQC46104.1 | 4617 | 11188 | 648 | KQC46105.1 | 4618 | 11189 | 223 | KQC46106.1 | 4619 | 11190 | 426 |
| 1160 | I | 4 | KWV49702.1 | 4621 | 11192 | 676 | KWV49701.1 | 4622 | 11193 | 332 | KWV49700.1 | 4623 | 11194 | 435 |
| 1161 | I | 4 | KUI99562.1 | 4625 | 11196 | 548 | KUI99563.1 | 4626 | 11197 | 244 | KUI99564.1 | 4627 | 11198 | 484 |
| 1162 | I | 4 | KTG21218.1 | 4629 | 11200 | 723 | KTG21219.1 | 4630 | 11201 | 252 | KTG21220.1 | 4631 | 11202 | 564 |
| 1163 | I | 4 | CVJ90686.1 | 4633 | 11204 | 903 | CVJ90696.1 | 4634 | 11205 | 236 | CVJ90705.1 | 4635 | 11206 | 594 |
| 1164 | I | 4 | CVK24348.1 | 4637 | 11208 | 780 | CVK24349.1 | 4638 | 11209 | 241 | CVK24350.1 | 4639 | 11210 | 630 |
| 1165 | I | 4 | CVK22610.1 | 4641 | 11212 | 724 | CVK22609.1 | 4642 | 11213 | 252 | CVK22608.1 | 4643 | 11214 | 546 |
| 1166 | I | 4 | CVK27724.1 | 4645 | 11216 | 785 | CVK27723.1 | 4646 | 11217 | 252 | CVK27722.1 | 4647 | 11218 | 556 |
| 1167 | I | 4 | CVJ14788.1 | 4649 | 11220 | 767 | CVJ14762.1 | 4650 | 11221 | 241 | CVJ14745.1 | 4651 | 11222 | 746 |
| 1168 | I | 4 | CVJ96983.1 | 4653 | 11224 | 844 | CVJ96975.1 | 4654 | 11225 | 240 | CVJ96968.1 | 4655 | 11226 | 658 |
| 1169 | I | 4 | KXS40897.1 | 4657 | 11228 | 657 | KXS40896.1 | 4658 | 11229 | 245 | KXS40895.1 | 4659 | 11230 | 391 |
| 1170 | I | 4 | KXW57569.1 | 4661 | 11232 | 646 | KXW57568.1 | 4662 | 11233 | 237 | KXW57567.1 | 4663 | 11234 | 499 |
| 1171 | I | 4 | EJO46330.1 | 4665 | 11236 | 711 | EJO46331.1 | 4666 | 11237 | 246 | EJO46332.1 | 4667 | 11238 | 560 |
| 1172 | I | 4 | EPY95209.1 | 4669 | 11240 | 851 | EPY95208.1 | 4670 | 11241 | 245 | EPY95207.1 | 4671 | 11242 | 597 |
| 1173 | I | 4 | EUL64248.1 | 4673 | 11244 | 711 | EUL64247.1 | 4674 | 11245 | 246 | EUL64246.1 | 4675 | 11246 | 560 |
| 1174 | I | 4 | AMQ20312.1 | 4677 | 11248 | 648 | AMQ20313.1 | 4678 | 11249 | 223 | AMQ20314.1 | 4679 | 11250 | 426 |
| 1175 | II | 3 | ADB42634.1 | 4681 | 11252 | 472 | ADB42633.1 | 4682 | 11253 | 222 | | | | |
| 1176 | II | 3 | EIA72761.1 | 4684 | 11255 | 432 | EIA72760.1 | 4685 | 11256 | 235 | | | | |
| 1177 | II | 3 | EIA87029.1 | 4687 | 11258 | 432 | EIA87028.1 | 4688 | 11259 | 235 | | | | |
| 1178 | II | 3 | EIA94951.1 | 4690 | 11261 | 432 | EIA94950.1 | 4691 | 11262 | 235 | | | | |
| 1179 | II | 3 | EIA95449.1 | 4693 | 11264 | 432 | EIA95448.1 | 4694 | 11265 | 235 | | | | |
| 1180 | II | 3 | KQH60908.1 | 4696 | 11267 | 432 | KQH60907.1 | 4697 | 11268 | 235 | | | | |
| 1181 | II | 3 | KQI25488.1 | 4699 | 11270 | 432 | KQI25489.1 | 4700 | 11271 | 235 | | | | |
| 1182 | II | 3 | KQI25380.1 | 4702 | 11273 | 432 | KQI25381.1 | 4703 | 11274 | 235 | | | | |
| 1183 | II | 3 | KRS58891.1 | 4705 | 11276 | 432 | KRS58892.1 | 4706 | 11277 | 235 | | | | |
| 1184 | II | 3 | KRS89289.1 | 4708 | 11279 | 432 | KRS89290.1 | 4709 | 11280 | 234 | | | | |
| 1185 | II | 3 | KEA44658.1 | 4711 | 11282 | 480 | KEA44659.1 | 4712 | 11283 | 239 | | | | |
| 1186 | II | 3 | ALX13353.1 | 4714 | 11285 | 427 | ALX11999.1 | 4715 | 11286 | 230 | | | | |
| 1187 | II | 3 | AMB80664.1 | 4717 | 11288 | 547 | AMB81837.1 | 4718 | 11289 | 240 | | | | |
| 1188 | II | 3 | CZG58504.1 | 4720 | 11291 | 498 | CZG58452.1 | 4721 | 11292 | 230 | | | | |
| 1189 | II | 3 | CZH63906.1 | 4723 | 11294 | 498 | CZH63878.1 | 4724 | 11295 | 230 | | | | |
| 1190 | II | 3 | CZG92946.1 | 4726 | 11297 | 498 | CZG92895.1 | 4727 | 11298 | 230 | | | | |
| 1191 | II | 3 | CZI24914.1 | 4729 | 11300 | 498 | CZI24954.1 | 4730 | 11301 | 230 | | | | |
| 1192 | II | 3 | CZI29146.1 | 4732 | 11303 | 498 | CZI29107.1 | 4733 | 11304 | 230 | | | | |
| 1193 | II | 3 | CZH75364.1 | 4735 | 11306 | 498 | CZH75396.1 | 4736 | 11307 | 230 | | | | |
| 1194 | II | 3 | CZI28533.1 | 4738 | 11309 | 498 | CZI28487.1 | 4739 | 11310 | 230 | | | | |
| 1195 | II | 3 | CZQ90586.1 | 4741 | 11312 | 498 | CZQ90595.1 | 4742 | 11313 | 230 | | | | |
| 1196 | II | 3 | EEZ95918.1 | 4744 | 11315 | 455 | EEZ95917.1 | 4745 | 11316 | 230 | | | | |
| 1197 | II | 3 | ADG61932.1 | 4747 | 11318 | 465 | ADG61931.1 | 4748 | 11319 | 228 | | | | |
| 1198 | II | 3 | EGE12537.1 | 4750 | 11321 | 465 | EGE12536.1 | 4751 | 11322 | 204 | | | | |
| 1199 | II | 3 | EGE10945.1 | 4753 | 11324 | 465 | EGE10944.1 | 4754 | 11325 | 204 | | | | |
| 1200 | II | 3 | EGE11787.1 | 4756 | 11327 | 465 | EGE11786.1 | 4757 | 11328 | 204 | | | | |
| 1201 | II | 3 | EGE15771.1 | 4759 | 11330 | 342 | EGE15772.1 | 4760 | 11331 | 204 | | | | |
| 1202 | II | 3 | EGE17285.1 | 4762 | 11333 | 465 | EGE17284.1 | 4763 | 11334 | 204 | | | | |
| 1203 | II | 3 | EGE18525.1 | 4765 | 11336 | 465 | EGE18524.1 | 4766 | 11337 | 204 | | | | |
| 1204 | II | 3 | EGE26180.1 | 4768 | 11339 | 378 | EGE26179.1 | 4769 | 11340 | 204 | | | | |
| 1205 | II | 3 | EGE24867.1 | 4771 | 11342 | 465 | EGE24866.1 | 4772 | 11343 | 204 | | | | |
| 1206 | II | 3 | EKF83143.1 | 4774 | 11345 | 465 | EKF83142.1 | 4775 | 11346 | 214 | | | | |
| 1207 | II | 3 | AIT43974.1 | 4777 | 11348 | 378 | AIT43973.1 | 4778 | 11349 | 238 | | | | |
| 1208 | II | 3 | ALD78152.1 | 4780 | 11351 | 498 | ALD78151.1 | 4781 | 11352 | 235 | | | | |
| 1209 | II | 3 | KJI56238.1 | 4783 | 11354 | 550 | KJI56239.1 | 4784 | 11355 | 235 | | | | |
| 1210 | II | 3 | KKW50395.1 | 4786 | 11357 | 180 | KKW50401.1 | 4787 | 11358 | 226 | | | | |
| 1211 | II | 3 | KFF70136.1 | 4789 | 11360 | 459 | KFF70137.1 | 4790 | 11361 | 244 | | | | |
| 1212 | II | 3 | KHS98349.1 | 4792 | 11363 | 459 | KHS98348.1 | 4793 | 11364 | 244 | | | | |
| 1213 | II | 3 | AAG59482.1 | 4795 | 11366 | 550 | AAG59481.1 | 4796 | 11367 | 235 | | | | |
| 1214 | II | 3 | BAB38681.1 | 4798 | 11369 | 550 | BAB38680.1 | 4799 | 11370 | 235 | | | | |
| 1215 | II | 3 | ACA79490.1 | 4801 | 11372 | 550 | ACA79491.1 | 4802 | 11373 | 235 | | | | |
| 1216 | II | 3 | ACB17340.1 | 4804 | 11375 | 550 | ACB16649.1 | 4805 | 11376 | 235 | | | | |
| 1217 | II | 3 | ACI35160.1 | 4807 | 11378 | 550 | ACI35732.1 | 4808 | 11379 | 235 | | | | |
| 1218 | II | 3 | ACT75062.1 | 4810 | 11381 | 550 | ACT75061.1 | 4811 | 11382 | 235 | | | | |
| 1219 | II | 3 | ADD59517.1 | 4813 | 11384 | 550 | ADD59516.1 | 4814 | 11385 | 235 | | | | |
| 1220 | II | 3 | EEC30753.1 | 4816 | 11387 | 550 | EEC30190.1 | 4817 | 11388 | 235 | | | | |
| 1221 | II | 3 | EFK27048.1 | 4819 | 11390 | 550 | EFK27047.1 | 4820 | 11391 | 235 | | | | |
| 1222 | II | 3 | EDU34174.1 | 4822 | 11393 | 550 | EDU34140.1 | 4823 | 11394 | 235 | | | | |
| 1223 | II | 3 | EDU54291.1 | 4825 | 11396 | 550 | EDU54290.1 | 4826 | 11397 | 235 | | | | |
| 1224 | II | 3 | EDU68759.1 | 4828 | 11399 | 550 | EDU68786.1 | 4829 | 11400 | 235 | | | | |
| 1225 | II | 3 | EDU76183.1 | 4831 | 11402 | 550 | EDU76267.1 | 4832 | 11403 | 235 | | | | |
| 1226 | II | 3 | EDU82627.1 | 4834 | 11405 | 550 | EDU82726.1 | 4835 | 11406 | 235 | | | | |
| 1227 | II | 3 | EDU87443.1 | 4837 | 11408 | 550 | EDU87344.1 | 4838 | 11409 | 235 | | | | |
| 1228 | II | 3 | EDU93482.1 | 4840 | 11411 | 550 | EDU93378.1 | 4841 | 11412 | 235 | | | | |
| 1229 | II | 3 | EDU97879.1 | 4843 | 11414 | 550 | EDU97966.1 | 4844 | 11415 | 235 | | | | |
| 1230 | II | 3 | EGI28993.1 | 4846 | 11417 | 550 | EGI28991.1 | 4847 | 11418 | 159 | | | | |
| 1231 | II | 3 | EDZ75683.1 | 4849 | 11420 | 550 | EDZ75201.1 | 4850 | 11421 | 235 | | | | |
| 1232 | II | 3 | EDZ82225.1 | 4852 | 11423 | 550 | EDZ82316.1 | 4853 | 11424 | 235 | | | | |
| 1233 | II | 3 | EDZ89786.1 | 4855 | 11426 | 550 | EDZ89331.1 | 4856 | 11427 | 235 | | | | |
| 1234 | II | 3 | EFX08673.1 | 4858 | 11429 | 550 | EFX08672.1 | 4859 | 11430 | 235 | | | | |
| 1235 | II | 3 | EFX13462.1 | 4861 | 11432 | 550 | EFX13461.1 | 4862 | 11433 | 235 | | | | |
| 1236 | II | 3 | EFX18239.1 | 4864 | 11435 | 550 | EFX18238.1 | 4865 | 11436 | 235 | | | | |
| 1237 | II | 3 | EFX28078.1 | 4867 | 11438 | 498 | EFX28077.1 | 4868 | 11439 | 235 | | | | |
| 1238 | II | 3 | EFX32591.1 | 4870 | 11441 | 498 | EFX32590.1 | 4871 | 11442 | 235 | | | | |
| 1239 | II | 3 | EGD70493.1 | 4873 | 11444 | 550 | EGD70492.1 | 4874 | 11445 | 206 | | | | |
| 1240 | II | 3 | EGD69129.1 | 4876 | 11447 | 550 | EGD69130.1 | 4877 | 11448 | 206 | | | | |
| 1241 | II | 3 | EFW65234.1 | 4879 | 11450 | 550 | EFW65235.1 | 4880 | 11451 | 206 | | | | |
| 1242 | II | 3 | AEZ43447.1 | 4882 | 11453 | 550 | AEZ43446.1 | 4883 | 11454 | 235 | | | | |
| 1243 | II | 3 | EHU86059.1 | 4885 | 11456 | 550 | EHU86058.1 | 4886 | 11457 | 210 | | | | |
| 1244 | II | 3 | EHU89504.1 | 4888 | 11459 | 498 | EHU89503.1 | 4889 | 11460 | 76 | | | | |
| 1245 | II | 3 | EHV18499.1 | 4891 | 11462 | 498 | EHV18498.1 | 4892 | 11463 | 210 | | | | |
| 1246 | II | 3 | EHV31734.1 | 4894 | 11465 | 550 | EHV31797.1 | 4895 | 11466 | 206 | | | | |
| 1247 | II | 3 | EHV46593.1 | 4897 | 11468 | 498 | EHV46592.1 | 4898 | 11469 | 210 | | | | |
| 1248 | II | 3 | EIF87146.1 | 4900 | 11471 | 550 | EIF87145.1 | 4901 | 11472 | 235 | | | | |
| 1249 | II | 3 | AFJ31993.1 | 4903 | 11474 | 550 | AFJ31992.1 | 4904 | 11475 | 235 | | | | |
| 1250 | II | 3 | EIN15909.1 | 4906 | 11477 | 550 | EIN15908.1 | 4907 | 11478 | 210 | | | | |
| 1251 | II | 3 | EIP63310.1 | 4909 | 11480 | 550 | EIP63578.1 | 4910 | 11481 | 206 | | | | |
| 1252 | II | 3 | EIP71583.1 | 4912 | 11483 | 550 | EIP71554.1 | 4913 | 11484 | 202 | | | | |
| 1253 | II | 3 | EIO79100.1 | 4915 | 11486 | 550 | EIO79099.1 | 4916 | 11487 | 210 | | | | |
| 1254 | II | 3 | EIN94365.1 | 4918 | 11489 | 550 | EIN94459.1 | 4919 | 11490 | 202 | | | | |
| 1255 | II | 3 | EIO32395.1 | 4921 | 11492 | 550 | EIO32394.1 | 4922 | 11493 | 210 | | | | |
| 1256 | II | 3 | EIO45819.1 | 4924 | 11495 | 550 | EIO46021.1 | 4925 | 11496 | 210 | | | | |
| 1257 | II | 3 | EIO63273.1 | 4927 | 11498 | 550 | EIO63762.1 | 4928 | 11499 | 210 | | | | |
| 1258 | II | 3 | EIO69657.1 | 4930 | 11501 | 550 | EIO69656.1 | 4931 | 11502 | 210 | | | | |
| 1259 | II | 3 | EIO86334.1 | 4933 | 11504 | 550 | EIO86307.1 | 4934 | 11505 | 206 | | | | |
| 1260 | II | 3 | EIP72925.1 | 4936 | 11507 | 550 | EIP72924.1 | 4937 | 11508 | 210 | | | | |
| 1261 | II | 3 | EIP72313.1 | 4939 | 11510 | 550 | EIP72312.1 | 4940 | 11511 | 210 | | | | |
| 1262 | II | 3 | EIP50029.1 | 4942 | 11513 | 550 | EIP50028.1 | 4943 | 11514 | 206 | | | | |
| 1263 | II | 3 | EIP48998.1 | 4945 | 11516 | 550 | EIP49007.1 | 4946 | 11517 | 205 | | | | |
| 1264 | II | 3 | EIP40275.1 | 4948 | 11519 | 550 | EIP40258.1 | 4949 | 11520 | 235 | | | | |
| 1265 | II | 3 | EIP35349.1 | 4951 | 11522 | 550 | EIP35359.1 | 4952 | 11523 | 210 | | | | |
| 1266 | II | 3 | EIP27300.1 | 4954 | 11525 | 452 | EIP27306.1 | 4955 | 11526 | 210 | | | | |
| 1267 | II | 3 | EIP38853.1 | 4957 | 11528 | 550 | EIP38852.1 | 4958 | 11529 | 210 | | | | |
| 1268 | II | 3 | EIP33942.1 | 4960 | 11531 | 550 | EIP33941.1 | 4961 | 11532 | 210 | | | | |
| 1269 | II | 3 | EIP10352.1 | 4963 | 11534 | 550 | EIP10349.1 | 4964 | 11535 | 210 | | | | |
| 1270 | II | 3 | EIP05667.1 | 4966 | 11537 | 550 | EIP05660.1 | 4967 | 11538 | 210 | | | | |
| 1271 | II | 3 | EIP03403.1 | 4969 | 11540 | 452 | EIP03404.1 | 4970 | 11541 | 210 | | | | |
| 1272 | II | 3 | EIO92501.1 | 4972 | 11543 | 550 | EIO92517.1 | 4973 | 11544 | 210 | | | | |
| 1273 | II | 3 | EIO87483.1 | 4975 | 11546 | 550 | EIO87493.1 | 4976 | 11547 | 202 | | | | |
| 1274 | II | 3 | EIN16733.1 | 4978 | 11549 | 550 | EIN16732.1 | 4979 | 11550 | 210 | | | | |
| 1275 | II | 3 | EIN15657.1 | 4981 | 11552 | 550 | EIN15629.1 | 4982 | 11553 | 210 | | | | |
| 1276 | II | 3 | EIN33040.1 | 4984 | 11555 | 550 | EIN33050.1 | 4985 | 11556 | 210 | | | | |
| 1277 | II | 3 | EIO86817.1 | 4987 | 11558 | 191 | EIO86816.1 | 4988 | 11559 | 202 | | | | |
| 1278 | II | 3 | EIO65815.1 | 4990 | 11561 | 550 | EIO65813.1 | 4991 | 11562 | 210 | | | | |
| 1279 | II | 3 | EIO79447.1 | 4993 | 11564 | 550 | EIO79464.1 | 4994 | 11565 | 210 | | | | |
| 1280 | II | 3 | EIO49130.1 | 4996 | 11567 | 550 | EIO49202.1 | 4997 | 11568 | 202 | | | | |
| 1281 | II | 3 | EIO29777.1 | 4999 | 11570 | 550 | EIO29776.1 | 5000 | 11571 | 206 | | | | |
| 1282 | II | 3 | EIO24705.1 | 5002 | 11573 | 452 | EIO24703.1 | 5003 | 11574 | 210 | | | | |
| 1283 | II | 3 | EIO11193.1 | 5005 | 11576 | 550 | EIO11192.1 | 5006 | 11577 | 210 | | | | |
| 1284 | II | 3 | EIO07409.1 | 5008 | 11579 | 550 | EIO07417.1 | 5009 | 11580 | 210 | | | | |
| 1285 | II | 3 | EIO07023.1 | 5011 | 11582 | 550 | EIO07031.1 | 5012 | 11583 | 210 | | | | |
| 1286 | II | 3 | EIO09663.1 | 5014 | 11585 | 550 | EIO09672.1 | 5015 | 11586 | 206 | | | | |
| 1287 | II | 3 | EIN89796.1 | 5017 | 11588 | 550 | EIN89896.1 | 5018 | 11589 | 210 | | | | |
| 1288 | II | 3 | EIN88185.1 | 5020 | 11591 | 550 | EIN88192.1 | 5021 | 11592 | 210 | | | | |
| 1289 | II | 3 | EIN85439.1 | 5023 | 11594 | 550 | EIN85471.1 | 5024 | 11595 | 210 | | | | |
| 1290 | II | 3 | EIN69802.1 | 5026 | 11597 | 550 | EIN69801.1 | 5027 | 11598 | 210 | | | | |
| 1291 | II | 3 | EIN65413.1 | 5029 | 11600 | 550 | EIN65412.1 | 5030 | 11601 | 202 | | | | |
| 1292 | II | 3 | EIN68646.1 | 5032 | 11603 | 550 | EIN68645.1 | 5033 | 11604 | 210 | | | | |
| 1293 | II | 3 | EIN52366.1 | 5035 | 11606 | 550 | EIN52365.1 | 5036 | 11607 | 210 | | | | |
| 1294 | II | 3 | EIN49112.1 | 5038 | 11609 | 550 | EIN49111.1 | 5039 | 11610 | 210 | | | | |
| 1295 | II | 3 | EIN33836.1 | 5041 | 11612 | 550 | EIN33835.1 | 5042 | 11613 | 210 | | | | |
| 1296 | II | 3 | EIN35239.1 | 5044 | 11615 | 550 | EIN35238.1 | 5045 | 11616 | 202 | | | | |
| 1297 | II | 3 | EKG95781.1 | 5047 | 11618 | 550 | EKG95780.1 | 5048 | 11619 | 205 | | | | |
| 1298 | II | 3 | EKH07680.1 | 5050 | 11621 | 550 | EKH07679.1 | 5051 | 11622 | 206 | | | | |
| 1299 | II | 3 | EKJ54995.1 | 5053 | 11624 | 550 | EKJ54994.1 | 5054 | 11625 | 210 | | | | |
| 1300 | II | 3 | EKJ48134.1 | 5056 | 11627 | 550 | EKJ48188.1 | 5057 | 11628 | 210 | | | | |
| 1301 | II | 3 | EKJ52904.1 | 5059 | 11630 | 550 | EKJ52873.1 | 5060 | 11631 | 210 | | | | |
| 1302 | II | 3 | EKJ36498.1 | 5062 | 11633 | 550 | EKJ36497.1 | 5063 | 11634 | 202 | | | | |
| 1303 | II | 3 | EKJ47662.1 | 5065 | 11636 | 550 | EKJ47661.1 | 5066 | 11637 | 210 | | | | |
| 1304 | II | 3 | EKJ36051.1 | 5068 | 11639 | 550 | EKJ36042.1 | 5069 | 11640 | 210 | | | | |
| 1305 | II | 3 | EKJ20862.1 | 5071 | 11642 | 498 | EKJ20861.1 | 5072 | 11643 | 210 | | | | |
| 1306 | II | 3 | EKJ19824.1 | 5074 | 11645 | 550 | EKJ19823.1 | 5075 | 11646 | 206 | | | | |
| 1307 | II | 3 | EKJ00851.1 | 5077 | 11648 | 550 | EKJ00850.1 | 5078 | 11649 | 210 | | | | |
| 1308 | II | 3 | EKI92952.1 | 5080 | 11651 | 550 | EKI92951.1 | 5081 | 11652 | 210 | | | | |
| 1309 | II | 3 | EKJ05352.1 | 5083 | 11654 | 550 | EKJ05390.1 | 5084 | 11655 | 202 | | | | |
| 1310 | II | 3 | EKI82675.1 | 5086 | 11657 | 550 | EKI82674.1 | 5087 | 11658 | 210 | | | | |
| 1311 | II | 3 | EKI91870.1 | 5089 | 11660 | 550 | EKI91869.1 | 5090 | 11661 | 210 | | | | |
| 1312 | II | 3 | EKI72763.1 | 5092 | 11663 | 550 | EKI72762.1 | 5093 | 11664 | 210 | | | | |
| 1313 | II | 3 | EKI64838.1 | 5095 | 11666 | 550 | EKI64837.1 | 5096 | 11667 | 210 | | | | |
| 1314 | II | 3 | EKI59123.1 | 5098 | 11669 | 550 | EKI59122.1 | 5099 | 11670 | 210 | | | | |
| 1315 | II | 3 | EKI57117.1 | 5101 | 11672 | 550 | EKI57139.1 | 5102 | 11673 | 206 | | | | |
| 1316 | II | 3 | EKI46667.1 | 5104 | 11675 | 550 | EKI46666.1 | 5105 | 11676 | 210 | | | | |
| 1317 | II | 3 | EKI33386.1 | 5107 | 11678 | 498 | EKI33385.1 | 5108 | 11679 | 210 | | | | |
| 1318 | II | 3 | EKH20917.1 | 5110 | 11681 | 550 | EKH20916.1 | 5111 | 11682 | 210 | | | | |
| 1319 | II | 3 | EKH25286.1 | 5113 | 11684 | 550 | EKH25285.1 | 5114 | 11685 | 210 | | | | |
| 1320 | II | 3 | EKH13352.1 | 5116 | 11687 | 550 | EKH13351.1 | 5117 | 11688 | 210 | | | | |
| 1321 | II | 3 | EKH36315.1 | 5119 | 11690 | 550 | EKH36314.1 | 5120 | 11691 | 210 | | | | |
| 1322 | II | 3 | EKH26863.1 | 5122 | 11693 | 550 | EKH26862.1 | 5123 | 11694 | 210 | | | | |
| 1323 | II | 3 | EKH48829.1 | 5125 | 11696 | 550 | EKH48828.1 | 5126 | 11697 | 210 | | | | |
| 1324 | II | 3 | EKH53678.1 | 5128 | 11699 | 550 | EKH53677.1 | 5129 | 11700 | 210 | | | | |
| 1325 | II | 3 | EKH61580.1 | 5131 | 11702 | 550 | EKH61520.1 | 5132 | 11703 | 210 | | | | |
| 1326 | II | 3 | EKH63165.1 | 5134 | 11705 | 550 | EKH63164.1 | 5135 | 11706 | 210 | | | | |
| 1327 | II | 3 | EKH71847.1 | 5137 | 11708 | 550 | EKH71789.1 | 5138 | 11709 | 210 | | | | |
| 1328 | II | 3 | EKH63848.1 | 5140 | 11711 | 550 | EKH63847.1 | 5141 | 11712 | 210 | | | | |
| 1329 | II | 3 | EKH83439.1 | 5143 | 11714 | 550 | EKH83457.1 | 5144 | 11715 | 210 | | | | |
| 1330 | II | 3 | EKH87900.1 | 5146 | 11717 | 550 | EKH87899.1 | 5147 | 11718 | 210 | | | | |
| 1331 | II | 3 | EKH95565.1 | 5149 | 11720 | 550 | EKH95564.1 | 5150 | 11721 | 210 | | | | |
| 1332 | II | 3 | EKI01262.1 | 5152 | 11723 | 550 | EKI01261.1 | 5153 | 11724 | 210 | | | | |
| 1333 | II | 3 | EKI02731.1 | 5155 | 11726 | 550 | EKI02730.1 | 5156 | 11727 | 210 | | | | |
| 1334 | II | 3 | EKH96738.1 | 5158 | 11729 | 550 | EKH96737.1 | 5159 | 11730 | 210 | | | | |
| 1335 | II | 3 | EKI03040.1 | 5161 | 11732 | 550 | EKI03039.1 | 5162 | 11733 | 210 | | | | |
| 1336 | II | 3 | EKI06059.1 | 5164 | 11735 | 550 | EKI06058.1 | 5165 | 11736 | 210 | | | | |
| 1337 | II | 3 | EKK37394.1 | 5167 | 11738 | 550 | EKK37393.1 | 5168 | 11739 | 210 | | | | |
| 1338 | II | 3 | EKK71766.1 | 5170 | 11741 | 550 | EKK71765.1 | 5171 | 11742 | 210 | | | | |
| 1339 | II | 3 | EKK91183.1 | 5173 | 11744 | 550 | EKK91182.1 | 5174 | 11745 | 210 | | | | |
| 1340 | II | 3 | EKK36994.1 | 5176 | 11747 | 550 | EKK36843.1 | 5177 | 11748 | 206 | | | | |
| 1341 | II | 3 | EKK37977.1 | 5179 | 11750 | 550 | EKK37976.1 | 5180 | 11751 | 206 | | | | |
| 1342 | II | 3 | EKK61089.1 | 5182 | 11753 | 550 | EKK61088.1 | 5183 | 11754 | 205 | | | | |
| 1343 | II | 3 | EKK52332.1 | 5185 | 11756 | 550 | EKK52331.1 | 5186 | 11757 | 210 | | | | |
| 1344 | II | 3 | EKK67939.1 | 5188 | 11759 | 550 | EKK67938.1 | 5189 | 11760 | 210 | | | | |
| 1345 | II | 3 | EKK62291.1 | 5191 | 11762 | 550 | EKK62290.1 | 5192 | 11763 | 210 | | | | |
| 1346 | II | 3 | EKK87667.1 | 5194 | 11765 | 550 | EKK87666.1 | 5195 | 11766 | 210 | | | | |
| 1347 | II | 3 | EKV88765.1 | 5197 | 11768 | 550 | EKV88764.1 | 5198 | 11769 | 210 | | | | |
| 1348 | II | 3 | EKV85098.1 | 5200 | 11771 | 550 | EKV85097.1 | 5201 | 11772 | 210 | | | | |
| 1349 | II | 3 | EKV70652.1 | 5203 | 11774 | 550 | EKV70651.1 | 5204 | 11775 | 210 | | | | |
| 1350 | II | 3 | EKW05771.1 | 5206 | 11777 | 550 | EKW05770.1 | 5207 | 11778 | 202 | | | | |
| 1351 | II | 3 | EKV91529.1 | 5209 | 11780 | 550 | EKV91591.1 | 5210 | 11781 | 210 | | | | |
| 1352 | II | 3 | EKW03290.1 | 5212 | 11783 | 550 | EKW03180.1 | 5213 | 11784 | 210 | | | | |
| 1353 | II | 3 | EKW04243.1 | 5215 | 11786 | 550 | EKW04288.1 | 5216 | 11787 | 210 | | | | |
| 1354 | II | 3 | EKW19024.1 | 5218 | 11789 | 550 | EKW19023.1 | 5219 | 11790 | 210 | | | | |
| 1355 | II | 3 | EKW08487.1 | 5221 | 11792 | 550 | EKW08486.1 | 5222 | 11793 | 210 | | | | |
| 1356 | II | 3 | EKW71371.1 | 5224 | 11795 | 550 | EKW71370.1 | 5225 | 11796 | 210 | | | | |
| 1357 | II | 3 | EKW96655.1 | 5227 | 11798 | 550 | EKW96654.1 | 5228 | 11799 | 202 | | | | |
| 1358 | II | 3 | EKW96260.1 | 5230 | 11801 | 550 | EKW96259.1 | 5231 | 11802 | 210 | | | | |
| 1359 | II | 3 | EKW76356.1 | 5233 | 11804 | 498 | EKW76355.1 | 5234 | 11805 | 210 | | | | |
| 1360 | II | 3 | EKW75842.1 | 5236 | 11807 | 550 | EKW75841.1 | 5237 | 11808 | 206 | | | | |
| 1361 | II | 3 | EKW68012.1 | 5239 | 11810 | 550 | EKW68011.1 | 5240 | 11811 | 202 | | | | |
| 1362 | II | 3 | EKW74793.1 | 5242 | 11813 | 550 | EKW74753.1 | 5243 | 11814 | 210 | | | | |
| 1363 | II | 3 | EKW43906.1 | 5245 | 11816 | 550 | EKW43905.1 | 5246 | 11817 | 210 | | | | |
| 1364 | II | 3 | EKW70675.1 | 5248 | 11819 | 550 | EKW70674.1 | 5249 | 11820 | 210 | | | | |
| 1365 | II | 3 | EKW38124.1 | 5251 | 11822 | 550 | EKW38123.1 | 5252 | 11823 | 210 | | | | |
| 1366 | II | 3 | EKW21071.1 | 5254 | 11825 | 352 | EKW21070.1 | 5255 | 11826 | 210 | | | | |
| 1367 | II | 3 | EKW36043.1 | 5257 | 11828 | 550 | EKW36042.1 | 5258 | 11829 | 202 | | | | |
| 1368 | II | 3 | EKW36718.1 | 5260 | 11831 | 550 | EKW36717.1 | 5261 | 11832 | 210 | | | | |
| 1369 | II | 3 | EKW51278.1 | 5263 | 11834 | 550 | EKW51302.1 | 5264 | 11835 | 210 | | | | |
| 1370 | II | 3 | EKY34591.1 | 5266 | 11837 | 550 | EKY34590.1 | 5267 | 11838 | 210 | | | | |
| 1371 | II | 3 | EKY34729.1 | 5269 | 11840 | 498 | EKY34728.1 | 5270 | 11841 | 206 | | | | |
| 1372 | II | 3 | ELI49200.1 | 5272 | 11843 | 550 | ELI49199.1 | 5273 | 11844 | 235 | | | | |
| 1373 | II | 3 | ELV23654.1 | 5275 | 11846 | 550 | ELV23653.1 | 5276 | 11847 | 210 | | | | |
| 1374 | II | 3 | ELV30876.1 | 5278 | 11849 | 550 | ELV30875.1 | 5279 | 11850 | 210 | | | | |
| 1375 | II | 3 | ELV62885.1 | 5281 | 11852 | 498 | ELV62893.1 | 5282 | 11853 | 210 | | | | |
| 1376 | II | 3 | ELV61722.1 | 5284 | 11855 | 443 | ELV61721.1 | 5285 | 11856 | 210 | | | | |
| 1377 | II | 3 | ELV63259.1 | 5287 | 11858 | 550 | ELV63258.1 | 5288 | 11859 | 210 | | | | |
| 1378 | II | 3 | ELV91642.1 | 5290 | 11861 | 550 | ELV91641.1 | 5291 | 11862 | 206 | | | | |
| 1379 | II | 3 | ELV93149.1 | 5293 | 11864 | 550 | ELV93148.1 | 5294 | 11865 | 210 | | | | |
| 1380 | II | 3 | ELW21805.1 | 5296 | 11867 | 550 | ELW21804.1 | 5297 | 11868 | 205 | | | | |
| 1381 | II | 3 | ELW24262.1 | 5299 | 11870 | 550 | ELW24261.1 | 5300 | 11871 | 210 | | | | |
| 1382 | II | 3 | ELW27707.1 | 5302 | 11873 | 550 | ELW27706.1 | 5303 | 11874 | 210 | | | | |
| 1383 | II | 3 | ELW23231.1 | 5305 | 11876 | 550 | ELW23230.1 | 5306 | 11877 | 202 | | | | |
| 1384 | II | 3 | ELW28316.1 | 5308 | 11879 | 550 | ELW28315.1 | 5309 | 11880 | 202 | | | | |
| 1385 | II | 3 | ELW46370.1 | 5311 | 11882 | 550 | ELW46369.1 | 5312 | 11883 | 210 | | | | |
| 1386 | II | 3 | ELV14533.1 | 5314 | 11885 | 550 | ELV14532.1 | 5315 | 11886 | 210 | | | | |
| 1387 | II | 3 | ELV31270.1 | 5317 | 11888 | 550 | ELV31244.1 | 5318 | 11889 | 210 | | | | |
| 1388 | II | 3 | ELV35522.1 | 5320 | 11891 | 550 | ELV35521.1 | 5321 | 11892 | 206 | | | | |
| 1389 | II | 3 | ELV44403.1 | 5323 | 11894 | 452 | ELV44402.1 | 5324 | 11895 | 235 | | | | |
| 1390 | II | 3 | ELV47175.1 | 5326 | 11897 | 550 | ELV47167.1 | 5327 | 11898 | 206 | | | | |
| 1391 | II | 3 | ELV76553.1 | 5329 | 11900 | 550 | ELV76552.1 | 5330 | 11901 | 202 | | | | |
| 1392 | II | 3 | ELV98805.1 | 5332 | 11903 | 550 | ELV98804.1 | 5333 | 11904 | 210 | | | | |
| 1393 | II | 3 | ELV75967.1 | 5335 | 11906 | 550 | ELV75966.1 | 5336 | 11907 | 210 | | | | |
| 1394 | II | 3 | ELV90962.1 | 5338 | 11909 | 550 | ELV90961.1 | 5339 | 11910 | 235 | | | | |
| 1395 | II | 3 | ELW12424.1 | 5341 | 11912 | 550 | ELW12423.1 | 5342 | 11913 | 210 | | | | |
| 1396 | II | 3 | ELV15308.1 | 5344 | 11915 | 550 | ELV15307.1 | 5345 | 11916 | 210 | | | | |
| 1397 | II | 3 | EMR91942.1 | 5347 | 11918 | 550 | EMR91943.1 | 5348 | 11919 | 235 | | | | |
| 1398 | II | 3 | EMS03600.1 | 5350 | 11921 | 550 | EMS03599.1 | 5351 | 11922 | 235 | | | | |
| 1399 | II | 3 | ELE41780.1 | 5353 | 11924 | 550 | ELE41779.1 | 5354 | 11925 | 235 | | | | |
| 1400 | II | 3 | ELF28432.1 | 5356 | 11927 | 550 | ELF28431.1 | 5357 | 11928 | 235 | | | | |
| 1401 | II | 3 | ELG08155.1 | 5359 | 11930 | 550 | ELG08154.1 | 5360 | 11931 | 235 | | | | |
| 1402 | II | 3 | ELH63190.1 | 5362 | 11933 | 550 | ELH63189.1 | 5363 | 11934 | 235 | | | | |
| 1403 | II | 3 | ENE27218.1 | 5365 | 11936 | 550 | ENE27216.1 | 5366 | 11937 | 206 | | | | |
| 1404 | II | 3 | EQO57392.1 | 5368 | 11939 | 550 | EQO57391.1 | 5369 | 11940 | 235 | | | | |
| 1405 | II | 3 | EQO66403.1 | 5371 | 11942 | 550 | EQO66402.1 | 5372 | 11943 | 235 | | | | |
| 1406 | II | 3 | EQT31739.1 | 5374 | 11945 | 550 | EQT31738.1 | 5375 | 11946 | 235 | | | | |
| 1407 | II | 3 | EQT84558.1 | 5377 | 11948 | 550 | EQT84557.1 | 5378 | 11949 | 235 | | | | |
| 1408 | II | 3 | ERB08804.1 | 5380 | 11951 | 550 | ERB08803.1 | 5381 | 11952 | 235 | | | | |
| 1409 | II | 3 | ERB13352.1 | 5383 | 11954 | 550 | ERB13353.1 | 5384 | 11955 | 235 | | | | |
| 1410 | II | 3 | ERC00102.1 | 5386 | 11957 | 550 | ERC00101.1 | 5387 | 11958 | 206 | | | | |
| 1411 | II | 3 | ERB68141.1 | 5389 | 11960 | 550 | ERB68140.1 | 5390 | 11961 | 210 | | | | |
| 1412 | II | 3 | ERB88973.1 | 5392 | 11963 | 550 | ERB88972.1 | 5393 | 11964 | 210 | | | | |
| 1413 | II | 3 | ERC15358.1 | 5395 | 11966 | 550 | ERC15203.1 | 5396 | 11967 | 202 | | | | |
| 1414 | II | 3 | ERB79215.1 | 5398 | 11969 | 550 | ERB79214.1 | 5399 | 11970 | 205 | | | | |
| 1415 | II | 3 | ERB91962.1 | 5401 | 11972 | 550 | ERB92027.1 | 5402 | 11973 | 205 | | | | |
| 1416 | II | 3 | ERC08311.1 | 5404 | 11975 | 550 | ERC08310.1 | 5405 | 11976 | 210 | | | | |
| 1417 | II | 3 | ERC32305.1 | 5407 | 11978 | 550 | ERC32304.1 | 5408 | 11979 | 210 | | | | |
| 1418 | II | 3 | ERC25309.1 | 5410 | 11981 | 550 | ERC25308.1 | 5411 | 11982 | 205 | | | | |
| 1419 | II | 3 | ERC09303.1 | 5413 | 11984 | 550 | ERC09302.1 | 5414 | 11985 | 210 | | | | |
| 1420 | II | 3 | ERC10658.1 | 5416 | 11987 | 550 | ERC10657.1 | 5417 | 11988 | 206 | | | | |
| 1421 | II | 3 | ERE14327.1 | 5419 | 11990 | 550 | ERE14326.1 | 5420 | 11991 | 210 | | | | |
| 1422 | II | 3 | ERC92367.1 | 5422 | 11993 | 550 | ERC92366.1 | 5423 | 11994 | 235 | | | | |
| 1423 | II | 3 | ERD40230.1 | 5425 | 11996 | 550 | ERD40229.1 | 5426 | 11997 | 210 | | | | |
| 1424 | II | 3 | ERC91695.1 | 5428 | 11999 | 550 | ERC91694.1 | 5429 | 12000 | 206 | | | | |
| 1425 | II | 3 | ERD09264.1 | 5431 | 12002 | 550 | ERD09263.1 | 5432 | 12003 | 210 | | | | |
| 1426 | II | 3 | ERC65822.1 | 5434 | 12005 | 550 | ERC65821.1 | 5435 | 12006 | 210 | | | | |
| 1427 | II | 3 | ERC53517.1 | 5437 | 12008 | 550 | ERC53516.1 | 5438 | 12009 | 202 | | | | |
| 1428 | II | 3 | ERE00881.1 | 5440 | 12011 | 550 | ERE00880.1 | 5441 | 12012 | 210 | | | | |
| 1429 | II | 3 | ERE21796.1 | 5443 | 12014 | 550 | ERE21795.1 | 5444 | 12015 | 202 | | | | |
| 1430 | II | 3 | ERC61430.1 | 5446 | 12017 | 550 | ERC61431.1 | 5447 | 12018 | 235 | | | | |
| 1431 | II | 3 | ERC74185.1 | 5449 | 12020 | 550 | ERC74184.1 | 5450 | 12021 | 210 | | | | |
| 1432 | II | 3 | ERC30060.1 | 5452 | 12023 | 550 | ERC30059.1 | 5453 | 12024 | 206 | | | | |
| 1433 | II | 3 | ERC33933.1 | 5455 | 12026 | 550 | ERC33932.1 | 5456 | 12027 | 210 | | | | |
| 1434 | II | 3 | ERC40340.1 | 5458 | 12029 | 550 | ERC40339.1 | 5459 | 12030 | 206 | | | | |
| 1435 | II | 3 | ERC48257.1 | 5461 | 12032 | 550 | ERC48256.1 | 5462 | 12033 | 210 | | | | |
| 1436 | II | 3 | ERD08504.1 | 5464 | 12035 | 550 | ERD08318.1 | 5465 | 12036 | 206 | | | | |
| 1437 | II | 3 | ERD05019.1 | 5467 | 12038 | 550 | ERD05018.1 | 5468 | 12039 | 210 | | | | |
| 1438 | II | 3 | ERD20746.1 | 5470 | 12041 | 550 | ERD20745.1 | 5471 | 12042 | 206 | | | | |
| 1439 | II | 3 | ERD22950.1 | 5473 | 12044 | 550 | ERD22949.1 | 5474 | 12045 | 210 | | | | |
| 1440 | II | 3 | ERD23990.1 | 5476 | 12047 | 550 | ERD23989.1 | 5477 | 12048 | 210 | | | | |
| 1441 | II | 3 | ERD35106.1 | 5479 | 12050 | 550 | ERD35201.1 | 5480 | 12051 | 214 | | | | |
| 1442 | II | 3 | ERD37183.1 | 5482 | 12053 | 550 | ERD37182.1 | 5483 | 12054 | 210 | | | | |
| 1443 | II | 3 | ERD26787.1 | 5485 | 12056 | 498 | ERD26788.1 | 5486 | 12057 | 210 | | | | |
| 1444 | II | 3 | ERD52929.1 | 5488 | 12059 | 550 | ERD52928.1 | 5489 | 12060 | 210 | | | | |
| 1445 | II | 3 | ERD45127.1 | 5491 | 12062 | 550 | ERD45126.1 | 5492 | 12063 | 210 | | | | |
| 1446 | II | 3 | ERD72597.1 | 5494 | 12065 | 550 | ERD72596.1 | 5495 | 12066 | 205 | | | | |
| 1447 | II | 3 | ERD68376.1 | 5497 | 12068 | 550 | ERD68375.1 | 5498 | 12069 | 202 | | | | |
| 1448 | II | 3 | ERD73526.1 | 5500 | 12071 | 498 | ERD73510.1 | 5501 | 12072 | 210 | | | | |
| 1449 | II | 3 | ERD83187.1 | 5503 | 12074 | 550 | ERD83186.1 | 5504 | 12075 | 206 | | | | |
| 1450 | II | 3 | ERD87990.1 | 5506 | 12077 | 550 | ERD87989.1 | 5507 | 12078 | 210 | | | | |
| 1451 | II | 3 | ERD91775.1 | 5509 | 12080 | 550 | ERD91774.1 | 5510 | 12081 | 210 | | | | |
| 1452 | II | 3 | ERD98682.1 | 5512 | 12083 | 550 | ERD98681.1 | 5513 | 12084 | 210 | | | | |
| 1453 | II | 3 | ERD88427.1 | 5515 | 12086 | 498 | ERD88426.1 | 5516 | 12087 | 205 | | | | |
| 1454 | II | 3 | ERE36110.1 | 5518 | 12089 | 550 | ERE36109.1 | 5519 | 12090 | 210 | | | | |
| 1455 | II | 3 | ERE23639.1 | 5521 | 12092 | 550 | ERE23638.1 | 5522 | 12093 | 210 | | | | |
| 1456 | II | 3 | ERE42060.1 | 5524 | 12095 | 550 | ERE42059.1 | 5525 | 12096 | 210 | | | | |
| 1457 | II | 3 | ERE45408.1 | 5527 | 12098 | 550 | ERE45407.1 | 5528 | 12099 | 202 | | | | |
| 1458 | II | 3 | ETJ70764.1 | 5530 | 12101 | 550 | ETJ70765.1 | 5531 | 12102 | 235 | | | | |
| 1459 | II | 3 | ERC07680.1 | 5533 | 12104 | 550 | ERC07679.1 | 5534 | 12105 | 206 | | | | |
| 1460 | II | 3 | ESD10539.1 | 5536 | 12107 | 550 | ESD10538.1 | 5537 | 12108 | 235 | | | | |
| 1461 | II | 3 | ESL20616.1 | 5539 | 12110 | 550 | ESL20617.1 | 5540 | 12111 | 235 | | | | |
| 1462 | II | 3 | ESP12226.1 | 5542 | 12113 | 550 | ESP12225.1 | 5543 | 12114 | 235 | | | | |
| 1463 | II | 3 | ETJ79053.1 | 5545 | 12116 | 550 | ETJ79052.1 | 5546 | 12117 | 235 | | | | |
| 1464 | II | 3 | EST67462.1 | 5548 | 12119 | 550 | EST67463.1 | 5549 | 12120 | 55 | | | | |
| 1465 | II | 3 | EST67376.1 | 5551 | 12122 | 550 | EST67377.1 | 5552 | 12123 | 235 | | | | |
| 1466 | II | 3 | AHG12155.1 | 5554 | 12125 | 498 | AHG12154.1 | 5555 | 12126 | 210 | | | | |
| 1467 | II | 3 | EYE30767.1 | 5557 | 12128 | 550 | EYE30766.1 | 5558 | 12129 | 235 | | | | |
| 1468 | II | 3 | EYE15509.1 | 5560 | 12131 | 550 | EYE15508.1 | 5561 | 12132 | 235 | | | | |
| 1469 | II | 3 | EYE15596.1 | 5563 | 12134 | 550 | EYE15595.1 | 5564 | 12135 | 210 | | | | |
| 1470 | II | 3 | EYW09907.1 | 5566 | 12137 | 550 | EYW09908.1 | 5567 | 12138 | 210 | | | | |
| 1471 | II | 3 | EYW25814.1 | 5569 | 12140 | 550 | EYW25815.1 | 5570 | 12141 | 210 | | | | |
| 1472 | II | 3 | EYW27180.1 | 5572 | 12143 | 550 | EYW27179.1 | 5573 | 12144 | 210 | | | | |
| 1473 | II | 3 | EYW07431.1 | 5575 | 12146 | 550 | EYW07430.1 | 5576 | 12147 | 210 | | | | |
| 1474 | II | 3 | EYW24509.1 | 5578 | 12149 | 550 | EYW24508.1 | 5579 | 12150 | 210 | | | | |
| 1475 | II | 3 | EYW34609.1 | 5581 | 12152 | 550 | EYW34608.1 | 5582 | 12153 | 210 | | | | |
| 1476 | II | 3 | EYW13500.1 | 5584 | 12155 | 550 | EYW13499.1 | 5585 | 12156 | 210 | | | | |
| 1477 | II | 3 | EYV89287.1 | 5587 | 12158 | 550 | EYV89288.1 | 5588 | 12159 | 210 | | | | |
| 1478 | II | 3 | EYY46579.1 | 5590 | 12161 | 550 | EYY46580.1 | 5591 | 12162 | 210 | | | | |
| 1479 | II | 3 | EYV70454.1 | 5593 | 12164 | 550 | EYV70453.1 | 5594 | 12165 | 210 | | | | |
| 1480 | II | 3 | EYV67646.1 | 5596 | 12167 | 550 | EYV67645.1 | 5597 | 12168 | 210 | | | | |
| 1481 | II | 3 | EYV59035.1 | 5599 | 12170 | 550 | EYV59034.1 | 5600 | 12171 | 210 | | | | |
| 1482 | II | 3 | EYV37954.1 | 5602 | 12173 | 550 | EYV37955.1 | 5603 | 12174 | 210 | | | | |
| 1483 | II | 3 | EYV46019.1 | 5605 | 12176 | 550 | EYV46020.1 | 5606 | 12177 | 210 | | | | |
| 1484 | II | 3 | EYV44256.1 | 5608 | 12179 | 550 | EYV44255.1 | 5609 | 12180 | 210 | | | | |
| 1485 | II | 3 | EYV24873.1 | 5611 | 12182 | 550 | EYV24872.1 | 5612 | 12183 | 210 | | | | |
| 1486 | II | 3 | EYV22945.1 | 5614 | 12185 | 550 | EYV22946.1 | 5615 | 12186 | 210 | | | | |
| 1487 | II | 3 | EYV18170.1 | 5617 | 12188 | 550 | EYV18171.1 | 5618 | 12189 | 210 | | | | |
| 1488 | II | 3 | EYV20080.1 | 5620 | 12191 | 550 | EYV20081.1 | 5621 | 12192 | 210 | | | | |
| 1489 | II | 3 | EYV16482.1 | 5623 | 12194 | 550 | EYV16481.1 | 5624 | 12195 | 210 | | | | |
| 1490 | II | 3 | EYW83367.1 | 5626 | 12197 | 550 | EYW83368.1 | 5627 | 12198 | 210 | | | | |
| 1491 | II | 3 | EYW75519.1 | 5629 | 12200 | 550 | EYW75518.1 | 5630 | 12201 | 210 | | | | |
| 1492 | II | 3 | EYW71149.1 | 5632 | 12203 | 550 | EYW71148.1 | 5633 | 12204 | 210 | | | | |
| 1493 | II | 3 | EYW67181.1 | 5635 | 12206 | 550 | EYW67182.1 | 5636 | 12207 | 210 | | | | |
| 1494 | II | 3 | EYW64050.1 | 5638 | 12209 | 550 | EYW64051.1 | 5639 | 12210 | 210 | | | | |
| 1495 | II | 3 | EYW57178.1 | 5641 | 12212 | 550 | EYW57179.1 | 5642 | 12213 | 210 | | | | |
| 1496 | II | 3 | EYW49140.1 | 5644 | 12215 | 550 | EYW49139.1 | 5645 | 12216 | 210 | | | | |
| 1497 | II | 3 | EYW49453.1 | 5647 | 12218 | 550 | EYW49452.1 | 5648 | 12219 | 210 | | | | |
| 1498 | II | 3 | EYW43050.1 | 5650 | 12221 | 550 | EYW43051.1 | 5651 | 12222 | 210 | | | | |
| 1499 | II | 3 | EYW39160.1 | 5653 | 12224 | 550 | EYW39159.1 | 5654 | 12225 | 210 | | | | |
| 1500 | II | 3 | EYX70058.1 | 5656 | 12227 | 550 | EYX70057.1 | 5657 | 12228 | 210 | | | | |
| 1501 | II | 3 | EYX57445.1 | 5659 | 12230 | 550 | EYX57446.1 | 5660 | 12231 | 210 | | | | |
| 1502 | II | 3 | EYX54550.1 | 5662 | 12233 | 550 | EYX54551.1 | 5663 | 12234 | 210 | | | | |
| 1503 | II | 3 | EYX48136.1 | 5665 | 12236 | 550 | EYX48137.1 | 5666 | 12237 | 210 | | | | |
| 1504 | II | 3 | EYX44883.1 | 5668 | 12239 | 550 | EYX44884.1 | 5669 | 12240 | 210 | | | | |
| 1505 | II | 3 | EYX43991.1 | 5671 | 12242 | 550 | EYX43990.1 | 5672 | 12243 | 210 | | | | |
| 1506 | II | 3 | EYX33006.1 | 5674 | 12245 | 550 | EYX33007.1 | 5675 | 12246 | 210 | | | | |
| 1507 | II | 3 | EYX30698.1 | 5677 | 12248 | 550 | EYX30699.1 | 5678 | 12249 | 210 | | | | |
| 1508 | II | 3 | EYX27759.1 | 5680 | 12251 | 550 | EYX27758.1 | 5681 | 12252 | 210 | | | | |
| 1509 | II | 3 | EYX13626.1 | 5683 | 12254 | 550 | EYX13625.1 | 5684 | 12255 | 210 | | | | |
| 1510 | II | 3 | EYX12329.1 | 5686 | 12257 | 550 | EYX12330.1 | 5687 | 12258 | 210 | | | | |
| 1511 | II | 3 | EYX02202.1 | 5689 | 12260 | 550 | EYX02201.1 | 5690 | 12261 | 210 | | | | |
| 1512 | II | 3 | EYW98550.1 | 5692 | 12263 | 550 | EYW98549.1 | 5693 | 12264 | 210 | | | | |
| 1513 | II | 3 | EYW85334.1 | 5695 | 12266 | 550 | EYW85335.1 | 5696 | 12267 | 210 | | | | |
| 1514 | II | 3 | EYV84725.1 | 5698 | 12269 | 550 | EYV84726.1 | 5699 | 12270 | 210 | | | | |
| 1515 | II | 3 | EYZ76664.1 | 5701 | 12272 | 550 | EYZ76665.1 | 5702 | 12273 | 210 | | | | |
| 1516 | II | 3 | EYZ63882.1 | 5704 | 12275 | 550 | EYZ63883.1 | 5705 | 12276 | 210 | | | | |
| 1517 | II | 3 | EYZ52260.1 | 5707 | 12278 | 550 | EYZ52261.1 | 5708 | 12279 | 210 | | | | |
| 1518 | II | 3 | EYZ37414.1 | 5710 | 12281 | 550 | EYZ37413.1 | 5711 | 12282 | 210 | | | | |
| 1519 | II | 3 | EYZ38309.1 | 5713 | 12284 | 550 | EYZ38310.1 | 5714 | 12285 | 210 | | | | |
| 1520 | II | 3 | EYZ36219.1 | 5716 | 12287 | 550 | EYZ36220.1 | 5717 | 12288 | 210 | | | | |
| 1521 | II | 3 | EYZ14531.1 | 5719 | 12290 | 550 | EYZ14532.1 | 5720 | 12291 | 210 | | | | |
| 1522 | II | 3 | EZC28522.1 | 5722 | 12293 | 550 | EZC28521.1 | 5723 | 12294 | 210 | | | | |
| 1523 | II | 3 | EZB48636.1 | 5725 | 12296 | 550 | EZB48635.1 | 5726 | 12297 | 210 | | | | |
| 1524 | II | 3 | EZB05976.1 | 5728 | 12299 | 550 | EZB05977.1 | 5729 | 12300 | 210 | | | | |
| 1525 | II | 3 | EZB18141.1 | 5731 | 12302 | 550 | EZB18140.1 | 5732 | 12303 | 210 | | | | |
| 1526 | II | 3 | EZA89753.1 | 5734 | 12305 | 550 | EZA89754.1 | 5735 | 12306 | 210 | | | | |
| 1527 | II | 3 | EZB32013.1 | 5737 | 12308 | 550 | EZB32012.1 | 5738 | 12309 | 210 | | | | |
| 1528 | II | 3 | EZB20622.1 | 5740 | 12311 | 550 | EZB20623.1 | 5741 | 12312 | 210 | | | | |
| 1529 | II | 3 | EZB41522.1 | 5743 | 12314 | 550 | EZB41521.1 | 5744 | 12315 | 210 | | | | |
| 1530 | II | 3 | EZB11567.1 | 5746 | 12317 | 550 | EZB11568.1 | 5747 | 12318 | 210 | | | | |
| 1531 | II | 3 | EZB46983.1 | 5749 | 12320 | 550 | EZB46982.1 | 5750 | 12321 | 210 | | | | |
| 1532 | II | 3 | EZB04405.1 | 5752 | 12323 | 550 | EZB04406.1 | 5753 | 12324 | 210 | | | | |
| 1533 | II | 3 | EZB74688.1 | 5755 | 12326 | 550 | EZB74687.1 | 5756 | 12327 | 210 | | | | |
| 1534 | II | 3 | EZB73672.1 | 5758 | 12329 | 550 | EZB73671.1 | 5759 | 12330 | 210 | | | | |
| 1535 | II | 3 | EZB73224.1 | 5761 | 12332 | 550 | EZB73225.1 | 5762 | 12333 | 210 | | | | |
| 1536 | II | 3 | EZB87909.1 | 5764 | 12335 | 550 | EZB87908.1 | 5765 | 12336 | 210 | | | | |
| 1537 | II | 3 | EZB80137.1 | 5767 | 12338 | 550 | EZB80138.1 | 5768 | 12339 | 210 | | | | |
| 1538 | II | 3 | EZB81693.1 | 5770 | 12341 | 550 | EZB81692.1 | 5771 | 12342 | 210 | | | | |
| 1539 | II | 3 | EZB96172.1 | 5773 | 12344 | 264 | EZB96173.1 | 5774 | 12345 | 210 | | | | |
| 1540 | II | 3 | EZC15365.1 | 5776 | 12347 | 498 | EZC15364.1 | 5777 | 12348 | 210 | | | | |
| 1541 | II | 3 | EZC19641.1 | 5779 | 12350 | 550 | EZC19640.1 | 5780 | 12351 | 210 | | | | |
| 1542 | II | 3 | EZC20554.1 | 5782 | 12353 | 550 | EZC20553.1 | 5783 | 12354 | 210 | | | | |
| 1543 | II | 3 | EZC30166.1 | 5785 | 12356 | 550 | EZC30167.1 | 5786 | 12357 | 210 | | | | |
| 1544 | II | 3 | EZC37647.1 | 5788 | 12359 | 550 | EZC37648.1 | 5789 | 12360 | 210 | | | | |
| 1545 | II | 3 | EZC43981.1 | 5791 | 12362 | 550 | EZC43980.1 | 5792 | 12363 | 210 | | | | |
| 1546 | II | 3 | EZB95444.1 | 5794 | 12365 | 550 | EZB95445.1 | 5795 | 12366 | 210 | | | | |
| 1547 | II | 3 | EZC48750.1 | 5797 | 12368 | 550 | EZC48751.1 | 5798 | 12369 | 210 | | | | |
| 1548 | II | 3 | EZC62957.1 | 5800 | 12371 | 550 | EZC62958.1 | 5801 | 12372 | 210 | | | | |
| 1549 | II | 3 | EZC70420.1 | 5803 | 12374 | 550 | EZC70419.1 | 5804 | 12375 | 210 | | | | |
| 1550 | II | 3 | EZC77660.1 | 5806 | 12377 | 550 | EZC77659.1 | 5807 | 12378 | 210 | | | | |
| 1551 | II | 3 | EZC64797.1 | 5809 | 12380 | 550 | EZC64798.1 | 5810 | 12381 | 210 | | | | |
| 1552 | II | 3 | EZC90331.1 | 5812 | 12383 | 550 | EZC90330.1 | 5813 | 12384 | 210 | | | | |
| 1553 | II | 3 | EZC92769.1 | 5815 | 12386 | 550 | EZC92768.1 | 5816 | 12387 | 210 | | | | |
| 1554 | II | 3 | EZC86951.1 | 5818 | 12389 | 550 | EZC86950.1 | 5819 | 12390 | 210 | | | | |
| 1555 | II | 3 | EZC83412.1 | 5821 | 12392 | 550 | EZC83411.1 | 5822 | 12393 | 210 | | | | |
| 1556 | II | 3 | EZD75267.1 | 5824 | 12395 | 550 | EZD75266.1 | 5825 | 12396 | 210 | | | | |
| 1557 | II | 3 | EZF08562.1 | 5827 | 12398 | 550 | EZF08563.1 | 5828 | 12399 | 210 | | | | |
| 1558 | II | 3 | EZF05483.1 | 5830 | 12401 | 550 | EZF05484.1 | 5831 | 12402 | 210 | | | | |
| 1559 | II | 3 | EZE61419.1 | 5833 | 12404 | 550 | EZE61418.1 | 5834 | 12405 | 210 | | | | |
| 1560 | II | 3 | EZE88804.1 | 5836 | 12407 | 550 | EZE88803.1 | 5837 | 12408 | 210 | | | | |
| 1561 | II | 3 | EZE89447.1 | 5839 | 12410 | 550 | EZE89446.1 | 5840 | 12411 | 210 | | | | |
| 1562 | II | 3 | EZE90569.1 | 5842 | 12413 | 550 | EZE90570.1 | 5843 | 12414 | 210 | | | | |
| 1563 | II | 3 | EZD08970.1 | 5845 | 12416 | 550 | EZD08971.1 | 5846 | 12417 | 210 | | | | |
| 1564 | II | 3 | EZD16779.1 | 5848 | 12419 | 476 | EZD16778.1 | 5849 | 12420 | 210 | | | | |
| 1565 | II | 3 | EZD15759.1 | 5851 | 12422 | 550 | EZD15760.1 | 5852 | 12423 | 210 | | | | |
| 1566 | II | 3 | EZD19490.1 | 5854 | 12425 | 550 | EZD19491.1 | 5855 | 12426 | 210 | | | | |
| 1567 | II | 3 | EZD00269.1 | 5857 | 12428 | 550 | EZD00270.1 | 5858 | 12429 | 210 | | | | |
| 1568 | II | 3 | EZD85328.1 | 5860 | 12431 | 550 | EZD85327.1 | 5861 | 12432 | 210 | | | | |
| 1569 | II | 3 | EZD90122.1 | 5863 | 12434 | 550 | EZD90121.1 | 5864 | 12435 | 210 | | | | |
| 1570 | II | 3 | EZJ86906.1 | 5866 | 12437 | 550 | EZJ86912.1 | 5867 | 12438 | 205 | | | | |
| 1571 | II | 3 | EZJ76223.1 | 5869 | 12440 | 498 | EZJ76224.1 | 5870 | 12441 | 206 | | | | |
| 1572 | II | 3 | EZJ72758.1 | 5872 | 12443 | 550 | EZJ72757.1 | 5873 | 12444 | 206 | | | | |
| 1573 | II | 3 | EZK00741.1 | 5875 | 12446 | 550 | EZK00742.1 | 5876 | 12447 | 235 | | | | |
| 1574 | II | 3 | EZQ47392.1 | 5878 | 12449 | 550 | EZQ47391.1 | 5879 | 12450 | 210 | | | | |
| 1575 | II | 3 | EZQ50284.1 | 5881 | 12452 | 550 | EZQ50285.1 | 5882 | 12453 | 210 | | | | |
| 1576 | II | 3 | AHY73974.1 | 5884 | 12455 | 498 | AHY73973.1 | 5885 | 12456 | 210 | | | | |
| 1577 | II | 3 | KDA70996.1 | 5887 | 12458 | 550 | KDA70993.1 | 5888 | 12459 | 214 | | | | |
| 1578 | II | 3 | KDA57924.1 | 5890 | 12461 | 498 | KDA57923.1 | 5891 | 12462 | 210 | | | | |
| 1579 | II | 3 | KDM81019.1 | 5893 | 12464 | 550 | KDM81018.1 | 5894 | 12465 | 210 | | | | |
| 1580 | II | 3 | KDM84274.1 | 5896 | 12467 | 550 | KDM84275.1 | 5897 | 12468 | 210 | | | | |
| 1581 | II | 3 | KDT83300.1 | 5899 | 12470 | 550 | KDT83311.1 | 5900 | 12471 | 235 | | | | |
| 1582 | II | 3 | KDX42979.1 | 5902 | 12473 | 498 | KDX42980.1 | 5903 | 12474 | 235 | | | | |
| 1583 | II | 3 | KEJ21097.1 | 5905 | 12476 | 550 | KEJ21096.1 | 5906 | 12477 | 235 | | | | |
| 1584 | II | 3 | KEJ20441.1 | 5908 | 12479 | 550 | KEJ20440.1 | 5909 | 12480 | 210 | | | | |
| 1585 | II | 3 | KEM49610.1 | 5911 | 12482 | 550 | KEM49616.1 | 5912 | 12483 | 210 | | | | |
| 1586 | II | 3 | KEM85726.1 | 5914 | 12485 | 550 | KEM85727.1 | 5915 | 12486 | 210 | | | | |
| 1587 | II | 3 | KEN65095.1 | 5917 | 12488 | 550 | KEN65104.1 | 5918 | 12489 | 210 | | | | |
| 1588 | II | 3 | KEO16490.1 | 5920 | 12491 | 498 | KEO16489.1 | 5921 | 12492 | 235 | | | | |
| 1589 | II | 3 | KEO21427.1 | 5923 | 12494 | 550 | KEO21426.1 | 5924 | 12495 | 235 | | | | |
| 1590 | II | 3 | KEK80772.1 | 5926 | 12497 | 550 | KEK80773.1 | 5927 | 12498 | 235 | | | | |
| 1591 | II | 3 | KEK94609.1 | 5929 | 12500 | 550 | KEK94610.1 | 5930 | 12501 | 235 | | | | |
| 1592 | II | 3 | KEL07350.1 | 5932 | 12503 | 550 | KEL07345.1 | 5933 | 12504 | 206 | | | | |
| 1593 | II | 3 | KEL97937.1 | 5935 | 12506 | 550 | KEL97936.1 | 5936 | 12507 | 235 | | | | |
| 1594 | II | 3 | KEM08518.1 | 5938 | 12509 | 550 | KEM08517.1 | 5939 | 12510 | 235 | | | | |
| 1595 | II | 3 | AIF96932.1 | 5941 | 12512 | 550 | AIF96931.1 | 5942 | 12513 | 235 | | | | |
| 1596 | II | 3 | AIG71772.1 | 5944 | 12515 | 550 | AIG71771.1 | 5945 | 12516 | 205 | | | | |
| 1597 | II | 3 | KHI41604.1 | 5947 | 12518 | 550 | KHI41605.1 | 5948 | 12519 | 235 | | | | |
| 1598 | II | 3 | KHH50139.1 | 5950 | 12521 | 550 | KHH50140.1 | 5951 | 12522 | 235 | | | | |
| 1599 | II | 3 | KHI22225.1 | 5953 | 12524 | 550 | KHI22224.1 | 5954 | 12525 | 235 | | | | |
| 1600 | II | 3 | AJA29434.1 | 5956 | 12527 | 550 | AJA29433.1 | 5957 | 12528 | 235 | | | | |
| 1601 | II | 3 | KIG29572.1 | 5959 | 12530 | 550 | KIG29573.1 | 5960 | 12531 | 235 | | | | |
| 1602 | II | 3 | KIY28271.1 | 5962 | 12533 | 550 | KIY28270.1 | 5963 | 12534 | 235 | | | | |
| 1603 | II | 3 | KIZ09777.1 | 5965 | 12536 | 550 | KIZ09776.1 | 5966 | 12537 | 235 | | | | |
| 1604 | II | 3 | KJJ46592.1 | 5968 | 12539 | 550 | KJJ46591.1 | 5969 | 12540 | 235 | | | | |
| 1605 | II | 3 | KJW55353.1 | 5971 | 12542 | 550 | KJW55352.1 | 5972 | 12543 | 235 | | | | |
| 1606 | II | 3 | KJW51697.1 | 5974 | 12545 | 550 | KJW51698.1 | 5975 | 12546 | 235 | | | | |
| 1607 | II | 3 | KKF77971.1 | 5977 | 12548 | 550 | KKF77970.1 | 5978 | 12549 | 235 | | | | |
| 1608 | II | 3 | KKF80396.1 | 5980 | 12551 | 550 | KKF80395.1 | 5981 | 12552 | 235 | | | | |
| 1609 | II | 3 | KKK30167.1 | 5983 | 12554 | 550 | KKK30168.1 | 5984 | 12555 | 235 | | | | |
| 1610 | II | 3 | KKY44750.1 | 5986 | 12557 | 550 | KKY44749.1 | 5987 | 12558 | 235 | | | | |
| 1611 | II | 3 | KLG52812.1 | 5989 | 12560 | 550 | KLG52813.1 | 5990 | 12561 | 235 | | | | |
| 1612 | II | 3 | KNF16835.1 | 5992 | 12563 | 550 | KNF16834.1 | 5993 | 12564 | 235 | | | | |
| 1613 | II | 3 | KNF20996.1 | 5995 | 12566 | 550 | KNF20997.1 | 5996 | 12567 | 235 | | | | |
| 1614 | II | 3 | KNF39641.1 | 5998 | 12569 | 550 | KNF39642.1 | 5999 | 12570 | 235 | | | | |
| 1615 | II | 3 | KNG40957.1 | 6001 | 12572 | 550 | KNG40956.1 | 6002 | 12573 | 235 | | | | |
| 1616 | II | 3 | CTT73512.1 | 6004 | 12575 | 550 | CTT73497.1 | 6005 | 12576 | 235 | | | | |
| 1617 | II | 3 | KOZ12764.1 | 6007 | 12578 | 550 | KOZ12763.1 | 6008 | 12579 | 235 | | | | |
| 1618 | II | 3 | KOZ62646.1 | 6010 | 12581 | 550 | KOZ62645.1 | 6011 | 12582 | 235 | | | | |
| 1619 | II | 3 | KOZ92032.1 | 6013 | 12584 | 550 | KOZ92033.1 | 6014 | 12585 | 235 | | | | |
| 1620 | II | 3 | KOZ11135.1 | 6016 | 12587 | 550 | KOZ11134.1 | 6017 | 12588 | 235 | | | | |
| 1621 | II | 3 | KOZ14565.1 | 6019 | 12590 | 550 | KOZ14564.1 | 6020 | 12591 | 235 | | | | |
| 1622 | II | 3 | KOZ32808.1 | 6022 | 12593 | 550 | KOZ32807.1 | 6023 | 12594 | 235 | | | | |
| 1623 | II | 3 | KOZ23192.1 | 6025 | 12596 | 550 | KOZ23193.1 | 6026 | 12597 | 235 | | | | |
| 1624 | II | 3 | KOZ33146.1 | 6028 | 12599 | 550 | KOZ33145.1 | 6029 | 12600 | 235 | | | | |
| 1625 | II | 3 | KOZ37735.1 | 6031 | 12602 | 550 | KOZ37734.1 | 6032 | 12603 | 235 | | | | |
| 1626 | II | 3 | KOZ50073.1 | 6034 | 12605 | 550 | KOZ50074.1 | 6035 | 12606 | 235 | | | | |
| 1627 | II | 3 | KOZ47194.1 | 6037 | 12608 | 550 | KOZ47193.1 | 6038 | 12609 | 235 | | | | |
| 1628 | II | 3 | KOZ49646.1 | 6040 | 12611 | 550 | KOZ49647.1 | 6041 | 12612 | 235 | | | | |
| 1629 | II | 3 | KOZ66200.1 | 6043 | 12614 | 550 | KOZ66199.1 | 6044 | 12615 | 235 | | | | |
| 1630 | II | 3 | KOZ69677.1 | 6046 | 12617 | 550 | KOZ69678.1 | 6047 | 12618 | 235 | | | | |
| 1631 | II | 3 | KOZ74922.1 | 6049 | 12620 | 550 | KOZ74921.1 | 6050 | 12621 | 235 | | | | |
| 1632 | II | 3 | KOZ84734.1 | 6052 | 12623 | 550 | KOZ84733.1 | 6053 | 12624 | 235 | | | | |
| 1633 | II | 3 | KOZ80209.1 | 6055 | 12626 | 550 | KOZ80208.1 | 6056 | 12627 | 235 | | | | |
| 1634 | II | 3 | KOZ97678.1 | 6058 | 12629 | 550 | KOZ97679.1 | 6059 | 12630 | 235 | | | | |
| 1635 | II | 3 | KPH45898.1 | 6061 | 12632 | 550 | KPH45897.1 | 6062 | 12633 | 235 | | | | |
| 1636 | II | 3 | KPH35131.1 | 6064 | 12635 | 550 | KPH35132.1 | 6065 | 12636 | 235 | | | | |
| 1637 | II | 3 | KPH38256.1 | 6067 | 12638 | 550 | KPH38255.1 | 6068 | 12639 | 235 | | | | |
| 1638 | II | 3 | ALH93594.1 | 6070 | 12641 | 550 | ALH93593.1 | 6071 | 12642 | 235 | | | | |
| 1639 | II | 3 | KPO74169.1 | 6073 | 12644 | 550 | KPO74168.1 | 6074 | 12645 | 235 | | | | |
| 1640 | II | 3 | KPP03702.1 | 6076 | 12647 | 550 | KPP03703.1 | 6077 | 12648 | 235 | | | | |
| 1641 | II | 3 | KPP08801.1 | 6079 | 12650 | 550 | KPP08802.1 | 6080 | 12651 | 235 | | | | |
| 1642 | II | 3 | KPP18125.1 | 6082 | 12653 | 550 | KPP18126.1 | 6083 | 12654 | 235 | | | | |
| 1643 | II | 3 | KPP23766.1 | 6085 | 12656 | 550 | KPP23765.1 | 6086 | 12657 | 235 | | | | |
| 1644 | II | 3 | KPP34280.1 | 6088 | 12659 | 550 | KPP34279.1 | 6089 | 12660 | 235 | | | | |
| 1645 | II | 3 | KPP38850.1 | 6091 | 12662 | 550 | KPP38849.1 | 6092 | 12663 | 235 | | | | |
| 1646 | II | 3 | KPP49038.1 | 6094 | 12665 | 550 | KPP49037.1 | 6095 | 12666 | 235 | | | | |
| 1647 | II | 3 | KPP10066.1 | 6097 | 12668 | 550 | KPP10065.1 | 6098 | 12669 | 235 | | | | |
| 1648 | II | 3 | KPP41788.1 | 6100 | 12671 | 550 | KPP41787.1 | 6101 | 12672 | 235 | | | | |
| 1649 | II | 3 | KPP53631.1 | 6103 | 12674 | 550 | KPP53632.1 | 6104 | 12675 | 235 | | | | |
| 1650 | II | 3 | KRQ04754.1 | 6106 | 12677 | 550 | KRQ04753.1 | 6107 | 12678 | 235 | | | | |
| 1651 | II | 3 | KUG91604.1 | 6109 | 12680 | 550 | KUG91603.1 | 6110 | 12681 | 235 | | | | |
| 1652 | II | 3 | KUH02053.1 | 6112 | 12683 | 550 | KUH02054.1 | 6113 | 12684 | 235 | | | | |
| 1653 | II | 3 | KUS40191.1 | 6115 | 12686 | 550 | KUS40190.1 | 6116 | 12687 | 235 | | | | |
| 1654 | II | 3 | KUT25846.1 | 6118 | 12689 | 550 | KUT25845.1 | 6119 | 12690 | 235 | | | | |
| 1655 | II | 3 | KUT16910.1 | 6121 | 12692 | 550 | KUT16911.1 | 6122 | 12693 | 235 | | | | |
| 1656 | II | 3 | KUT50286.1 | 6124 | 12695 | 550 | KUT50285.1 | 6125 | 12696 | 235 | | | | |
| 1657 | II | 3 | KUU89821.1 | 6127 | 12698 | 550 | KUU89822.1 | 6128 | 12699 | 235 | | | | |
| 1658 | II | 3 | KUT63217.1 | 6130 | 12701 | 550 | KUT63218.1 | 6131 | 12702 | 235 | | | | |
| 1659 | II | 3 | KUU32866.1 | 6133 | 12704 | 550 | KUU32867.1 | 6134 | 12705 | 235 | | | | |
| 1660 | II | 3 | KUU24010.1 | 6136 | 12707 | 550 | KUU24009.1 | 6137 | 12708 | 235 | | | | |
| 1661 | II | 3 | KUV87991.1 | 6139 | 12710 | 550 | KUV87990.1 | 6140 | 12711 | 235 | | | | |
| 1662 | II | 3 | KUW19155.1 | 6142 | 12713 | 550 | KUW19156.1 | 6143 | 12714 | 235 | | | | |
| 1663 | II | 3 | KUW69106.1 | 6145 | 12716 | 550 | KUW69107.1 | 6146 | 12717 | 235 | | | | |
| 1664 | II | 3 | KUW47131.1 | 6148 | 12719 | 550 | KUW47132.1 | 6149 | 12720 | 235 | | | | |
| 1665 | II | 3 | AMG80376.1 | 6151 | 12722 | 550 | AMG80377.1 | 6152 | 12723 | 235 | | | | |
| 1666 | II | 3 | KXK90272.1 | 6154 | 12725 | 550 | KXK90273.1 | 6155 | 12726 | 235 | | | | |
| 1667 | II | 3 | KXP75340.1 | 6157 | 12728 | 550 | KXP75341.1 | 6158 | 12729 | 235 | | | | |
| 1668 | II | 3 | KXR06383.1 | 6160 | 12731 | 550 | KXR06382.1 | 6161 | 12732 | 235 | | | | |
| 1669 | II | 3 | KXR86340.1 | 6163 | 12734 | 550 | KXR86339.1 | 6164 | 12735 | 235 | | | | |
| 1670 | II | 3 | EYT05881.1 | 6166 | 12737 | 550 | EYT05880.1 | 6167 | 12738 | 235 | | | | |
| 1671 | II | 3 | KMV95472.1 | 6169 | 12740 | 550 | KMV95471.1 | 6170 | 12741 | 235 | | | | |
| 1672 | II | 3 | ESN46751.1 | 6172 | 12743 | 550 | ESN46750.1 | 6173 | 12744 | 235 | | | | |
| 1673 | II | 3 | KDL89510.1 | 6175 | 12746 | 550 | KDL89509.1 | 6176 | 12747 | 235 | | | | |
| 1674 | II | 3 | KMG65747.1 | 6178 | 12749 | 550 | KMG65746.1 | 6179 | 12750 | 235 | | | | |
| 1675 | II | 3 | KRR31030.1 | 6181 | 12752 | 550 | KRR31031.1 | 6182 | 12753 | 235 | | | | |
| 1676 | II | 3 | CVD67996.1 | 6184 | 12755 | 550 | CVD68041.1 | 6185 | 12756 | 205 | | | | |
| 1677 | II | 3 | CVD62450.1 | 6187 | 12758 | 550 | CVD62420.1 | 6188 | 12759 | 205 | | | | |
| 1678 | II | 3 | CVA98419.1 | 6190 | 12761 | 550 | CVA98397.1 | 6191 | 12762 | 205 | | | | |
| 1679 | II | 3 | CVB67027.1 | 6193 | 12764 | 550 | CVB66985.1 | 6194 | 12765 | 205 | | | | |
| 1680 | II | 3 | CVE07719.1 | 6196 | 12767 | 550 | CVE07671.1 | 6197 | 12768 | 205 | | | | |
| 1681 | II | 3 | CUZ34178.1 | 6199 | 12770 | 550 | CUZ34215.1 | 6200 | 12771 | 205 | | | | |
| 1682 | II | 3 | CVH03780.1 | 6202 | 12773 | 550 | CVH03759.1 | 6203 | 12774 | 205 | | | | |
| 1683 | II | 3 | CUZ32573.1 | 6205 | 12776 | 550 | CUZ32642.1 | 6206 | 12777 | 205 | | | | |
| 1684 | II | 3 | CVC01626.1 | 6208 | 12779 | 550 | CVC01593.1 | 6209 | 12780 | 205 | | | | |
| 1685 | II | 3 | CVC86950.1 | 6211 | 12782 | 550 | CVC86922.1 | 6212 | 12783 | 205 | | | | |
| 1686 | II | 3 | CVC74574.1 | 6214 | 12785 | 550 | CVC74549.1 | 6215 | 12786 | 205 | | | | |
| 1687 | II | 3 | CVC09129.1 | 6217 | 12788 | 550 | CVC09161.1 | 6218 | 12789 | 205 | | | | |
| 1688 | II | 3 | CVG04189.1 | 6220 | 12791 | 550 | CVG04225.1 | 6221 | 12792 | 205 | | | | |
| 1689 | II | 3 | CVB23886.1 | 6223 | 12794 | 550 | CVB23925.1 | 6224 | 12795 | 205 | | | | |
| 1690 | II | 3 | CVE95450.1 | 6226 | 12797 | 550 | CVE95488.1 | 6227 | 12798 | 205 | | | | |
| 1691 | II | 3 | CVG92218.1 | 6229 | 12800 | 550 | CVG92173.1 | 6230 | 12801 | 205 | | | | |
| 1692 | II | 3 | CVA05211.1 | 6232 | 12803 | 550 | CVA05242.1 | 6233 | 12804 | 205 | | | | |
| 1693 | II | 3 | CQJ21079.1 | 6235 | 12806 | 550 | CQJ21085.1 | 6236 | 12807 | 235 | | | | |
| 1694 | II | 3 | CNK85706.1 | 6238 | 12809 | 546 | CNK85680.1 | 6239 | 12810 | 235 | | | | |
| 1695 | II | 3 | KLE23459.1 | 6241 | 12812 | 590 | KLE23458.1 | 6242 | 12813 | 235 | | | | |
| 1696 | II | 3 | KNY42369.1 | 6244 | 12815 | 583 | KNY42368.1 | 6245 | 12816 | 235 | | | | |
| 1697 | II | 3 | KTL44731.1 | 6247 | 12818 | 583 | KTL44732.1 | 6248 | 12819 | 235 | | | | |
| 1698 | II | 3 | KED68169.1 | 6250 | 12821 | 583 | KED68170.1 | 6251 | 12822 | 235 | | | | |
| 1699 | II | 3 | KHF16016.1 | 6253 | 12824 | 583 | KHF16015.1 | 6254 | 12825 | 235 | | | | |
| 1700 | II | 3 | KIT58956.1 | 6256 | 12827 | 486 | KIT58955.1 | 6257 | 12828 | 235 | | | | |
| 1701 | II | 3 | KIT38898.1 | 6259 | 12830 | 486 | KIT38899.1 | 6260 | 12831 | 225 | | | | |
| 1702 | II | 3 | KJR33562.1 | 6262 | 12833 | 583 | KJR33561.1 | 6263 | 12834 | 235 | | | | |
| 1703 | II | 3 | KKX83991.1 | 6265 | 12836 | 583 | KKX83990.1 | 6266 | 12837 | 235 | | | | |
| 1704 | II | 3 | KOE91954.1 | 6268 | 12839 | 583 | KOE91953.1 | 6269 | 12840 | 235 | | | | |
| 1705 | II | 3 | KOF38061.1 | 6271 | 12842 | 583 | KOF38060.1 | 6272 | 12843 | 235 | | | | |
| 1706 | II | 3 | KON59226.1 | 6274 | 12845 | 515 | KON59157.1 | 6275 | 12846 | 237 | | | | |
| 1707 | II | 3 | KXG05869.1 | 6277 | 12848 | 583 | KXG05868.1 | 6278 | 12849 | 235 | | | | |
| 1708 | II | 3 | KYJ92316.1 | 6280 | 12851 | 583 | KYJ92315.1 | 6281 | 12852 | 235 | | | | |
| 1709 | II | 3 | EMB49752.1 | 6283 | 12854 | 414 | EMB49753.1 | 6284 | 12855 | 235 | | | | |
| 1710 | II | 3 | EDL69253.1 | 6286 | 12857 | 583 | EDL69242.1 | 6287 | 12858 | 235 | | | | |
| 1711 | II | 3 | EFM85262.1 | 6289 | 12860 | 552 | EFM85263.1 | 6290 | 12861 | 230 | | | | |
| 1712 | II | 3 | EFM93934.1 | 6292 | 12863 | 552 | EFM93935.1 | 6293 | 12864 | 230 | | | | |
| 1713 | II | 3 | EFM98321.1 | 6295 | 12866 | 552 | EFM98322.1 | 6296 | 12867 | 230 | | | | |
| 1714 | II | 3 | ABI24728.1 | 6298 | 12869 | 589 | ABI24729.1 | 6299 | 12870 | 229 | | | | |
| 1715 | II | 3 | EYA48173.1 | 6301 | 12872 | 529 | EYA48172.1 | 6302 | 12873 | 233 | | | | |
| 1716 | II | 3 | EYA75808.1 | 6304 | 12875 | 529 | EYA75712.1 | 6305 | 12876 | 233 | | | | |
| 1717 | II | 3 | EYA68803.1 | 6307 | 12878 | 527 | EYA68804.1 | 6308 | 12879 | 233 | | | | |
| 1718 | II | 3 | EYA80659.1 | 6310 | 12881 | 529 | EYA80658.1 | 6311 | 12882 | 233 | | | | |
| 1719 | II | 3 | CUA18412.1 | 6313 | 12884 | 529 | CUA18411.1 | 6314 | 12885 | 233 | | | | |
| 1720 | II | 3 | KDS43041.1 | 6316 | 12887 | 515 | KDS43042.1 | 6317 | 12888 | 233 | | | | |
| 1721 | II | 3 | KDS37991.1 | 6319 | 12890 | 515 | KDS37899.1 | 6320 | 12891 | 233 | | | | |
| 1722 | II | 3 | KDS73983.1 | 6322 | 12893 | 515 | KDS73984.1 | 6323 | 12894 | 233 | | | | |
| 1723 | II | 3 | ALF18255.1 | 6325 | 12896 | 643 | ALF18256.1 | 6326 | 12897 | 234 | | | | |
| 1724 | II | 3 | KXA24061.1 | 6328 | 12899 | 643 | KXA24060.1 | 6329 | 12900 | 234 | | | | |
| 1725 | II | 3 | EFG28532.1 | 6331 | 12902 | 711 | EFG28533.1 | 6332 | 12903 | 232 | | | | |
| 1726 | II | 3 | ADJ62020.1 | 6334 | 12905 | 435 | ADJ62019.1 | 6335 | 12906 | 232 | | | | |
| 1727 | II | 3 | KTC70124.1 | 6337 | 12908 | 498 | KTC70123.1 | 6338 | 12909 | 230 | | | | |
| 1728 | II | 3 | AFT94972.1 | 6340 | 12911 | 598 | AFT94973.1 | 6341 | 12912 | 235 | | | | |
| 1729 | II | 3 | EEX38485.1 | 6343 | 12914 | 583 | EEX38486.1 | 6344 | 12915 | 235 | | | | |
| 1730 | II | 3 | CCN78625.1 | 6346 | 12917 | 592 | CCN78626.1 | 6347 | 12918 | 236 | | | | |
| 1731 | II | 3 | CCN34617.1 | 6349 | 12920 | 592 | CCN34618.1 | 6350 | 12921 | 236 | | | | |
| 1732 | II | 3 | CCN40571.1 | 6352 | 12923 | 592 | CCN40570.1 | 6353 | 12924 | 236 | | | | |
| 1733 | II | 3 | CCN66135.1 | 6355 | 12926 | 592 | CCN66136.1 | 6356 | 12927 | 236 | | | | |
| 1734 | II | 3 | KGJ97945.1 | 6358 | 12929 | 598 | KGJ97946.1 | 6359 | 12930 | 238 | | | | |
| 1735 | II | 3 | EEP49046.1 | 6361 | 12932 | 435 | EEP51863.1 | 6362 | 12933 | 230 | | | | |
| 1736 | II | 3 | AIP07406.1 | 6364 | 12935 | 435 | AIP07455.1 | 6365 | 12936 | 230 | | | | |
| 1737 | II | 3 | KGC46655.1 | 6367 | 12938 | 435 | KGC46770.1 | 6368 | 12939 | 230 | | | | |
| 1738 | II | 3 | AIV54526.1 | 6370 | 12941 | 435 | AIV54849.1 | 6371 | 12942 | 230 | | | | |
| 1739 | II | 3 | KGU70585.1 | 6373 | 12944 | 435 | KGU70576.1 | 6374 | 12945 | 230 | | | | |
| 1740 | II | 3 | KGV18629.1 | 6376 | 12947 | 435 | KGV17582.1 | 6377 | 12948 | 230 | | | | |
| 1741 | II | 3 | KGV95069.1 | 6379 | 12950 | 435 | KGV94752.1 | 6380 | 12951 | 230 | | | | |
| 1742 | II | 3 | KGV65245.1 | 6382 | 12953 | 435 | KGV65979.1 | 6383 | 12954 | 230 | | | | |
| 1743 | II | 3 | KGV93341.1 | 6385 | 12956 | 435 | KGV92723.1 | 6386 | 12957 | 230 | | | | |
| 1744 | II | 3 | KGX53114.1 | 6388 | 12959 | 435 | KGX53127.1 | 6389 | 12960 | 230 | | | | |
| 1745 | II | 3 | KGX64948.1 | 6391 | 12962 | 435 | KGX64947.1 | 6392 | 12963 | 230 | | | | |
| 1746 | II | 3 | AJX70756.1 | 6394 | 12965 | 435 | AJX71777.1 | 6395 | 12966 | 230 | | | | |
| 1747 | II | 3 | AIA69103.1 | 6397 | 12968 | 459 | AIA69102.1 | 6398 | 12969 | 244 | | | | |
| 1748 | II | 3 | AIK12008.1 | 6400 | 12971 | 459 | AIK12007.1 | 6401 | 12972 | 244 | | | | |
| 1749 | II | 3 | KMK83438.1 | 6403 | 12974 | 459 | KMK83437.1 | 6404 | 12975 | 244 | | | | |
| 1750 | II | 3 | KGK11299.1 | 6406 | 12977 | 583 | KGK11298.1 | 6407 | 12978 | 235 | | | | |
| 1751 | II | 3 | EAR22192.1 | 6409 | 12980 | 606 | EAR22191.1 | 6410 | 12981 | 237 | | | | |
| 1752 | II | 3 | ERG19017.1 | 6412 | 12983 | 391 | ERG19018.1 | 6413 | 12984 | 217 | | | | |
| 1753 | II | 3 | ERG19053.1 | 6415 | 12986 | 599 | ERG19054.1 | 6416 | 12987 | 235 | | | | |
| 1754 | II | 3 | ERG37343.1 | 6418 | 12989 | 588 | ERG37344.1 | 6419 | 12990 | 234 | | | | |
| 1755 | II | 3 | KTD25444.1 | 6421 | 12992 | 494 | KTD25443.1 | 6422 | 12993 | 230 | | | | |
| 1756 | II | 3 | EER46085.1 | 6424 | 12995 | 586 | EER46086.1 | 6425 | 12996 | 229 | | | | |
| 1757 | II | 3 | AKZ71842.1 | 6427 | 12998 | 550 | AKZ71841.1 | 6428 | 12999 | 235 | | | | |
| 1758 | II | 3 | KJN72848.1 | 6430 | 13001 | 550 | KJN72849.1 | 6431 | 13002 | 235 | | | | |
| 1759 | II | 3 | KLQ05988.1 | 6433 | 13004 | 550 | KLQ05987.1 | 6434 | 13005 | 235 | | | | |
| 1760 | II | 3 | KHE02046.1 | 6436 | 13007 | 433 | KHE02111.1 | 6437 | 13008 | 226 | | | | |
| 1761 | II | 3 | KHN64404.1 | 6439 | 13010 | 433 | KHN64740.1 | 6440 | 13011 | 226 | | | | |
| 1762 | II | 3 | ACS83827.1 | 6442 | 13013 | 520 | ACS83826.1 | 6443 | 13014 | 248 | | | | |
| 1763 | II | 3 | EAS45749.1 | 6445 | 13016 | 585 | EAS45750.1 | 6446 | 13017 | 237 | | | | |
| 1764 | II | 3 | ALP65206.1 | 6448 | 13019 | 435 | ALP66609.1 | 6449 | 13020 | 230 | | | | |
| 1765 | II | 3 | AIO36173.1 | 6451 | 13022 | 445 | AIO34939.1 | 6452 | 13023 | 230 | | | | |
| 1766 | II | 3 | KTC93828.1 | 6454 | 13025 | 494 | KTC93827.1 | 6455 | 13026 | 230 | | | | |
| 1767 | II | 3 | KVP70159.1 | 6457 | 13028 | 435 | KVP70160.1 | 6458 | 13029 | 232 | | | | |
| 1768 | II | 3 | KVP49168.1 | 6460 | 13031 | 435 | KVP49169.1 | 6461 | 13032 | 232 | | | | |
| 1769 | II | 3 | KVQ79696.1 | 6463 | 13034 | 435 | KVQ79697.1 | 6464 | 13035 | 232 | | | | |
| 1770 | II | 3 | KVR10907.1 | 6466 | 13037 | 435 | KVR10908.1 | 6467 | 13038 | 232 | | | | |
| 1771 | II | 3 | KVR50011.1 | 6469 | 13040 | 435 | KVR50012.1 | 6470 | 13041 | 232 | | | | |
| 1772 | II | 3 | KVR54358.1 | 6472 | 13043 | 435 | KVR54359.1 | 6473 | 13044 | 232 | | | | |
| 1773 | II | 3 | KWB45018.1 | 6475 | 13046 | 435 | KWB45017.1 | 6476 | 13047 | 232 | | | | |
| 1774 | II | 3 | KWB78076.1 | 6478 | 13049 | 435 | KWB78077.1 | 6479 | 13050 | 232 | | | | |
| 1775 | II | 3 | KWD39079.1 | 6481 | 13052 | 435 | KWD39080.1 | 6482 | 13053 | 232 | | | | |
| 1776 | II | 3 | KWD33064.1 | 6484 | 13055 | 435 | KWD33065.1 | 6485 | 13056 | 232 | | | | |
| 1777 | II | 3 | KWD38753.1 | 6487 | 13058 | 435 | KWD38754.1 | 6488 | 13059 | 232 | | | | |
| 1778 | II | 3 | KWO93445.1 | 6490 | 13061 | 435 | KWO93444.1 | 6491 | 13062 | 232 | | | | |
| 1779 | II | 3 | KVX24372.1 | 6493 | 13064 | 435 | KVX24373.1 | 6494 | 13065 | 232 | | | | |
| 1780 | II | 3 | KGO04268.1 | 6496 | 13067 | 488 | KGO04269.1 | 6497 | 13068 | 233 | | | | |
| 1781 | II | 3 | ADE14195.1 | 6499 | 13070 | 606 | ADE14194.1 | 6500 | 13071 | 237 | | | | |
| 1782 | II | 3 | ADR35021.1 | 6502 | 13073 | 378 | ADR35022.1 | 6503 | 13074 | 238 | | | | |
| 1783 | II | 3 | EPF16739.1 | 6505 | 13076 | 435 | EPF16738.1 | 6506 | 13077 | 226 | | | | |
| 1784 | II | 3 | KYL32886.1 | 6508 | 13079 | 587 | KYL32887.1 | 6509 | 13080 | 234 | | | | |
| 1785 | II | 3 | ALS34707.1 | 6511 | 13082 | 588 | ALS34708.1 | 6512 | 13083 | 232 | | | | |
| 1786 | II | 3 | KOO13437.1 | 6514 | 13085 | 583 | KOO13436.1 | 6515 | 13086 | 235 | | | | |
| 1787 | II | 3 | KGA93591.1 | 6517 | 13088 | 387 | KGA93590.1 | 6518 | 13089 | 238 | | | | |
| 1788 | II | 3 | CCK76631.1 | 6520 | 13091 | 572 | CCK76632.1 | 6521 | 13092 | 234 | | | | |
| 1789 | II | 3 | CAV18530.1 | 6523 | 13094 | 590 | CAV18531.1 | 6524 | 13095 | 236 | | | | |
| 1790 | II | 3 | CEO93970.1 | 6526 | 13097 | 490 | CEO93972.1 | 6527 | 13098 | 196 | | | | |
| 1791 | II | 3 | CDT36105.1 | 6529 | 13100 | 567 | CDT36097.1 | 6530 | 13101 | 233 | | | | |
| 1792 | II | 3 | CDT66931.1 | 6532 | 13103 | 567 | CDT66922.1 | 6533 | 13104 | 233 | | | | |
| 1793 | II | 3 | EIY57316.1 | 6535 | 13106 | 529 | EIY57317.1 | 6536 | 13107 | 233 | | | | |
| 1794 | II | 3 | EPR32275.1 | 6538 | 13109 | 439 | EPR32276.1 | 6539 | 13110 | 235 | | | | |
| 1795 | II | 3 | ENO91777.1 | 6541 | 13112 | 532 | ENO91778.1 | 6542 | 13113 | 243 | | | | |
| 1796 | II | 3 | EAQ53529.1 | 6544 | 13115 | 519 | EAQ53528.1 | 6545 | 13116 | 236 | | | | |
| 1797 | II | 3 | GAA81805.1 | 6547 | 13118 | 588 | GAA81804.1 | 6548 | 13119 | 232 | | | | |
| 1798 | II | 3 | EEF80486.1 | 6550 | 13121 | 599 | EEF80469.1 | 6551 | 13122 | 212 | | | | |
| 1799 | II | 3 | KVA10031.1 | 6553 | 13124 | 435 | KVA10030.1 | 6554 | 13125 | 230 | | | | |
| 1800 | II | 3 | GAD76289.1 | 6556 | 13127 | 583 | GAD76290.1 | 6557 | 13128 | 235 | | | | |
| 1801 | II | 3 | EFM21230.1 | 6559 | 13130 | 550 | EFM21229.1 | 6560 | 13131 | 235 | | | | |
| 1802 | II | 3 | KJF90748.1 | 6562 | 13133 | 583 | KJF90749.1 | 6563 | 13134 | 235 | | | | |
| 1803 | II | 3 | KKB47519.1 | 6565 | 13136 | 508 | KKB47518.1 | 6566 | 13137 | 233 | | | | |
| 1804 | II | 3 | EIM72585.1 | 6568 | 13139 | 289 | EIM72584.1 | 6569 | 13140 | 249 | | | | |
| 1805 | II | 3 | EEX64653.1 | 6571 | 13142 | 414 | EEX64652.1 | 6572 | 13143 | 217 | | | | |
| 1806 | II | 3 | EEY99587.1 | 6574 | 13145 | 584 | EEY99586.1 | 6575 | 13146 | 217 | | | | |
| 1807 | II | 3 | EGW44491.1 | 6577 | 13148 | 425 | EGW44490.1 | 6578 | 13149 | 236 | | | | |
| 1808 | II | 3 | KHD25429.1 | 6580 | 13151 | 679 | KHD25430.1 | 6581 | 13152 | 236 | | | | |
| 1809 | II | 3 | GAL03971.1 | 6583 | 13154 | 658 | GAL03972.1 | 6584 | 13155 | 235 | | | | |
| 1810 | II | 3 | ELA08940.1 | 6586 | 13157 | 561 | ELA08939.1 | 6587 | 13158 | 230 | | | | |
| 1811 | II | 3 | AEH01975.1 | 6589 | 13160 | 407 | AEH01976.1 | 6590 | 13161 | 234 | | | | |
| 1812 | II | 3 | EKM24778.1 | 6592 | 13163 | 591 | EKM24779.1 | 6593 | 13164 | 236 | | | | |
| 1813 | II | 3 | EOD77073.1 | 6595 | 13166 | 583 | EOD77074.1 | 6596 | 13167 | 236 | | | | |
| 1814 | II | 3 | KEQ18612.1 | 6598 | 13169 | 675 | KEQ18611.1 | 6599 | 13170 | 234 | | | | |
| 1815 | II | 3 | EJF07133.1 | 6601 | 13172 | 511 | EJF07137.1 | 6602 | 13173 | 245 | | | | |
| 1816 | II | 3 | KWU01629.1 | 6604 | 13175 | 677 | KWU01630.1 | 6605 | 13176 | 236 | | | | |
| 1817 | II | 3 | KHL11033.1 | 6607 | 13178 | 435 | KHL11032.1 | 6608 | 13179 | 230 | | | | |
| 1818 | II | 3 | AIL32429.1 | 6610 | 13181 | 506 | AIL32428.1 | 6611 | 13182 | 222 | | | | |
| 1819 | II | 3 | KIM02579.1 | 6613 | 13184 | 399 | KIM02580.1 | 6614 | 13185 | 230 | | | | |
| 1820 | II | 3 | KIM12269.1 | 6616 | 13187 | 440 | KIM12268.1 | 6617 | 13188 | 250 | | | | |
| 1821 | II | 3 | EJU08777.1 | 6619 | 13190 | 659 | EJU08778.1 | 6620 | 13191 | 234 | | | | |
| 1822 | II | 3 | AJA69892.1 | 6622 | 13193 | 463 | AJA69893.1 | 6623 | 13194 | 235 | | | | |
| 1823 | II | 3 | KRG22676.1 | 6625 | 13196 | 497 | KRG22677.1 | 6626 | 13197 | 214 | | | | |
| 1824 | II | 3 | KLN64107.1 | 6628 | 13199 | 550 | KLN64108.1 | 6629 | 13200 | 235 | | | | |
| 1825 | II | 3 | KDM93486.1 | 6631 | 13202 | 560 | KDM93485.1 | 6632 | 13203 | 235 | | | | |
| 1826 | II | 3 | KLE39938.1 | 6634 | 13205 | 550 | KLE39937.1 | 6635 | 13206 | 235 | | | | |
| 1827 | II | 3 | KPZ54442.1 | 6637 | 13208 | 588 | KPZ54443.1 | 6638 | 13209 | 232 | | | | |
| 1828 | II | 3 | KQN43371.1 | 6640 | 13211 | 547 | KQN43544.1 | 6641 | 13212 | 240 | | | | |
| 1829 | II | 3 | CVJ63610.1 | 6643 | 13214 | 435 | CVJ63623.1 | 6644 | 13215 | 230 | | | | |
| 1830 | II | 3 | CVE17086.1 | 6646 | 13217 | 550 | CVE17042.1 | 6647 | 13218 | 205 | | | | |

(Part C)

| | | | | Y | | | | AC | | | |
|---|---|---|---|---|---|---|---|---|---|---|---|
| | | | | ZorD | | | | ZorE | | | |
| | V | W | X | protein | Z | AA | AB | protein | AD | AE | |
| | ZorD | PRT SEQ | DNA SEQ | length | ZorE | PRT SEQ | DNA SEQ | length | Genomic Start | Genomic End | AF |
| 1 | protein_accession | ID NO: | ID NO: | (aa) | protein_accession | ID NO: | ID NO: | (aa) | Point | Point | comments |
| 2 | | | | | | | | | 1103024 | 1107464 | |
| 3 | KGH31557.1 | 84 | 6655 | 1089 | | | | | 109913 | 117783 | |
| 4 | ABR83422.1 | 88 | 6659 | 1010 | | | | | 6232483 | 6240424 | |
| 5 | EIE46560.1 | 92 | 6663 | 1013 | | | | | 167614 | 175555 | |
| 6 | EKA35838.1 | 96 | 6667 | 1083 | | | | | 52101 | 59974 | |
| 7 | EKA51670.1 | 100 | 6671 | 1083 | | | | | 3200 | 11072 | |
| 8 | EOQ78911.1 | 104 | 6675 | 1083 | | | | | 9650 | 17440 | |
| 9 | | | | | | | | | 4597 | 8758 | |
| 10 | ERY08920.1 | 111 | 6682 | 1013 | | | | | 714819 | 722760 | |
| 11 | ERY16787.1 | 115 | 6686 | 1083 | | | | | 5165403 | 5173276 | |
| 12 | ERY21331.1 | 119 | 6690 | 1013 | | | | | 1199237 | 1207178 | |
| 13 | ERV56554.1 | 123 | 6694 | 1013 | | | | | 739445 | 747386 | |
| 14 | ERX20608.1 | 127 | 6698 | 1083 | | | | | 1361333 | 1369206 | |
| 15 | ERX27341.1 | 131 | 6702 | 1083 | | | | | 19893 | 27765 | |
| 16 | ERZ22538.1 | 135 | 6706 | 1083 | | | | | 2803767 | 2811640 | |
| 17 | ERX75593.1 | 139 | 6710 | 1083 | | | | | 1559729 | 1567601 | |
| 18 | ESR70189.1 | 143 | 6714 | 1083 | | | | | 64238 | 72111 | |
| 19 | ETU86356.1 | 147 | 6718 | 1013 | | | | | 956562 | 964503 | |
| 20 | CDI94245.1 | 151 | 6722 | 1028 | | | | | 6519543 | 6527528 | Additional ZorC homolog CDI94246.1 |
| 21 | CDI95169.1 | 155 | 6726 | 1083 | | | | | 7388834 | 7396675 | |
| 22 | EVT82479.1 | 159 | 6730 | 782 | | | | | 1 | 7247 | |
| 23 | EYU03500.1 | 163 | 6734 | 1082 | | | | | 54121 | 61990 | |
| 24 | EZN45281.1 | 167 | 6738 | 1009 | | | | | 8398 | 16691 | |
| 25 | EZO27047.1 | 171 | 6742 | 1014 | | | | | 504264 | 512118 | |
| 26 | EZP05711.1 | 175 | 6746 | 1014 | | | | | 1929997 | 1937851 | |
| 27 | CDH74039.1 | 179 | 6750 | 1028 | | | | | 47360 | 55346 | |
| 28 | CDH70664.1 | 183 | 6754 | 1083 | | | | | 20547 | 28388 | |
| 29 | KEA10738.1 | 187 | 6758 | 1013 | | | | | 116482 | 124423 | |
| 30 | AJF50274.1 | 191 | 6762 | 1083 | | | | | 1683969 | 1691810 | |
| 31 | AKE69363.1 | 195 | 6766 | 1083 | | | | | 2967762 | 2975603 | |
| 32 | AKE72975.1 | 199 | 6770 | 1028 | | | | | 7120178 | 7128164 | |
| 33 | CRQ30613.1 | 203 | 6774 | 1028 | | | | | 10264 | 18250 | |
| 34 | CRQ14077.1 | 207 | 6778 | 1083 | | | | | 20601 | 28442 | |
| 35 | CRQ20861.1 | 211 | 6782 | 1028 | | | | | 21948 | 29934 | |
| 36 | CRP04479.1 | 215 | 6786 | 1083 | | | | | 2221 | 10062 | |
| 37 | CRQ05508.1 | 219 | 6790 | 1083 | | | | | 20602 | 28443 | |
| 38 | CRP93982.1 | 223 | 6794 | 1028 | | | | | 14375 | 22361 | |
| 39 | CRP94802.1 | 227 | 6798 | 1028 | | | | | 21977 | 29963 | |
| 40 | CRQ51017.1 | 231 | 6802 | 1083 | | | | | 7536 | 15377 | |
| 41 | CRS01084.1 | 235 | 6806 | 1028 | | | | | 19796 | 27782 | |
| 42 | CRX34597.1 | 239 | 6810 | 1028 | | | | | 21981 | 29967 | |
| 43 | CRX35808.1 | 243 | 6814 | 1083 | | | | | 7536 | 15377 | |
| 44 | CRN87050.1 | 247 | 6818 | 1083 | | | | | 7536 | 15377 | |
| 45 | CRQ28286.1 | 251 | 6822 | 1083 | | | | | 20602 | 28443 | |
| 46 | CRQ21590.1 | 255 | 6826 | 1028 | | | | | 19796 | 27782 | |
| 47 | CRN79674.1 | 259 | 6830 | 1028 | | | | | 19796 | 27782 | |
| 48 | CRO17354.1 | 263 | 6834 | 1083 | | | | | 7536 | 15377 | |
| 49 | CRW80513.1 | 267 | 6838 | 1028 | | | | | 1009 | 8995 | |
| 50 | CRW81768.1 | 271 | 6842 | 1083 | | | | | 3068 | 10909 | |
| 51 | CRS64331.1 | 275 | 6846 | 1083 | | | | | 7536 | 15377 | |
| 52 | CRS61286.1 | 279 | 6850 | 1028 | | | | | 21981 | 29967 | |
| 53 | CRX10264.1 | 283 | 6854 | 1083 | | | | | 7536 | 15377 | |
| 54 | CRX00531.1 | 287 | 6858 | 1028 | | | | | 21972 | 29958 | |
| 55 | CRW55874.1 | 291 | 6862 | 1083 | | | | | 7536 | 15377 | |
| 56 | CRX16408.1 | 295 | 6866 | 1028 | | | | | 10272 | 18258 | |
| 57 | CRP10908.1 | 299 | 6870 | 1028 | | | | | 19796 | 27782 | |
| 58 | CRP41378.1 | 303 | 6874 | 1083 | | | | | 20600 | 28441 | |
| 59 | CRP14671.1 | 307 | 6878 | 1028 | | | | | 21981 | 29967 | |
| 60 | CRP47678.1 | 311 | 6882 | 1083 | | | | | 7536 | 15377 | |
| 61 | CRO88182.1 | 315 | 6886 | 1083 | | | | | 7536 | 15377 | |
| 62 | CRO42689.1 | 319 | 6890 | 1028 | | | | | 21982 | 29968 | |
| 63 | CRN87527.1 | 323 | 6894 | 1083 | | | | | 7536 | 15377 | |
| 64 | CRN66270.1 | 327 | 6898 | 1028 | | | | | 19796 | 27782 | |
| 65 | CRP41135.1 | 331 | 6902 | 1028 | | | | | 19796 | 27782 | |
| 66 | CRP68434.1 | 335 | 6906 | 1083 | | | | | 7536 | 15377 | |
| 67 | CRP76218.1 | 339 | 6910 | 1028 | | | | | 21981 | 29967 | |
| 68 | CRQ24486.1 | 343 | 6914 | 1083 | | | | | 7536 | 15377 | |
| 69 | CRP82303.1 | 347 | 6918 | 1083 | | | | | 7536 | 15377 | |
| 70 | CRP60955.1 | 351 | 6922 | 1028 | | | | | 21979 | 29965 | |
| 71 | CRP29619.1 | 355 | 6926 | 1083 | | | | | 7536 | 15377 | |
| 72 | CRO50908.1 | 359 | 6930 | 1028 | | | | | 19796 | 27782 | |
| 73 | | | | | | | | | 2197 | 6787 | |
| 74 | CRP88395.1 | 366 | 6937 | 1028 | | | | | 15384 | 23370 | |
| 75 | CRP42036.1 | 370 | 6941 | 1028 | | | | | 21981 | 29967 | |
| 76 | CRP91116.1 | 374 | 6945 | 1083 | | | | | 7536 | 15377 | |
| 77 | CRN61529.1 | 378 | 6949 | 1028 | | | | | 21982 | 29968 | |
| 78 | CRN91506.1 | 382 | 6953 | 1083 | | | | | 20602 | 28443 | |
| 79 | CRP44801.1 | 386 | 6957 | 1083 | | | | | 20602 | 28443 | |
| 80 | CRP16211.1 | 390 | 6961 | 1028 | | | | | 21981 | 29967 | |
| 81 | CRP57132.1 | 394 | 6965 | 1028 | | | | | 19796 | 27782 | |
| 82 | CRP83812.1 | 398 | 6969 | 1083 | | | | | 20602 | 28443 | |
| 83 | CRO13657.1 | 402 | 6973 | 1028 | | | | | 28606 | 36592 | |
| 84 | CRO55518.1 | 406 | 6977 | 1083 | | | | | 7536 | 15377 | |
| 85 | CRO41650.1 | 410 | 6981 | 1083 | | | | | 20602 | 28443 | |
| 86 | CRO12755.1 | 414 | 6985 | 1028 | | | | | 19796 | 27782 | |
| 87 | CRP86290.1 | 418 | 6989 | 1083 | | | | | 20602 | 28443 | |
| 88 | CRP43574.1 | 422 | 6993 | 1028 | | | | | 21972 | 29958 | |
| 89 | CRP83305.1 | 426 | 6997 | 1083 | | | | | 7536 | 15377 | |
| 90 | CRP15159.1 | 430 | 7001 | 1028 | | | | | 19797 | 27783 | |
| 91 | CRP60560.1 | 434 | 7005 | 1028 | | | | | 21977 | 29963 | |
| 92 | CRQ10764.1 | 438 | 7009 | 1083 | | | | | 7536 | 15377 | |
| 93 | CRP54752.1 | 442 | 7013 | 1083 | | | | | 7536 | 15377 | |
| 94 | CRP76522.1 | 446 | 7017 | 1028 | | | | | 19796 | 27782 | |
| 95 | CRP46003.1 | 450 | 7021 | 1083 | | | | | 20602 | 28443 | |
| 96 | CRP23116.1 | 454 | 7025 | 1028 | | | | | 21977 | 29963 | |
| 97 | CRP65472.1 | 458 | 7029 | 1028 | | | | | 19796 | 27782 | |
| 98 | CRP93795.1 | 462 | 7033 | 1083 | | | | | 7536 | 15377 | |
| 99 | CRQ27545.1 | 466 | 7037 | 1028 | | | | | 19797 | 27783 | |
| 100 | CRQ56549.1 | 470 | 7041 | 1083 | | | | | 7536 | 15377 | |
| 101 | CRP80501.1 | 474 | 7045 | 1083 | | | | | 20602 | 28443 | |
| 102 | CRP35990.1 | 478 | 7049 | 1028 | | | | | 21982 | 29968 | |
| 103 | CRO87201.1 | 482 | 7053 | 1028 | | | | | 19796 | 27782 | |
| 104 | CRP11419.1 | 486 | 7057 | 1083 | | | | | 7536 | 15377 | |
| 105 | CRP24877.1 | 490 | 7061 | 1083 | | | | | 7536 | 15377 | |
| 106 | CRO90725.1 | 494 | 7065 | 1028 | | | | | 19796 | 27782 | |
| 107 | CRP17797.1 | 498 | 7069 | 1083 | | | | | 7536 | 15377 | |
| 108 | CRO58922.1 | 502 | 7073 | 1028 | | | | | 19796 | 27782 | |
| 109 | CRP26962.1 | 506 | 7077 | 1028 | | | | | 21977 | 29963 | |
| 110 | CRP96154.1 | 510 | 7081 | 1083 | | | | | 5235 | 13076 | |
| 111 | CRN60218.1 | 514 | 7085 | 1028 | | | | | 19796 | 27782 | |
| 112 | CRO00192.1 | 518 | 7089 | 1083 | | | | | 7536 | 15377 | |
| 113 | CRO92517.1 | 522 | 7093 | 1083 | | | | | 7536 | 15377 | |
| 114 | CRO70260.1 | 526 | 7097 | 1028 | | | | | 19796 | 27782 | |
| 115 | CRP22828.1 | 530 | 7101 | 1028 | | | | | 21981 | 29967 | |
| 116 | CRP50508.1 | 534 | 7105 | 1083 | | | | | 7536 | 15377 | |
| 117 | CRO39287.1 | 538 | 7109 | 1083 | | | | | 20601 | 28442 | |
| 118 | CRO06853.1 | 542 | 7113 | 1028 | | | | | 19796 | 27782 | |
| 119 | CRP42088.1 | 546 | 7117 | 1083 | | | | | 20602 | 28443 | |
| 120 | CRP08999.1 | 550 | 7121 | 1028 | | | | | 21977 | 29963 | |
| 121 | CRQ56997.1 | 554 | 7125 | 1083 | | | | | 7536 | 15377 | |
| 122 | CRQ59380.1 | 558 | 7129 | 1028 | | | | | 19796 | 27782 | |
| 123 | CRQ91375.1 | 562 | 7133 | 1083 | | | | | 7536 | 15377 | |
| 124 | CRQ84097.1 | 566 | 7137 | 1028 | | | | | 21977 | 29963 | |
| 125 | CRQ52244.1 | 570 | 7141 | 1083 | | | | | 7536 | 15377 | |
| 126 | CRQ54306.1 | 574 | 7145 | 1028 | | | | | 19796 | 27782 | |
| 127 | CRQ62236.1 | 578 | 7149 | 1083 | | | | | 7536 | 15377 | |
| 128 | CRQ81684.1 | 582 | 7153 | 1028 | | | | | 21977 | 29963 | |
| 129 | CRQ17181.1 | 586 | 7157 | 1028 | | | | | 19796 | 27782 | |
| 130 | CRQ37577.1 | 589 | 7160 | 1083 | | | | | 20602 | 28443 | |
| 131 | CRQ86033.1 | 593 | 7164 | 1083 | | | | | 3165 | 11006 | |
| 132 | CRQ40649.1 | 597 | 7168 | 1028 | | | | | 21981 | 29967 | |
| 133 | CRQ91563.1 | 601 | 7172 | 1083 | | | | | 20602 | 28443 | |
| 134 | CRQ79048.1 | 605 | 7176 | 1028 | | | | | 21981 | 29967 | |
| 135 | CRR29633.1 | 609 | 7180 | 1083 | | | | | 7536 | 15377 | |
| 136 | CRR29050.1 | 613 | 7184 | 1028 | | | | | 10273 | 18259 | |
| 137 | CRR72814.1 | 617 | 7188 | 1028 | | | | | 19796 | 27782 | |
| 138 | CRR80212.1 | 621 | 7192 | 1083 | | | | | 7536 | 15377 | |
| 139 | CRR16565.1 | 625 | 7196 | 1083 | | | | | 20602 | 28443 | |
| 140 | CRR21548.1 | 629 | 7200 | 1028 | | | | | 21979 | 29965 | |
| 141 | CRQ92439.1 | 633 | 7204 | 1083 | | | | | 7536 | 15377 | |
| 142 | CRQ86092.1 | 637 | 7208 | 1028 | | | | | 19796 | 27782 | |
| 143 | CRQ59643.1 | 641 | 7212 | 1083 | | | | | 20602 | 28443 | |
| 144 | CRQ56267.1 | 645 | 7216 | 1028 | | | | | 19796 | 27782 | |
| 145 | CRR63880.1 | 649 | 7220 | 1083 | | | | | 20602 | 28443 | |
| 146 | CRR21712.1 | 653 | 7224 | 1028 | | | | | 21977 | 29963 | |
| 147 | | | | | | | | | 2348 | 6938 | |
| 148 | CRP93286.1 | 660 | 7231 | 1028 | | | | | 15000 | 22986 | |
| 149 | CRR90653.1 | 664 | 7235 | 1028 | | | | | 19796 | 27782 | |
| 150 | CRS00769.1 | 668 | 7239 | 1083 | | | | | 20650 | 28491 | |
| 151 | CRR57278.1 | 672 | 7243 | 1028 | | | | | 21981 | 29967 | |
| 152 | CRR67560.1 | 676 | 7247 | 1083 | | | | | 20600 | 28441 | |
| 153 | CRR87246.1 | 680 | 7251 | 1028 | | | | | 21981 | 29967 | |
| 154 | CRS01368.1 | 684 | 7255 | 1083 | | | | | 20650 | 28491 | |
| 155 | CRX14802.1 | 688 | 7259 | 1083 | | | | | 20571 | 28412 | |
| 156 | CRX13614.1 | 692 | 7263 | 1028 | | | | | 19796 | 27782 | |
| 157 | CRX26810.1 | 696 | 7267 | 1028 | | | | | 10207 | 18193 | |
| 158 | | | | | | | | | 20601 | 25191 | |
| 159 | CRP16606.1 | 703 | 7274 | 1028 | | | | | 21972 | 29958 | |
| 160 | CRP62133.1 | 707 | 7278 | 1083 | | | | | 7536 | 15377 | |
| 161 | CRO03492.1 | 711 | 7282 | 1028 | | | | | 21974 | 29960 | |
| 162 | CRO33372.1 | 715 | 7286 | 1083 | | | | | 7536 | 15377 | |
| 163 | CRS11153.1 | 719 | 7290 | 1028 | | | | | 21977 | 29963 | |
| 164 | CRS17556.1 | 723 | 7294 | 1083 | | | | | 7536 | 15377 | |
| 165 | CRR97375.1 | 727 | 7298 | 1028 | | | | | 19796 | 27782 | |
| 166 | CRS12921.1 | 731 | 7302 | 1083 | | | | | 20650 | 28491 | |
| 167 | CRP70784.1 | 735 | 7306 | 1028 | | | | | 19796 | 27782 | |
| 168 | CRO21080.1 | 739 | 7310 | 1083 | | | | | 7536 | 15377 | |
| 169 | CRO99381.1 | 743 | 7314 | 1028 | | | | | 19796 | 27782 | |
| 170 | CRP25040.1 | 747 | 7318 | 1083 | | | | | 7536 | 15377 | |
| 171 | CRP38642.1 | 751 | 7322 | 1083 | | | | | 7536 | 15377 | |
| 172 | CRP11550.1 | 755 | 7326 | 1028 | | | | | 21982 | 29968 | |
| 173 | CRP98584.1 | 759 | 7330 | 1083 | | | | | 20650 | 28491 | |
| 174 | CRP72862.1 | 763 | 7334 | 1028 | | | | | 21977 | 29963 | |
| 175 | CRX06581.1 | 767 | 7338 | 1028 | | | | | 19796 | 27782 | |
| 176 | CRX13436.1 | 771 | 7342 | 1083 | | | | | 20650 | 28491 | |
| 177 | CRR85682.1 | 775 | 7346 | 1028 | | | | | 21981 | 29967 | |
| 178 | CRR95301.1 | 779 | 7350 | 1083 | | | | | 7536 | 15377 | |
| 179 | CRR86731.1 | 783 | 7354 | 1083 | | | | | 7536 | 15377 | |
| 180 | CRR89302.1 | 787 | 7358 | 1028 | | | | | 19796 | 27782 | |
| 181 | CRS01767.1 | 791 | 7362 | 1028 | | | | | 19796 | 27782 | |
| 182 | CRS11319.1 | 795 | 7366 | 1083 | | | | | 7536 | 15377 | |
| 183 | CRR80885.1 | 799 | 7370 | 1028 | | | | | 21985 | 29971 | |
| 184 | CRR92362.1 | 803 | 7374 | 1083 | | | | | 7536 | 15377 | |
| 185 | CRR30192.1 | 807 | 7378 | 1083 | | | | | 7536 | 15377 | |
| 186 | CRS13888.1 | 811 | 7382 | 1028 | | | | | 19797 | 27783 | |
| 187 | CRS13748.1 | 815 | 7386 | 1083 | | | | | 7536 | 15377 | |
| 188 | CRR98713.1 | 819 | 7390 | 1028 | | | | | 19796 | 27782 | |
| 189 | CRS06172.1 | 823 | 7394 | 1028 | | | | | 21977 | 29963 | |
| 190 | CRS13985.1 | 827 | 7398 | 1083 | | | | | 20602 | 28443 | |
| 191 | CRW73996.1 | 831 | 7402 | 617 | | | | | 9779 | 16532 | |
| 192 | CRX24341.1 | 835 | 7406 | 1083 | | | | | 20602 | 28443 | |
| 193 | CRX24406.1 | 839 | 7410 | 1083 | | | | | 7536 | 15377 | |
| 194 | CRX17822.1 | 843 | 7414 | 1028 | | | | | 15348 | 23334 | |
| 195 | CRR62878.1 | 847 | 7418 | 1083 | | | | | 7536 | 15377 | |
| 196 | CRX06818.1 | 851 | 7422 | 1028 | | | | | 21984 | 29970 | |
| 197 | CRX13750.1 | 855 | 7426 | 1083 | | | | | 20602 | 28443 | |
| 198 | CRR17545.1 | 859 | 7430 | 1083 | | | | | 6790 | 14631 | |
| 199 | CRQ30075.1 | 863 | 7434 | 1028 | | | | | 10239 | 18225 | |
| 200 | CRR51884.1 | 867 | 7438 | 1083 | | | | | 7536 | 15377 | |
| 201 | CRQ97126.1 | 871 | 7442 | 1028 | | | | | 21982 | 29968 | |
| 202 | KQJ58849.1 | 875 | 7446 | 1012 | | | | | 96 | 8034 | |
| 203 | KRU98871.1 | 879 | 7450 | 1083 | | | | | 4551 | 12425 | |
| 204 | KRV03413.1 | 883 | 7454 | 1083 | | | | | 10551 | 18423 | |
| 205 | KRU83197.1 | 887 | 7458 | 1083 | | | | | 3589 | 11464 | |
| 206 | KRU92654.1 | 891 | 7462 | 1083 | | | | | 4551 | 12425 | |
| 207 | KSD25192.1 | 895 | 7466 | 1013 | | | | | 113233 | 121174 | |
| 208 | KSD74105.1 | 899 | 7470 | 1013 | | | | | 106671 | 114764 | |
| 209 | KSD60221.1 | 903 | 7474 | 1028 | | | | | 115376 | 123362 | |
| 210 | KSD87955.1 | 907 | 7478 | 1083 | | | | | 7720 | 15561 | |
| 211 | KSD88702.1 | 911 | 7482 | 1028 | | | | | 20150 | 28136 | |
| 212 | KSD50143.1 | 915 | 7486 | 1083 | | | | | 7720 | 15561 | |
| 213 | KSD56742.1 | 919 | 7490 | 1028 | | | | | 202494 | 210480 | |
| 214 | KSE06416.1 | 923 | 7494 | 1028 | | | | | 691615 | 699601 | |
| 215 | KSD97267.1 | 927 | 7498 | 1083 | | | | | 8459 | 16300 | |
| 216 | KSE55323.1 | 931 | 7502 | 1083 | | | | | 7720 | 15561 | |
| 217 | KSE57197.1 | 935 | 7506 | 1028 | | | | | 20032 | 28018 | |
| 218 | KSE67394.1 | 939 | 7510 | 1083 | | | | | 7720 | 15561 | |
| 219 | KSE22577.1 | 943 | 7514 | 1083 | | | | | 7720 | 15561 | |
| 220 | KSE22792.1 | 947 | 7518 | 1028 | | | | | 19980 | 27966 | |
| 221 | KSG55973.1 | 951 | 7522 | 1013 | | | | | 113233 | 121174 | |
| 222 | KSH11348.1 | 955 | 7526 | 1013 | | | | | 114765 | 122706 | |
| 223 | KSC39035.1 | 959 | 7530 | 1083 | | | | | 3729 | 11602 | |
| 224 | KSC26156.1 | 963 | 7534 | 1083 | | | | | 607382 | 615223 | |
| 225 | KSC92705.1 | 967 | 7538 | 1013 | | | | | 113233 | 121174 | |
| 226 | KSD59504.1 | 971 | 7542 | 1028 | | | | | 20152 | 28138 | |
| 227 | KSD58173.1 | 975 | 7546 | 1083 | | | | | 7720 | 15561 | |
| 228 | KSE83339.1 | 979 | 7550 | 1013 | | | | | 111993 | 119934 | |
| 229 | KSI47362.1 | 983 | 7554 | 1083 | | | | | 26399 | 34240 | |
| 230 | KSI07555.1 | 987 | 7558 | 1083 | | | | | 7720 | 15561 | |
| 231 | KSJ10821.1 | 991 | 7562 | 1028 | | | | | 28779 | 36765 | |
| 232 | KSJ26232.1 | 995 | 7566 | 1013 | | | | | 280039 | 287980 | |
| 233 | KSJ98816.1 | 999 | 7570 | 1083 | | | | | 178760 | 186632 | |
| 234 | KSK91644.1 | 1003 | 7574 | 1083 | | | | | 44277 | 52118 | |
| 235 | KSL06913.1 | 1007 | 7578 | 1083 | | | | | 6696 | 14569 | |
| 236 | KSM47318.1 | 1011 | 7582 | 1083 | | | | | 186153 | 194025 | |
| 237 | KSM41522.1 | 1015 | 7586 | 1013 | | | | | 174276 | 182369 | |
| 238 | KSN32762.1 | 1019 | 7590 | 1083 | | | | | 20786 | 28627 | |
| 239 | KSN33323.1 | 1023 | 7594 | 1028 | | | | | 20152 | 28138 | |
| 240 | KSN27909.1 | 1027 | 7598 | 1083 | | | | | 5029 | 12870 | |
| 241 | KSN02520.1 | 1031 | 7602 | 1014 | | | | | 88424 | 96278 | |
| 242 | KSN94645.1 | 1035 | 7606 | 1083 | | | | | 6822 | 14695 | |
| 243 | KSN59776.1 | 1039 | 7610 | 1028 | | | | | 19980 | 27966 | |
| 244 | KSN68238.1 | 1043 | 7614 | 1083 | | | | | 678802 | 686643 | |
| 245 | KSO78874.1 | 1047 | 7618 | 1083 | | | | | 6821 | 14694 | |
| 246 | KSO73923.1 | 1051 | 7622 | 1083 | | | | | 7720 | 15561 | |
| 247 | KSO74311.1 | 1055 | 7626 | 1028 | | | | | 28768 | 36754 | |
| 248 | KSO93084.1 | 1059 | 7630 | 1028 | | | | | 19851 | 27837 | |
| 249 | KSO91842.1 | 1063 | 7634 | 1083 | | | | | 7720 | 15561 | |
| 250 | KSP60334.1 | 1067 | 7638 | 1028 | | | | | 19084 | 27070 | |
| 251 | KSP82593.1 | 1071 | 7642 | 1009 | | | | | 65229 | 73525 | |
| 252 | KSQ11853.1 | 1075 | 7646 | 1083 | | | | | 262790 | 270663 | |
| 253 | KSN68772.1 | 1079 | 7650 | 1083 | | | | | 6822 | 14695 | |
| 254 | KSO40827.1 | 1083 | 7654 | 1013 | | | | | 176313 | 184406 | |
| 255 | KSQ48397.1 | 1087 | 7658 | 1028 | | | | | 29036 | 37022 | |
| 256 | KSQ47081.1 | 1091 | 7662 | 1083 | | | | | 7720 | 15561 | |
| 257 | KSQ03905.1 | 1095 | 7666 | 1028 | | | | | 29276 | 37262 | |
| 258 | KSQ01965.1 | 1099 | 7670 | 1083 | | | | | 7720 | 15561 | |
| 259 | KSR61591.1 | 1103 | 7674 | 1013 | | | | | 101987 | 110080 | |
| 260 | KSR90899.1 | 1107 | 7678 | 1013 | | | | | 112375 | 120316 | |
| 261 | KSR87676.1 | 1111 | 7682 | 1083 | | | | | 6822 | 14695 | |
| 262 | KSR56103.1 | 1115 | 7686 | 1083 | | | | | 7720 | 15561 | |
| 263 | KSR68840.1 | 1119 | 7690 | 1028 | | | | | 691615 | 699601 | |
| 264 | KSS83645.1 | 1123 | 7694 | 1028 | | | | | 28814 | 36800 | |
| 265 | KSS82294.1 | 1127 | 7698 | 1083 | | | | | 7720 | 15561 | |
| 266 | KSS65849.1 | 1131 | 7702 | 1083 | | | | | 7720 | 15561 | |
| 267 | KSS71071.1 | 1135 | 7706 | 1028 | | | | | 65766 | 73752 | |
| 268 | KSS83668.1 | 1139 | 7710 | 1083 | | | | | 7720 | 15561 | |
| 269 | KSS97186.1 | 1143 | 7714 | 1028 | | | | | 691552 | 699538 | |
| 270 | KSS68539.1 | 1147 | 7718 | 1083 | | | | | 7720 | 15561 | |
| 271 | KSS64136.1 | 1151 | 7722 | 1028 | | | | | 303502 | 311488 | |
| 272 | KST02404.1 | 1155 | 7726 | 1028 | | | | | 20083 | 28069 | |
| 273 | KST01503.1 | 1159 | 7730 | 1083 | | | | | 7720 | 15561 | |
| 274 | KST09050.1 | 1163 | 7734 | 1028 | | | | | 28768 | 36754 | |
| 275 | KST07353.1 | 1167 | 7738 | 1083 | | | | | 7719 | 15560 | |
| 276 | KSR39891.1 | 1171 | 7742 | 1028 | | | | | 123377 | 131363 | |
| 277 | KST03846.1 | 1175 | 7746 | 1083 | | | | | 7720 | 15561 | |
| 278 | KST05248.1 | 1179 | 7750 | 1028 | | | | | 28768 | 36754 | |
| 279 | KSS85818.1 | 1183 | 7754 | 1028 | | | | | 20152 | 28138 | |
| 280 | KSS83935.1 | 1187 | 7758 | 1083 | | | | | 7720 | 15561 | |
| 281 | KTF54399.1 | 1191 | 7762 | 1028 | | | | | 20040 | 28026 | |
| 282 | KTF49808.1 | 1195 | 7766 | 1083 | | | | | 7726 | 15567 | |
| 283 | KTK55769.1 | 1199 | 7770 | 964 | | | | | 5885944 | 5897844 | |
| 284 | ALZ13981.1 | 1203 | 7774 | 1009 | | | | | 3432864 | 3441160 | |
| 285 | ALY33853.1 | 1207 | 7778 | 1082 | | | | | 398410 | 406279 | |
| 286 | ALY39463.1 | 1211 | 7782 | 1083 | | | | | 155293 | 163134 | |
| 287 | ALY43154.1 | 1215 | 7786 | 1013 | | | | | 4323402 | 4331343 | |
| 288 | | | | | | | | | 3032150 | 3036740 | |
| 289 | KWZ69448.1 | 1221 | 7792 | 1013 | | | | | 10132 | 18224 | |
| 290 | KXG16568.1 | 1225 | 7796 | 1013 | | | | | 153843 | 161784 | |
| 291 | KYO75363.1 | 1229 | 7800 | 1028 | | | | | 19761 | 27747 | |
| 292 | KIS48445.1 | 1232 | 7803 | 536 | | | | | 2364174 | 2369453 | |
| 293 | KVA56603.1 | 1236 | 7807 | 1198 | | | | | 199542 | 207683 | |
| 294 | KVC33768.1 | 1240 | 7811 | 860 | | | | | 118414 | 125547 | |
| 295 | AEV65171.1 | 1244 | 7815 | 1082 | | | | | 6013571 | 6021027 | |
| 296 | KGE64071.1 | 1248 | 7819 | 1082 | | | | | 75257 | 83079 | |
| 297 | KWV80503.1 | 1252 | 7823 | 1009 | | | | | 1368440 | 1376687 | |
| 298 | ABQ80735.1 | 1256 | 7827 | 1082 | | | | | 5169632 | 5177451 | |
| 299 | AFK68694.1 | 1260 | 7831 | 1083 | | | | | 1915596 | 1923415 | |
| 300 | EMR48533.1 | 1264 | 7835 | 1012 | | | | | 523291 | 531481 | |
| 301 | AGA73020.1 | 1268 | 7839 | 1095 | | | | | 2309435 | 2317296 | |
| 302 | KTC24574.1 | 1272 | 7843 | 1009 | | | | | 91397 | 99402 | |
| 303 | ABP79170.1 | 1276 | 7847 | 1012 | | | | | 1580205 | 1591257 | Additional ZorC homolog ABP79169.1 |
| 304 | AEA83400.1 | 1280 | 7851 | 1012 | | | | | 1567955 | 1576354 | |
| 305 | EHY79733.1 | 1284 | 7855 | 1012 | | | | | 65479 | 73878 | |
| 306 | AFM32809.1 | 1288 | 7859 | 1012 | | | | | 1676860 | 1685262 | |
| 307 | EWC39444.1 | 1292 | 7863 | 1083 | | | | | 336964 | 344689 | |
| 308 | EPL62185.1 | 1295 | 7866 | 1012 | | | | | 213132 | 221531 | |
| 309 | EPM44378.1 | 1299 | 7870 | 1082 | | | | | 14136 | 21754 | |
| 310 | EPN29006.1 | 1303 | 7874 | 177 | | | | | 667 | 5568 | |
| 311 | EPN47281.1 | 1307 | 7878 | 183 | | | | | 2221 | 7140 | |
| 312 | EPN38586.1 | 1311 | 7882 | 184 | | | | | 2215 | 7137 | |
| 313 | EPN31619.1 | 1315 | 7886 | 928 | | | | | 16485 | 30385 | longer system - ZorD annotated manually |
| 314 | EPN22778.1 | 1319 | 7890 | 1082 | | | | | 16485 | 24103 | |
| 315 | EPN13935.1 | 1323 | 7894 | 1082 | | | | | 1746 | 9364 | |
| 316 | EPM64845.1 | 1327 | 7898 | 1082 | | | | | 677 | 8295 | |
| 317 | KFE44520.1 | 1331 | 7902 | 1082 | | | | | 131424 | 139246 | |
| 318 | KTC49635.1 | 1335 | 7906 | 1082 | | | | | 2323 | 10154 | |
| 319 | AAM40750.1 | 1339 | 7910 | 1065 | | | | | 1688713 | 1696136 | |
| 320 | AAY49834.1 | 1343 | 7914 | 1065 | | | | | 3347629 | 3355052 | |
| 321 | AKS18352.1 | 1347 | 7918 | 641 | | | | | 3124168 | 3131591 | |
| 322 | ACP24375.1 | 1351 | 7922 | 1072 | | | | | 631821 | 638722 | |
| 323 | | | | | | | | | 41480 | 45803 | |
| 324 | KUM27285.1 | 1358 | 7929 | 970 | | | | | 191211 | 198647 | |
| 325 | CDZ72585.1 | 1362 | 7933 | 1033 | | | | | 110001 | 117427 | |
| 326 | ACK84142.1 | 1366 | 7937 | 1033 | | | | | 3482023 | 3489384 | |
| 327 | CAH15305.1 | 1370 | 7941 | 1128 | | | | | 1195308 | 1202768 | |
| 328 | CCD05129.1 | 1374 | 7945 | 1128 | | | | | 1099307 | 1106704 | |
| 329 | CZL99023.1 | 1378 | 7949 | 1128 | | | | | 8467 | 15864 | |
| 330 | CZN28496.1 | 1382 | 7953 | 1128 | | | | | 8467 | 15864 | |
| 331 | CZP40238.1 | 1386 | 7957 | 1128 | | | | | 8467 | 15864 | |
| 332 | CZP31232.1 | 1390 | 7961 | 1128 | | | | | 37176 | 44573 | |
| 333 | CZP19776.1 | 1394 | 7965 | 1128 | | | | | 8467 | 15864 | |
| 334 | CZN56551.1 | 1398 | 7969 | 1128 | | | | | 8467 | 15864 | |
| 335 | CZN21905.1 | 1402 | 7973 | 1128 | | | | | 8467 | 15864 | |
| 336 | CZP49331.1 | 1406 | 7977 | 1128 | | | | | 8467 | 15864 | |
| 337 | CZP61158.1 | 1410 | 7981 | 1128 | | | | | 37472 | 44869 | |
| 338 | CZN58367.1 | 1414 | 7985 | 1128 | | | | | 37472 | 44869 | |
| 339 | CZO62490.1 | 1418 | 7989 | 1128 | | | | | 37166 | 44563 | |
| 340 | CZO85517.1 | 1422 | 7993 | 1128 | | | | | 37472 | 44869 | |
| 341 | CZN18828.1 | 1426 | 7997 | 1128 | | | | | 37183 | 44580 | |
| 342 | CZO33299.1 | 1430 | 8001 | 1128 | | | | | 37166 | 44563 | |
| 343 | CZN48822.1 | 1434 | 8005 | 1128 | | | | | 148086 | 155483 | |
| 344 | CZO35416.1 | 1438 | 8009 | 1128 | | | | | 37456 | 44853 | |
| 345 | CZL93564.1 | 1442 | 8013 | 1128 | | | | | 131968 | 139365 | |
| 346 | CZH31874.1 | 1446 | 8017 | 1128 | | | | | 8467 | 15864 | |
| 347 | CZG09164.1 | 1450 | 8021 | 1129 | | | | | 167538 | 174938 | |
| 348 | CZO58072.1 | 1454 | 8025 | 1128 | | | | | 8467 | 15864 | |
| 349 | CZP31158.1 | 1458 | 8029 | 1128 | | | | | 677 | 8074 | |
| 350 | CZP25160.1 | 1462 | 8033 | 1128 | | | | | 37183 | 44580 | |
| 351 | CZO87108.1 | 1466 | 8037 | 1128 | | | | | 37166 | 44563 | |
| 352 | CZP12686.1 | 1470 | 8041 | 1128 | | | | | 37456 | 44853 | |
| 353 | CZO76680.1 | 1474 | 8045 | 1128 | | | | | 8438 | 15835 | |
| 354 | CZM75981.1 | 1478 | 8049 | 1128 | | | | | 8467 | 15864 | |
| 355 | CZM80502.1 | 1482 | 8053 | 1128 | | | | | 37456 | 44853 | |
| 356 | CZO03187.1 | 1486 | 8057 | 1128 | | | | | 37166 | 44563 | |
| 357 | CZO99623.1 | 1490 | 8061 | 1128 | | | | | 8467 | 15864 | |
| 358 | CZN77929.1 | 1494 | 8065 | 1128 | | | | | 8467 | 15864 | |
| 359 | CZO69927.1 | 1498 | 8069 | 1128 | | | | | 37456 | 44853 | |
| 360 | CZO98759.1 | 1502 | 8073 | 1128 | | | | | 37472 | 44869 | |
| 361 | CZN87263.1 | 1506 | 8077 | 1128 | | | | | 37472 | 44869 | |
| 362 | CZO28947.1 | 1510 | 8081 | 1128 | | | | | 8467 | 15864 | |
| 363 | CZO58257.1 | 1514 | 8085 | 1128 | | | | | 37166 | 44563 | |
| 364 | CZM99444.1 | 1518 | 8089 | 1128 | | | | | 8467 | 15864 | |
| 365 | CZN97615.1 | 1522 | 8093 | 1128 | | | | | 37183 | 44580 | |
| 366 | CZN56267.1 | 1526 | 8097 | 1128 | | | | | 148086 | 155483 | |
| 367 | CZP07331.1 | 1530 | 8101 | 1128 | | | | | 8467 | 15864 | |
| 368 | CZP63613.1 | 1534 | 8105 | 1128 | | | | | 37440 | 44837 | |
| 369 | CZM58531.1 | 1538 | 8109 | 1128 | | | | | 8490 | 15887 | |
| 370 | CZN95629.1 | 1542 | 8113 | 1128 | | | | | 8441 | 15838 | |
| 371 | CZN53220.1 | 1546 | 8117 | 1128 | | | | | 37166 | 44563 | |
| 372 | CZN21830.1 | 1550 | 8121 | 1128 | | | | | 37472 | 44869 | |
| 373 | CZO53942.1 | 1554 | 8125 | 1128 | | | | | 8467 | 15864 | |
| 374 | CZO83111.1 | 1558 | 8129 | 1128 | | | | | 37472 | 44869 | |
| 375 | CZM80568.1 | 1562 | 8133 | 1128 | | | | | 8467 | 15864 | |
| 376 | CZN76211.1 | 1566 | 8137 | 1128 | | | | | 8467 | 15864 | |
| 377 | CZN17285.1 | 1570 | 8141 | 1128 | | | | | 37472 | 44869 | |
| 378 | CZN08698.1 | 1574 | 8145 | 1128 | | | | | 8472 | 15869 | |
| 379 | CZN07686.1 | 1578 | 8149 | 1128 | | | | | 8467 | 15864 | |
| 380 | CZN27100.1 | 1582 | 8153 | 1128 | | | | | 37456 | 44853 | |
| 381 | CZO91499.1 | 1586 | 8157 | 1128 | | | | | 8467 | 15864 | |
| 382 | CZN16051.1 | 1590 | 8161 | 1128 | | | | | 8467 | 15864 | |
| 383 | CZN38967.1 | 1594 | 8165 | 1128 | | | | | 8467 | 15864 | |
| 384 | CZI18617.1 | 1598 | 8169 | 1128 | | | | | 8467 | 15864 | |
| 385 | CZL86257.1 | 1602 | 8173 | 1128 | | | | | 8467 | 15864 | |
| 386 | CZM41687.1 | 1606 | 8177 | 1128 | | | | | 37166 | 44563 | |
| 387 | CZM78452.1 | 1610 | 8181 | 1128 | | | | | 8467 | 15864 | |
| 388 | CZM56718.1 | 1614 | 8185 | 1128 | | | | | 8467 | 15864 | |
| 389 | CZM62068.1 | 1618 | 8189 | 1128 | | | | | 37472 | 44869 | |
| 390 | CZM06036.1 | 1622 | 8193 | 1128 | | | | | 8467 | 15864 | |
| 391 | CZM98015.1 | 1626 | 8197 | 1128 | | | | | 37456 | 44853 | |
| 392 | CZN32097.1 | 1630 | 8201 | 1128 | | | | | 37183 | 44580 | |
| 393 | CZN27816.1 | 1634 | 8205 | 1128 | | | | | 37183 | 44580 | |
| 394 | CZM96679.1 | 1638 | 8209 | 1128 | | | | | 8467 | 15864 | |
| 395 | CZN17375.1 | 1642 | 8213 | 1128 | | | | | 37166 | 44563 | |
| 396 | CZN17807.1 | 1646 | 8217 | 1128 | | | | | 8467 | 15864 | |
| 397 | CZN51221.1 | 1650 | 8221 | 1128 | | | | | 8467 | 15864 | |
| 398 | CZN80042.1 | 1654 | 8225 | 1128 | | | | | 8467 | 15864 | |
| 399 | CZN83589.1 | 1658 | 8229 | 1128 | | | | | 37183 | 44580 | |
| 400 | CZN87872.1 | 1662 | 8233 | 1128 | | | | | 8408 | 15805 | |
| 401 | CZN94066.1 | 1666 | 8237 | 1128 | | | | | 37183 | 44580 | |
| 402 | CZO07198.1 | 1670 | 8241 | 1128 | | | | | 37510 | 44907 | |
| 403 | CZO11915.1 | 1674 | 8245 | 1128 | | | | | 8467 | 15864 | |
| 404 | CZO09323.1 | 1678 | 8249 | 1128 | | | | | 8467 | 15864 | |
| 405 | CZN87980.1 | 1682 | 8253 | 1128 | | | | | 8500 | 15897 | |
| 406 | CZO32215.1 | 1686 | 8257 | 1128 | | | | | 37183 | 44580 | |
| 407 | CZO07237.1 | 1690 | 8261 | 1128 | | | | | 8467 | 15864 | |
| 408 | CZO04106.1 | 1694 | 8265 | 1128 | | | | | 8472 | 15869 | |
| 409 | CZN90727.1 | 1698 | 8269 | 1128 | | | | | 37183 | 44580 | |
| 410 | CZP18336.1 | 1702 | 8273 | 1128 | | | | | 8467 | 15864 | |
| 411 | CZP26215.1 | 1706 | 8277 | 1128 | | | | | 8467 | 15864 | |
| 412 | CZP25407.1 | 1710 | 8281 | 1128 | | | | | 8467 | 15864 | |
| 413 | CZN32022.1 | 1714 | 8285 | 1128 | | | | | 8467 | 15864 | |
| 414 | CZO49291.1 | 1718 | 8289 | 1128 | | | | | 37183 | 44580 | |
| 415 | CZO32798.1 | 1722 | 8293 | 1128 | | | | | 8467 | 15864 | |
| 416 | CZO62433.1 | 1726 | 8297 | 1128 | | | | | 37166 | 44563 | |
| 417 | CZO58360.1 | 1730 | 8301 | 1128 | | | | | 37456 | 44853 | |
| 418 | CZO85770.1 | 1734 | 8305 | 1128 | | | | | 8467 | 15864 | |
| 419 | CZP51187.1 | 1738 | 8309 | 1128 | | | | | 37440 | 44837 | |
| 420 | CZO57236.1 | 1742 | 8313 | 1128 | | | | | 148086 | 155483 | |
| 421 | CZO45203.1 | 1746 | 8317 | 1128 | | | | | 8467 | 15864 | |
| 422 | CZO91301.1 | 1750 | 8321 | 1128 | | | | | 37472 | 44869 | |
| 423 | CZN53915.1 | 1754 | 8325 | 1128 | | | | | 37183 | 44580 | |
| 424 | CZN51502.1 | 1758 | 8329 | 1128 | | | | | 37440 | 44837 | |
| 425 | CZO76121.1 | 1762 | 8333 | 1128 | | | | | 37183 | 44580 | |
| 426 | CZR30106.1 | 1766 | 8337 | 1128 | | | | | 435 | 7832 | |
| 427 | KTD18863.1 | 1770 | 8341 | 1125 | | | | | 828 | 8210 | |
| 428 | | | | | | | | | 5615 | 9801 | |
| 429 | | | | | | | | | 2638 | 6824 | |
| 430 | EMT94536.1 | 1780 | 8351 | 1067 | | | | | 7878 | 15300 | |
| 431 | | | | | | | | | 1 | 3978 | |
| 432 | EMU02179.1 | 1787 | 8358 | 1067 | | | | | 2863 | 10285 | |
| 433 | EXB30085.1 | 1791 | 8362 | 1067 | | | | | 38504 | 45935 | |
| 434 | EXB35596.1 | 1795 | 8366 | 1067 | | | | | 190269 | 197700 | |
| 435 | EXB05629.1 | 1799 | 8370 | 1067 | | | | | 29426 | 36857 | |
| 436 | EXB92792.1 | 1803 | 8374 | 1067 | | | | | 600238 | 607669 | |
| 437 | EXB73474.1 | 1807 | 8378 | 1067 | | | | | 187080 | 194511 | |
| 438 | EXE59931.1 | 1811 | 8382 | 1067 | | | | | 198540 | 205983 | |
| 439 | EXE71115.1 | 1815 | 8386 | 717 | | | | | 5498 | 11879 | |
| 440 | KCX96447.1 | 1819 | 8390 | 1067 | | | | | 1709 | 9140 | |
| 441 | KHO17161.1 | 1823 | 8394 | 1067 | | | | | 15406 | 22828 | |
| 442 | KLT90614.1 | 1827 | 8398 | 1067 | | | | | 4629 | 12051 | |
| 443 | KRI43457.1 | 1831 | 8402 | 1068 | | | | | 19553 | 26974 | |
| 444 | KRJ35149.1 | 1835 | 8406 | 1067 | | | | | 9974 | 17405 | |
| 445 | AMN00866.1 | 1839 | 8410 | 1070 | | | | | 1372997 | 1380433 | |
| 446 | KDB58589.1 | 1843 | 8414 | 1300 | | | | | 192445 | 200726 | |
| 447 | KDD86367.1 | 1847 | 8418 | 1293 | | | | | 46614 | 54916 | |
| 448 | ACV76376.1 | 1851 | 8422 | 1034 | | | | | 19297 | 26557 | |
| 449 | AEI38593.1 | 1855 | 8426 | 1034 | | | | | 2402 | 9662 | |
| 450 | KTJ39357.1 | 1859 | 8430 | 1081 | | | | | 145121 | 152985 | |
| 451 | KUQ09079.1 | 1863 | 8434 | 1079 | | | | | 68203 | 76536 | |
| 452 | KYN64183.1 | 1867 | 8438 | 1042 | | | | | 702125 | 709468 | |
| 453 | AFP68827.1 | 1871 | 8442 | 1080 | | | | | 1024953 | 1032814 | Additional ZorC homolog AFP68828.1 |
| 454 | ESS59418.1 | 1875 | 8446 | 1080 | | | | | 17627 | 25491 | |
| 455 | EUL88644.1 | 1879 | 8450 | 78 | | | | | 3297579 | 3302381 | |
| 456 | KDF77541.1 | 1883 | 8454 | 78 | | | | | 65448 | 70250 | |
| 457 | AIX56043.1 | 1887 | 8458 | 1080 | | | | | 3771498 | 3779361 | |
| 458 | KJW77577.1 | 1891 | 8462 | 1079 | | | | | 1673 | 10006 | |
| 459 | KJX05613.1 | 1895 | 8466 | 1079 | | | | | 1673 | 10006 | |
| 460 | KPS87961.1 | 1898 | 8469 | 1035 | | | | | 1 | 5522 | |
| 461 | KRS24834.1 | 1901 | 8472 | 1080 | | | | | 6925 | 12583 | |
| 462 | KUQ03192.1 | 1905 | 8476 | 1080 | | | | | 42478 | 50340 | |
| 463 | BAK13747.1 | 1909 | 8480 | 1042 | | | | | 4393137 | 4400480 | |
| 464 | CCF11171.1 | 1913 | 8484 | 1042 | | | | | 3979011 | 3986353 | |
| 465 | AFR04656.1 | 1917 | 8488 | 1080 | | | | | 3684004 | 3691868 | |
| 466 | KHS69300.1 | 1921 | 8492 | 1080 | | | | | 46628 | 54492 | |
| 467 | KHT02548.1 | 1925 | 8496 | 1080 | | | | | 45831 | 53695 | |
| 468 | KHT03966.1 | 1929 | 8500 | 1080 | | | | | 47097 | 54961 | |
| 469 | ABV17208.1 | 1933 | 8504 | 1080 | | | | | 299412 | 307306 | |
| 470 | EIP59430.1 | 1937 | 8508 | 220 | | | | | 26726 | 32010 | |
| 471 | EIN79899.1 | 1941 | 8512 | 1080 | | | | | 3501 | 11365 | |
| 472 | EKK37355.1 | 1945 | 8516 | 1080 | | | | | 1607 | 9471 | |
| 473 | EKW33216.1 | 1949 | 8520 | 1080 | | | | | 2019 | 9883 | |
| 474 | ELW24561.1 | 1953 | 8524 | 1080 | | | | | 660 | 8524 | |
| 475 | ELV55441.1 | 1957 | 8528 | 1080 | | | | | 1478 | 9222 | |
| 476 | ELV58669.1 | 1961 | 8532 | 1080 | | | | | 664 | 8528 | |
| 477 | ELV27734.1 | 1965 | 8536 | 1080 | | | | | 64453 | 72317 | |
| 478 | ELE34847.1 | 1969 | 8540 | 1080 | | | | | 52842 | 60706 | |
| 479 | ELF60010.1 | 1973 | 8544 | 1084 | | | | | 586259 | 594135 | |
| 480 | ENC42749.1 | 1977 | 8548 | 1080 | | | | | 33688 | 41552 | |
| 481 | ENC49342.1 | 1981 | 8552 | 1080 | | | | | 27211 | 35075 | |
| 482 | ENC65369.1 | 1985 | 8556 | 1080 | | | | | 2255 | 9929 | |
| 483 | ENC60224.1 | 1989 | 8560 | 1080 | | | | | 27020 | 34884 | |
| 484 | ENC64691.1 | 1993 | 8564 | 1080 | | | | | 26939 | 34803 | |
| 485 | ENC77388.1 | 1997 | 8568 | 1080 | | | | | 26972 | 34836 | |
| 486 | ENC83661.1 | 2001 | 8572 | 1080 | | | | | 27153 | 35017 | |
| 487 | ENC86712.1 | 2005 | 8576 | 1080 | | | | | 27619 | 35483 | |
| 488 | ENE16671.1 | 2009 | 8580 | 1080 | | | | | 1801 | 9665 | |
| 489 | ENC77072.1 | 2013 | 8584 | 1080 | | | | | 27211 | 35075 | |
| 490 | EOQ56567.1 | 2017 | 8588 | 1079 | | | | | 636603 | 644930 | |
| 491 | ERB06044.1 | 2021 | 8592 | 1080 | | | | | 39898 | 47762 | |
| 492 | EQV94535.1 | 2025 | 8596 | 1079 | | | | | 962513 | 970840 | |
| 493 | EQV96724.1 | 2029 | 8600 | 1084 | | | | | 653799 | 661675 | |
| 494 | ERB23475.1 | 2033 | 8604 | 1080 | | | | | 1404484 | 1412348 | |
| 495 | ERA25536.1 | 2037 | 8608 | 1080 | | | | | 337494 | 345358 | |
| 496 | ERB97872.1 | 2041 | 8612 | 1080 | | | | | 2550 | 10414 | |
| 497 | ERB87463.1 | 2045 | 8616 | 1080 | | | | | 835 | 8699 | |
| 498 | ERB73279.1 | 2049 | 8620 | 1080 | | | | | 2197 | 10061 | |
| 499 | ERB84450.1 | 2053 | 8624 | 1080 | | | | | 5599 | 13463 | |
| 500 | ERD03125.1 | 2057 | 8628 | 1080 | | | | | 834 | 8698 | |
| 501 | ERD02931.1 | 2060 | 8631 | 111 | | | | | 2176 | 3966 | |
| 502 | ERD21115.1 | 2064 | 8635 | 1080 | | | | | 1073 | 8937 | |
| 503 | ERD19181.1 | 2068 | 8639 | 1080 | | | | | 2495 | 10359 | |
| 504 | ERD72946.1 | 2072 | 8643 | 1080 | | | | | 1149 | 9013 | |
| 505 | ERD66559.1 | 2076 | 8647 | 1080 | | | | | 600 | 8464 | |
| 506 | ERD75975.1 | 2080 | 8651 | 1080 | | | | | 945 | 8809 | |
| 507 | ERD83531.1 | 2084 | 8655 | 1080 | | | | | 658 | 8522 | |
| 508 | ERD92969.1 | 2088 | 8659 | 1080 | | | | | 1952 | 9816 | |
| 509 | ERD99053.1 | 2092 | 8663 | 1080 | | | | | 1388 | 9252 | |
| 510 | ERD98124.1 | 2096 | 8667 | 1080 | | | | | 1079 | 8943 | |
| 511 | AHM42042.1 | 2100 | 8671 | 1084 | | | | | 488627 | 496503 | |
| 512 | AHM46677.1 | 2104 | 8675 | 1084 | | | | | 496169 | 504045 | |
| 513 | AHM51232.1 | 2108 | 8679 | 1084 | | | | | 497566 | 505442 | |
| 514 | EYD87638.1 | 2112 | 8683 | 1079 | | | | | 41244 | 49112 | |
| 515 | EYW22453.1 | 2116 | 8687 | 1080 | | | | | 168471 | 176335 | |
| 516 | EYW31321.1 | 2120 | 8691 | 1080 | | | | | 1923 | 9787 | |
| 517 | EYV86552.1 | 2124 | 8695 | 1080 | | | | | 1922 | 9786 | |
| 518 | EYW71959.1 | 2128 | 8699 | 1080 | | | | | 26412 | 34276 | |
| 519 | EYW62760.1 | 2132 | 8703 | 1080 | | | | | 26412 | 34276 | |
| 520 | EYW60241.1 | 2136 | 8707 | 1080 | | | | | 1922 | 9786 | |
| 521 | EYW56541.1 | 2140 | 8711 | 1080 | | | | | 2143 | 10007 | |
| 522 | EYW47183.1 | 2144 | 8715 | 1080 | | | | | 3218 | 11082 | |
| 523 | EYW47503.1 | 2148 | 8719 | 1080 | | | | | 3222 | 11086 | |
| 524 | EYW43759.1 | 2152 | 8723 | 1080 | | | | | 26417 | 34281 | |
| 525 | EYW40417.1 | 2156 | 8727 | 1080 | | | | | 26412 | 34276 | |
| 526 | EYW30109.1 | 2160 | 8731 | 1080 | | | | | 1922 | 9786 | |
| 527 | EYY79854.1 | 2164 | 8735 | 1080 | | | | | 34684 | 42548 | |
| 528 | EZB10670.1 | 2168 | 8739 | 1080 | | | | | 2019 | 9883 | |
| 529 | EZE32943.1 | 2172 | 8743 | 1080 | | | | | 26396 | 34260 | |
| 530 | KDZ82664.1 | 2176 | 8747 | 1080 | | | | | 17465 | 25329 | |
| 531 | KHG75766.1 | 2180 | 8751 | 1080 | | | | | 581 | 8445 | |
| 532 | KHG79500.1 | 2184 | 8755 | 1080 | | | | | 921 | 8785 | |
| 533 | KOZ37429.1 | 2188 | 8759 | 1080 | | | | | 64411 | 72275 | |
| 534 | KOZ53463.1 | 2192 | 8763 | 1080 | | | | | 4236 | 12100 | |
| 535 | KOZ92706.1 | 2196 | 8767 | 1080 | | | | | 6079 | 13943 | |
| 536 | CTV73579.1 | 2200 | 8771 | 1080 | | | | | 14419 | 22283 | |
| 537 | CTY75874.1 | 2204 | 8775 | 1080 | | | | | 70490 | 78354 | |
| 538 | KPH47565.1 | 2208 | 8779 | 1080 | | | | | 596 | 8460 | |
| 539 | KPH29391.1 | 2212 | 8783 | 1080 | | | | | 26567 | 34431 | |
| 540 | KPO40057.1 | 2216 | 8787 | 1080 | | | | | 26789 | 34653 | |
| 541 | KPP40487.1 | 2220 | 8791 | 1080 | | | | | 27360 | 35224 | |
| 542 | KQI75361.1 | 2224 | 8795 | 1080 | | | | | 53820 | 61684 | |
| 543 | KST33202.1 | 2228 | 8799 | 1080 | | | | | 27013 | 34877 | |
| 544 | KUV50203.1 | 2232 | 8803 | 1084 | | | | | 16306 | 24182 | |
| 545 | KUT58776.1 | 2236 | 8807 | 1080 | | | | | 39315 | 47179 | |
| 546 | KXL70400.1 | 2240 | 8811 | 1080 | | | | | 1546 | 9410 | |
| 547 | KXM39828.1 | 2244 | 8815 | 1080 | | | | | 6312 | 14176 | |
| 548 | KXM53393.1 | 2248 | 8819 | 1080 | | | | | 2592 | 10456 | |
| 549 | KXN00951.1 | 2252 | 8823 | 1080 | | | | | 4479 | 12343 | |
| 550 | KXQ06779.1 | 2256 | 8827 | 1080 | | | | | 75 | 7939 | |
| 551 | KXQ54356.1 | 2260 | 8831 | 1080 | | | | | 314 | 8178 | |
| 552 | KXR15703.1 | 2264 | 8835 | 1080 | | | | | 50549 | 58413 | |
| 553 | KXQ76403.1 | 2268 | 8839 | 1080 | | | | | 522 | 8386 | |
| 554 | KXQ99886.1 | 2272 | 8843 | 1080 | | | | | 312 | 8176 | |
| 555 | KXR88731.1 | 2276 | 8847 | 1080 | | | | | 238975 | 246839 | |
| 556 | KXR78154.1 | 2280 | 8851 | 1080 | | | | | 8890 | 16754 | |
| 557 | EGC96563.1 | 2284 | 8855 | 1080 | | | | | 3169949 | 3177774 | |
| 558 | GAB54116.1 | 2288 | 8859 | 627 | | | | | 9182 | 15685 | |
| 559 | EHM44107.1 | 2292 | 8863 | 1080 | | | | | 4368 | 12232 | |
| 560 | EKB79931.1 | 2296 | 8867 | 1080 | | | | | 833707 | 841571 | |
| 561 | EKB69924.1 | 2300 | 8871 | 1082 | | | | | 141821 | 149691 | |
| 562 | EMH92795.1 | 2304 | 8875 | 470 | | | | | 56292 | 64102 | |
| 563 | EMH90434.1 | 2308 | 8879 | 1082 | | | | | 2827 | 10697 | |
| 564 | EPA89043.1 | 2312 | 8883 | 1080 | | | | | 31904 | 39684 | |
| 565 | EPO98322.1 | 2316 | 8887 | 1080 | | | | | 3559 | 11339 | |
| 566 | ERN60894.1 | 2320 | 8891 | 1080 | | | | | 58696 | 66506 | |
| 567 | ESM66667.1 | 2324 | 8895 | 1080 | | | | | 3031589 | 3039453 | |
| 568 | | | | | | | | | 7279 | 11205 | |
| 569 | EWE84470.1 | 2331 | 8902 | 1082 | | | | | 156425 | 164295 | |
| 570 | EWE89861.1 | 2335 | 8906 | 1080 | | | | | 59506 | 67370 | |
| 571 | EZQ78639.1 | 2339 | 8910 | 1080 | | | | | 56522 | 64386 | |
| 572 | EZR23961.1 | 2343 | 8914 | 1080 | | | | | 56535 | 64399 | |
| 573 | KDK71113.1 | 2347 | 8918 | 1080 | | | | | 56471 | 64335 | |
| 574 | KDL50058.1 | 2351 | 8922 | 1080 | | | | | 102416 | 110280 | |
| 575 | KEF24234.1 | 2355 | 8926 | 1080 | | | | | 298318 | 306182 | |
| 576 | AIG86118.1 | 2359 | 8930 | 1080 | | | | | 2499874 | 2507684 | |
| 577 | AIT02044.1 | 2363 | 8934 | 1080 | | | | | 2796337 | 2804201 | |
| 578 | KGK55642.1 | 2367 | 8938 | 1080 | | | | | 4976163 | 4984027 | |
| 579 | KHF56288.1 | 2371 | 8942 | 1080 | | | | | 56658 | 64522 | |
| 580 | CEO84462.1 | 2375 | 8946 | 1080 | | | | | 56654 | 64518 | |
| 581 | KLZ85287.1 | 2379 | 8950 | 1080 | | | | | 299767 | 307631 | |
| 582 | KME72629.1 | 2383 | 8954 | 1082 | | | | | 341221 | 349091 | |
| 583 | KMG80270.1 | 2387 | 8958 | 1080 | | | | | 56631 | 64495 | |
| 584 | KMH33141.1 | 2391 | 8962 | 1080 | | | | | 298484 | 306348 | |
| 585 | KMH45009.1 | 2395 | 8966 | 1080 | | | | | 298657 | 306521 | |
| 586 | KMH61877.1 | 2399 | 8970 | 1080 | | | | | 298657 | 306521 | |
| 587 | KMH74808.1 | 2403 | 8974 | 1080 | | | | | 298345 | 306209 | |
| 588 | KMH92294.1 | 2407 | 8978 | 1080 | | | | | 298488 | 306352 | |
| 589 | KMH82196.1 | 2411 | 8982 | 1082 | | | | | 33540 | 41410 | |
| 590 | KMI35041.1 | 2415 | 8986 | 1082 | | | | | 411073 | 418943 | |
| 591 | KMJ00754.1 | 2419 | 8990 | 1080 | | | | | 298445 | 306309 | |
| 592 | KMX47012.1 | 2423 | 8994 | 1080 | | | | | 159517 | 167381 | |
| 593 | ALH85686.1 | 2427 | 8998 | 1080 | | | | | 2553997 | 2561861 | |
| 594 | KPR26028.1 | 2431 | 9002 | 1080 | | | | | 257164 | 265028 | |
| 595 | KSW78887.1 | 2435 | 9006 | 1077 | | | | | 127014 | 135431 | |
| 596 | ALP77149.1 | 2439 | 9010 | 1080 | | | | | 1308820 | 1316684 | |
| 597 | KSZ25784.1 | 2443 | 9014 | 1080 | | | | | 284411 | 292275 | |
| 598 | AMA16469.1 | 2447 | 9018 | 1080 | | | | | 2542623 | 2550487 | |
| 599 | KXO21004.1 | 2451 | 9022 | 1080 | | | | | 28886 | 36750 | |
| 600 | KYL54016.1 | 2455 | 9026 | 1080 | | | | | 10919 | 18783 | |
| 601 | KYM08972.1 | 2459 | 9030 | 1080 | | | | | 14860 | 22724 | |
| 602 | KYL42997.1 | 2463 | 9034 | 1080 | | | | | 14860 | 22724 | |
| 603 | KYL42678.1 | 2467 | 9038 | 1080 | | | | | 14870 | 22734 | |
| 604 | KYL71100.1 | 2471 | 9042 | 1080 | | | | | 10922 | 18786 | |
| 605 | KYL53996.1 | 2475 | 9046 | 1080 | | | | | 10920 | 18784 | |
| 606 | KYM33516.1 | 2479 | 9050 | 1080 | | | | | 284951 | 292815 | |
| 607 | KYL73346.1 | 2483 | 9054 | 1080 | | | | | 14860 | 22724 | |
| 608 | KYL53876.1 | 2487 | 9058 | 1080 | | | | | 14862 | 22726 | |
| 609 | KYM21788.1 | 2491 | 9062 | 1080 | | | | | 14861 | 22725 | |
| 610 | KYM07146.1 | 2495 | 9066 | 1080 | | | | | 10923 | 18787 | |
| 611 | KYM09276.1 | 2499 | 9070 | 1080 | | | | | 10920 | 18784 | |
| 612 | KYL81722.1 | 2503 | 9074 | 1080 | | | | | 14861 | 22725 | |
| 613 | KYL90350.1 | 2507 | 9078 | 1080 | | | | | 14861 | 22725 | |
| 614 | KYM24954.1 | 2511 | 9082 | 1080 | | | | | 10920 | 18784 | |
| 615 | CQJ58396.1 | 2515 | 9086 | 1042 | | | | | 442633 | 449979 | |
| 616 | CFV22979.1 | 2519 | 9090 | 1042 | | | | | 128423 | 135769 | |
| 617 | CNI05674.1 | 2523 | 9094 | 1042 | | | | | 382852 | 390198 | |
| 618 | AHV33809.1 | 2527 | 9098 | 1019 | | | | | 445565 | 453509 | |
| 619 | KOG92698.1 | 2531 | 9102 | 1019 | | | | | 891037 | 898981 | |
| 620 | KRW58409.1 | 2535 | 9106 | 1254 | | | | | 282454 | 290695 | |
| 621 | AAF94909.1 | 2539 | 9110 | 940 | | | | | 1898009 | 1905745 | |
| 622 | ABQ21454.1 | 2543 | 9114 | 1146 | | | | | 1451122 | 1458848 | |
| 623 | ACP06006.1 | 2547 | 9118 | 1149 | | | | | 1845143 | 1852878 | |
| 624 | ACP09871.1 | 2551 | 9122 | 1146 | | | | | 1982541 | 1990267 | |
| 625 | | | | | | | | | 1741763 | 1746058 | |
| 626 | EFH78552.1 | 2558 | 9129 | 1149 | | | | | 406663 | 414398 | |
| 627 | EAZ72426.1 | 2561 | 9132 | 1149 | | | | | 102894 | 108516 | |
| 628 | EAZ78570.1 | 2565 | 9136 | 1149 | | | | | 39155 | 46890 | |
| 629 | AET26856.1 | 2569 | 9140 | 1149 | | | | | 1369410 | 1377145 | |
| 630 | KNH51116.1 | 2573 | 9144 | 1149 | | | | | 31898 | 39633 | |
| 631 | KNA61361.1 | 2577 | 9148 | 1149 | | | | | 426524 | 434259 | |
| 632 | EEO08428.1 | 2581 | 9152 | 932 | | | | | 320173 | 327908 | |
| 633 | EEO16531.1 | 2585 | 9156 | 932 | | | | | 1108223 | 1115958 | |
| 634 | EEO20562.1 | 2589 | 9160 | 932 | | | | | 1025633 | 1033368 | |
| 635 | EET92690.1 | 2593 | 9164 | 1149 | | | | | 31076 | 38811 | |
| 636 | EEY40705.1 | 2597 | 9168 | 1149 | | | | | 318366 | 326101 | |
| 637 | EEY47280.1 | 2601 | 9172 | 1149 | | | | | 293048 | 300726 | |
| 638 | EGQ97274.1 | 2605 | 9176 | 1149 | | | | | 315513 | 323191 | |
| 639 | EGQ98248.1 | 2609 | 9180 | 1149 | | | | | 315860 | 323595 | |
| 640 | EGS48432.1 | 2613 | 9184 | 1149 | | | | | 2498 | 10233 | |
| 641 | EGS47643.1 | 2617 | 9188 | 1149 | | | | | 159058 | 166793 | |
| 642 | EGS47804.1 | 2621 | 9192 | 1149 | | | | | 159009 | 166744 | |
| 643 | EGS62505.1 | 2625 | 9196 | 1149 | | | | | 159057 | 166735 | |
| 644 | EGS70772.1 | 2629 | 9200 | 1149 | | | | | 159054 | 166789 | |
| 645 | EHH71588.1 | 2633 | 9204 | 1149 | | | | | 87128 | 94863 | |
| 646 | EHH83255.1 | 2637 | 9208 | 1149 | | | | | 313471 | 321206 | |
| 647 | EHH87247.1 | 2641 | 9212 | 1149 | | | | | 159015 | 166750 | |
| 648 | EHH97389.1 | 2645 | 9216 | 1149 | | | | | 315855 | 323590 | |
| 649 | EHI04570.1 | 2649 | 9220 | 1149 | | | | | 318768 | 326503 | |
| 650 | EHI04038.1 | 2653 | 9224 | 1149 | | | | | 1 | 6847 | Additional ZorC homolog EHI04039.1 |
| 651 | EHH99554.1 | 2657 | 9228 | 1149 | | | | | 159021 | 166756 | |
| 652 | EHH93198.1 | 2661 | 9232 | 1149 | | | | | 159052 | 166787 | |
| 653 | EHH82142.1 | 2665 | 9236 | 1149 | | | | | 159011 | 166746 | |
| 654 | EHH72364.1 | 2669 | 9240 | 1149 | | | | | 159013 | 166748 | |
| 655 | EHH76757.1 | 2673 | 9244 | 1149 | | | | | 159078 | 166813 | |
| 656 | AFC58579.1 | 2677 | 9248 | 1149 | | | | | 1944318 | 1952053 | |
| 657 | EJH73149.1 | 2681 | 9252 | 1149 | | | | | 159078 | 166813 | |
| 658 | EJH69789.1 | 2685 | 9256 | 1149 | | | | | 159086 | 166821 | |
| 659 | EJH28003.1 | 2689 | 9260 | 1149 | | | | | 159398 | 167133 | |
| 660 | EJH27515.1 | 2693 | 9264 | 1149 | | | | | 159452 | 167187 | |
| 661 | EJH29360.1 | 2697 | 9268 | 1149 | | | | | 314088 | 321823 | |
| 662 | EJH38297.1 | 2701 | 9272 | 1149 | | | | | 311261 | 318996 | |
| 663 | EJH70290.1 | 2705 | 9276 | 1149 | | | | | 159175 | 166910 | |
| 664 | EJH44247.1 | 2709 | 9280 | 1149 | | | | | 313098 | 320833 | |
| 665 | EJH55110.1 | 2713 | 9284 | 1149 | | | | | 1125543 | 1133278 | |
| 666 | EJH55326.1 | 2717 | 9288 | 1149 | | | | | 315841 | 323576 | |
| 667 | EJH83355.1 | 2721 | 9292 | 1149 | | | | | 360461 | 368196 | |
| 668 | EJH85690.1 | 2725 | 9296 | 1149 | | | | | 159055 | 166790 | |
| 669 | EJH80826.1 | 2729 | 9300 | 1149 | | | | | 159198 | 166933 | |
| 670 | EJH40242.1 | 2733 | 9304 | 1149 | | | | | 349947 | 357682 | |
| 671 | EKG51166.1 | 2737 | 9308 | 1149 | | | | | 159143 | 166878 | |
| 672 | EKG45545.1 | 2741 | 9312 | 1149 | | | | | 159094 | 166829 | |
| 673 | EKG69361.1 | 2745 | 9316 | 1149 | | | | | 159020 | 166755 | |
| 674 | EKG78204.1 | 2749 | 9320 | 1149 | | | | | 360413 | 368148 | |
| 675 | EKG79524.1 | 2753 | 9324 | 1149 | | | | | 159046 | 166724 | |
| 676 | EKG89062.1 | 2757 | 9328 | 1149 | | | | | 159114 | 166792 | |
| 677 | EKK80940.1 | 2761 | 9332 | 1149 | | | | | 152818 | 160553 | |
| 678 | EKK97420.1 | 2765 | 9336 | 1149 | | | | | 159065 | 166743 | |
| 679 | EKL07614.1 | 2769 | 9340 | 932 | | | | | 2711 | 8667 | |
| 680 | EKL26686.1 | 2773 | 9344 | 1149 | | | | | 159013 | 166748 | |
| 681 | EKL25947.1 | 2777 | 9348 | 1149 | | | | | 159005 | 166740 | |
| 682 | EKL86047.1 | 2781 | 9352 | 1149 | | | | | 159001 | 166736 | |
| 683 | EKM09898.1 | 2785 | 9356 | 1149 | | | | | 159050 | 166785 | |
| 684 | EKL86443.1 | 2789 | 9360 | 1149 | | | | | 159016 | 166694 | |
| 685 | EKM18413.1 | 2793 | 9364 | 1149 | | | | | 159007 | 166685 | |
| 686 | ELT24498.1 | 2797 | 9368 | 1149 | | | | | 318101 | 325779 | |
| 687 | ELT39814.1 | 2801 | 9372 | 1149 | | | | | 318117 | 325852 | |
| 688 | ELS74164.1 | 2805 | 9376 | 1149 | | | | | 159011 | 166746 | |
| 689 | ELS81595.1 | 2809 | 9380 | 1149 | | | | | 159013 | 166691 | |
| 690 | ELS88994.1 | 2813 | 9384 | 1149 | | | | | 159009 | 166744 | |
| 691 | ELS96625.1 | 2817 | 9388 | 1149 | | | | | 159067 | 166802 | |
| 692 | ELT03891.1 | 2821 | 9392 | 1149 | | | | | 159007 | 166742 | |
| 693 | ELT10274.1 | 2825 | 9396 | 1149 | | | | | 159009 | 166687 | |
| 694 | ELT32498.1 | 2829 | 9400 | 1149 | | | | | 159005 | 166740 | |
| 695 | EMB02077.1 | 2833 | 9404 | 1149 | | | | | 2023763 | 2031498 | |
| 696 | EMP84511.1 | 2837 | 9408 | 1149 | | | | | 159020 | 166755 | |
| 697 | EMP97714.1 | 2841 | 9412 | 1146 | | | | | 159712 | 167381 | |
| 698 | EMP95635.1 | 2845 | 9416 | 1149 | | | | | 159039 | 166774 | |
| 699 | EMQ03271.1 | 2849 | 9420 | 1149 | | | | | 159039 | 166774 | |
| 700 | EMQ04746.1 | 2853 | 9424 | 1149 | | | | | 159015 | 166693 | |
| 701 | EMQ11840.1 | 2857 | 9428 | 1149 | | | | | 159023 | 166701 | |
| 702 | EMQ11494.1 | 2861 | 9432 | 1149 | | | | | 159013 | 166748 | |
| 703 | EMQ16254.1 | 2865 | 9436 | 1149 | | | | | 159021 | 166699 | |
| 704 | EMQ22000.1 | 2869 | 9440 | 1149 | | | | | 159017 | 166752 | |
| 705 | EMQ27290.1 | 2873 | 9444 | 1149 | | | | | 130877 | 138612 | |
| 706 | EMQ26217.1 | 2877 | 9448 | 1149 | | | | | 130881 | 138616 | |
| 707 | EMQ32317.1 | 2881 | 9452 | 1149 | | | | | 159017 | 166752 | |
| 708 | EMQ37897.1 | 2885 | 9456 | 1149 | | | | | 159026 | 166761 | |
| 709 | EMQ51392.1 | 2889 | 9460 | 1149 | | | | | 159021 | 166756 | |
| 710 | EMQ53993.1 | 2893 | 9464 | 1149 | | | | | 159019 | 166754 | |
| 711 | EMQ39195.1 | 2897 | 9468 | 1149 | | | | | 159017 | 166695 | |
| 712 | EMQ68293.1 | 2901 | 9472 | 1149 | | | | | 159017 | 166695 | |
| 713 | EMQ62926.1 | 2905 | 9476 | 1149 | | | | | 159012 | 166690 | |
| 714 | EMQ43436.1 | 2909 | 9480 | 1149 | | | | | 159013 | 166748 | |
| 715 | EMQ47712.1 | 2913 | 9484 | 1149 | | | | | 159021 | 166756 | |
| 716 | EWM32708.1 | 2917 | 9488 | 1149 | | | | | 130877 | 138612 | |
| 717 | KEA49017.1 | 2921 | 9492 | 1149 | | | | | 158099 | 165834 | |
| 718 | | | | | | | | | 327156 | 331451 | |
| 719 | KEH80155.1 | 2928 | 9499 | 1149 | | | | | 31003 | 38738 | |
| 720 | KEH82626.1 | 2932 | 9503 | 1149 | | | | | 31003 | 38738 | |
| 721 | | | | | | | | | 5628 | 9512 | |
| 722 | | | | | | | | | 1490 | 5374 | |
| 723 | KFE03686.1 | 2942 | 9513 | 1149 | | | | | 158948 | 166626 | |
| 724 | KFE20273.1 | 2946 | 9517 | 1149 | | | | | 31824 | 39502 | |
| 725 | KFZ34212.1 | 2950 | 9521 | 1149 | | | | | 158938 | 166673 | |
| 726 | AIT29753.1 | 2954 | 9525 | 1149 | | | | | 1367243 | 1374978 | |
| 727 | KHE18841.1 | 2958 | 9529 | 1149 | | | | | 115674 | 123409 | |
| 728 | KHE21919.1 | 2962 | 9533 | 1149 | | | | | 30978 | 38713 | |
| 729 | BAP03189.1 | 2966 | 9537 | 1149 | | | | | 1752968 | 1760703 | |
| 730 | KJD16374.1 | 2970 | 9541 | 1149 | | | | | 31764 | 39499 | |
| 731 | KJJ52417.1 | 2974 | 9545 | 1149 | | | | | 311822 | 319557 | |
| 732 | KJJ54926.1 | 2978 | 9549 | 1149 | | | | | 311849 | 319584 | |
| 733 | KJR76010.1 | 2982 | 9553 | 1149 | | | | | 158920 | 166655 | |
| 734 | KJS92994.1 | 2986 | 9557 | 1146 | | | | | 159627 | 167353 | |
| 735 | AKA00222.1 | 2990 | 9561 | 1149 | | | | | 1981293 | 1989028 | |
| 736 | KJW14524.1 | 2994 | 9565 | 1149 | | | | | 22906 | 30641 | |
| 737 | KJX83384.1 | 2998 | 9569 | 1149 | | | | | 30976 | 38711 | |
| 738 | KKP13600.1 | 3002 | 9573 | 1149 | | | | | 311137 | 318815 | |
| 739 | KKP11540.1 | 3006 | 9577 | 1149 | | | | | 159049 | 166784 | |
| 740 | KKP10400.1 | 3010 | 9581 | 1149 | | | | | 31066 | 38801 | |
| 741 | AKO75283.1 | 3014 | 9585 | 1149 | | | | | 1873149 | 1880884 | |
| 742 | CSC37318.1 | 3017 | 9588 | 650 | | | | | 33349 | 39027 | |
| 743 | CRZ83750.1 | 3021 | 9592 | 1149 | | | | | 323105 | 330857 | |
| 744 | CSE02169.1 | 3025 | 9596 | 1149 | | | | | 310728 | 318406 | |
| 745 | CRZ49585.1 | 3029 | 9600 | 1149 | | | | | 310734 | 318412 | |
| 746 | CSC16469.1 | 3033 | 9604 | 1149 | | | | | 31070 | 38748 | |
| 747 | CSB69205.1 | 3037 | 9608 | 1149 | | | | | 31121 | 38824 | |
| 748 | CSA28505.1 | 3041 | 9612 | 1146 | | | | | 31851 | 39520 | |
| 749 | CSB84087.1 | 3045 | 9616 | 657 | | | | | 135830 | 143726 | |
| 750 | CSB63121.1 | 3049 | 9620 | 1149 | | | | | 16865 | 24600 | |
| 751 | CSA19206.1 | 3053 | 9624 | 1149 | | | | | 31070 | 38748 | |
| 752 | CSD58145.1 | 3057 | 9628 | 1149 | | | | | 31082 | 38760 | |
| 753 | | | | | | | | | 166125 | 170429 | |
| 754 | CSB47757.1 | 3064 | 9635 | 1149 | | | | | 31012 | 38747 | |
| 755 | CSA30951.1 | 3068 | 9639 | 1146 | | | | | 31850 | 39519 | |
| 756 | CSB56119.1 | 3072 | 9643 | 1149 | | | | | 31737 | 39415 | |
| 757 | CRZ98351.1 | 3076 | 9647 | 1149 | | | | | 365059 | 372737 | |
| 758 | CSA01334.1 | 3080 | 9651 | 1149 | | | | | 17713 | 25417 | |
| 759 | CSB97529.1 | 3084 | 9655 | 1149 | | | | | 159188 | 166980 | |
| 760 | CSC01752.1 | 3088 | 9659 | 1149 | | | | | 159378 | 167056 | |
| 761 | CRZ46109.1 | 3092 | 9663 | 565 | | | | | 31477 | 39390 | |
| 762 | CSA07846.1 | 3096 | 9667 | 1149 | | | | | 361547 | 369225 | |
| 763 | CSC23719.1 | 3100 | 9671 | 1149 | | | | | 159382 | 167060 | |
| 764 | | | | | | | | | 31152 | 35390 | |
| 765 | CSE01568.1 | 3107 | 9678 | 1149 | | | | | 31080 | 38758 | |
| 766 | CSA08428.1 | 3110 | 9681 | 1149 | | | | | 111629 | 119351 | |
| 767 | CRZ45164.1 | 3114 | 9685 | 1149 | | | | | 360008 | 367686 | |
| 768 | CSA07018.1 | 3118 | 9689 | 1149 | | | | | 31070 | 38748 | |
| 769 | CSA08758.1 | 3122 | 9693 | 1149 | | | | | 311375 | 319053 | |
| 770 | CSA15617.1 | 3126 | 9697 | 1151 | | | | | 118328 | 126027 | |
| 771 | CSA74554.1 | 3130 | 9701 | 421 | | | | | 31048 | 38213 | |
| 772 | CSB88604.1 | 3133 | 9704 | 650 | | | | | 202946 | 208618 | |
| 773 | CSC80153.1 | 3137 | 9708 | 1149 | | | | | 158978 | 166656 | |
| 774 | CSB83805.1 | 3141 | 9712 | 1146 | | | | | 33081 | 40750 | |
| 775 | CSB56566.1 | 3144 | 9715 | 902 | | | | | 33322 | 38967 | |
| 776 | CSC85417.1 | 3148 | 9719 | 1149 | | | | | 49583 | 57261 | |
| 777 | CSB86278.1 | 3152 | 9723 | 327 | | | | | 79066 | 86933 | |
| 778 | CSD13130.1 | 3156 | 9727 | 1149 | | | | | 31083 | 38761 | |
| 779 | CSD79384.1 | 3160 | 9731 | 1149 | | | | | 158961 | 166639 | |
| 780 | CSD86903.1 | 3164 | 9735 | 1149 | | | | | 311074 | 318752 | |
| 781 | CSA39718.1 | 3168 | 9739 | 1149 | | | | | 31077 | 38755 | |
| 782 | CSC76671.1 | 3172 | 9743 | 1149 | | | | | 159318 | 166996 | |
| 783 | CSA42827.1 | 3176 | 9747 | 1149 | | | | | 17305 | 24983 | |
| 784 | CSA52168.1 | 3180 | 9751 | 1149 | | | | | 31069 | 38747 | |
| 785 | CSD31842.1 | 3184 | 9755 | 1149 | | | | | 310993 | 318671 | |
| 786 | CSD17868.1 | 3188 | 9759 | 1149 | | | | | 31086 | 38764 | |
| 787 | CSD38685.1 | 3192 | 9763 | 1149 | | | | | 310723 | 318401 | |
| 788 | CSA26333.1 | 3196 | 9767 | 1149 | | | | | 159373 | 167051 | |
| 789 | CSA45918.1 | 3200 | 9771 | 1149 | | | | | 31045 | 38780 | |
| 790 | CSD96324.1 | 3204 | 9775 | 1149 | | | | | 31082 | 38760 | |
| 791 | CSA54003.1 | 3208 | 9779 | 1149 | | | | | 159718 | 167396 | |
| 792 | CSC37805.1 | 3211 | 9782 | 233 | | | | | 32052 | 39355 | |
| 793 | CSA88183.1 | 3215 | 9786 | 413 | | | | | 33049 | 40215 | |
| 794 | CSA15198.1 | 3219 | 9790 | 496 | | | | | 31993 | 39834 | |
| 795 | CSC98525.1 | 3222 | 9793 | 327 | | | | | 34368 | 40014 | |
| 796 | CRZ48549.1 | 3226 | 9797 | 1157 | | | | | 160331 | 168052 | |
| 797 | CSB25047.1 | 3229 | 9800 | 435 | | | | | 34141 | 39160 | Additional ZorC homolog CSB25035.1 |
| 798 | CSD98674.1 | 3233 | 9804 | 1149 | | | | | 360011 | 367689 | |
| 799 | CSA36985.1 | 3236 | 9807 | 650 | | | | | 33493 | 39175 | |
| 800 | | | | | | | | | 32082 | 36377 | |
| 801 | CSD70475.1 | 3243 | 9814 | 1149 | | | | | 31083 | 38761 | |
| 802 | CSD13890.1 | 3246 | 9817 | 657 | | | | | 459 | 6109 | |
| 803 | CSD31883.1 | 3250 | 9821 | 1149 | | | | | 31084 | 38762 | |
| 804 | CSE18808.1 | 3254 | 9825 | 1149 | | | | | 158956 | 166634 | |
| 805 | CSD93195.1 | 3258 | 9829 | 1149 | | | | | 31084 | 38762 | |
| 806 | CSA21132.1 | 3262 | 9833 | 1149 | | | | | 159994 | 167672 | |
| 807 | CSA44698.1 | 3266 | 9837 | 1146 | | | | | 160570 | 168345 | |
| 808 | CSD30628.1 | 3270 | 9841 | 1149 | | | | | 207665 | 215343 | |
| 809 | CSD92385.1 | 3274 | 9845 | 1149 | | | | | 310736 | 318414 | |
| 810 | CSD99314.1 | 3278 | 9849 | 1149 | | | | | 31871 | 39549 | |
| 811 | CSA22955.1 | 3282 | 9853 | 1149 | | | | | 159775 | 167453 | |
| 812 | CSA49214.1 | 3286 | 9857 | 366 | | | | | 31257 | 39041 | |
| 813 | CSC63613.1 | 3290 | 9861 | 650 | | | | | 9409 | 16634 | |
| 814 | CRZ49258.1 | 3294 | 9865 | 1149 | | | | | 33478 | 41156 | |
| 815 | CSC03090.1 | 3298 | 9869 | 1149 | | | | | 124696 | 132431 | |
| 816 | CSD87248.1 | 3302 | 9873 | 1149 | | | | | 310735 | 318413 | |
| 817 | CSD21248.1 | 3306 | 9877 | 1149 | | | | | 388072 | 395750 | |
| 818 | | | | | | | | | 31912 | 36177 | |
| 819 | CSA26743.1 | 3313 | 9884 | 1149 | | | | | 159358 | 167090 | |
| 820 | CSB50330.1 | 3317 | 9888 | 1149 | | | | | 668438 | 676116 | |
| 821 | CSB24819.1 | 3321 | 9892 | 233 | | | | | 32013 | 39918 | |
| 822 | CSB68067.1 | 3325 | 9896 | 650 | | | | | 31070 | 38775 | |
| 823 | CSB16272.1 | 3329 | 9900 | 915 | | | | | 333817 | 341563 | |
| 824 | CRZ89203.1 | 3333 | 9904 | 1149 | | | | | 310756 | 318434 | |
| 825 | CSD99947.1 | 3337 | 9908 | 1149 | | | | | 31875 | 39553 | |
| 826 | CSA40881.1 | 3341 | 9912 | 1149 | | | | | 31156 | 38834 | |
| 827 | CSC19347.1 | 3345 | 9916 | 1149 | | | | | 310775 | 318453 | |
| 828 | CSD27143.1 | 3349 | 9920 | 1149 | | | | | 158972 | 166650 | |
| 829 | CSA25008.1 | 3353 | 9924 | 1149 | | | | | 159300 | 166978 | |
| 830 | CSD33007.1 | 3357 | 9928 | 1149 | | | | | 26879 | 34089 | |
| 831 | CSD25943.1 | 3361 | 9932 | 1149 | | | | | 311072 | 318750 | |
| 832 | CSD37937.1 | 3365 | 9936 | 1149 | | | | | 310737 | 318415 | |
| 833 | CSD14752.1 | 3369 | 9940 | 1149 | | | | | 31084 | 38762 | |
| 834 | | | | | | | | | 162427 | 166665 | |
| 835 | CSD47052.1 | 3376 | 9947 | 1149 | | | | | 31087 | 38765 | |
| 836 | CRZ80385.1 | 3380 | 9951 | 1149 | | | | | 313075 | 320840 | |
| 837 | CSC19211.1 | 3384 | 9955 | 1149 | | | | | 168078 | 175756 | |
| 838 | CSA23993.1 | 3388 | 9959 | 1146 | | | | | 160208 | 167877 | |
| 839 | CSA08080.1 | 3392 | 9963 | 1149 | | | | | 31862 | 39540 | |
| 840 | CSB55683.1 | 3396 | 9967 | 797 | | | | | 278315 | 286089 | |
| 841 | CSA25866.1 | 3400 | 9971 | 1149 | | | | | 31850 | 39528 | |
| 842 | CSD34664.1 | 3404 | 9975 | 1149 | | | | | 310731 | 318409 | |
| 843 | CSC58104.1 | 3408 | 9979 | 1146 | | | | | 63231 | 70982 | |
| 844 | CSA23928.1 | 3412 | 9983 | 817 | | | | | 31012 | 38784 | |
| 845 | CSB25832.1 | 3416 | 9987 | 239 | | | | | 4488 | 12028 | |
| 846 | CSD08425.1 | 3420 | 9991 | 1149 | | | | | 310632 | 318310 | |
| 847 | CSD25614.1 | 3424 | 9995 | 1149 | | | | | 31075 | 38753 | |
| 848 | CSD28595.1 | 3428 | 9999 | 1149 | | | | | 31079 | 38757 | |
| 849 | CSA45233.1 | 3432 | 10003 | 1146 | | | | | 160096 | 167765 | |
| 850 | CSD82509.1 | 3436 | 10007 | 1149 | | | | | 360009 | 367687 | |
| 851 | CSC20734.1 | 3440 | 10011 | 1149 | | | | | 159381 | 167059 | |
| 852 | CSC43362.1 | 3444 | 10015 | 902 | | | | | 63491 | 71271 | |
| 853 | CSC06923.1 | 3448 | 10019 | 1149 | | | | | 31021 | 38756 | |
| 854 | CSB50482.1 | 3452 | 10023 | 1149 | | | | | 177974 | 185709 | |
| 855 | CSE01128.1 | 3456 | 10027 | 1149 | | | | | 310979 | 318657 | |
| 856 | CSB99370.1 | 3460 | 10031 | 1149 | | | | | 31077 | 38755 | |
| 857 | KOY92949.1 | 3463 | 10034 | 1149 | | | | | 212064 | 217686 | |
| 858 | KOY92341.1 | 3467 | 10038 | 1149 | | | | | 159277 | 167012 | |
| 859 | KOY97237.1 | 3471 | 10042 | 1149 | | | | | 12401 | 20136 | |
| 860 | KOZ01029.1 | 3475 | 10046 | 1149 | | | | | 211986 | 219721 | |
| 861 | KPA03324.1 | 3479 | 10050 | 1149 | | | | | 360412 | 368147 | |
| 862 | ALJ63819.1 | 3483 | 10054 | 1149 | | | | | 1178223 | 1185958 | |
| 863 | KTL56322.1 | 3487 | 10058 | 1146 | | | | | 324982 | 332708 | |
| 864 | KUO35495.1 | 3490 | 10061 | 1149 | | | | | 158946 | 164568 | |
| 865 | | | | | | | | | 30980 | 35275 | |
| 866 | KUP86909.1 | 3497 | 10068 | 1149 | | | | | 30979 | 38714 | |
| 867 | KUY44288.1 | 3501 | 10072 | 1149 | | | | | 30985 | 38720 | |
| 868 | KVI44902.1 | 3505 | 10076 | 1149 | | | | | 343662 | 351397 | |
| 869 | KWW48036.1 | 3509 | 10080 | 1149 | | | | | 31013 | 38748 | |
| 870 | EIG23745.1 | 3513 | 10084 | 999 | | | | | 100888 | 108391 | |
| 871 | KGQ46275.1 | 3517 | 10088 | 1033 | | | | | 80629 | 88171 | |
| 872 | KGQ51099.1 | 3521 | 10092 | 1033 | | | | | 57777 | 65324 | |
| 873 | KGQ65034.1 | 3525 | 10096 | 1033 | | | | | 22663 | 30210 | |
| 874 | ACX76636.1 | 3529 | 10100 | 1045 | | | | | 3759682 | 3766672 | |
| 875 | ADL25841.1 | 3533 | 10104 | 1045 | | | | | 363595 | 370585 | |
| 876 | EEO43109.1 | 3537 | 10108 | 1163 | | | | | 2128114 | 2135123 | |
| 877 | EHG17833.2 | 3541 | 10112 | 1163 | | | | | 2126049 | 2133058 | |
| 878 | ERT42788.1 | 3545 | 10116 | 1163 | | | | | 50872 | 58025 | |
| 879 | KGE62644.1 | 3549 | 10120 | 1162 | | | | | 397783 | 404930 | |
| 880 | EFE87097.1 | 3553 | 10124 | 1166 | | | | | 770761 | 777911 | |
| 881 | ABM29950.1 | 3557 | 10128 | 1131 | | | | | 3435271 | 3442881 | |
| 882 | ADB47621.1 | 3561 | 10132 | 969 | | | | | 1390210 | 1397088 | |
| 883 | ADE85049.1 | 3565 | 10136 | 1030 | | | | | 1376580 | 1384055 | |
| 884 | ETD02076.1 | 3569 | 10140 | 1030 | | | | | 56033 | 63508 | |
| 885 | ETD86669.1 | 3573 | 10144 | 1029 | | | | | 52380 | 59851 | |
| 886 | ETD77750.1 | 3577 | 10148 | 1030 | | | | | 226246 | 233721 | |
| 887 | ETE54108.1 | 3581 | 10152 | 1030 | | | | | 56001 | 63476 | |
| 888 | | | | | | | | | 130723 | 134953 | |
| 889 | KFI23092.1 | 3588 | 10159 | 1150 | | | | | 38137 | 45876 | |
| 890 | KMY56663.1 | 3592 | 10163 | 874 | | | | | 14053 | 20516 | |
| 891 | KMY64906.1 | 3596 | 10167 | 874 | | | | | 14041 | 20504 | |
| 892 | KYD35335.1 | 3600 | 10171 | 860 | | | | | 7802 | 14262 | |
| 893 | GAD13405.1 | 3604 | 10175 | 860 | | | | | 26441 | 32340 | |
| 894 | EMT39962.1 | 3607 | 10178 | 931 | | | | | 147491 | 153762 | |
| 895 | | | | | | | | | 189427 | 193818 | |
| 896 | EKF49052.1 | 3613 | 10184 | 832 | | | | | 59928 | 66237 | Gene EKF49051.1 |
| 897 | BAL95141.1 | 3617 | 10188 | 1287 | | | | | 1873936 | 1882199 | |
| 898 | KTC75264.1 | 3621 | 10192 | 574 | | | | | 10108 | 15843 | |
| 899 | EFF49968.1 | 3625 | 10196 | 221 | | | | | 66300 | 71522 | |
| 900 | ABU75894.1 | 3629 | 10200 | 1080 | | | | | 573812 | 581682 | |
| 901 | EGL73324.1 | 3632 | 10203 | 1080 | | | | | 1391 | 7059 | |
| 902 | | | | | | | | | 3085383 | 3088601 | |
| 903 | CCK02757.1 | 3639 | 10210 | 1080 | | | | | 1992732 | 2000383 | |
| 904 | CCO48378.1 | 3643 | 10214 | 1149 | | | | | 351151 | 358883 | |
| 905 | CCK80599.1 | 3647 | 10218 | 1149 | | | | | 2847791 | 2855375 | |
| 906 | KGD34413.1 | 3651 | 10222 | 961 | | | | | 604039 | 612320 | |
| 907 | KGS74755.1 | 3655 | 10226 | 1253 | | | | | 44290 | 52434 | |
| 908 | KGW09385.1 | 3659 | 10230 | 1257 | | | | | 3032122 | 3040259 | |
| 909 | KGX47861.1 | 3663 | 10234 | 881 | | | | | 14326 | 22286 | |
| 910 | KGX39521.1 | 3667 | 10238 | 1290 | | | | | 2107525 | 2115821 | |
| 911 | CPH56590.1 | 3671 | 10242 | 1258 | | | | | 30629 | 39310 | |
| 912 | KSB52474.1 | 3675 | 10246 | 1080 | | | | | 185515 | 193379 | |
| 913 | AEF17802.1 | 3678 | 10249 | 930 | | | | | 1842826 | 1849094 | |
| 914 | ENW17899.1 | 3682 | 10253 | 1067 | | | | | 59747 | 65556 | |
| 915 | ABO66650.1 | 3686 | 10257 | 874 | | | | | 1352626 | 1359020 | |
| 916 | | | | | | | | | 2415017 | 2419718 | |
| 917 | ACS21191.1 | 3693 | 10264 | 1291 | | | | | 4851523 | 4859825 | |
| 918 | | | | | | | | | 1418094 | 1422180 | |
| 919 | EET81940.1 | 3700 | 10271 | 1067 | | | | | 99524 | 106967 | |
| 920 | ENU31374.1 | 3704 | 10275 | 1067 | | | | | 191572 | 197836 | |
| 921 | ALA59736.1 | 3708 | 10279 | 1244 | | | | | 3145019 | 3153095 | |
| 922 | AGB41058.1 | 3712 | 10283 | 1172 | | | | | 1097125 | 1104635 | |
| 923 | AEI93762.1 | 3716 | 10287 | 1058 | | | | | 1813459 | 1820361 | |
| 924 | CCU78670.1 | 3720 | 10291 | 939 | | | | | 785072 | 791847 | |
| 925 | ERG17895.1 | 3724 | 10295 | 1152 | | | | | 22799 | 30533 | |
| 926 | ALF60589.1 | 3728 | 10299 | 1075 | | | | | 2700909 | 2708350 | |
| 927 | AEM78248.1 | 3731 | 10302 | 931 | | | | | 840832 | 847102 | |
| 928 | EFV93690.1 | 3735 | 10306 | 1109 | | | | | 3038718 | 3046540 | |
| 929 | KRI14523.1 | 3739 | 10310 | 1068 | | | | | 149243 | 156664 | |
| 930 | AEJ38285.1 | 3743 | 10314 | 908 | | | | | 54168 | 60713 | |
| 931 | AEW03627.1 | 3747 | 10318 | 908 | | | | | 54408 | 60953 | |
| 932 | KFX14694.1 | 3751 | 10322 | 1080 | | | | | 19071 | 26935 | |
| 933 | KKW93257.1 | 3755 | 10326 | 1274 | | | | | 127747 | 135625 | |
| 934 | KVX03058.1 | 3759 | 10330 | 1007 | | | | | 67700 | 75395 | |
| 935 | KJM54477.1 | 3763 | 10334 | 1079 | | | | | 76651 | 84984 | |
| 936 | KLF88327.1 | 3767 | 10338 | 1080 | | | | | 57307 | 65172 | |
| 937 | KLG16013.1 | 3771 | 10342 | 1079 | | | | | 39524 | 47386 | |
| 938 | KLP43533.1 | 3775 | 10346 | 1080 | | | | | 57204 | 65069 | |
| 939 | KTK05047.1 | 3779 | 10350 | 1079 | | | | | 80895 | 89228 | |
| 940 | KTJ30245.1 | 3783 | 10354 | 1079 | | | | | 10225 | 18087 | |
| 941 | KTI23425.1 | 3787 | 10358 | 1079 | | | | | 288377 | 296710 | |
| 942 | AKL12334.1 | 3791 | 10362 | 1080 | | | | | 2215142 | 2223007 | |
| 943 | | | | | | | | | 1907323 | 1912534 | |
| 944 | | | | | | | | | 4313226 | 4317455 | |
| 945 | AJG24949.1 | 3801 | 10372 | 1288 | | | | | 3725247 | 3733546 | |
| 946 | | | | | | | | | 8581 | 12602 | |
| 947 | | | | | | | | | 3803428 | 3807386 | |
| 948 | AJE15426.1 | 3811 | 10382 | 1083 | | | | | 2249957 | 2257829 | |
| 949 | | | | | | | | | 869 | 4909 | |
| 950 | EHO11884.1 | 3818 | 10389 | 1089 | | | | | 1267870 | 1274810 | |
| 951 | CAY72980.1 | 3822 | 10393 | 1081 | | | | | 680846 | 688730 | |
| 952 | CAX54370.1 | 3826 | 10397 | 1081 | | | | | 680824 | 688708 | |
| 953 | AGA90550.1 | 3830 | 10401 | 966 | | | | | 1965119 | 1972029 | |
| 954 | CUH46422.1 | 3834 | 10405 | 1042 | | | | | 70525 | 78149 | |
| 955 | AMO80631.1 | 3838 | 10409 | 1082 | | | | | 1259869 | 1267751 | |
| 956 | AGP47381.1 | 3842 | 10413 | 1042 | | | | | 4767443 | 4774474 | |
| 957 | KIN78153.1 | 3846 | 10417 | 1032 | | | | | 1354 | 9819 | |
| 958 | AMS40140.1 | 3850 | 10421 | 1000 | | | | | 1255627 | 1262896 | |
| 959 | ABK50006.1 | 3854 | 10425 | 1148 | | | | | 4544823 | 4552542 | |
| 960 | CAP40553.1 | 3858 | 10429 | 1246 | | | | | 241480 | 249729 | |
| 961 | ERI29927.1 | 3862 | 10433 | 501 | | | | | 71963 | 77851 | |
| 962 | EPZ87097.1 | 3866 | 10437 | 1253 | | | | | 687271 | 695415 | |
| 963 | KKI79918.1 | 3870 | 10441 | 1221 | | | | | 2182489 | 2190633 | |
| 964 | KVD94187.1 | 3874 | 10445 | 1253 | | | | | 12091 | 20284 | |
| 965 | KVT83336.1 | 3878 | 10449 | 1288 | | | | | 78180 | 86479 | |
| 966 | KVW62587.1 | 3882 | 10453 | 1288 | | | | | 3262 | 11561 | |
| 967 | | | | | | | | | 4322511 | 4327158 | |
| 968 | ADD01960.1 | 3888 | 10459 | 931 | | | | | 714604 | 720875 | |
| 969 | AEG43647.1 | 3892 | 10463 | 1005 | | | | | 936023 | 943033 | |
| 970 | ACY51402.1 | 3896 | 10467 | 1149 | | | | | 1803262 | 1810997 | |
| 971 | EDN58082.1 | 3900 | 10471 | 1149 | | | | | 98875 | 106610 | |
| 972 | AIR88229.1 | 3904 | 10475 | 1082 | | | | | 609086 | 616908 | |
| 973 | ABC30367.1 | 3908 | 10479 | 1003 | | | | | 3762737 | 3770015 | |
| 974 | ALV90956.1 | 3912 | 10483 | 1083 | | | | | 367721 | 375594 | |
| 975 | EDL49430.1 | 3916 | 10487 | 1270 | | | | | 30300 | 38162 | |
| 976 | CAQ68799.1 | 3920 | 10491 | 1097 | | | | | 858781 | 866499 | |
| 977 | BAH37230.1 | 3924 | 10495 | 1150 | | | | | 220564 | 228082 | |
| 978 | KGU86623.1 | 3928 | 10499 | 1082 | | | | | 16946 | 24768 | |
| 979 | AFE11186.1 | 3931 | 10502 | 858 | | | | | 3778679 | 3785329 | |
| 980 | EHJ60588.1 | 3935 | 10506 | 1271 | | | | | 82585 | 90450 | |
| 981 | AIT79634.1 | 3939 | 10510 | 1271 | | | | | 1565213 | 1573078 | |
| 982 | | | | | | | | | 1479567 | 1484303 | |
| 983 | ADP10189.1 | 3946 | 10517 | 1081 | | | | | 558724 | 566608 | |
| 984 | ABM39547.1 | 3950 | 10521 | 1259 | | | | | 145574 | 154312 | |
| 985 | EIL89343.1 | 3954 | 10525 | 1080 | | | | | 112461 | 119985 | |
| 986 | GAC31731.1 | 3958 | 10529 | 1156 | | | | | 31246 | 38984 | |
| 987 | | | | | | | | | 2144456 | 2148780 | |
| 988 | KFK00372.1 | 3965 | 10536 | 1080 | | | | | 91457 | 99321 | |
| 989 | CDT04312.1 | 3969 | 10540 | 1148 | | | | | 483924 | 491657 | |
| 990 | CDT11724.1 | 3973 | 10544 | 1148 | | | | | 106517 | 114250 | |
| 991 | KXV35458.1 | 3977 | 10548 | 1028 | | | | | 11957 | 19254 | |
| 992 | EAT06419.1 | 3981 | 10552 | 952 | | | | | 18325 | 29199 | |
| 993 | BAQ44677.1 | 3985 | 10556 | 1033 | | | | | 1242440 | 1249828 | |
| 994 | CCE22487.1 | 3989 | 10560 | 1003 | | | | | 864299 | 871500 | |
| 995 | CEG51219.1 | 3993 | 10564 | 1012 | | | | | 170325 | 178733 | |
| 996 | EJI89229.1 | 3997 | 10568 | 390 | | | | | 559407 | 565225 | |
| 997 | KDE37031.1 | 4001 | 10572 | 1081 | | | | | 305795 | 313692 | |
| 998 | | | | | | | | | 2602720 | 2606694 | |
| 999 | GAE46383.1 | 4007 | 10578 | 810 | | | | | 27879 | 34299 | |
| 1000 | EAQ47299.1 | 4011 | 10582 | 1032 | | | | | 3319389 | 3327854 | |
| 1001 | EDP59416.1 | 4015 | 10586 | 1149 | | | | | 217393 | 225128 | |
| 1002 | CUH52009.1 | 4019 | 10590 | 1071 | | | | | 33047 | 40102 | |
| 1003 | CVK01153.1 | 4023 | 10594 | 1256 | | | | | 2323 | 11357 | |
| 1004 | ABE74737.1 | 4027 | 10598 | 1075 | | | | | 1137832 | 1145312 | |
| 1005 | CCW17773.1 | 4030 | 10601 | 1251 | | | | | 59 | 7588 | |
| 1006 | | | | | | | | | 4213818 | 4218168 | |
| 1007 | AFU46479.1 | 4037 | 10608 | 1093 | | | | | 3031899 | 3040069 | |
| 1008 | EZI30548.1 | 4041 | 10612 | 1082 | | | | | 320199 | 328021 | |
| 1009 | | | | | | | | | 1174385 | 1178645 | |
| 1010 | GAA77180.1 | 4048 | 10619 | 1151 | | | | | 153172 | 160898 | |
| 1011 | AMK16853.1 | 4052 | 10623 | 1074 | | | | | 479754 | 487343 | |
| 1012 | ADQ06818.1 | 4055 | 10626 | 939 | | | | | 1109840 | 1116255 | |
| 1013 | EFN90476.1 | 4059 | 10630 | 1090 | | | | | 8688 | 15379 | |
| 1014 | KXB76240.1 | 4062 | 10633 | 255 | | | | | 20 | 2822 | |
| 1015 | EPR18408.1 | 4066 | 10637 | 441 | | | | | 4420 | 10039 | |
| 1016 | KMO18104.1 | 4070 | 10641 | 968 | | | | | 1639 | 9617 | |
| 1017 | | | | | | | | | 3802 | 7852 | |
| 1018 | ACT17073.1 | 4077 | 10648 | 1248 | | | | | 1186285 | 1194417 | |
| 1019 | KMW37146.1 | 4081 | 10652 | 916 | | | | | 352471 | 359778 | |
| 1020 | CUB00796.1 | 4084 | 10655 | 1032 | | | | | 1448 | 6835 | |
| 1021 | ADJ28734.1 | 4088 | 10659 | 1145 | | | | | 2071841 | 2079565 | |
| 1022 | AJR24434.1 | 4091 | 10662 | 1074 | | | | | 2738468 | 2744069 | |
| 1023 | AJR25290.1 | 4095 | 10666 | 1073 | | | | | 3840140 | 3847708 | |
| 1024 | EHO63913.1 | 4099 | 10670 | 1088 | | | | | 191966 | 200316 | |
| 1025 | KVM95914.1 | 4103 | 10674 | 1250 | | | | | 212451 | 220642 | |
| 1026 | EDY06974.1 | 4107 | 10678 | 874 | | | | | 313023 | 319483 | |
| 1027 | | | | | | | | | 2634211 | 2638780 | |
| 1028 | EHR42624.1 | 4114 | 10685 | 986 | | | | | 67071 | 74599 | |
| 1029 | EHD22820.1 | 4118 | 10689 | 1083 | | | | | 3735867 | 3743740 | |
| 1030 | CRI66751.1 | 4122 | 10693 | 1249 | | | | | 5085246 | 5093439 | |
| 1031 | EFY05646.1 | 4126 | 10697 | 1109 | | | | | 5476 | 13083 | |
| 1032 | EKN30944.1 | 4130 | 10701 | 916 | | | | | 354487 | 361794 | |
| 1033 | KPL51800.1 | 4134 | 10705 | 1004 | | | | | 1329326 | 1336639 | |
| 1034 | AMN39056.1 | 4137 | 10708 | 960 | | | | | 660425 | 667875 | |
| 1035 | KMV29897.1 | 4141 | 10712 | 927 | | | | | 126899 | 133697 | |
| 1036 | CCA91257.1 | 4145 | 10716 | 1170 | | | | | 303090 | 310618 | |
| 1037 | CCA92390.1 | 4149 | 10720 | 1271 | | | | | 1576101 | 1583966 | |
| 1038 | ADE38424.1 | 4153 | 10724 | 1130 | | | | | 185251 | 192804 | |
| 1039 | EPR27901.1 | 4157 | 10728 | 666 | | | | | 4547 | 11006 | |
| 1040 | KYC33909.1 | 4161 | 10732 | 1073 | | | | | 68665 | 76233 | |
| 1041 | | | | | | | | | 3008592 | 3012561 | |
| 1042 | EPR43454.1 | 4168 | 10739 | 962 | | | | | 39663 | 46452 | |
| 1043 | ESU31840.1 | 4171 | 10742 | 886 | | | | | 2112774 | 2119197 | |
| 1044 | KHJ69398.1 | 4175 | 10746 | 1083 | | | | | 29299 | 37172 | |
| 1045 | ERO56338.1 | 4179 | 10750 | 1080 | | | | | 712736 | 720606 | |
| 1046 | KHN63197.1 | 4183 | 10754 | 1081 | | | | | 41108 | 48981 | |
| 1047 | | | | | | | | | 24422 | 28518 | |
| 1048 | CUB04081.1 | 4190 | 10761 | 1008 | | | | | 169304 | 176741 | |
| 1049 | EJM18416.1 | 4194 | 10765 | 1082 | | | | | 19009 | 26828 | |
| 1050 | EUB73629.1 | 4198 | 10769 | 1009 | | | | | 891473 | 899518 | |
| 1051 | | | | | | | | | 80 | 4289 | |
| 1052 | EOU44973.1 | 4205 | 10776 | 1079 | | | | | 2232245 | 2240572 | |
| 1053 | ELC22343.1 | 4209 | 10780 | 1079 | | | | | 132985 | 141312 | |
| 1054 | EOU82995.1 | 4213 | 10784 | 1079 | | | | | 1010570 | 1018897 | |
| 1055 | KXU33091.1 | 4217 | 10788 | 1073 | | | | | 97745 | 105313 | |
| 1056 | EOV44199.1 | 4221 | 10792 | 1079 | | | | | 2185792 | 2194119 | |
| 1057 | EOQ55530.1 | 4225 | 10796 | 1080 | | | | | 932985 | 940849 | |
| 1058 | EOV91300.1 | 4229 | 10800 | 1079 | | | | | 1475831 | 1484158 | |
| 1059 | EOW68212.1 | 4233 | 10804 | 1079 | | | | | 141883 | 150210 | |
| 1060 | AFY17879.1 | 4237 | 10808 | 1011 | | | | | 795376 | 803717 | |
| 1061 | KHK57377.1 | 4241 | 10812 | 1254 | | | | | 222685 | 230903 | |
| 1062 | ENW78278.1 | 4245 | 10816 | 1067 | | | | | 453952 | 461376 | |
| 1063 | EME68213.1 | 4249 | 10820 | 1120 | | | | | 587 | 8575 | |
| 1064 | CDE94531.1 | 4253 | 10824 | 972 | | | | | 1395 | 8284 | |
| 1065 | CDA50131.1 | 4257 | 10828 | 1097 | | | | | 3567 | 10917 | |
| 1066 | ESQ90331.1 | 4261 | 10832 | 1186 | | | | | 26132 | 33751 | |
| 1067 | ESQ74517.1 | 4265 | 10836 | 1252 | | | | | 23941 | 31878 | |
| 1068 | AII86802.1 | 4269 | 10840 | 1040 | | | | | 1362274 | 1370579 | |
| 1069 | KPQ04146.1 | 4273 | 10844 | 1149 | | | | | 804600 | 812315 | |
| 1070 | CUS49189.1 | 4277 | 10848 | 1149 | | | | | 2278030 | 2285745 | |
| 1071 | ESN27962.1 | 4281 | 10852 | 1080 | | | | | 61729 | 69537 | |
| 1072 | EPJ56198.1 | 4285 | 10856 | 994 | | | | | 22834 | 30573 | |
| 1073 | EQA99139.1 | 4289 | 10860 | 1250 | | | | | 233840 | 241719 | |
| 1074 | KMS61418.1 | 4293 | 10864 | 1250 | | | | | 3101463 | 3109342 | |
| 1075 | AGT31735.1 | 4297 | 10868 | 865 | | | | | 1327845 | 1334314 | |
| 1076 | AIY65735.1 | 4301 | 10872 | 1152 | | | | | 2507239 | 2514925 | |
| 1077 | KXW55385.1 | 4305 | 10876 | 1331 | | | | | 74261 | 82426 | |
| 1078 | AKU92630.1 | 4309 | 10880 | 920 | | | | | 3541455 | 3548134 | |
| 1079 | | | | | | | | | 1 | 3561 | |
| 1080 | ERS83849.1 | 4315 | 10886 | 545 | | | | | 18505 | 26132 | |
| 1081 | KXU87123.1 | 4319 | 10890 | 1257 | | | | | 16810 | 25813 | |
| 1082 | KLU37748.1 | 4323 | 10894 | 1284 | | | | | 146865 | 155158 | |
| 1083 | EUC70009.1 | 4327 | 10898 | 1004 | | | | | 47366 | 54537 | |
| 1084 | EXI82586.1 | 4331 | 10902 | 1250 | | | | | 64911 | 73149 | |
| 1085 | KAK42946.1 | 4335 | 10906 | 1102 | | | | | 16857 | 25146 | |
| 1086 | BAO84443.1 | 4339 | 10910 | 1255 | | | | | 2386040 | 2394279 | |
| 1087 | CQR46608.1 | 4342 | 10913 | 898 | | | | | 914451 | 920975 | |
| 1088 | BAP87808.1 | 4346 | 10917 | 1256 | | | | | 715557 | 723918 | |
| 1089 | KDP87794.1 | 4350 | 10921 | 1097 | | | | | 19414 | 27256 | |
| 1090 | KQB03826.1 | 4354 | 10925 | 1149 | | | | | 16315 | 24050 | |
| 1091 | KQA99547.1 | 4358 | 10929 | 1149 | | | | | 159021 | 166756 | |
| 1092 | KEY85733.1 | 4362 | 10933 | 1082 | | | | | 94535 | 102357 | |
| 1093 | GAK41826.1 | 4366 | 10937 | 917 | | | | | 154548 | 161205 | |
| 1094 | KVV58317.1 | 4370 | 10941 | 1263 | | | | | 7829 | 16059 | |
| 1095 | KVX28282.1 | 4374 | 10945 | 1263 | | | | | 7829 | 16059 | |
| 1096 | KVZ97544.1 | 4378 | 10949 | 1250 | | | | | 209019 | 217210 | |
| 1097 | AJY51018.1 | 4382 | 10953 | 1010 | | | | | 2719272 | 2726819 | |
| 1098 | CDX33072.1 | 4386 | 10957 | 992 | | | | | 46644 | 54080 | |
| 1099 | CDX43769.1 | 4390 | 10961 | 992 | | | | | 2178 | 9614 | |
| 1100 | KJS80659.1 | 4393 | 10964 | 1169 | | | | | 21617 | 29198 | |
| 1101 | KGD90265.1 | 4397 | 10968 | 1293 | | | | | 461343 | 469645 | |
| 1102 | | | | | | | | | 9785 | 13551 | |
| 1103 | KOC90085.1 | 4404 | 10975 | 1083 | | | | | 30118 | 37991 | |
| 1104 | KOC94081.1 | 4408 | 10979 | 1083 | | | | | 18469 | 26342 | |
| 1105 | KHF78366.1 | 4412 | 10983 | 1069 | | | | | 824611 | 832051 | |
| 1106 | KQB52479.1 | 4416 | 10987 | 1082 | | | | | 8344 | 16187 | |
| 1107 | AJP47986.1 | 4419 | 10990 | 1254 | | | | | 1006536 | 1012681 | |
| 1108 | KIN89384.1 | 4423 | 10994 | 1285 | | | | | 719621 | 727970 | |
| 1109 | ALQ39735.1 | 4427 | 10998 | 1163 | | | | | 878815 | 885968 | |
| 1110 | KIQ83918.1 | 4431 | 11002 | 1078 | | | | | 96014 | 103978 | |
| 1111 | KRP95694.1 | 4435 | 11006 | 1082 | | | | | 120090 | 127912 | |
| 1112 | | | | | | | | | 3688839 | 3693414 | |
| 1113 | | | | | | | | | 318 | 5435 | |
| 1114 | KJM39256.1 | 4445 | 11016 | 1080 | | | | | 95946 | 103809 | |
| 1115 | KJJ99148.1 | 4449 | 11020 | 1260 | | | | | 335865 | 344079 | |
| 1116 | KJQ91386.1 | 4453 | 11024 | 1149 | | | | | 23951 | 31686 | |
| 1117 | KJQ87532.1 | 4457 | 11028 | 1149 | | | | | 23951 | 31686 | |
| 1118 | AKI01766.1 | 4461 | 11032 | 989 | | | | | 3205142 | 3212616 | |
| 1119 | KMP10825.1 | 4464 | 11035 | 1132 | | | | | 4141 | 11432 | |
| 1120 | KJS25179.1 | 4468 | 11039 | 1012 | | | | | 393 | 8801 | |
| 1121 | KJS49373.1 | 4471 | 11042 | 1169 | | | | | 1742 | 9323 | |
| 1122 | KLG11563.1 | 4475 | 11046 | 1079 | | | | | 101392 | 109725 | |
| 1123 | KLP25068.1 | 4479 | 11050 | 1080 | | | | | 12174 | 20036 | |
| 1124 | KLG16382.1 | 4483 | 11054 | 1080 | | | | | 92870 | 100733 | |
| 1125 | AKQ40861.1 | 4487 | 11058 | 1243 | | | | | 103859 | 111640 | |
| 1126 | KLR33908.1 | 4491 | 11062 | 1080 | | | | | 7456 | 15318 | |
| 1127 | KLQ90826.1 | 4495 | 11066 | 1080 | | | | | 420860 | 428722 | |
| 1128 | KYO07693.1 | 4499 | 11070 | 1079 | | | | | 361776 | 370109 | |
| 1129 | KYO16911.1 | 4502 | 11073 | 1080 | | | | | 24041 | 29699 | |
| 1130 | KLP47186.1 | 4506 | 11077 | 1080 | | | | | 39512 | 47374 | |
| 1131 | ALE53301.1 | 4510 | 11081 | 1252 | | | | | 36044 | 44241 | |
| 1132 | KQB93620.1 | 4514 | 11085 | 874 | | | | | 20482 | 26942 | |
| 1133 | AMN49380.1 | 4518 | 11089 | 1075 | | | | | 1279035 | 1286515 | |
| 1134 | | | | | | | | | 3339822 | 3344259 | |
| 1135 | ALK96266.1 | 4525 | 11096 | 1284 | | | | | 1851643 | 1859936 | |
| 1136 | CUJ89784.1 | 4529 | 11100 | 1071 | | | | | 341420 | 348475 | |
| 1137 | CUJ83699.1 | 4533 | 11104 | 1039 | | | | | 311766 | 319390 | |
| 1138 | CUQ65731.1 | 4537 | 11108 | 1151 | | | | | 722567 | 729986 | |
| 1139 | KVV05823.1 | 4541 | 11112 | 1082 | | | | | 20533 | 28381 | |
| 1140 | KVV04343.1 | 4545 | 11116 | 1082 | | | | | 212447 | 220295 | |
| 1141 | KUO77798.1 | 4549 | 11120 | 1163 | | | | | 3229 | 10766 | |
| 1142 | KQM30741.1 | 4553 | 11124 | 1069 | | | | | 115202 | 122116 | |
| 1143 | KQM97535.1 | 4557 | 11128 | 1194 | | | | | 10557 | 18537 | |
| 1144 | KQN80960.1 | 4561 | 11132 | 1069 | | | | | 115205 | 122119 | |
| 1145 | KQQ29439.1 | 4565 | 11136 | 1033 | | | | | 213672 | 221015 | |
| 1146 | KQR49973.1 | 4569 | 11140 | 1250 | | | | | 159043 | 167267 | |
| 1147 | | | | | | | | | 618525 | 622872 | |
| 1148 | KQS63849.1 | 4576 | 11147 | 1033 | | | | | 214815 | 222241 | |
| 1149 | KQV35759.1 | 4580 | 11151 | 1033 | | | | | 269085 | 276511 | |
| 1150 | KQY95045.1 | 4584 | 11155 | 1228 | | | | | 46871 | 54637 | |
| 1151 | KRD25373.1 | 4588 | 11159 | 1093 | | | | | 92331 | 100492 | |
| 1152 | KRD25866.1 | 4592 | 11163 | 1033 | | | | | 269071 | 276497 | |
| 1153 | KQV20176.1 | 4596 | 11167 | 1084 | | | | | 52687 | 60515 | |
| 1154 | KQX34250.1 | 4600 | 11171 | 1028 | | | | | 21428 | 28723 | |
| 1155 | KRE22553.1 | 4604 | 11175 | 999 | | | | | 7778 | 15050 | |
| 1156 | KRA26259.1 | 4608 | 11179 | 1082 | | | | | 142278 | 150100 | |
| 1157 | KRA28531.1 | 4612 | 11183 | 1228 | | | | | 295879 | 303645 | |
| 1158 | KRB49803.1 | 4616 | 11187 | 988 | | | | | 113257 | 120693 | |
| 1159 | KQC46107.1 | 4620 | 11191 | 874 | | | | | 19282 | 25742 | |
| 1160 | KWV49699.1 | 4624 | 11195 | 1032 | | | | | 46982 | 54421 | |
| 1161 | KUI99565.1 | 4628 | 11199 | 1156 | | | | | 1381229 | 1388527 | |
| 1162 | KTG21221.1 | 4632 | 11203 | 1007 | | | | | 2662 | 10353 | |
| 1163 | CVJ90715.1 | 4636 | 11207 | 1285 | | | | | 15727 | 24792 | |
| 1164 | CVK24351.1 | 4640 | 11211 | 1264 | | | | | 173387 | 182161 | |
| 1165 | CVK22607.1 | 4644 | 11215 | 1094 | | | | | 247062 | 254978 | |
| 1166 | CVK27721.1 | 4648 | 11219 | 1104 | | | | | 11000 | 19159 | |
| 1167 | CVJ14724.1 | 4652 | 11223 | 1257 | | | | | 373326 | 382397 | |
| 1168 | CVJ96960.1 | 4656 | 11227 | 1256 | | | | | 4116 | 13150 | |
| 1169 | KXS40894.1 | 4660 | 11231 | 781 | | | | | 1 | 6250 | |
| 1170 | KXW57566.1 | 4664 | 11235 | 1236 | | | | | 203 | 8225 | |
| 1171 | EJO46333.1 | 4668 | 11239 | 1079 | | | | | 3283 | 11091 | |
| 1172 | EPY95206.1 | 4672 | 11243 | 1079 | | | | | 81138 | 89471 | |
| 1173 | EUL64245.1 | 4676 | 11247 | 1079 | | | | | 52392 | 60200 | |
| 1174 | AMQ20315.1 | 4680 | 11251 | 874 | | | | | 858032 | 864492 | |
| 1175 | | | | | ADB42632.1 | 4683 | 11254 | 260 | 34303 | 37171 | |
| 1176 | | | | | EIA72759.1 | 4686 | 11257 | 272 | 4981 | 7798 | |
| 1177 | | | | | EIA87027.1 | 4689 | 11260 | 272 | 587 | 3404 | |
| 1178 | | | | | EIA94949.1 | 4692 | 11263 | 272 | 4929 | 7746 | |
| 1179 | | | | | EIA95447.1 | 4695 | 11266 | 272 | 4929 | 7746 | |
| 1180 | | | | | KQH60906.1 | 4698 | 11269 | 272 | 4977 | 7794 | |
| 1181 | | | | | KQI25490.1 | 4701 | 11272 | 272 | 6992 | 9809 | |
| 1182 | | | | | KQI25382.1 | 4704 | 11275 | 272 | 29293 | 32110 | |
| 1183 | | | | | KRS58893.1 | 4707 | 11278 | 272 | 205116 | 207933 | |
| 1184 | | | | | KRS89291.1 | 4710 | 11281 | 272 | 37988 | 40802 | |
| 1185 | | | | | KEA44660.1 | 4713 | 11284 | 258 | 75386 | 78313 | |
| 1186 | | | | | ALX12000.1 | 4716 | 11287 | 282 | 2362582 | 2365410 | |
| 1187 | | | | | AMB80663.1 | 4719 | 11290 | 171 | 3818332 | 3821205 | |
| 1188 | | | | | CZG58405.1 | 4722 | 11293 | 288 | 228584 | 231634 | |
| 1189 | | | | | CZH63846.1 | 4725 | 11296 | 288 | 299658 | 302708 | |
| 1190 | | | | | CZG92852.1 | 4728 | 11299 | 288 | 132992 | 136042 | |
| 1191 | | | | | CZI24994.1 | 4731 | 11302 | 288 | 5076 | 8126 | |
| 1192 | | | | | CZI29056.1 | 4734 | 11305 | 288 | 236475 | 239525 | |
| 1193 | | | | | CZH75430.1 | 4737 | 11308 | 288 | 4977 | 8027 | |
| 1194 | | | | | CZI28436.1 | 4740 | 11311 | 288 | 236475 | 239525 | |
| 1195 | | | | | CZQ90608.1 | 4743 | 11314 | 288 | 5076 | 8126 | |
| 1196 | | | | | EEZ95916.1 | 4746 | 11317 | 270 | 1176272 | 1179193 | |
| 1197 | | | | | ADG61930.1 | 4749 | 11320 | 238 | 1638409 | 1641357 | |
| 1198 | | | | | EGE12535.1 | 4752 | 11323 | 283 | 142451 | 145399 | |
| 1199 | | | | | EGE10943.1 | 4755 | 11326 | 283 | 32251 | 35199 | |
| 1200 | | | | | EGE11784.1 | 4758 | 11329 | 238 | 35082 | 38030 | |
| 1201 | | | | | EGE15773.1 | 4761 | 11332 | 283 | 36412 | 38991 | |
| 1202 | | | | | EGE17283.1 | 4764 | 11335 | 283 | 104584 | 107532 | |
| 1203 | | | | | EGE18523.1 | 4767 | 11338 | 283 | 113565 | 116513 | |
| 1204 | | | | | EGE26178.1 | 4770 | 11341 | 283 | 113528 | 116215 | |
| 1205 | | | | | EGE24865.1 | 4773 | 11344 | 283 | 113550 | 116498 | |
| 1206 | | | | | EKF83141.1 | 4776 | 11347 | 283 | 182847 | 185795 | |
| 1207 | | | | | AIT43972.1 | 4779 | 11350 | 283 | 1706599 | 1709286 | |
| 1208 | | | | | ALD78150.1 | 4782 | 11353 | 363 | 3528333 | 3531638 | |
| 1209 | | | | | KJI56240.1 | 4785 | 11356 | 363 | 155926 | 159387 | |
| 1210 | | | | | KKW50396.1 | 4788 | 11359 | 286 | 1 | 2089 | |
| 1211 | | | | | KFF70138.1 | 4791 | 11362 | 291 | 156818 | 159810 | |
| 1212 | | | | | KHS98347.1 | 4794 | 11365 | 291 | 92311 | 95303 | |
| 1213 | | | | | AAG59480.1 | 4797 | 11368 | 367 | 5390202 | 5393675 | |
| 1214 | | | | | BAB38679.1 | 4800 | 11371 | 367 | 5360199 | 5363672 | |
| 1215 | | | | | ACA79492.1 | 4803 | 11374 | 367 | 4265907 | 4269380 | |
| 1216 | | | | | ACB17260.1 | 4806 | 11377 | 367 | 4909284 | 4912757 | |
| 1217 | | | | | ACI34823.1 | 4809 | 11380 | 367 | 5433847 | 5437320 | |
| 1218 | | | | | ACT75060.1 | 4812 | 11383 | 367 | 5389908 | 5393381 | |
| 1219 | | | | | ADD59515.1 | 4815 | 11386 | 367 | 5198464 | 5201937 | |
| 1220 | | | | | EEC29617.1 | 4818 | 11389 | 367 | 1434820 | 1438293 | |
| 1221 | | | | | EFK27046.1 | 4821 | 11392 | 367 | 3332 | 6805 | |
| 1222 | | | | | EDU34130.1 | 4824 | 11395 | 367 | 92585 | 96058 | |
| 1223 | | | | | EDU54254.1 | 4827 | 11398 | 367 | 93693 | 97166 | |
| 1224 | | | | | EDU68785.1 | 4830 | 11401 | 367 | 71232 | 74705 | |
| 1225 | | | | | EDU76194.1 | 4833 | 11404 | 367 | 110915 | 114388 | |
| 1226 | | | | | EDU82467.1 | 4836 | 11407 | 367 | 309575 | 313048 | |
| 1227 | | | | | EDU87384.1 | 4839 | 11410 | 367 | 111793 | 115266 | |
| 1228 | | | | | EDU93251.1 | 4842 | 11413 | 367 | 312441 | 315914 | |
| 1229 | | | | | EDU97861.1 | 4845 | 11416 | 367 | 75960 | 79433 | |
| 1230 | | | | | EGI28990.1 | 4848 | 11419 | 367 | 292706 | 296178 | |
| 1231 | | | | | EDZ76317.1 | 4851 | 11422 | 367 | 2709358 | 2712831 | |
| 1232 | | | | | EDZ82369.1 | 4854 | 11425 | 367 | 2577686 | 2581159 | |
| 1233 | | | | | EDZ88717.1 | 4857 | 11428 | 367 | 3697436 | 3700909 | |
| 1234 | | | | | EFX08671.1 | 4860 | 11431 | 367 | 283864 | 287337 | |
| 1235 | | | | | EFX13460.1 | 4863 | 11434 | 367 | 289307 | 292780 | |
| 1236 | | | | | EFX18237.1 | 4866 | 11437 | 367 | 289258 | 292731 | |
| 1237 | | | | | EFX28076.1 | 4869 | 11440 | 367 | 211056 | 214373 | |
| 1238 | | | | | EFX32589.1 | 4872 | 11443 | 367 | 18337 | 21654 | |
| 1239 | | | | | EGD70491.1 | 4875 | 11446 | 367 | 274421 | 277894 | |
| 1240 | | | | | EGD69131.1 | 4878 | 11449 | 367 | 361430 | 364903 | |
| 1241 | | | | | EFW65236.1 | 4881 | 11452 | 367 | 470631 | 474104 | |
| 1242 | | | | | AEZ43445.1 | 4884 | 11455 | 367 | 5125498 | 5128971 | |
| 1243 | | | | | EHU86057.1 | 4887 | 11458 | 367 | 77320 | 80793 | |
| 1244 | | | | | EHU89502.1 | 4890 | 11461 | 367 | 311953 | 315268 | |
| 1245 | | | | | EHV18497.1 | 4893 | 11464 | 367 | 37259 | 40576 | |
| 1246 | | | | | EHV31799.1 | 4896 | 11467 | 367 | 307976 | 311449 | |
| 1247 | | | | | EHV46591.1 | 4899 | 11470 | 367 | 161927 | 165244 | |
| 1248 | | | | | EIF87144.1 | 4902 | 11473 | 367 | 447700 | 451173 | |
| 1249 | | | | | AFJ31991.1 | 4905 | 11476 | 367 | 5247976 | 5251449 | |
| 1250 | | | | | EIN15907.1 | 4908 | 11479 | 367 | 9700 | 13173 | |
| 1251 | | | | | EIP63614.1 | 4911 | 11482 | 367 | 76951 | 80424 | |
| 1252 | | | | | EIP71436.1 | 4914 | 11485 | 367 | 10354 | 13827 | |
| 1253 | | | | | EIO79098.1 | 4917 | 11488 | 351 | 77077 | 80550 | |
| 1254 | | | | | EIN94506.1 | 4920 | 11491 | 367 | 76794 | 80267 | |
| 1255 | | | | | EIO32393.1 | 4923 | 11494 | 367 | 78914 | 82387 | |
| 1256 | | | | | EIO45814.1 | 4926 | 11497 | 367 | 241456 | 244929 | |
| 1257 | | | | | EIO63773.1 | 4929 | 11500 | 367 | 250314 | 253787 | |
| 1258 | | | | | EIO69655.1 | 4932 | 11503 | 367 | 10239 | 13712 | |
| 1259 | | | | | EIO86632.1 | 4935 | 11506 | 367 | 250688 | 254161 | |
| 1260 | | | | | EIP72923.1 | 4938 | 11509 | 367 | 9692 | 13165 | |
| 1261 | | | | | EIP72311.1 | 4941 | 11512 | 367 | 26220 | 29693 | |
| 1262 | | | | | EIP50027.1 | 4944 | 11515 | 367 | 26239 | 29712 | |
| 1263 | | | | | EIP49011.1 | 4947 | 11518 | 367 | 9686 | 13159 | |
| 1264 | | | | | EIP40252.1 | 4950 | 11521 | 367 | 9696 | 13169 | |
| 1265 | | | | | EIP35337.1 | 4953 | 11524 | 367 | 26235 | 29708 | |
| 1266 | | | | | EIP27296.1 | 4956 | 11527 | 367 | 23530 | 26709 | |
| 1267 | | | | | EIP38851.1 | 4959 | 11530 | 367 | 75543 | 79016 | |
| 1268 | | | | | EIP33940.1 | 4962 | 11533 | 367 | 9690 | 13163 | |
| 1269 | | | | | EIP10351.1 | 4965 | 11536 | 367 | 9692 | 13165 | |
| 1270 | | | | | EIP05659.1 | 4968 | 11539 | 367 | 7027 | 10500 | |
| 1271 | | | | | EIP03401.1 | 4971 | 11542 | 367 | 1558 | 4737 | |
| 1272 | | | | | EIO92489.1 | 4974 | 11545 | 367 | 26262 | 29735 | |
| 1273 | | | | | EIO87488.1 | 4977 | 11548 | 367 | 26302 | 29775 | |
| 1274 | | | | | EIN16731.1 | 4980 | 11551 | 367 | 9693 | 13166 | |
| 1275 | | | | | EIN15643.1 | 4983 | 11554 | 367 | 3483 | 6956 | |
| 1276 | | | | | EIN33047.1 | 4986 | 11557 | 367 | 9701 | 13174 | |
| 1277 | | | | | EIO86815.1 | 4989 | 11560 | 39 | 1 | 1412 | |
| 1278 | | | | | EIO65805.1 | 4992 | 11563 | 367 | 9691 | 13164 | |
| 1279 | | | | | EIO79511.1 | 4995 | 11566 | 162 | 3560 | 6418 | |
| 1280 | | | | | EIO49184.1 | 4998 | 11569 | 367 | 9700 | 13173 | |
| 1281 | | | | | EIO29775.1 | 5001 | 11572 | 367 | 1758 | 5231 | |
| 1282 | | | | | EIO24810.1 | 5004 | 11575 | 105 | 9701 | 12947 | |
| 1283 | | | | | EIO11191.1 | 5007 | 11578 | 367 | 9700 | 13173 | |
| 1284 | | | | | EIO07423.1 | 5010 | 11581 | 367 | 9694 | 13167 | |
| 1285 | | | | | EIO07038.1 | 5013 | 11584 | 367 | 9698 | 13171 | |
| 1286 | | | | | EIO09723.1 | 5016 | 11587 | 367 | 9696 | 13169 | |
| 1287 | | | | | EIN89792.1 | 5019 | 11590 | 367 | 112339 | 115812 | |
| 1288 | | | | | EIN88208.1 | 5022 | 11593 | 367 | 26149 | 29622 | |
| 1289 | | | | | EIN85417.1 | 5025 | 11596 | 367 | 9700 | 13173 | |
| 1290 | | | | | EIN69800.1 | 5028 | 11599 | 367 | 9696 | 13169 | |
| 1291 | | | | | EIN65411.1 | 5031 | 11602 | 367 | 9693 | 13166 | |
| 1292 | | | | | EIN68644.1 | 5034 | 11605 | 367 | 9696 | 13169 | |
| 1293 | | | | | EIN52364.1 | 5037 | 11608 | 367 | 9696 | 13169 | |
| 1294 | | | | | EIN49110.1 | 5040 | 11611 | 367 | 26227 | 29700 | |
| 1295 | | | | | EIN33834.1 | 5043 | 11614 | 367 | 9692 | 13165 | |
| 1296 | | | | | EIN35237.1 | 5046 | 11617 | 367 | 29162 | 32635 | |
| 1297 | | | | | EKG95779.1 | 5049 | 11620 | 367 | 3432 | 6905 | |
| 1298 | | | | | EKH07678.1 | 5052 | 11623 | 367 | 364931 | 368404 | |
| 1299 | | | | | EKJ54993.1 | 5055 | 11626 | 367 | 9700 | 13173 | |
| 1300 | | | | | EKJ48079.1 | 5058 | 11629 | 367 | 9705 | 13178 | |
| 1301 | | | | | EKJ52900.1 | 5061 | 11632 | 367 | 9688 | 13161 | |
| 1302 | | | | | EKJ36496.1 | 5064 | 11635 | 367 | 9694 | 13167 | |
| 1303 | | | | | EKJ47660.1 | 5067 | 11638 | 367 | 9700 | 13173 | |
| 1304 | | | | | EKJ36025.1 | 5070 | 11641 | 367 | 9698 | 13171 | |
| 1305 | | | | | EKJ20860.1 | 5073 | 11644 | 367 | 9698 | 13015 | |
| 1306 | | | | | EKJ19822.1 | 5076 | 11647 | 367 | 9694 | 13167 | |
| 1307 | | | | | EKJ00849.1 | 5079 | 11650 | 367 | 23510 | 26983 | |
| 1308 | | | | | EKJ92950.1 | 5082 | 11653 | 367 | 112428 | 115901 | |
| 1309 | | | | | EKJ05366.1 | 5085 | 11656 | 367 | 26146 | 29619 | |
| 1310 | | | | | EKI82673.1 | 5088 | 11659 | 367 | 26272 | 29745 | |
| 1311 | | | | | EKI91868.1 | 5091 | 11662 | 367 | 75553 | 79026 | |
| 1312 | | | | | EKI72761.1 | 5094 | 11665 | 351 | 26220 | 29693 | |
| 1313 | | | | | EKI64836.1 | 5097 | 11668 | 367 | 26230 | 29703 | |
| 1314 | | | | | EKI59121.1 | 5100 | 11671 | 367 | 9693 | 13166 | |
| 1315 | | | | | EKI57124.1 | 5103 | 11674 | 351 | 9695 | 13168 | |
| 1316 | | | | | EKI46664.1 | 5106 | 11677 | 351 | 9693 | 13166 | |
| 1317 | | | | | EKI33384.1 | 5109 | 11680 | 367 | 9694 | 13011 | |
| 1318 | | | | | EKH20915.1 | 5112 | 11683 | 367 | 9699 | 13172 | |
| 1319 | | | | | EKH25284.1 | 5115 | 11686 | 367 | 328332 | 331805 | |
| 1320 | | | | | EKH13350.1 | 5118 | 11689 | 367 | 9702 | 13175 | |
| 1321 | | | | | EKH36313.1 | 5121 | 11692 | 367 | 9704 | 13177 | |
| 1322 | | | | | EKH26861.1 | 5124 | 11695 | 367 | 115401 | 118874 | |
| 1323 | | | | | EKH48827.1 | 5127 | 11698 | 367 | 9700 | 13173 | |
| 1324 | | | | | EKH53676.1 | 5130 | 11701 | 367 | 115476 | 118949 | |
| 1325 | | | | | EKH61521.1 | 5133 | 11704 | 367 | 9699 | 13172 | |
| 1326 | | | | | EKH63163.1 | 5136 | 11707 | 367 | 248863 | 252336 | |
| 1327 | | | | | EKH71773.1 | 5139 | 11710 | 367 | 9699 | 13172 | |
| 1328 | | | | | EKH63846.1 | 5142 | 11713 | 367 | 9702 | 13175 | |
| 1329 | | | | | EKH83482.1 | 5145 | 11716 | 367 | 9704 | 13177 | |
| 1330 | | | | | EKH87898.1 | 5148 | 11719 | 367 | 9702 | 13175 | |
| 1331 | | | | | EKH95563.1 | 5151 | 11722 | 367 | 9704 | 13177 | |
| 1332 | | | | | EKI01260.1 | 5154 | 11725 | 367 | 115400 | 118873 | |
| 1333 | | | | | EKI02729.1 | 5157 | 11728 | 367 | 67397 | 70870 | |
| 1334 | | | | | EKH96736.1 | 5160 | 11731 | 367 | 9432 | 12905 | |
| 1335 | | | | | EKI03038.1 | 5163 | 11734 | 367 | 9488 | 12961 | |
| 1336 | | | | | EKI06057.1 | 5166 | 11737 | 367 | 66831 | 70304 | |
| 1337 | | | | | EKK37392.1 | 5169 | 11740 | 367 | 9688 | 13161 | |
| 1338 | | | | | EKK71764.1 | 5172 | 11743 | 367 | 68104 | 71577 | |
| 1339 | | | | | EKK91181.1 | 5175 | 11746 | 367 | 6240 | 9713 | |
| 1340 | | | | | EKK36880.1 | 5178 | 11749 | 367 | 9701 | 13174 | |
| 1341 | | | | | EKK37975.1 | 5181 | 11752 | 351 | 9698 | 13171 | |
| 1342 | | | | | EKK61087.1 | 5184 | 11755 | 367 | 9682 | 13155 | |
| 1343 | | | | | EKK52330.1 | 5187 | 11758 | 367 | 9684 | 13157 | |
| 1344 | | | | | EKK67937.1 | 5190 | 11761 | 367 | 75545 | 79018 | |
| 1345 | | | | | EKK62289.1 | 5193 | 11764 | 367 | 75520 | 78993 | |
| 1346 | | | | | EKK87665.1 | 5196 | 11767 | 367 | 77628 | 81101 | |
| 1347 | | | | | EKV88763.1 | 5199 | 11770 | 367 | 3477 | 6950 | |
| 1348 | | | | | EKV85096.1 | 5202 | 11773 | 367 | 9696 | 13169 | |
| 1349 | | | | | EKV70650.1 | 5205 | 11776 | 367 | 9694 | 13167 | |
| 1350 | | | | | EKW05769.1 | 5208 | 11779 | 367 | 75769 | 79242 | |
| 1351 | | | | | EKV91511.1 | 5211 | 11782 | 367 | 3479 | 6952 | |
| 1352 | | | | | EKW03278.1 | 5214 | 11785 | 367 | 9690 | 13163 | |
| 1353 | | | | | EKW04231.1 | 5217 | 11788 | 367 | 9698 | 13171 | |
| 1354 | | | | | EKW19022.1 | 5220 | 11791 | 367 | 9700 | 13173 | |
| 1355 | | | | | EKW08485.1 | 5223 | 11794 | 367 | 9700 | 13173 | |
| 1356 | | | | | EKW71369.1 | 5226 | 11797 | 351 | 6744 | 10217 | |
| 1357 | | | | | EKW96653.1 | 5229 | 11800 | 367 | 75179 | 78652 | |
| 1358 | | | | | EKW96258.1 | 5232 | 11803 | 367 | 9885 | 13358 | |
| 1359 | | | | | EKW76354.1 | 5235 | 11806 | 367 | 29183 | 32500 | |
| 1360 | | | | | EKW75840.1 | 5238 | 11809 | 367 | 9851 | 13324 | |
| 1361 | | | | | EKW68010.1 | 5241 | 11812 | 367 | 9909 | 13382 | |
| 1362 | | | | | EKW74813.1 | 5244 | 11815 | 351 | 9682 | 13155 | |
| 1363 | | | | | EKW43904.1 | 5247 | 11818 | 367 | 79656 | 83129 | |
| 1364 | | | | | EKW70673.1 | 5250 | 11821 | 367 | 75702 | 79175 | |
| 1365 | | | | | EKW38122.1 | 5253 | 11824 | 367 | 9692 | 13165 | |
| 1366 | | | | | EKW21069.1 | 5256 | 11827 | 367 | 3479 | 6358 | |
| 1367 | | | | | EKW36076.1 | 5259 | 11830 | 105 | 26295 | 29801 | |
| 1368 | | | | | EKW36716.1 | 5262 | 11833 | 351 | 9702 | 13175 | |
| 1369 | | | | | EKW51351.1 | 5265 | 11836 | 367 | 9684 | 13157 | |
| 1370 | | | | | EKY34589.1 | 5268 | 11839 | 367 | 9698 | 13171 | |
| 1371 | | | | | EKY34727.1 | 5271 | 11842 | 367 | 9696 | 13013 | |
| 1372 | | | | | ELI49198.1 | 5274 | 11845 | 367 | 723 | 4196 | |
| 1373 | | | | | ELV23652.1 | 5277 | 11848 | 367 | 19030 | 22503 | |
| 1374 | | | | | ELV30874.1 | 5280 | 11851 | 367 | 3059 | 6532 | |
| 1375 | | | | | ELV62889.1 | 5283 | 11854 | 367 | 29755 | 33072 | |
| 1376 | | | | | ELV61720.1 | 5286 | 11857 | 367 | 352 | 3504 | |
| 1377 | | | | | ELV63257.1 | 5289 | 11860 | 367 | 482 | 3955 | |
| 1378 | | | | | ELV91640.1 | 5292 | 11863 | 367 | 26114 | 29587 | |
| 1379 | | | | | ELV93147.1 | 5295 | 11866 | 367 | 2876 | 6349 | |
| 1380 | | | | | ELW21803.1 | 5298 | 11869 | 367 | 19055 | 22528 | |
| 1381 | | | | | ELW24260.1 | 5301 | 11872 | 367 | 355 | 3828 | |
| 1382 | | | | | ELW27705.1 | 5304 | 11875 | 367 | 9838 | 13311 | |
| 1383 | | | | | ELW23229.1 | 5307 | 11878 | 367 | 342 | 3815 | |
| 1384 | | | | | ELW28314.1 | 5310 | 11881 | 367 | 9868 | 13341 | |
| 1385 | | | | | ELW46368.1 | 5313 | 11884 | 367 | 9890 | 13363 | |
| 1386 | | | | | ELV14531.1 | 5316 | 11887 | 367 | 362 | 3835 | |
| 1387 | | | | | ELV31269.1 | 5319 | 11890 | 367 | 26209 | 29682 | |
| 1388 | | | | | ELV35520.1 | 5322 | 11893 | 367 | 26046 | 29519 | |
| 1389 | | | | | ELV44401.1 | 5325 | 11896 | 367 | 1488 | 4667 | |
| 1390 | | | | | ELV47161.1 | 5328 | 11899 | 367 | 9825 | 13298 | |
| 1391 | | | | | ELV76551.1 | 5331 | 11902 | 367 | 18805 | 22278 | |
| 1392 | | | | | ELV98803.1 | 5334 | 11905 | 367 | 9948 | 13421 | |
| 1393 | | | | | ELV75965.1 | 5337 | 11908 | 367 | 9795 | 13268 | |
| 1394 | | | | | ELV90960.1 | 5340 | 11911 | 367 | 351 | 3824 | |
| 1395 | | | | | ELW12422.1 | 5343 | 11914 | 367 | 9877 | 13350 | |
| 1396 | | | | | ELV15306.1 | 5346 | 11917 | 351 | 9689 | 13162 | |
| 1397 | | | | | EMR91944.1 | 5349 | 11920 | 367 | 5144 | 8617 | |
| 1398 | | | | | EMS03598.1 | 5352 | 11923 | 367 | 7561 | 11034 | |
| 1399 | | | | | ELE41778.1 | 5355 | 11926 | 365 | 3624619 | 3628086 | |
| 1400 | | | | | ELF28430.1 | 5358 | 11929 | 367 | 2021904 | 2025377 | |
| 1401 | | | | | ELG08153.1 | 5361 | 11932 | 367 | 1531417 | 1534890 | |
| 1402 | | | | | ELH63188.1 | 5364 | 11935 | 367 | 388742 | 392215 | |
| 1403 | | | | | ENE27217.1 | 5367 | 11938 | 172 | 180 | 3065 | |
| 1404 | | | | | EQO57390.1 | 5370 | 11941 | 367 | 620369 | 623842 | |
| 1405 | | | | | EQO66401.1 | 5373 | 11944 | 367 | 1177818 | 1181291 | |
| 1406 | | | | | EQT31737.1 | 5376 | 11947 | 367 | 348841 | 352314 | |
| 1407 | | | | | EQT84556.1 | 5379 | 11950 | 367 | 632377 | 635850 | |
| 1408 | | | | | ERB08802.1 | 5382 | 11953 | 367 | 3407072 | 3410545 | |
| 1409 | | | | | ERB13354.1 | 5385 | 11956 | 367 | 322637 | 326110 | |
| 1410 | | | | | ERC00100.1 | 5388 | 11959 | 367 | 77309 | 80782 | |
| 1411 | | | | | ERB68139.1 | 5391 | 11962 | 367 | 75975 | 79448 | |
| 1412 | | | | | ERB88971.1 | 5394 | 11965 | 367 | 9811 | 13284 | |
| 1413 | | | | | ERC15172.1 | 5397 | 11968 | 367 | 9856 | 13329 | |
| 1414 | | | | | ERB79213.1 | 5400 | 11971 | 367 | 77187 | 80660 | |
| 1415 | | | | | ERB91730.1 | 5403 | 11974 | 367 | 77192 | 80665 | |
| 1416 | | | | | ERC08309.1 | 5406 | 11977 | 367 | 9951 | 13424 | |
| 1417 | | | | | ERC32303.1 | 5409 | 11980 | 367 | 9828 | 13301 | |
| 1418 | | | | | ERC25307.1 | 5412 | 11983 | 367 | 249232 | 252705 | |
| 1419 | | | | | ERC09301.1 | 5415 | 11986 | 367 | 9873 | 13346 | |
| 1420 | | | | | ERC10656.1 | 5418 | 11989 | 367 | 9861 | 13334 | |
| 1421 | | | | | ERE14325.1 | 5421 | 11992 | 367 | 78160 | 81633 | |
| 1422 | | | | | ERC92365.1 | 5424 | 11995 | 367 | 503 | 3976 | |
| 1423 | | | | | ERD40228.1 | 5427 | 11998 | 367 | 9979 | 13452 | |
| 1424 | | | | | ERC91693.1 | 5430 | 12001 | 367 | 78422 | 81895 | |
| 1425 | | | | | ERD09262.1 | 5433 | 12004 | 367 | 9938 | 13411 | |
| 1426 | | | | | ERC65820.1 | 5436 | 12007 | 367 | 76813 | 80286 | |
| 1427 | | | | | ERC53515.1 | 5439 | 12010 | 367 | 79318 | 82791 | |
| 1428 | | | | | ERE00879.1 | 5442 | 12013 | 367 | 79822 | 83295 | |
| 1429 | | | | | ERE21794.1 | 5445 | 12016 | 367 | 77012 | 80485 | |
| 1430 | | | | | ERC61432.1 | 5448 | 12019 | 367 | 29621 | 33094 | |
| 1431 | | | | | ERC74183.1 | 5451 | 12022 | 367 | 7928 | 11401 | |
| 1432 | | | | | ERC30058.1 | 5454 | 12025 | 367 | 249421 | 252894 | |
| 1433 | | | | | ERC33931.1 | 5457 | 12028 | 367 | 251930 | 255403 | |
| 1434 | | | | | ERC40338.1 | 5460 | 12031 | 367 | 248447 | 251920 | |
| 1435 | | | | | ERC48255.1 | 5463 | 12034 | 367 | 313847 | 317320 | |
| 1436 | | | | | ERD08377.1 | 5466 | 12037 | 367 | 10188 | 13661 | |
| 1437 | | | | | ERD05017.1 | 5469 | 12040 | 367 | 10008 | 13481 | |
| 1438 | | | | | ERD20744.1 | 5472 | 12043 | 367 | 10127 | 13600 | |
| 1439 | | | | | ERD22948.1 | 5475 | 12046 | 367 | 9957 | 13430 | |
| 1440 | | | | | ERD23988.1 | 5478 | 12049 | 367 | 9873 | 13346 | |
| 1441 | | | | | ERD35067.1 | 5481 | 12052 | 367 | 10031 | 13504 | |
| 1442 | | | | | ERD37181.1 | 5484 | 12055 | 367 | 9911 | 13384 | |
| 1443 | | | | | ERD26789.1 | 5487 | 12058 | 367 | 29789 | 33106 | |
| 1444 | | | | | ERD52927.1 | 5490 | 12061 | 367 | 9940 | 13413 | |
| 1445 | | | | | ERD45125.1 | 5493 | 12064 | 367 | 9940 | 13413 | |
| 1446 | | | | | ERD72595.1 | 5496 | 12067 | 367 | 9928 | 13401 | |
| 1447 | | | | | ERD68374.1 | 5499 | 12070 | 367 | 9876 | 13349 | |
| 1448 | | | | | ERD73628.1 | 5502 | 12073 | 367 | 9971 | 13288 | |
| 1449 | | | | | ERD83185.1 | 5505 | 12076 | 367 | 9864 | 13337 | |
| 1450 | | | | | ERD87988.1 | 5508 | 12079 | 367 | 9921 | 13394 | |
| 1451 | | | | | ERD91773.1 | 5511 | 12082 | 367 | 10046 | 13519 | |
| 1452 | | | | | ERD98680.1 | 5514 | 12085 | 367 | 9963 | 13436 | |
| 1453 | | | | | ERD88425.1 | 5517 | 12088 | 367 | 9908 | 13225 | |
| 1454 | | | | | ERE36108.1 | 5520 | 12091 | 367 | 9963 | 13436 | |
| 1455 | | | | | ERE23637.1 | 5523 | 12094 | 367 | 324 | 3797 | |
| 1456 | | | | | ERE42058.1 | 5526 | 12097 | 367 | 76380 | 79853 | |
| 1457 | | | | | ERE45406.1 | 5529 | 12100 | 367 | 76828 | 80301 | |
| 1458 | | | | | ETJ70766.1 | 5532 | 12103 | 367 | 294 | 3767 | |
| 1459 | | | | | ERC07678.1 | 5535 | 12106 | 367 | 9843 | 13316 | |
| 1460 | | | | | ESD10537.1 | 5538 | 12109 | 367 | 455 | 3928 | |
| 1461 | | | | | ESL20618.1 | 5541 | 12112 | 367 | 2605262 | 2608735 | |
| 1462 | | | | | ESP12224.1 | 5544 | 12115 | 367 | 347406 | 350879 | |
| 1463 | | | | | ETJ79051.1 | 5547 | 12118 | 367 | 9638 | 13111 | |
| 1464 | | | | | EST67464.1 | 5550 | 12121 | 367 | 62231 | 65703 | |
| 1465 | | | | | EST67378.1 | 5553 | 12124 | 367 | 35969 | 39442 | |
| 1466 | | | | | AHG12153.1 | 5556 | 12127 | 367 | 5404978 | 5408295 | |
| 1467 | | | | | EYE30765.1 | 5559 | 12130 | 367 | 13431 | 16904 | |
| 1468 | | | | | EYE15507.1 | 5562 | 12133 | 367 | 8798 | 12271 | |
| 1469 | | | | | EYE15594.1 | 5565 | 12136 | 367 | 8718 | 12191 | |
| 1470 | | | | | EYW09909.1 | 5568 | 12139 | 367 | 361634 | 365107 | |
| 1471 | | | | | EYW25816.1 | 5571 | 12142 | 367 | 361618 | 365091 | |
| 1472 | | | | | EYW27178.1 | 5574 | 12145 | 367 | 75562 | 79035 | |
| 1473 | | | | | EYW07429.1 | 5577 | 12148 | 367 | 9641 | 13114 | |
| 1474 | | | | | EYW24507.1 | 5580 | 12151 | 367 | 76003 | 79476 | |
| 1475 | | | | | EYW34607.1 | 5583 | 12154 | 367 | 9641 | 13114 | |
| 1476 | | | | | EYW13498.1 | 5586 | 12157 | 367 | 76031 | 79504 | |
| 1477 | | | | | EYV89289.1 | 5589 | 12160 | 367 | 361672 | 365145 | |
| 1478 | | | | | EYY46581.1 | 5592 | 12163 | 367 | 358618 | 362091 | |
| 1479 | | | | | EYV70452.1 | 5595 | 12166 | 367 | 125628 | 129101 | |
| 1480 | | | | | EYV67644.1 | 5598 | 12169 | 367 | 298415 | 301888 | |
| 1481 | | | | | EYV59033.1 | 5601 | 12172 | 367 | 136307 | 139780 | |
| 1482 | | | | | EYV37956.1 | 5604 | 12175 | 367 | 6474 | 9947 | |
| 1483 | | | | | EYV46021.1 | 5607 | 12178 | 367 | 116589 | 120062 | |
| 1484 | | | | | EYV44254.1 | 5610 | 12181 | 367 | 135140 | 138613 | |
| 1485 | | | | | EYV24871.1 | 5613 | 12184 | 367 | 136213 | 139686 | |
| 1486 | | | | | EYV22947.1 | 5616 | 12187 | 367 | 18805 | 22278 | |
| 1487 | | | | | EYV18172.1 | 5619 | 12190 | 367 | 116382 | 119855 | |
| 1488 | | | | | EYV20082.1 | 5622 | 12193 | 367 | 17020 | 20493 | |
| 1489 | | | | | EYV16480.1 | 5625 | 12196 | 367 | 135221 | 138694 | |
| 1490 | | | | | EYW83369.1 | 5628 | 12199 | 367 | 361672 | 365145 | |
| 1491 | | | | | EYW75517.1 | 5631 | 12202 | 367 | 9640 | 13113 | |
| 1492 | | | | | EYW71147.1 | 5634 | 12205 | 367 | 9640 | 13113 | |
| 1493 | | | | | EYW67183.1 | 5637 | 12208 | 367 | 361537 | 365010 | |
| 1494 | | | | | EYW64052.1 | 5640 | 12211 | 367 | 361536 | 365009 | |
| 1495 | | | | | EYW57180.1 | 5643 | 12214 | 367 | 361537 | 365010 | |
| 1496 | | | | | EYW49138.1 | 5646 | 12217 | 367 | 9640 | 13113 | |
| 1497 | | | | | EYW49451.1 | 5649 | 12220 | 367 | 9640 | 13113 | |
| 1498 | | | | | EYW43052.1 | 5652 | 12223 | 367 | 361537 | 365010 | |
| 1499 | | | | | EYW39158.1 | 5655 | 12226 | 367 | 9640 | 13113 | |
| 1500 | | | | | EYX70056.1 | 5658 | 12229 | 367 | 246056 | 249529 | |
| 1501 | | | | | EYX57447.1 | 5661 | 12232 | 367 | 361672 | 365145 | |
| 1502 | | | | | EYX54552.1 | 5664 | 12235 | 367 | 361672 | 365145 | |
| 1503 | | | | | EYX48138.1 | 5667 | 12238 | 367 | 361672 | 365145 | |
| 1504 | | | | | EYX44885.1 | 5670 | 12241 | 367 | 361672 | 365145 | |
| 1505 | | | | | EYX43989.1 | 5673 | 12244 | 367 | 9641 | 13114 | |
| 1506 | | | | | EYX33008.1 | 5676 | 12247 | 367 | 361672 | 365145 | |
| 1507 | | | | | EYX30700.1 | 5679 | 12250 | 367 | 361672 | 365145 | |
| 1508 | | | | | EYX27757.1 | 5682 | 12253 | 367 | 9641 | 13114 | |
| 1509 | | | | | EYX13624.1 | 5685 | 12256 | 367 | 9642 | 13115 | |
| 1510 | | | | | EYX12331.1 | 5688 | 12259 | 367 | 361671 | 365144 | |
| 1511 | | | | | EYX02200.1 | 5691 | 12262 | 367 | 9639 | 13112 | |
| 1512 | | | | | EYW98548.1 | 5694 | 12265 | 367 | 135915 | 139388 | |
| 1513 | | | | | EYW85336.1 | 5697 | 12268 | 367 | 361672 | 365145 | |
| 1514 | | | | | EYV84727.1 | 5700 | 12271 | 367 | 361904 | 365377 | |
| 1515 | | | | | EYZ76666.1 | 5703 | 12274 | 367 | 114299 | 117772 | |
| 1516 | | | | | EYZ63884.1 | 5706 | 12277 | 367 | 22138 | 25611 | |
| 1517 | | | | | EYZ52262.1 | 5709 | 12280 | 367 | 361630 | 365103 | |
| 1518 | | | | | EYZ37412.1 | 5712 | 12283 | 367 | 9641 | 13114 | |
| 1519 | | | | | EYZ38311.1 | 5715 | 12286 | 367 | 361657 | 365130 | |
| 1520 | | | | | EYZ36221.1 | 5718 | 12289 | 367 | 361632 | 365105 | |
| 1521 | | | | | EYZ14533.1 | 5721 | 12292 | 367 | 16533 | 20006 | |
| 1522 | | | | | EZC28520.1 | 5724 | 12295 | 367 | 75292 | 78765 | |
| 1523 | | | | | EZB48634.1 | 5727 | 12298 | 367 | 10661 | 14134 | |
| 1524 | | | | | EZB05978.1 | 5730 | 12301 | 367 | 361672 | 365145 | |
| 1525 | | | | | EZB18139.1 | 5733 | 12304 | 367 | 75494 | 78967 | |
| 1526 | | | | | EZA89755.1 | 5736 | 12307 | 367 | 361630 | 365103 | |
| 1527 | | | | | EZB32011.1 | 5739 | 12310 | 367 | 9642 | 13115 | |
| 1528 | | | | | EZB20624.1 | 5742 | 12313 | 367 | 361672 | 365145 | |
| 1529 | | | | | EZB41520.1 | 5745 | 12316 | 367 | 9639 | 13112 | |
| 1530 | | | | | EZB11569.1 | 5748 | 12319 | 367 | 361763 | 365236 | |
| 1531 | | | | | EZB46981.1 | 5751 | 12322 | 367 | 9639 | 13112 | |
| 1532 | | | | | EZB04407.1 | 5754 | 12325 | 367 | 361672 | 365145 | |
| 1533 | | | | | EZB74686.1 | 5757 | 12328 | 367 | 9945 | 13418 | |
| 1534 | | | | | EZB73670.1 | 5760 | 12331 | 367 | 9018 | 12491 | |
| 1535 | | | | | EZB73226.1 | 5763 | 12334 | 367 | 1813 | 5286 | |
| 1536 | | | | | EZB87907.1 | 5766 | 12337 | 367 | 10203 | 13676 | |
| 1537 | | | | | EZB80139.1 | 5769 | 12340 | 367 | 361406 | 364879 | |
| 1538 | | | | | EZB81691.1 | 5772 | 12343 | 367 | 9836 | 13309 | |
| 1539 | | | | | EZB96174.1 | 5775 | 12346 | 367 | 1 | 2617 | |
| 1540 | | | | | EZC15363.1 | 5778 | 12349 | 367 | 10311 | 13628 | |
| 1541 | | | | | EZC19639.1 | 5781 | 12352 | 367 | 10014 | 13487 | |
| 1542 | | | | | EZC20552.1 | 5784 | 12355 | 367 | 9755 | 13228 | |
| 1543 | | | | | EZC30168.1 | 5787 | 12358 | 367 | 363212 | 366685 | |
| 1544 | | | | | EZC37649.1 | 5790 | 12361 | 367 | 361839 | 365312 | |
| 1545 | | | | | EZC43979.1 | 5793 | 12364 | 367 | 247561 | 251034 | |
| 1546 | | | | | EZB95446.1 | 5796 | 12367 | 367 | 156780 | 160253 | |
| 1547 | | | | | EZC48752.1 | 5799 | 12370 | 367 | 361737 | 365210 | |
| 1548 | | | | | EZC62959.1 | 5802 | 12373 | 367 | 73369 | 76842 | |
| 1549 | | | | | EZC70418.1 | 5805 | 12376 | 367 | 10529 | 14002 | |
| 1550 | | | | | EZC77658.1 | 5808 | 12379 | 367 | 9929 | 13402 | |
| 1551 | | | | | EZC64799.1 | 5811 | 12382 | 367 | 361985 | 365458 | |
| 1552 | | | | | EZC90329.1 | 5814 | 12385 | 367 | 9858 | 13331 | |
| 1553 | | | | | EZC92767.1 | 5817 | 12388 | 367 | 10327 | 13800 | |
| 1554 | | | | | EZC86949.1 | 5820 | 12391 | 367 | 9288 | 12761 | |
| 1555 | | | | | EZC83410.1 | 5823 | 12394 | 367 | 10360 | 13833 | |
| 1556 | | | | | EZD75265.1 | 5826 | 12397 | 367 | 9641 | 13114 | |
| 1557 | | | | | EZF08564.1 | 5829 | 12400 | 367 | 361634 | 365107 | |
| 1558 | | | | | EZF05485.1 | 5832 | 12403 | 367 | 361566 | 365039 | |
| 1559 | | | | | EZE61417.1 | 5835 | 12406 | 367 | 79039 | 82512 | |
| 1560 | | | | | EZE88802.1 | 5838 | 12409 | 367 | 10505 | 13978 | |
| 1561 | | | | | EZE89445.1 | 5841 | 12412 | 367 | 247303 | 250776 | |
| 1562 | | | | | EZE90571.1 | 5844 | 12415 | 367 | 17451 | 20924 | |
| 1563 | | | | | EZD08972.1 | 5847 | 12418 | 367 | 361866 | 365339 | |
| 1564 | | | | | EZD16777.1 | 5850 | 12421 | 367 | 298547 | 301798 | |
| 1565 | | | | | EZD15761.1 | 5853 | 12424 | 367 | 361275 | 364748 | |
| 1566 | | | | | EZD19492.1 | 5856 | 12427 | 367 | 361814 | 365287 | |
| 1567 | | | | | EZD00271.1 | 5859 | 12430 | 367 | 91957 | 95430 | |
| 1568 | | | | | EZD85326.1 | 5862 | 12433 | 367 | 76047 | 79520 | |
| 1569 | | | | | EZD90120.1 | 5865 | 12436 | 367 | 9641 | 13114 | |
| 1570 | | | | | EZJ86913.1 | 5868 | 12439 | 367 | 311 | 3784 | |
| 1571 | | | | | EZJ76225.1 | 5871 | 12442 | 367 | 2720 | 6037 | |
| 1572 | | | | | EZJ72756.1 | 5874 | 12445 | 367 | 645 | 4118 | |
| 1573 | | | | | EZK00743.1 | 5877 | 12448 | 367 | 2714 | 6187 | |
| 1574 | | | | | EZQ47390.1 | 5880 | 12451 | 367 | 298328 | 301801 | |
| 1575 | | | | | EZQ50286.1 | 5883 | 12454 | 367 | 361835 | 365308 | |
| 1576 | | | | | AHY73972.1 | 5886 | 12457 | 367 | 5404976 | 5408293 | |
| 1577 | | | | | KDA71003.1 | 5889 | 12460 | 367 | 9097 | 12570 | |
| 1578 | | | | | KDA57922.1 | 5892 | 12463 | 365 | 4997 | 8308 | |
| 1579 | | | | | KDM81017.1 | 5895 | 12466 | 367 | 152275 | 155748 | |
| 1580 | | | | | KDM84276.1 | 5898 | 12469 | 367 | 16699 | 20172 | |
| 1581 | | | | | KDT83301.1 | 5901 | 12472 | 367 | 26840 | 30313 | |
| 1582 | | | | | KDX42981.1 | 5904 | 12475 | 365 | 42388 | 45699 | |
| 1583 | | | | | KEJ21095.1 | 5907 | 12478 | 367 | 8693 | 12166 | |
| 1584 | | | | | KEJ20439.1 | 5910 | 12481 | 367 | 8678 | 12151 | |
| 1585 | | | | | KEM49613.1 | 5913 | 12484 | 367 | 27031 | 30504 | |
| 1586 | | | | | KEM85728.1 | 5916 | 12487 | 367 | 26649 | 30122 | |
| 1587 | | | | | KEN65094.1 | 5919 | 12490 | 367 | 726 | 4199 | |
| 1588 | | | | | KEO16488.1 | 5922 | 12493 | 365 | 5063 | 8374 | |
| 1589 | | | | | KEO21425.1 | 5925 | 12496 | 367 | 264 | 3737 | |
| 1590 | | | | | KEK80774.1 | 5928 | 12499 | 367 | 61240 | 64713 | |
| 1591 | | | | | KEK94611.1 | 5931 | 12502 | 367 | 26970 | 30443 | |
| 1592 | | | | | KEL07349.1 | 5934 | 12505 | 367 | 24905 | 28378 | |
| 1593 | | | | | KEL97935.1 | 5937 | 12508 | 367 | 1475 | 4948 | |
| 1594 | | | | | KEM08523.1 | 5940 | 12511 | 367 | 26927 | 30400 | |
| 1595 | | | | | AIF96930.1 | 5943 | 12514 | 367 | 5385621 | 5389094 | |
| 1596 | | | | | AIG71770.1 | 5946 | 12517 | 367 | 5409083 | 5412556 | |
| 1597 | | | | | KHI41606.1 | 5949 | 12520 | 367 | 168373 | 171846 | |
| 1598 | | | | | KHH50141.1 | 5952 | 12523 | 365 | 52610 | 56077 | |
| 1599 | | | | | KHI22223.1 | 5955 | 12526 | 367 | 1989 | 5462 | |
| 1600 | | | | | AJA29432.1 | 5958 | 12529 | 367 | 5350388 | 5353861 | |
| 1601 | | | | | KIG29574.1 | 5961 | 12532 | 367 | 33089 | 36562 | |
| 1602 | | | | | KIY28269.1 | 5964 | 12535 | 367 | 10372 | 13845 | |
| 1603 | | | | | KIZ09775.1 | 5967 | 12538 | 367 | 9762 | 13235 | |
| 1604 | | | | | KJJ46590.1 | 5970 | 12541 | 367 | 66829 | 70302 | |
| 1605 | | | | | KJW55351.1 | 5973 | 12544 | 367 | 136995 | 140468 | |
| 1606 | | | | | KJW51699.1 | 5976 | 12547 | 367 | 116958 | 120431 | |
| 1607 | | | | | KKF77969.1 | 5979 | 12550 | 367 | 10494 | 13967 | |
| 1608 | | | | | KKF80394.1 | 5982 | 12553 | 367 | 9762 | 13235 | |
| 1609 | | | | | KKK30169.1 | 5985 | 12556 | 367 | 2135963 | 2139436 | |
| 1610 | | | | | KKY44748.1 | 5988 | 12559 | 149 | 1 | 2817 | |
| 1611 | | | | | KLG52814.1 | 5991 | 12562 | 367 | 114307 | 117780 | |
| 1612 | | | | | KNF16833.1 | 5994 | 12565 | 367 | 1989 | 5462 | |
| 1613 | | | | | KNF20998.1 | 5997 | 12568 | 367 | 114447 | 117920 | |
| 1614 | | | | | KNF39643.1 | 6000 | 12571 | 367 | 16655 | 20128 | |
| 1615 | | | | | KNG40955.1 | 6003 | 12574 | 367 | 146674 | 150147 | |
| 1616 | | | | | CTT73476.1 | 6006 | 12577 | 367 | 5649 | 9122 | |
| 1617 | | | | | KOZ12762.1 | 6009 | 12580 | 367 | 78490 | 81963 | |
| 1618 | | | | | KOZ62644.1 | 6012 | 12583 | 367 | 9646 | 13119 | |
| 1619 | | | | | KOZ92034.1 | 6015 | 12586 | 367 | 47766 | 51239 | |
| 1620 | | | | | KOZ11133.1 | 6018 | 12589 | 367 | 9649 | 13122 | |
| 1621 | | | | | KOZ14563.1 | 6021 | 12592 | 367 | 248571 | 252044 | |
| 1622 | | | | | KOZ32806.1 | 6024 | 12595 | 367 | 75809 | 79282 | |
| 1623 | | | | | KOZ23194.1 | 6027 | 12598 | 367 | 361705 | 365178 | |
| 1624 | | | | | KOZ33144.1 | 6030 | 12601 | 367 | 9646 | 13119 | |
| 1625 | | | | | KOZ37733.1 | 6033 | 12604 | 367 | 9647 | 13120 | |
| 1626 | | | | | KOZ50075.1 | 6036 | 12607 | 367 | 361612 | 365085 | |
| 1627 | | | | | KOZ47192.1 | 6039 | 12610 | 367 | 9644 | 13117 | |
| 1628 | | | | | KOZ49648.1 | 6042 | 12613 | 367 | 361767 | 365240 | |
| 1629 | | | | | KOZ66198.1 | 6045 | 12616 | 367 | 67507 | 70980 | |
| 1630 | | | | | KOZ69679.1 | 6048 | 12619 | 367 | 361543 | 365016 | |
| 1631 | | | | | KOZ74920.1 | 6051 | 12622 | 367 | 17746 | 21219 | |
| 1632 | | | | | KOZ84732.1 | 6054 | 12625 | 367 | 66782 | 70255 | |
| 1633 | | | | | KOZ80207.1 | 6057 | 12628 | 367 | 66781 | 70254 | |
| 1634 | | | | | KOZ97680.1 | 6060 | 12631 | 367 | 150289 | 153762 | |
| 1635 | | | | | KPH45896.1 | 6063 | 12634 | 367 | 248360 | 251833 | |
| 1636 | | | | | KPH35133.1 | 6066 | 12637 | 367 | 361701 | 365174 | |
| 1637 | | | | | KPH38254.1 | 6069 | 12640 | 367 | 78493 | 81966 | |
| 1638 | | | | | ALH93592.1 | 6072 | 12643 | 367 | 5193818 | 5197291 | |
| 1639 | | | | | KPO74167.1 | 6075 | 12646 | 367 | 9683 | 13156 | |
| 1640 | | | | | KPP03704.1 | 6078 | 12649 | 367 | 114577 | 118050 | |
| 1641 | | | | | KPP08803.1 | 6081 | 12652 | 367 | 115506 | 118979 | |
| 1642 | | | | | KPP18127.1 | 6084 | 12655 | 367 | 363358 | 366831 | |
| 1643 | | | | | KPP23764.1 | 6087 | 12658 | 367 | 9682 | 13155 | |
| 1644 | | | | | KPP34278.1 | 6090 | 12661 | 367 | 9682 | 13155 | |
| 1645 | | | | | KPP38848.1 | 6093 | 12664 | 367 | 9682 | 13155 | |
| 1646 | | | | | KPP49036.1 | 6096 | 12667 | 367 | 9683 | 13156 | |
| 1647 | | | | | KPP10064.1 | 6099 | 12670 | 367 | 9683 | 13156 | |
| 1648 | | | | | KPP41786.1 | 6102 | 12673 | 367 | 9681 | 13154 | |
| 1649 | | | | | KPP53633.1 | 6105 | 12676 | 367 | 363428 | 366901 | |
| 1650 | | | | | KRQ04752.1 | 6108 | 12679 | 367 | 280602 | 284075 | |
| 1651 | | | | | KUG91602.1 | 6111 | 12682 | 367 | 545 | 4018 | |
| 1652 | | | | | KUH02055.1 | 6114 | 12685 | 367 | 27065 | 30538 | |
| 1653 | | | | | KUS40189.1 | 6117 | 12688 | 367 | 8291 | 11764 | |
| 1654 | | | | | KUT25844.1 | 6120 | 12691 | 367 | 14510 | 17983 | |
| 1655 | | | | | KUT16912.1 | 6123 | 12694 | 367 | 2806 | 6279 | |
| 1656 | | | | | KUT50284.1 | 6126 | 12697 | 367 | 17959 | 21432 | |
| 1657 | | | | | KUU89823.1 | 6129 | 12700 | 367 | 29590 | 33063 | |
| 1658 | | | | | KUT63219.1 | 6132 | 12703 | 367 | 9401 | 12874 | |
| 1659 | | | | | KUU32868.1 | 6135 | 12706 | 367 | 28187 | 31660 | |
| 1660 | | | | | KUU24008.1 | 6138 | 12709 | 367 | 8294 | 11767 | |
| 1661 | | | | | KUV87989.1 | 6141 | 12712 | 367 | 8488 | 11961 | |
| 1662 | | | | | KUW19157.1 | 6144 | 12715 | 367 | 103408 | 106881 | |
| 1663 | | | | | KUW69108.1 | 6147 | 12718 | 367 | 60641 | 64114 | |
| 1664 | | | | | KUW47133.1 | 6150 | 12721 | 367 | 28184 | 31657 | |
| 1665 | | | | | AMG80378.1 | 6153 | 12724 | 367 | 4055455 | 4058928 | |
| 1666 | | | | | KXK90274.1 | 6156 | 12727 | 367 | 382661 | 386134 | |
| 1667 | | | | | KXP75342.1 | 6159 | 12730 | 367 | 60834 | 64307 | |
| 1668 | | | | | KXR06381.1 | 6162 | 12733 | 365 | 17180 | 20647 | |
| 1669 | | | | | KXR86338.1 | 6165 | 12736 | 365 | 17181 | 20648 | |
| 1670 | | | | | EYT05879.1 | 6168 | 12739 | 363 | 315579 | 319040 | |
| 1671 | | | | | KMV95470.1 | 6171 | 12742 | 363 | 1142870 | 1146331 | |
| 1672 | | | | | ESN46749.1 | 6174 | 12745 | 363 | 356404 | 359865 | |
| 1673 | | | | | KDL89508.1 | 6177 | 12748 | 363 | 320792 | 324253 | |
| 1674 | | | | | KMG65745.1 | 6180 | 12751 | 363 | 5112636 | 5116097 | |
| 1675 | | | | | KRR31032.1 | 6183 | 12754 | 363 | 59524 | 62985 | |
| 1676 | | | | | CVD68076.1 | 6186 | 12757 | 363 | 361657 | 365120 | |
| 1677 | | | | | CVD62391.1 | 6189 | 12760 | 363 | 246007 | 249470 | |
| 1678 | | | | | CVA98365.1 | 6192 | 12763 | 363 | 246132 | 249595 | |
| 1679 | | | | | CVB66940.1 | 6195 | 12766 | 363 | 245939 | 249402 | |
| 1680 | | | | | CVE07646.1 | 6198 | 12769 | 363 | 211862 | 215325 | |
| 1681 | | | | | CUZ34247.1 | 6201 | 12772 | 363 | 363056 | 366519 | |
| 1682 | | | | | CVH03739.1 | 6204 | 12775 | 363 | 215808 | 219271 | |
| 1683 | | | | | CUZ32693.1 | 6207 | 12778 | 363 | 361916 | 365379 | |
| 1684 | | | | | CVC01550.1 | 6210 | 12781 | 363 | 249441 | 252904 | |
| 1685 | | | | | CVC86891.1 | 6213 | 12784 | 363 | 249294 | 252757 | |
| 1686 | | | | | CVC74523.1 | 6216 | 12787 | 363 | 212906 | 216369 | |
| 1687 | | | | | CVC09195.1 | 6219 | 12790 | 363 | 362064 | 365527 | |
| 1688 | | | | | CVG04243.1 | 6222 | 12793 | 363 | 361779 | 365242 | |
| 1689 | | | | | CVB23944.1 | 6225 | 12796 | 363 | 362214 | 365677 | |
| 1690 | | | | | CVE95538.1 | 6228 | 12799 | 363 | 361839 | 365302 | |
| 1691 | | | | | CVG92146.1 | 6231 | 12802 | 363 | 214249 | 217712 | |
| 1692 | | | | | CVA05266.1 | 6234 | 12805 | 363 | 364092 | 367555 | |
| 1693 | | | | | COJ21090.1 | 6237 | 12808 | 363 | 32605 | 36068 | |
| 1694 | | | | | CNK85655.1 | 6240 | 12811 | 363 | 185197 | 188660 | |
| 1695 | | | | | KLE23457.1 | 6243 | 12814 | 361 | 207605 | 211169 | |
| 1696 | | | | | KNY42367.1 | 6246 | 12817 | 371 | 142231 | 145804 | |
| 1697 | | | | | KTL44733.1 | 6249 | 12820 | 378 | 1320810 | 1324404 | |
| 1698 | | | | | KED68171.1 | 6252 | 12823 | 378 | 48394 | 51988 | |
| 1699 | | | | | KHF16014.1 | 6255 | 12826 | 361 | 33571 | 37114 | |
| 1700 | | | | | KIT58954.1 | 6258 | 12829 | 378 | 63893 | 67196 | |
| 1701 | | | | | KIT38900.1 | 6261 | 12832 | 378 | 8473 | 11776 | |
| 1702 | | | | | KJR33560.1 | 6264 | 12835 | 378 | 440782 | 444376 | |
| 1703 | | | | | KKX83989.1 | 6267 | 12838 | 378 | 440597 | 444191 | |
| 1704 | | | | | KOE91952.1 | 6270 | 12841 | 378 | 474874 | 478468 | |
| 1705 | | | | | KOF38059.1 | 6273 | 12844 | 361 | 9424 | 12967 | |
| 1706 | | | | | KON59156.1 | 6276 | 12847 | 279 | 561224 | 564323 | |
| 1707 | | | | | KXG05867.1 | 6279 | 12850 | 378 | 440782 | 444376 | |
| 1708 | | | | | KYJ92314.1 | 6282 | 12853 | 378 | 440782 | 444376 | |
| 1709 | | | | | EMB49754.1 | 6285 | 12856 | 372 | 6770 | 9839 | |
| 1710 | | | | | EDL69244.1 | 6288 | 12859 | 378 | 167290 | 170884 | |
| 1711 | | | | | EFM85264.1 | 6291 | 12862 | 269 | 139662 | 142821 | |
| 1712 | | | | | EFM93936.1 | 6294 | 12865 | 269 | 112997 | 116156 | |
| 1713 | | | | | EFM98323.1 | 6297 | 12868 | 269 | 139455 | 142614 | |
| 1714 | | | | | ABI24730.1 | 6300 | 12871 | 269 | 481084 | 484348 | |
| 1715 | | | | | EYA48171.1 | 6303 | 12874 | 267 | 60770 | 63872 | |
| 1716 | | | | | EYA76043.1 | 6306 | 12877 | 278 | 199288 | 202423 | |
| 1717 | | | | | EYA68805.1 | 6309 | 12880 | 278 | 1 | 3131 | |
| 1718 | | | | | EYA80657.1 | 6312 | 12883 | 278 | 47013 | 50148 | |
| 1719 | | | | | CUA18410.1 | 6315 | 12886 | 278 | 2195155 | 2198290 | |
| 1720 | | | | | KDS43043.1 | 6318 | 12889 | 306 | 21582 | 24750 | |
| 1721 | | | | | KDS37969.1 | 6321 | 12892 | 306 | 65172 | 68340 | |
| 1722 | | | | | KDS73985.1 | 6324 | 12895 | 306 | 108116 | 111284 | |
| 1723 | | | | | ALF18257.1 | 6327 | 12898 | 273 | 1819401 | 1822845 | |
| 1724 | | | | | KXA24059.1 | 6330 | 12901 | 273 | 105285 | 108729 | |
| 1725 | | | | | EFG28534.1 | 6333 | 12904 | 192 | 82671 | 86075 | |
| 1726 | | | | | ADJ62018.1 | 6336 | 12907 | 293 | 542484 | 545370 | |
| 1727 | | | | | KTC70122.1 | 6339 | 12910 | 143 | 45 | 2660 | |
| 1728 | | | | | AFT94974.1 | 6342 | 12913 | 364 | 1736318 | 1739982 | |
| 1729 | | | | | EEX38487.1 | 6345 | 12916 | 361 | 46338 | 49881 | |
| 1730 | | | | | CCN78627.1 | 6348 | 12919 | 361 | 1996439 | 2000017 | |
| 1731 | | | | | CCN34619.1 | 6351 | 12922 | 361 | 70222 | 73800 | |
| 1732 | | | | | CCN40569.1 | 6354 | 12925 | 361 | 26343 | 29921 | |
| 1733 | | | | | CCN66137.1 | 6357 | 12928 | 361 | 70235 | 73813 | |
| 1734 | | | | | KGJ97947.1 | 6360 | 12931 | 373 | 43748 | 47386 | |
| 1735 | | | | | EEP52109.1 | 6363 | 12934 | 282 | 1752487 | 1755339 | |
| 1736 | | | | | AIP08273.1 | 6366 | 12937 | 282 | 87534 | 90386 | |
| 1737 | | | | | KGC46811.1 | 6369 | 12940 | 282 | 924785 | 927637 | |
| 1738 | | | | | AIV53984.1 | 6372 | 12943 | 282 | 1079826 | 1082678 | |
| 1739 | | | | | KGU70602.1 | 6375 | 12946 | 281 | 1500031 | 1502880 | |
| 1740 | | | | | KGV18647.1 | 6378 | 12949 | 282 | 3065754 | 3068606 | |
| 1741 | | | | | KGV94868.1 | 6381 | 12952 | 282 | 2670857 | 2673709 | |
| 1742 | | | | | KGV65995.1 | 6384 | 12955 | 282 | 197475 | 200327 | |
| 1743 | | | | | KGV92499.1 | 6387 | 12958 | 282 | 459725 | 462577 | |
| 1744 | | | | | KGX53111.1 | 6390 | 12961 | 282 | 123203 | 126055 | |
| 1745 | | | | | KGX64950.1 | 6393 | 12964 | 282 | 2770 | 5622 | |
| 1746 | | | | | AJX71012.1 | 6396 | 12967 | 282 | 2464517 | 2467369 | |
| 1747 | | | | | AIA69101.1 | 6399 | 12970 | 291 | 101386 | 104378 | |
| 1748 | | | | | AIK12006.1 | 6402 | 12973 | 291 | 101407 | 104399 | |
| 1749 | | | | | KMK83436.1 | 6405 | 12976 | 291 | 83001 | 85993 | |
| 1750 | | | | | KGK11297.1 | 6408 | 12979 | 378 | 1809125 | 1812719 | |
| 1751 | | | | | EAR22190.1 | 6411 | 12982 | 368 | 1014237 | 1017892 | |
| 1752 | | | | | ERG19019.1 | 6414 | 12985 | 262 | 12777 | 15389 | |
| 1753 | | | | | ERG19055.1 | 6417 | 12988 | 382 | 10170 | 13838 | |
| 1754 | | | | | ERG37345.1 | 6420 | 12991 | 219 | 39830 | 42959 | |
| 1755 | | | | | KTD25442.1 | 6423 | 12994 | 272 | 53517 | 56564 | |
| 1756 | | | | | EER46087.1 | 6426 | 12997 | 280 | 22897 | 26188 | |
| 1757 | | | | | AKZ71840.1 | 6429 | 13000 | 363 | 570853 | 574314 | |
| 1758 | | | | | KJN72850.1 | 6432 | 13003 | 363 | 57346 | 60807 | |
| 1759 | | | | | KLQ05986.1 | 6435 | 13006 | 363 | 77216 | 80677 | |
| 1760 | | | | | KHE02047.1 | 6438 | 13009 | 286 | 126996 | 129842 | |
| 1761 | | | | | KHN64403.1 | 6441 | 13012 | 286 | 308711 | 311557 | |
| 1762 | | | | | ACS83825.1 | 6444 | 13015 | 287 | 7960 | 11128 | |
| 1763 | | | | | EAS45751.1 | 6447 | 13018 | 363 | 696153 | 699714 | |
| 1764 | | | | | ALP65205.1 | 6450 | 13021 | 282 | 1243807 | 1246659 | |
| 1765 | | | | | AIO35887.1 | 6453 | 13024 | 282 | 2947387 | 2950269 | |
| 1766 | | | | | KTC93826.1 | 6456 | 13027 | 270 | 188880 | 191921 | |
| 1767 | | | | | KVP70161.1 | 6459 | 13030 | 284 | 94244 | 97102 | |
| 1768 | | | | | KVP49170.1 | 6462 | 13033 | 284 | 184358 | 187216 | |
| 1769 | | | | | KVQ79698.1 | 6465 | 13036 | 284 | 191818 | 194676 | |
| 1770 | | | | | KVR10909.1 | 6468 | 13039 | 284 | 191827 | 194685 | |
| 1771 | | | | | KVR50013.1 | 6471 | 13042 | 284 | 96265 | 99123 | |
| 1772 | | | | | KVR54360.1 | 6474 | 13045 | 284 | 94349 | 97207 | |
| 1773 | | | | | KWB45016.1 | 6477 | 13048 | 284 | 5874 | 8732 | |
| 1774 | | | | | KWB78078.1 | 6480 | 13051 | 284 | 94316 | 97174 | |
| 1775 | | | | | KWD39081.1 | 6483 | 13054 | 284 | 184358 | 187216 | |
| 1776 | | | | | KWD33066.1 | 6486 | 13057 | 284 | 191818 | 194676 | |
| 1777 | | | | | KWD38755.1 | 6489 | 13060 | 284 | 96265 | 99123 | |
| 1778 | | | | | KWO93443.1 | 6492 | 13063 | 284 | 28626 | 31484 | |
| 1779 | | | | | KVX24374.1 | 6495 | 13066 | 284 | 110871 | 113729 | |
| 1780 | | | | | KGO04270.1 | 6498 | 13069 | 259 | 857 | 3814 | |
| 1781 | | | | | ADE14193.1 | 6501 | 13072 | 377 | 1007627 | 1011302 | |
| 1782 | | | | | ADR35023.1 | 6504 | 13075 | 172 | 2375586 | 2377970 | |
| 1783 | | | | | EPF16737.1 | 6507 | 13078 | 281 | 2485440 | 2488277 | |
| 1784 | | | | | KYL32888.1 | 6510 | 13081 | 379 | 8157 | 11763 | |
| 1785 | | | | | ALS34709.1 | 6513 | 13084 | 378 | 195869 | 199469 | |
| 1786 | | | | | KOO13435.1 | 6516 | 13087 | 371 | 119459 | 123032 | |
| 1787 | | | | | KGA93589.1 | 6519 | 13090 | 195 | 161290 | 163757 | |
| 1788 | | | | | CCK76633.1 | 6522 | 13093 | 369 | 2728464 | 2731988 | |
| 1789 | | | | | CAV18533.1 | 6525 | 13096 | 362 | 1475653 | 1479223 | |
| 1790 | | | | | CEO93971.1 | 6528 | 13099 | 261 | 126 | 3047 | |
| 1791 | | | | | CDT36087.1 | 6531 | 13102 | 383 | 162067 | 165622 | |
| 1792 | | | | | CDT66912.1 | 6534 | 13105 | 383 | 1519 | 5074 | |
| 1793 | | | | | EIY57318.1 | 6537 | 13108 | 296 | 805872 | 809052 | |
| 1794 | | | | | EPR32277.1 | 6540 | 13111 | 293 | 3145 | 6033 | |
| 1795 | | | | | ENO91779.1 | 6543 | 13114 | 362 | 17111 | 20509 | |
| 1796 | | | | | EAQ53527.1 | 6546 | 13117 | 282 | 673628 | 676748 | |
| 1797 | | | | | GAA81803.1 | 6549 | 13120 | 378 | 17567 | 21167 | |
| 1798 | | | | | EEF80509.1 | 6552 | 13123 | 137 | 187507 | 190453 | |
| 1799 | | | | | KVA10029.1 | 6555 | 13126 | 281 | 247235 | 250084 | |
| 1800 | | | | | GAD76291.1 | 6558 | 13129 | 378 | 52164 | 55758 | |
| 1801 | | | | | EFM21228.1 | 6561 | 13132 | 363 | 211867 | 215330 | |
| 1802 | | | | | KJF90750.1 | 6564 | 13135 | 361 | 53142 | 56685 | |
| 1803 | | | | | KKB47517.1 | 6567 | 13138 | 262 | 187119 | 190140 | |
| 1804 | | | | | EIM72583.1 | 6570 | 13141 | 262 | 115 | 2515 | |
| 1805 | | | | | EEX64651.1 | 6573 | 13144 | 372 | 390460 | 393529 | |
| 1806 | | | | | EEY99585.1 | 6576 | 13147 | 372 | 77969 | 81548 | |
| 1807 | | | | | EGW44489.1 | 6579 | 13150 | 293 | 176059 | 178904 | |
| 1808 | | | | | KHD25431.1 | 6582 | 13153 | 378 | 154792 | 158682 | |
| 1809 | | | | | GAL03974.1 | 6585 | 13156 | 273 | 103050 | 106823 | |
| 1810 | | | | | ELA08938.1 | 6588 | 13159 | 281 | 216422 | 219641 | |
| 1811 | | | | | AEH01977.1 | 6591 | 13162 | 264 | 2395689 | 2398415 | |
| 1812 | | | | | EKM24780.1 | 6594 | 13165 | 378 | 414659 | 418285 | |
| 1813 | | | | | EOD77075.1 | 6597 | 13168 | 361 | 2838 | 6384 | |
| 1814 | | | | | KEQ18610.1 | 6600 | 13171 | 380 | 51532 | 55402 | |
| 1815 | | | | | EJF07132.1 | 6603 | 13174 | 324 | 10761 | 15775 | |
| 1816 | | | | | KWU01631.1 | 6606 | 13177 | 361 | 1104 | 4932 | |
| 1817 | | | | | KHL11031.1 | 6609 | 13180 | 282 | 2470 | 5322 | |
| 1818 | | | | | AIL32427.1 | 6612 | 13183 | 268 | 682060 | 685211 | |
| 1819 | | | | | KIM02581.1 | 6615 | 13186 | 218 | 37 | 2584 | |
| 1820 | | | | | KIM12266.1 | 6618 | 13189 | 132 | 265881 | 268795 | |
| 1821 | | | | | EJU08779.1 | 6621 | 13192 | 273 | 341208 | 344700 | |
| 1822 | | | | | AJA69894.1 | 6624 | 13195 | 265 | 3038320 | 3041220 | |
| 1823 | | | | | KRG22678.1 | 6627 | 13198 | 288 | 262834 | 265878 | |
| 1824 | | | | | KLN64109.1 | 6630 | 13201 | 376 | 105944 | 109441 | |
| 1825 | | | | | KDM93484.1 | 6633 | 13204 | 375 | 115926 | 119449 | |
| 1826 | | | | | KLE39936.1 | 6636 | 13207 | 363 | 242443 | 245906 | |
| 1827 | | | | | KPZ54444.1 | 6639 | 13210 | 378 | 57960 | 61560 | |
| 1828 | | | | | KQN43370.1 | 6642 | 13213 | 361 | 53441 | 56884 | |
| 1829 | | | | | CVJ63634.1 | 6645 | 13216 | 281 | 59414 | 62268 | |
| 1830 | | | | | CVE16997.1 | 6648 | 13219 | 363 | 215644 | 219107 | |

[2082] The ZORYA system was not found in archaea. The system is present mainly in Proteobacteria and is markedly under-represented in Gram positive bacteria (Firmicutes and Actinobacteria), suggesting that its functionality depends on the double membrane organization of Gram negative bacteria (Table 8).

[2083] The gene composition of the Zorya system may point to several hypotheses as to its mechanism of action: It is possible that the system has adopted the MotAB proton channel to achieve depolarization of membrane potential upon phage infection. Possibly, ZorC, ZorD and ZorE may be involved in the sensing and inactivation of phage DNA, and if phage inactivation fails, the ZorAB proton channel opens up, leading to membrane depolarization and cell death. Under this hypothesis Zorya may be a conditional abortive infection system.

[2084] Interestingly, although Zorya-containing cells that were infected by phage T7 did not yield phage progeny in greater than 80% of infection events, infection of Zorya-containing cells in liquid cultures led to an eventual culture collapse, suggesting that Zorya-mediated defense involves death or metabolic arrest of the infected cell (FIGS. 4G-4I).

[2085] A second, more far-fetched hypothesis as to the function of Zorya may be that ZorAB localizes to the flagellar motor and alters the activity of the flagella in response to phage infection, presumably to evade infection or to avoid infection spreading.

### Example 4

### Analysis of the Type I ZORYA System Components

[2086] Objective:

[2087] To analyze the functionality of the Type I ZORYA system.

[2088] Methods:

[2089] In order to study the four gene components of the ZORYA type I system, functionality was analyzed with mutated forms of each of the genes of the Type I ZORYA. Deletion mutants were made and the cloned vectors comprising specific gene deletions were transformed into E. coli MG1655 cells. Similarly, point mutations were generated and vectors comprising the point mutation constructs were transformed into E. coli MG1655 cells.

[2090] Results:

[2091] All four genes in the system appear to be essential for its functionality, as deletion of each of the genes resulted in loss of protection from phage infection (FIG. 4J). Moreover, the activity of the ZorAB proton channel appears to be necessary for the system's functionality, as point mutations in residues predicted to be critical for proton translocation through the channel (either ZorA: T147A/S184A or ZorB:D26N) yielded a non-functional system (FIG. 4J). Similarly, point mutations inactivating the Walker B motif of the helicase domain of ZorD, predicted to prevent ATP hydrolysis, resulted in loss of protection from phage infection.

### Example 5

### Genomic Identification and Analysis of the Thoeris System

[2092] Objective:

[2093] Identify the candidate defense system based on the enrichment of the anchor pfam08937 (TIR domain).

[2094] Methods:

[2095] The Thoeris system was one of the systems identified in the first round of prediction. The Thoeris (Egyptian protective deity of childbirth and fertility) defense system is a two-gene system that was detected based on the enrichment of pfam08937 (TIR domain) next to defense genes (FIG. 3B and FIG. 5A). The Thoeris system in some embodiments, is termed the SIR2-TIR system. The TIR domain was previously reported as associated with prokaryotic argonaute genes.

[2096] Genomic Identification and Analysis of Thoeris (SIR2-TIR) Systems—

[2097] The anchor genes family for SIR2-TIR was pfam08937, a TIR-like domain (also annotated as DUF1863). It had a defense score of 0.68 and a diversity score of 0.33. It produced several subsystems, one of which was the SIR2-TIR subsystem with a defense score of 0.58 and diversity score of 0.91. It is composed of a SIR2-domain gene, with one or more TIR-domain genes in the immediate vicinity of +/−5 genes from the SIR2 gene. Initially 78 appearances were found in the dataset that was used in the automatic prediction. Later, by manual expansion using the most up-to-date IMG dataset, and via homologs of the SIR2 gene, additional 1162 appearances were found, totaling in 1240 appearances in microbial genomes. The genes domains, properties and environment were explored using known bioinformatics tools.

[2098] Cloning of SIR2-TIR into B. subtilis BES7003—

[2099] A cloning vector for large fragments was constructed by assembling the p15a origin of replication (ori) from pACYCDuet-1 and the amyE integration cassette from plasmid pDR110 (see https://www(dot)ncbi(dot)nlm(dot)nih(dot)gov/pmc/articles/PMC3814332/#pgen.1003892.s005). The p15a ori was amplified using primers OGO174+OGO175 (a list of all primers is provided in Table 5). The amyE integration cassette was amplified using primers OGO176+OGO185. The two fragments were assembled and transformed into E. coli cells using Gibson assembly cloning kit (NEB E5510S), and assembled plasmids were verified by restriction pattern and full sequencing.

[2100] The backbone of the above described vector was amplified using primers OGO309+OGO310, adding to it a BamHI restriction site and a terminator site. The multiple cloning site of plasmid pBS1C (received from the BGSC) was amplified using primers OGO311+OGO312. Both fragments were digested using AscI and BamHI, ligated using T4 ligase and transformed into E. coli, resulting in plasmid pSG1-rfp. The plasmid was digestion verified and fully sequenced.

[2101] The SIR2-TIR locus of Bacillus cereus MSX-D12 (RefSeq accession AHEQ01000050, coordinates 16453-19685 of the forward strand, SEQ ID NO: XXXXX) was commercially synthesized (GenScript) directly into pSG1-rfp between the AscI and NotI sites of the multiple cloning site. The cloned vector was transformed into B. subtilis BEST7003 [SD1] cells, and the resulting transformants were verified by PCR and whole genome sequencing.

[2102] Phage Cultivation and Plaque Assay—

[2103] In the initial studies, phi3T, SPO1, phi29 and phi105 phages were obtained from the Bacillus Genetic Stock Center (BGSC). Phages were propagated on B. subtilis BEST7003 using the plate lysate method as described by Fortier & Moineau (Fortier and Moineau (2009) Phage Production and Maintenance of Stocks, Including Expected Stock Lifetimes. In: Clokie M. R., Kropinski A. M. (eds) Bacteriophages. Methods in Molecular Biology™, vol 501. Humana Press)

[2104] Lysate titer was determined using the small drop plaque assay method as described by Mazzocco et al. (Mazzocco et al., 2009 ibid). Efficiency of plating (EOP) was measured by performing small drop plaque assay with the same phage lysate concentrations on control bacteria and bacteria containing the SIR2-TIR system and comparing the ratio of plaque formation. Follow-up experiments included plaque assays testing the EOP against JER, Chloro, SpBeta, SPR, phi105, rho14, and SPP1.

[2105] Results:

[2106] Thoeris (Egyptian protective deity of childbirth and fertility) is a system that was detected based on the enrichment of pfam08937 (TIR domain) next to known defense genes (FIG. 5A). This domain was previously reported as associated with prokaryotic argonaute genes. The pfam08937 (DUF1863) domain was found to be significantly associated with known defense systems (defense score of 0.68). pfam08937 is a protein domain of unknown function, which was found to have structural homology with the TIR-domain (TIR=Toll-Interleukin receptor). TIR domains are known to be involved in bacterial immune system evasion in animals and plants.

[2107] As defense systems are frequently encoded by multiple genes working in concert that are co-localized in the genome (i.e. defense islands), the genetic context of the pfam08937-containing genes was analyzed. It was found that there is a subsystem in which upstream of the genes with a pfam08937 domain there is a gene with a SIR2 domain (pfam13289). Also, in many cases there was more than one TIR-domain gene in proximity (FIG. 5A). The defense score of this subsystem was 0.58, raising the hypothesis that these two (or more) genes together form an anti-phage defense system, denoted herein as SIR2-TIR. The SIR2 gene (pfam13289) encodes a protein with a median size of 483 amino acids. The TIR genes can have one of two pfams, pfam08937 or pfam13676 or pfam 08357. They encode proteins with a median size of 202 amino acids.

[2108] The first gene in the Thoeris system, denoted thsA, has NAD-binding domain that is sometimes annotated as a sirtuin (SIR2)-like domain or Macro domain. The second gene was denoted thsB, and contains the TIR domain, and can appear in one or more copies (FIG. 5A). In some versions of the Thoeris system, ThsA polypeptide has a multi-transmembrane N-terminal domain.

[2109] Two instances of this system, one from Bacillus cereus MSX-D12 (SEQ ID NO: 10; where ThsA is predicted to be cytoplasmic) and the other from Bacillus amyloliquefaciens Y2 (SEQ ID NO: 11; where ThsA is predicted to be membrane-associated) (FIG. 5B), were engineered into B. subtilis BEST7003, which does not contain an endogenous Thoeris defense system. The correct insertion of the system into the B. subtilis BEST7003 genome was verified by whole genome sequencing. The Thoeris system containing B. subtilis BEST7003 strains were challenged with multiple phages spanning the three families of the dsDNA tailed phages Caudavirales, as detailed above in the methods. The mycophages and podophages are obligatory lytic phages, while the siphophages are temperate.

[2110] The cloned systems were found to confer defense against myophages (FIGS. 3B and 3E, and FIGS. 5C and 5D). As the 3 tested myophages are very different from each other and share little gene homologies, it is possible that the Thoeris system is sensing or targeting a general feature in the biology of myophages rather than a specific sequence or genome modification. Both Thoeris genes, thsA and thsB, are essential in the system as deletion of either of them rendered the system inactive (FIG. 5C).

[2111] Interestingly, the TIR domain (acronym for Toll-Interleukin Receptor) is an important component of the innate immune systems of mammals, plants and invertebrates, where it mainly serves as a connector domain that transfers the immune signal once a molecular pattern of an offensive pathogen is sensed. In animals this domain frequently forms the intracellular portion of membrane-bound Toll-like receptors, whereas in plants it is often connected to intracellular R genes and can also be involved in direct recognition of pathogens. The findings presented here mark a common role for TIR domains in innate immunity across the three domains of life, and implies that the ancestry of this important component of eukaryotic innate immune systems may have stemmed from prokaryotic defense against phages.

[2112] The Thoeris system is broadly distributed in bacteria and archaea, and can be detected in at least 4% of the sequenced genomes we analyzed (2070 genomes; Table 9; FIG. 3H).

TABLE 9
The Thoeris Defense System and Components Thereof
This table is presented in landscape orientation. Due to the number of columns, the table
has been split into parts. Part A includes the first set of columns and therefore should
be place to the left of subsequent parts (Part B and where relevant Part C). To avoid any
doubt, the rows of the table in each part line up once the tables are placed together.
(Part A)

| | | | | | | | | | I | |
|---|---|---|---|---|---|---|---|---|---|---|
| | | | | | E | | G | H | ThsA | J |
| | A | B | C | D | infra- | F | genomic_acces- | #genes | protein_acces- | PRT SEQ |
| 1 | assembly_accession | taxid | species_taxid | organism_name | specific_name | phylum | sion | identified | sion | ID NO: |
| 2 | GCA_000166815.1 | 333849 | 1352 | Enterococcus faecium DO | DO | Firmicutes | AAAK03000018.1 | 3 | EAN09999.1 | 13220 |
| 3 | GCA_000169315.1 | 388400 | 388400 | Bacillus sp. B14905 | B14905 | Firmicutes | AAXV01000012.1 | 2 | EAZ85483.1 | 13223 |
| 4 | GCA_000172675.1 | 535206 | 1352 | Enterococcus faecium E1162 | E1162 | Firmicutes | ABQJ01000097.1 | 3 | EFF33950.1 | 13225 |
| 5 | GCA_000172915.1 | 547468 | 1352 | Enterococcus faecium U0317 | U0317 | Firmicutes | ABSW01000016.1 | 3 | EFF30624.1 | 13228 |
| 6 | GCA_000176955.1 | 596330 | 33031 | Peptoniphilus lacrimalis 315-B | 315-B | Firmicutes | ADDO01000017.1 | 2 | EFA90661.1 | 13231 |
| 7 | GCA_000147675.2 | 596315 | 341694 | Peptostreptococcus stomatis DSM 17678 | DSM 17678 | Firmicutes | ADGQ01000022.1 | 2 | EFM65150.1 | 13233 |
| 8 | GCA_000178275.1 | 702443 | 28116 | Bacteroides ovatus SD CMC 3f | SD CMC 3f | Bacteroidetes | ADMO01000088.1 | 3 | EFF51768.1 | 13235 |
| 9 | GCA_000007825.1 | 226900 | 1396 | Bacillus cereus ATCC 14579 | ATCC 14579 | Firmicutes | AE016877.1 | 2 | AAP11368.1 | 13238 |
| 10 | GCA_000179615.1 | 717606 | 59840 | Paenibacillus curdlanolyticus YK9 | YK9 | Firmicutes | AEDD01000013.1 | 3 | EFM08817.1 | 13240 |
| 11 | GCA_000226815.3 | 907491 | 714 | Aggregatibacter actinomycetemcomitans | SCC1398 | Proteobacteria | AEJP02000033.1 | 3 | KND82314.1 | 13243 |
| | | | | serotype b str. SCC1398 | | | | | | |
| 12 | GCA_000226835.3 | 907492 | 714 | Aggregatibacter actinomycetemcomitans | I23C | Proteobacteria | AEJQ02000012.1 | 3 | KOE55210.1 | 13246 |
| | | | | serotype b str. I23C | | | | | | |
| 13 | GCA_000239115.2 | 933356 | 1352 | Enterococcus faecium E4452 | E4452 | Firmicutes | AEOU01000033.1 | 3 | EHM35989.1 | 13249 |
| 14 | GCA_000298315.2 | 990285 | 1120045 | Rhizobium grahamii CCGE 502 | CCGE 502 | Proteobacteria | AEYE02000011.1 | 2 | EPE98431.1 | 13252 |
| 15 | GCA_000223275.2 | 1035188 | 249188 | Haemophilus pittmaniae HK 85 | HK 85 | Proteobacteria | AFUV01000004.1 | 3 | EGV07449.1 | 13254 |
| 16 | GCA_000231965.2 | 760839 | 1313 | Streptococcus pneumoniae GA47502 | GA47502 | Firmicutes | AGNV01000008.1 | 3 | EHD29827.1 | 13257 |
| 17 | GCA_000239555.2 | 904766 | 1280 | Staphylococcus aureus subsp. | 21331 | Firmicutes | AGTV01000033.1 | 3 | EHM75393.1 | 13260 |
| | | | | aureus 21331 | | | | | | |
| 18 | GCA_000259915.1 | 1089447 | 714 | Aggregatibacter actinomycetemcomitans | RhAA1 | Proteobacteria | AHGR01000001.1 | 3 | EHK91559.1 | 13263 |
| | | | | RhAA1 | | | | | | |
| 19 | GCA_000401595.1 | 1137132 | 1280 | Staphylococcus aureus subsp. | 112808A | Firmicutes | AHZK01000035.1 | 3 | EOR48149.1 | 13266 |
| | | | | aureus 112808A | | | | | | |
| 20 | GCA_000257805.1 | 1095735 | 28037 | Streptococcus mitis SK616 | SK616 | Firmicutes | AICR01000116.1 | 3 | EID19247.1 | 13269 |
| 21 | GCA_000252405.2 | 1155079 | 1280 | Staphylococcus aureus subsp. | DR10 | Firmicutes | AIDT01000006.1 | 3 | EIA14317.1 | 13272 |
| | | | | aureus DR10 | | | | | | |
| 22 | GCA_000257705.1 | 1095750 | 467210 | Lachnoanaerobaculum saburreum F0468 | F0468 | Firmicutes | AJGH01000082.1 | 2 | EIC95439.1 | 13275 |
| 23 | GCA_000256585.3 | 406819 | 406819 | Burkholderia sp. SJ98 | SJ98 | Proteobacteria | AJHK02000012.1 | 2 | EKS70339.1 | 13277 |
| 24 | GCA_000332935.2 | 1167009 | 714 | Aggregatibacter actinomycetemcomitans | SCC4092 | Proteobacteria | AJMF02000026.1 | 3 | KOE52661.1 | 13279 |
| | | | | serotype b str. SCC4092 | | | | | | |
| 25 | GCA_000332955.2 | 1167008 | 714 | Aggregatibacter actinomycetemcomitans | S23A | Proteobacteria | AJMH02000015.1 | 3 | KOE56127.1 | 13282 |
| | | | | serotype b str. S23A | | | | | | |
| 26 | GCA_000262265.1 | 1095744 | 735 | Haemophilus parahaemolyticus HK385 | HK385 | Proteobacteria | AJSW01000041.1 | 3 | EIJ69644.1 | 13285 |
| 27 | GCA_000264155.1 | 752788 | 562 | Escherichia coli 75 | 75 | Proteobacteria | AJWT01000218.1 | 2 | EIL59628.1 | 13288 |
| 28 | GCA_000279285.1 | 991946 | 666 | Vibrio cholerae HE-45 | HE-45 | Proteobacteria | ALED01000025.1 | 2 | EJH65283.1 | 13290 |
| 29 | GCA_000290475.1 | 1154930 | 1311 | Streptococcus agalactiae GB00679 | GB00679 | Firmicutes | ALTY01000018.1 | 2 | EPV35489.1 | 13292 |
| 30 | GCA_000067165.1 | 448385 | 56 | Sorangium cellulosum So ce56 | So ce 56 | Proteobacteria | AM746676.1 | 2 | CAN93966.1 | 13294 |
| 31 | GCA_000009585.1 | 523796 | 1280 | Staphylococcus aureus subsp. | type strain: | Firmicutes | AM990992.1 | 3 | CAQ50582.1 | 13296 |
| | | | | aureus ST398 | ST398 | | | | | |
| 32 | GCA_000300515.1 | 1231190 | 721133 | Nitratireductor indicus C115 | C115 | Proteobacteria | AMSI01000038.1 | 3 | EKF39860.1 | 13299 |
| 33 | GCA_000468975.2 | 1232203 | 1428 | Bacillus thuringiensis serovar | Leapi01 | Firmicutes | AMXS02000100.1 | 2 | ETE93554.1 | 13302 |
| | | | | aizawai str. Leapi01 | | | | | | |
| 34 | GCA_000468995.3 | 1238885 | 1428 | Bacillus thuringiensis serovar | Hu4-2 | Firmicutes | AMXT02000117.1 | 2 | ETE97368.1 | 13304 |
| | | | | aizawai str. Hu4-2 | | | | | | |
| 35 | GCA_000410435.1 | 1256211 | 1597 | Lactobacillus paracasei subsp. | CNCM | Firmicutes | ANKH01000630.1 | 2 | EPC81228.1 | 13306 |
| | | | | paracasei CNCM I-4649 | I-4649 | | | | | |
| 36 | GCA_000326585.1 | 1169377 | 562 | Escherichia coli KTE113 | KTE113 | Proteobacteria | ANXQ01000026.1 | 2 | ELI26319.1 | 13308 |
| 37 | GCA_000326445.1 | 1169399 | 562 | Escherichia coli KTE168 | KTE168 | Proteobacteria | ANYM01000035.1 | 2 | ELJ29820.1 | 13310 |
| 38 | GCA_000341815.1 | 1278077 | 334542 | Rhodococcus qingshengii BKS 20-40 | BKS 20-40 | Actinobacteria | AODN01000101.1 | 3 | EME14866.1 | 13312 |
| 39 | GCA_000342205.1 | 1263833 | 615 | Serratia marcescens VGH107 | VGH107 | Proteobacteria | AORJ01000083.1 | 2 | EMF02811.1 | 13315 |
| 40 | GCA_000828775.1 | 1334564 | 615 | Serratia marcescens SM39 | SM39 | Proteobacteria | AP013063.1 | 2 | BAO35114.1 | 13317 |
| 41 | GCA_000828875.1 | 758796 | 758796 | Burkholderia sp. RPE67 | RPE67 | Proteobacteria | AP014579.1 | 2 | BAO91362.1 | 13319 |
| 42 | GCA_001547895.1 | 1500686 | 1500686 | Pseudomonas sp. Os17 | Os17 | Proteobacteria | AP014627.1 | 5 | BAQ74702.1 | 13321 |
| 43 | GCA_000372645.1 | 1292034 | 155892 | Caulobacter crescentus OR37 | OR37 | Proteobacteria | APMP01000003.1 | 3 | ENZ83250.1 | 13326 |
| 44 | GCA_000445085.1 | 428994 | 428994 | Sphingobium sp. HDIP04 | HDIP04 | Proteobacteria | ATDO01000049.1 | 2 | EQB07550.1 | 13329 |
| 45 | GCA_000416235.1 | 911242 | 911242 | Pseudomonas sp. CFII64 | CFII64 | Proteobacteria | ATLO01000035.1 | 2 | EPJ82189.1 | 13331 |
| 46 | GCA_000421925.1 | 1346790 | 420233 | Sphingobium chinhatense IP26 | IP26 | Proteobacteria | AUDA01000159.1 | 2 | EPR14527.1 | 13333 |
| 47 | GCA_000455725.2 | 1344577 | 1280 | Staphylococcus aureus S1 | S1 | Firmicutes | AUPS01000015.1 | 3 | EQM91604.1 | 13335 |
| 48 | GCA_000443245.1 | 1344578 | 1280 | Staphylococcus aureus S130 | S130 | Firmicutes | AUPT01000016.1 | 3 | EPZ04960.1 | 13338 |
| 49 | GCA_000443265.1 | 1344579 | 1280 | Staphylococcus aureus S123 | S123 | Firmicutes | AUPU01000015.1 | 3 | EPZ06671.1 | 13341 |
| 50 | GCA_000443125.1 | 1344580 | 1280 | Staphylococcus aureus S100 | S100 | Firmicutes | AUPV01000016.1 | 3 | EPZ03686.1 | 13344 |
| 51 | GCA_000443285.1 | 1344581 | 1280 | Staphylococcus aureus S94 | S94 | Firmicutes | AUPW01000016.1 | 3 | EPZ11495.1 | 13347 |
| 52 | GCA_000477515.1 | 1366052 | 1613 | Lactobacillus fermentum MTCC 8711 | MTCC 8711 | Firmicutes | AVAB01000001.1 | 2 | EQC60101.1 | 13350 |
| 53 | GCA_000449945.2 | 1151319 | 1496 | Peptoclostridium difficile DA00065 | DA00065 | Firmicutes | AVIU01000072.1 | 2 | EQG20075.1 | 13352 |
| 54 | GCA_000452125.2 | 1151436 | 1496 | Peptoclostridium difficile P71 | P71 | Firmicutes | AVMW01000033.1 | 2 | EQK22995.1 | 13354 |
| 55 | GCA_000516615.2 | 1343073 | 470 | Acinetobacter baumannii CI78 | CI78 | Proteobacteria | AVOE01000023.1 | 6 | ETR94925.1 | 13356 |
| 56 | GCA_000454165.1 | 1238193 | 670 | Vibrio parahaemolyticus VP2007-095 | VP2007-095 | Proteobacteria | AVOI01000015.1 | 3 | EQL89245.1 | 13362 |
| 57 | GCA_000465615.2 | 1357297 | 615 | Serratia marcescens EGD-HP20 | EGD-HP20 | Proteobacteria | AVSR01000008.1 | 2 | ERH73216.1 | 13365 |
| 58 | GCA_000478965.1 | 1111454 | 1111454 | Megasphaera sp. BV3C16-1 | BV3C16-1 | Firmicutes | AWXA01000003.1 | 2 | ERT62562.1 | 13367 |
| 59 | GCA_000478985.1 | 1111134 | 1111134 | Peptoniphilus sp. BV3C26 | BV3C26 | Firmicutes | AWXB01000008.1 | 3 | ERT61554.1 | 13369 |
| 60 | GCA_000478985.1 | 1111134 | 1111134 | Peptoniphilus sp. BV3C26 | BV3C26 | Firmicutes | AWXB01000046.1 | 2 | ERT58436.1 | 13372 |
| 61 | GCA_000478865.2 | 1388760 | 303 | Pseudomonas putida SJ3 | SJ3 | Proteobacteria | AXDX02000039.1 | 5 | ERT19168.2 | 13374 |
| 62 | GCA_000496325.1 | 1408193 | 287 | Pseudomonas aeruginosa VRFPA05 | VRFPA05 | Proteobacteria | AXZJ01000100.1 | 3 | ESR69982.1 | 13379 |
| 63 | GCA_000648195.1 | 1400808 | 1351 | Enterococcus faecalis NY9 | NY9 | Firmicutes | AYOL01000045.1 | 3 | KAJ84751.1 | 13382 |
| 64 | GCA_000648195.1 | 1400808 | 1351 | Enterococcus faecalis NY9 | NY9 | Firmicutes | AYOL01000110.l | 2 | KAJ82225.1 | 13385 |
| 65 | GCA_000506425.2 | 1415162 | 1061 | Rhodobacter capsulatus B6 | B6 | Proteobacteria | AYQA01000057.1 | 2 | ETD82032.1 | 13387 |
| 66 | GCA_000503195.1 | 1419876 | 1419876 | Blastomonas sp. CACIA14H2 | | Proteobacteria | AYSC01000003.1 | 3 | ESZ88708.1 | 13389 |
| 67 | GCA_000510425.1 | 1161902 | 35518 | Eubacterium nodatum ATCC 33099 | ATCC 33099 | Firmicutes | AZKM01000022.1 | 2 | ETJ99320.1 | 13392 |
| 68 | GCA_001596225.1 | 1434263 | 714 | Aggregatibacter actinomycetemcomitans | SA2149 | Proteobacteria | AZTT01000065.1 | 3 | KYK73940.1 | 13394 |
| | | | | serotype e str. SA2149 | | | | | | |
| 69 | GCA_000512995.1 | 936596 | 936596 | Lachnoanaerobaculum sp. MSX33 | MSX33 | Firmicutes | AZXX01000025.1 | 2 | ETO98932.1 | 13397 |
| 70 | GCA_000513095.1 | 1236970 | 127891 | Bacillus wakoensis JCM 9140 | JCM 9140 | Firmicutes | BAUT01000052.1 | 2 | GAE27470.1 | 13399 |
| 71 | GCA_000787715.1 | 1219049 | 28213 | Sphingomonas parapaucimobilis NBRC 15100 | NBRC 15100 | Proteobacteria | BBPI01000099.1 | 3 | GAM02795.1 | 13401 |
| 72 | GCA_000195675.1 | 257310 | 518 | Bordetella bronchiseptica RB50 | RB50 | Proteobacteria | BX470250.1 | 3 | CAE30982.1 | 13404 |
| 73 | GCA_000355725.1 | 1118157 | 40324 | Stenotrophomonas maltophilia RA8 | RA8 | Proteobacteria | CALM01001187.1 | 3 | CCP18523.1 | 13407 |
| 74 | GCA_000985975.1 | 323656 | 399 | Neorhizobium galegae bv. officinalis | | Proteobacteria | CCRK01000014.1 | 2 | CDZ53063.1 | 13410 |
| 75 | GCA_000820425.1 | 1363 | 1363 | Lactococcus garvieae | M14 | Firmicutes | CCXC01000004.1 | 2 | CEF52297.1 | 13412 |
| 76 | GCA_001113365.1 | 1313 | 1313 | Streptococcus pneumoniae | SMRU2014 | Firmicutes | CKYA01000015.1 | 2 | CJD59524.1 | 13414 |
| 77 | GCA_000161115.1 | 526978 | 1396 | Bacillus cereus BDRD-Cer4 | BDRD-Cer4 | Firmicutes | CM000726.1 | 2 | EEL09527.1 | 13416 |
| 78 | GCA_000161395.1 | 526993 | 1396 | Bacillus cereus AH1272 | AH1272 | Firmicutes | CM000740.1 | 3 | EEL84782.1 | 13418 |
| 79 | GCA_000003955.1 | 526994 | 1396 | Bacillus cereus AH1273 | AH1273 | Firmicutes | CM000741.1 | 3 | EEL90114.1 | 13421 |
| 80 | GCA_000159695.1 | 525282 | 1260 | Finegoldia magna ATCC 53516 | ATCC 53516 | Firmicutes | CM000955.1 | 2 | EFH92719.1 | 13424 |
| 81 | GCA_000183885.1 | 702456 | 1642 | Listeria innocua FSLS4-378 | FSLS4-378 | Firmicutes | CM001048.1 | 2 | EFR92171.1 | 13426 |
| 82 | GCA_000263675.2 | 1038924 | 294 | Pseudomonas fluorescens SS101 | SS101 | Proteobacteria | CM001513.1 | 3 | EIK62927.1 | 13428 |
| 83 | GCA_000012605.1 | 317025 | 39765 | Thiomicrospira crunogena XCL-2 | XCL-2 | Proteobacteria | CP000109.2 | 4 | ABB40969.1 | 13431 |
| 84 | GCA_000013605.1 | 338969 | 192843 | Rhodoferax ferrireducens T118 | DSM 15236 | Proteobacteria | CP000267.1 | 2 | ABD68809.1 | 13435 |
| 85 | GCA_000013625.1 | 375286 | 375286 | Janthinobacterium sp. Marseille | Marseille | Proteobacteria | CP000269.1 | 3 | ABR91460.1 | 13437 |
| 86 | GCA_000014665.1 | 60481 | 60481 | Shewanella sp. MR-7 | MR-7 | Proteobacteria | CP000444.1 | 3 | ABI42036.1 | 13440 |
| 87 | GCA_000015885.1 | 416269 | 715 | Actinobacillus pleuropneumoniae | L20 | Proteobacteria | CP000569.1 | 3 | ABN74271.1 | 13443 |
| | | | | serovar 5b str. L20 | | | | | | |
| 88 | GCA_000016125.1 | 402880 | 39152 | Methanococcus maripaludis C5 | C5 | Euryarchaeota | CP000609.1 | 2 | ABO35466.1 | 13446 |
| 89 | GCA_000016405.1 | 349102 | 1063 | Rhodobacter sphaeroides ATCC 17025 | ATCC 17025 | Proteobacteria | CP000665.1 | 3 | ABP73209.1 | 13448 |
| 90 | GCA_000016965.1 | 290402 | 1520 | Clostridium beijerinckii NCIMB8052 | NCIMB 8052 | Firmicutes | CP000721.1 | 5 | ABR34958.1 | 13451 |
| 91 | GCA_000017145.1 | 366394 | 110321 | Sinorhizobium medicae WSM419 | WSM419 | Proteobacteria | CP000741.1 | 2 | ABR65059.1 | 13456 |
| 92 | GCA_000019445.1 | 390235 | 303 | Pseudomonas putida W619 | W619 | Proteobacteria | CP000949.1 | 5 | ACA73845.1 | 13458 |
| 93 | GCA_000019925.1 | 398577 | 152480 | Burkholderia ambifaria MC40-6 | MC40-6 | Proteobacteria | CP001026.1 | 3 | ACB66894.1 | 13463 |
| 94 | GCA_000146265.2 | 668336 | 714 | Aggregatibacter actinomycetemcomitans | D11S-1 | Proteobacteria | CP001733.1 | 3 | ACX81594.1 | 13466 |
| | | | | D11S-1 | | | | | | |
| 95 | GCA_000024405.1 | 526218 | 826 | Sebaldella termitidis ATCC 33386 | ATCC 33386 | Fusobacteria | CP001740.1 | 2 | ACZ11005.1 | 13469 |
| 96 | GCA_000025345.1 | 526225 | 1861 | Geodermatophilus obscurus DSM 43160 | DSM 43160 | Actinobacteria | CP001867.1 | 3 | ADB76077.1 | 13471 |
| 97 | GCA_000192635.1 | 861208 | 861208 | Agrobacterium sp. H13-3 | H13-3 | Proteobacteria | CP002250.1 | 4 | ADY67727.1 | 13474 |
| 98 | GCA_000166135.1 | 298654 | 298654 | Frankia sp. Eul1c | Eul1c | Actinobacteria | CP002299.1 | 2 | ADP84996.1 | 13478 |
| 99 | GCA_000195575.1 | 208596 | 208596 | Carnobacterium sp. 17-4 | 17-4 | Firmicutes | CP002563.1 | 3 | AEB29797.1 | 13480 |
| 100 | GCA_000194745.1 | 999541 | 28095 | Burkholderia gladioli BSR3 | BSR3 | Proteobacteria | CP002599.1 | 6 | AEA61152.1 | 13483 |
| 101 | GCA_000258685.1 | 1155084 | 1280 | Staphylococcus aureus subsp. | 71193 | Firmicutes | CP003045.1 | 3 | AFH70387.1 | 13489 |
| | | | | aureus 71193 | | | | | | |
| 102 | GCA_000241025.2 | 754507 | 714 | Aggregatibacter actinomycetemcomitans | ANH9381 | Proteobacteria | CP003099.1 | 3 | AEW76524.1 | 13492 |
| | | | | ANH9381 | | | | | | |
| 103 | GCA_000239195.1 | 347495 | 1396 | Bacillus cereus F837/76 | F837/76 | Firmicutes | CP003187.1 | 2 | AEW57570.1 | 13495 |
| 104 | GCA_000264455.2 | 1110502 | 171437 | Tistrella mobilis KA081020-065 | KA081020-065 | Proteobacteria | CP003236.1 | 4 | AFK54067.1 | 13497 |
| 105 | GCA_000747565.1 | 488142 | 488142 | Serratia sp. SCBI | SCBI | Proteobacteria | CP003424.1 | 2 | AIM23120.1 | 13501 |
| 106 | GCA_000230695.3 | 666685 | 666685 | Rhodanobacter denitrificans | 2APBS1 | Proteobacteria | CP003470.1 | 2 | AGG89637.1 | 13503 |
| 107 | GCA_000174395.2 | 333849 | 1352 | Enterococcus faecium DO | DO | Firmicutes | CP003583.1 | 3 | AFK58216.1 | 13505 |
| 108 | GCA_000281215.1 | 1196325 | 303 | Pseudomonas putida DOT-T1E | DOT-TIE | Proteobacteria | CP003734.1 | 4 | AF049035.1 | 13508 |
| 109 | GCA_000296595.1 | 1229492 | 1280 | Staphylococcus aureus 08BA02176 | 08BA02176 | Firmicutes | CP003808.1 | 3 | AFR74120.1 | 13512 |
| 110 | GCA_000599545.1 | 543736 | 37919 | Rhodococcus opacus PD630 | PD630 | Actinobacteria | CP003949.1 | 2 | AHK33011.1 | 13515 |
| 111 | GCA_000336425.1 | 435998 | 615 | Serratia marcescens WW4 | WW4 | Proteobacteria | CP003959.1 | 2 | AGE19433.1 | 13517 |
| 112 | GCA_000257545.3 | 1147786 | 75612 | Pseudomonas mandelii JR-1 | JR-1 | Proteobacteria | CP005960.1 | 4 | AHZ68662.1 | 13519 |
| 113 | GCA_000401555.1 | 1288394 | 644 | Aeromonas hydrophila ML09-119 | ML09-119 | Proteobacteria | CP005966.1 | 2 | AGM44765.1 | 13523 |
| 114 | GCA_000338115.2 | 1284663 | 1590 | Lactobacillus plantarum ZJ316 | ZJ316 | Firmicutes | CP006247.1 | 2 | AGS26695.1 | 13525 |
| 115 | GCA_000176835.2 | 682634 | 82996 | Serratia plymuthica 4Rx13 | 4Rx13 | Proteobacteria | CP006250.1 | 2 | AGO56414.1 | 13527 |
| 116 | GCA_000418305.1 | 571800 | 571800 | Psychrobacter sp. G | G | Proteobacteria | CP006265.1 | 3 | AGP48697.1 | 13529 |
| 117 | GCA_000767745.1 | 864803 | 1520 | Clostridium beijerinckii ATCC 35702 | SA-1 | Firmicutes | CP006777.1 | 5 | AIU01497.1 | 13532 |
| 118 | GCA_000504585.1 | 1380774 | 1380774 | Pandoraea sp. RB-44 | RB-44 | Proteobacteria | CP006938.1 | 3 | AHB77236.1 | 13537 |
| 119 | GCA_000835085.1 | 1124992 | 2095 | Mycoplasma capricolum subsp. | 87001 | Tenericutes | CP006959.1 | 2 | AJK51071.1 | 13540 |
| | | | | capripneumoniae 87001 | | | | | | |
| 120 | GCA_000510285.1 | 1435044 | 76759 | Pseudomonas monteilii SB3078 | SB3078 | Proteobacteria | CP006978.1 | 3 | AHC80715.1 | 13542 |
| 121 | GCA_000510325.1 | 1435058 | 76759 | Pseudomonas monteilii SB3101 | SB3101 | Proteobacteria | CP006979.1 | 3 | AHC86147.1 | 13545 |
| 122 | GCA_000604045.1 | 272556 | 714 | Aggregatibacter actinomycetemcomitans | HK1651 | Proteobacteria | CP007502.1 | 3 | AHN71072.1 | 13548 |
| | | | | HK1651 | | | | | | |
| 123 | GCA_001191585.1 | 272556 | 714 | Aggregatibacter actinomycetemcomitans | HK1651 | Proteobacteria | CP008984.1 | 3 | AKU28345.1 | 13551 |
| | | | | HK1651 | | | | | | |
| 124 | GCA_000834215.1 | 1454377 | 29484 | Yersinia frederiksenii Y225 | Y225 | Proteobacteria | CP009364.1 | 3 | AJI87975.1 | 13554 |
| 125 | GCA_000758725.1 | 189426 | 189426 | Paenibacillus odorifer | DSM 15391 | Firmicutes | CP009428.1 | 3 | AIQ75144.1 | 13557 |
| 126 | GCA_000477035.2 | 1348585 | 76594 | Cellulophaga baltica NN016038 | NN016038 | Bacteroidetes | CP009887.1 | 2 | AIY12608.1 | 13560 |
| 127 | GCA_000834865.1 | 28152 | 28152 | Yersinia kristensenii | Y231 | Proteobacteria | CP009997.1 | 3 | AJJ37542.1 | 13562 |
| 128 | GCA_000831585.1 | 70775 | 70775 | Pseudomonas plecoglossicida | NyZ12 | Proteobacteria | CP010359.1 | 3 | AJG12527.1 | 13565 |
| 129 | GCA_000961035.1 | 35554 | 35554 | Geobacter sulfurreducens | AM-1 | Proteobacteria | CP010430.1 | 3 | AJY68818.1 | 13568 |
| 130 | GCA_000934565.1 | 294 | 294 | Pseudomonas fluorescens | PCL1751 | Proteobacteria | CP010896.1 | 2 | AJP52231.1 | 13571 |
| 131 | GCA_000934525.1 | 589873 | 589873 | Alteromonas australica | DE170 | Proteobacteria | CP010912.1 | 2 | AJP42564.1 | 13573 |
| 132 | GCA_001023535.1 | 587753 | 587753 | Pseudomonas chlororaphis | UFB2 | Proteobacteria | CP011020.1 | 3 | AKK01414.1 | 13575 |
| 133 | GCA_000973085.1 | 187101 | 187101 | Sneathia amnii | SN35 | Fusobacteria | CP011280.1 | 4 | AKC95051.1 | 13578 |
| 134 | GCA_001043175.1 | 330734 | 330734 | Marinobacter psychrophilus | 20041 | Proteobacteria | CP011494.1 | 2 | AKO52328.1 | 13582 |
| 135 | GCA_001266795.1 | 1671721 | 1671721 | Marinobacter sp. CP1 | CP1 | Proteobacteria | CP011929.1 | 2 | AKV98647.1 | 13584 |
| 136 | GCA_001294565.1 | 615 | 615 | Serratia marcescens | SmUNAM836 | Proteobacteria | CP012685.1 | 2 | ALE97361.1 | 13586 |
| 137 | GCA_001310255.1 | 1532555 | 1532555 | Brevundimonas sp. DS20 | DS20 | Proteobacteria | CP012897.1 | 4 | ALJ08795.1 | 13588 |
| 138 | GCA_001594245.1 | 714 | 714 | Aggregatibacter actinomycetemcomitans | VT1169 | Proteobacteria | CP012958.1 | 3 | AMQ92899.1 | 13592 |
| 139 | GCA_001414055.1 | 69395 | 69395 | Caulobacter henricii | CB4 | Proteobacteria | CP013002.1 | 3 | ALL13164.1 | 13595 |
| 140 | GCA_001455365.1 | 644 | 644 | Aeromonas hydrophila | JBN2301 | Proteobacteria | CP013178.1 | 3 | ALQ62810.1 | 13598 |
| 141 | GCA_001465635.1 | 1280 | 1280 | Staphylococcus aureus | RIVM1295 | Firmicutes | CP013616.1 | 3 | ALS70450.1 | 13601 |
| 142 | GCA_001465675.1 | 1280 | 1280 | Staphylococcus aureus | RIVM1607 | Firmicutes | CP013619.1 | 3 | ALS73061.1 | 13604 |
| 143 | GCA_001465755.1 | 1280 | 1280 | Staphylococcus aureus | RIVM3897 | Firmicutes | CP013621.1 | 3 | ALS86458.1 | 13607 |
| 144 | GCA_001518915.1 | 1763998 | 1763998 | Rheinheimera sp. F8 | F8 | Proteobacteria | CP013656.1 | 2 | ALZ77344.1 | 13610 |
| 145 | GCA_001518775.1 | 644 | 644 | Aeromonas hydrophila | D4 | Proteobacteria | CP013965.1 | 3 | ALZ79510.1 | 13612 |
| 146 | GCA_001518735.1 | 1352 | 1352 | Enterococcus faecium | 6E6 | Firmicutes | CP013994.1 | 3 | ALZ52747.1 | 13615 |
| 147 | GCA_001561955.1 | 991789 | 28446 | [Clostridium] propionicum DSM 1682 | X2 | Firmicutes | CP014223.1 | 4 | AMJ40926.1 | 13618 |
| 148 | GCA_001560895.1 | 28037 | 28037 | Streptococcus mitis | SVGS_061 | Firmicutes | CP014326.1 | 3 | AMH88749.1 | 13622 |
| 149 | GCA_001515585.2 | 303 | 303 | Pseudomonas putida | 1A00316 | Proteobacteria | CP014343.1 | 2 | AMK33280.1 | 13625 |
| 150 | GCA_001112925.1 | 685706 | 685706 | Yersinia nurmii | type strain: | Proteobacteria | CPYD01000022.1 | 2 | CNF27344.1 | 13627 |
| | | | | | CIP110231 | | | | | |
| 151 | GCA_001140625.1 | 633 | 633 | Yersinia pseudotuberculosis | R819 | Proteobacteria | CPZI01000008.1 | 3 | CNF62528.1 | 13629 |
| 152 | GCA_001121225.1 | 29484 | 29484 | Yersinia frederiksenii | IP25924 | Proteobacteria | CQBF01000033.1 | 3 | CNI82010.1 | 13632 |
| 153 | GCA_001114105.1 | 367190 | 367190 | Yersinia similis | Y233 | Proteobacteria | CQBK01000054.1 | 3 | CNI72044.1 | 13635 |
| 154 | GCA_001368815.1 | 1462524 | 1462524 | Paraliobacillus sp. PM-2 | PM-2 | Firmicutes | CTEI01000001.1 | 2 | CQR45868.1 | 13638 |
| 155 | GCA_001222805.1 | 630 | 630 | Yersinia enterocolitica | YE09/03 | Proteobacteria | CTKQ01000009.1 | 5 | CQJ38356.1 | 13640 |
| 156 | GCA_001499695.1 | 40324 | 40324 | Stenotrophomonas maltophilia | | Proteobacteria | CVIU01000014.1 | 4 | CRD50721.1 | 13645 |
| 157 | GCA_001406815.1 | 301302 | 301302 | Roseburia faecis | M72 | Firmicutes | CVRR01000033.1 | 2 | CRL40092.1 | 13649 |
| 158 | GCA_001177845.1 | 148942 | 1336 | Streptococcus equi subsp. equi | EQUI0003 | Firmicutes | CVWY01000044.1 | 2 | CRR05859.1 | 13651 |
| 159 | GCA_001179425.1 | 148942 | 1336 | Streptococcus equi subsp. equi | EQUI0005 | Firmicutes | CVXE01000065.1 | 2 | CRR37079.1 | 13653 |
| 160 | GCA_001179085.1 | 148942 | 1336 | Streptococcus equi subsp. equi | EQUI0004 | Firmicutes | CVXF01000062.1 | 2 | CRR43612.1 | 13655 |
| 161 | GCA_001178765.1 | 148942 | 1336 | Streptococcus equi subsp. equi | EQUI0007 | Firmicutes | CVXG01000062.1 | 2 | CRR34883.1 | 13657 |
| 162 | GCA_001178485.1 | 148942 | 1336 | Streptococcus equi subsp. equi | EQUI0006 | Firmicutes | CVXI01000065.1 | 2 | CRR50108.1 | 13659 |
| 163 | GCA_001175105.1 | 148942 | 1336 | Streptococcus equi subsp. equi | EQUI0008 | Firmicutes | CVXJ01000058.1 | 2 | CRR37365.1 | 13661 |
| 164 | GCA_001175965.1 | 148942 | 1336 | Streptococcus equi subsp. equi | EQUI0009 | Firmicutes | CVXK01000003.1 | 2 | CRR01737.1 | 13663 |
| 165 | GCA_001175845.1 | 148942 | 1336 | Streptococcus equi subsp. equi | EQUI0010 | Firmicutes | CVXM01000058.1 | 2 | CRR52905.1 | 13665 |
| 166 | GCA_001176705.1 | 148942 | 1336 | Streptococcus equi subsp. equi | EQUI0011 | Firmicutes | CVX001000058.1 | 2 | CRR41690.1 | 13667 |
| 167 | GCA_001178165.1 | 148942 | 1336 | Streptococcus equi subsp. equi | EQUI0033 | Firmicutes | CVXQ01000063.1 | 2 | CRS57164.1 | 13669 |
| 168 | GCA_001178685.1 | 148942 | 1336 | Streptococcus equi subsp. equi | EQUI0035 | Firmicutes | CVXR01000068.1 | 2 | CRS58226.1 | 13671 |
| 169 | GCA_001178905.1 | 148942 | 1336 | Streptococcus equi subsp. equi | EQUI0036 | Firmicutes | CVXS01000068.1 | 2 | CRS57780.1 | 13673 |
| 170 | GCA_001178025.1 | 148942 | 1336 | Streptococcus equi subsp. equi | EQUI0034 | Firmicutes | CVXT01000066.1 | 2 | CRS58151.1 | 13675 |
| 171 | GCA_001178585.1 | 148942 | 1336 | Streptococcus equi subsp. equi | EQUI0037 | Firmicutes | CVXU01000042.1 | 2 | CRS55109.1 | 13677 |
| 172 | GCA_001175585.1 | 148942 | 1336 | Streptococcus equi subsp. equi | EQUI0039 | Firmicutes | CVXV01000043.1 | 2 | CRS48588.1 | 13679 |
| 173 | GCA_001175365.1 | 148942 | 1336 | Streptococcus equi subsp. equi | EQUI0040 | Firmicutes | CVXW01000043.1 | 2 | CRS51337.1 | 13681 |
| 174 | GCA_001175305.1 | 148942 | 1336 | Streptococcus equi subsp. equi | EQUI0038 | Firmicutes | CVXX01000041.1 | 2 | CRS48392.1 | 13683 |
| 175 | GCA_001175645.1 | 148942 | 1336 | Streptococcus equi subsp. equi | EQUI0041 | Firmicutes | CVXY01000044.1 | 2 | CRS50262.1 | 13685 |
| 176 | GCA_001176045.1 | 148942 | 1336 | Streptococcus equi subsp. equi | EQUI0042 | Firmicutes | CVXZ01000043.1 | 2 | CRS50718.1 | 13687 |
| 177 | GCA_001176505.1 | 148942 | 1336 | Streptococcus equi subsp. equi | EQUI0043 | Firmicutes | CVYA01000044.1 | 2 | CRS54427.1 | 13689 |
| 178 | GCA_001176825.1 | 148942 | 1336 | Streptococcus equi subsp. equi | EQUI0044 | Firmicutes | CVYB01000042.1 | 2 | CRS57080.1 | 13691 |
| 179 | GCA_001176965.1 | 148942 | 1336 | Streptococcus equi subsp. equi | EQUI0045 | Firmicutes | CVYC01000044.1 | 2 | CRS58973.1 | 13693 |
| 180 | GCA_001177245.1 | 148942 | 1336 | Streptococcus equi subsp. equi | EQUI0046 | Firmicutes | CVYD01000043.1 | 2 | CRS51127.1 | 13695 |
| 181 | GCA_001177205.1 | 148942 | 1336 | Streptococcus equi subsp. equi | EQUI0047 | Firmicutes | CVYE01000045.1 | 2 | CRS51981.1 | 13697 |
| 182 | GCA_001177785.1 | 148942 | 1336 | Streptococcus equi subsp. equi | EQUI0220 | Firmicutes | CVYF01000064.1 | 2 | CRS77740.1 | 13699 |
| 183 | GCA_001179185.1 | 148942 | 1336 | Streptococcus equi subsp. equi | EQUI0222 | Firmicutes | CVYG01000060.1 | 2 | CRS83912.1 | 13701 |
| 184 | GCA_001178625.1 | 148942 | 1336 | Streptococcus equi subsp. equi | EQUI0048 | Firmicutes | CVYH01000042.1 | 2 | CRS76791.1 | 13703 |
| 185 | GCA_001178345.1 | 148942 | 1336 | Streptococcus equi subsp. equi | EQUI0218 | Firmicutes | CVYI01000043.1 | 2 | CRS78515.1 | 13705 |
| 186 | GCA_001177385.1 | 148942 | 1336 | Streptococcus equi subsp. equi | EQUI0219 | Firmicutes | CVYJ01000068.1 | 2 | CRS90898.1 | 13707 |
| 187 | GCA_001179045.1 | 148942 | 1336 | Streptococcus equi subsp. equi | EQUI0221 | Firmicutes | CVYK01000065.1 | 2 | CRS79977.1 | 13709 |
| 188 | GCA_001178545.1 | 148942 | 1336 | Streptococcus equi subsp. equi | EQUI0224 | Firmicutes | CVYL01000063.1 | 2 | CRS84436.1 | 13711 |
| 189 | GCA_001179445.1 | 148942 | 1336 | Streptococcus equi subsp. equi | EQUI0223 | Firmicutes | CVYM01000062.1 | 2 | CRS81776.1 | 13713 |
| 190 | GCA_001178925.1 | 148942 | 1336 | Streptococcus equi subsp. equi | EQUI0049 | Firmicutes | CVYN01000043.1 | 2 | CRS82433.1 | 13715 |
| 191 | GCA_001177665.1 | 148942 | 1336 | Streptococcus equi subsp. equi | EQUI0234 | Firmicutes | CVYO01000041.1 | 2 | CRS93257.1 | 13717 |
| 192 | GCA_001175485.1 | 148942 | 1336 | Streptococcus equi subsp. equi | EQUI0226 | Firmicutes | CVYP01000057.1 | 2 | CRT34694.1 | 13719 |
| 193 | GCA_001178205.1 | 148942 | 1336 | Streptococcus equi subsp. equi | EQUI0237 | Firmicutes | CVYQ01000063.1 | 2 | CRT26926.1 | 13721 |
| 194 | GCA_001178065.1 | 148942 | 1336 | Streptococcus equi subsp. equi | EQUI0236 | Firmicutes | CVYR01000064.1 | 2 | CRT43878.1 | 13723 |
| 195 | GCA_001177345.1 | 148942 | 1336 | Streptococcus equi subsp. equi | EQUI0232 | Firmicutes | CVYS01000043.1 | 2 | CRT34280.1 | 13725 |
| 196 | GCA_001177405.1 | 148942 | 1336 | Streptococcus equi subsp. equi | EQUI0233 | Firmicutes | CVYT01000065.1 | 2 | CRT48070.1 | 13727 |
| 197 | GCA_001176725.1 | 148942 | 1336 | Streptococcus equi subsp. equi | EQUI0230 | Firmicutes | CVYU01000041.1 | 2 | CRT42031.1 | 13729 |
| 198 | GCA_001175145.1 | 148942 | 1336 | Streptococcus equi subsp. equi | EQUI0239 | Firmicutes | CVYV01000040.1 | 2 | CRT45621.1 | 13731 |
| 199 | GCA_001176105.1 | 148942 | 1336 | Streptococcus equi subsp. equi | EQUI0060 | Firmicutes | CVYW01000044.1 | 2 | CRT37702.1 | 13733 |
| 200 | GCA_001177885.1 | 148942 | 1336 | Streptococcus equi subsp. equi | EQUI0235 | Firmicutes | CVYX01000041.1 | 2 | CRT44937.1 | 13735 |
| 201 | GCA_001176125.1 | 148942 | 1336 | Streptococcus equi subsp. equi | EQUI0228 | Firmicutes | CVYY01000066.1 | 2 | CRT51318.1 | 13737 |
| 202 | GCA_001175185.1 | 148942 | 1336 | Streptococcus equi subsp. equi | EQUI0059 | Firmicutes | CVYZ01000043.1 | 2 | CRT46051.1 | 13739 |
| 203 | GCA_001178845.1 | 148942 | 1336 | Streptococcus equi subsp. equi | EQUI0225 | Firmicutes | CVZA01000065.1 | 2 | CRT46015.1 | 13741 |
| 204 | GCA_001176025.1 | 148942 | 1336 | Streptococcus equi subsp. equi | EQUI0238 | Firmicutes | CVZB01000068.1 | 2 | CRT64519.1 | 13743 |
| 205 | GCA_001175885.1 | 148942 | 1336 | Streptococcus equi subsp. equi | EQUI0062 | Firmicutes | CVZC01000026.1 | 2 | CRT20938.1 | 13745 |
| 206 | GCA_001175665.1 | 148942 | 1336 | Streptococcus equi subsp. equi | EQUI0061 | Firmicutes | CVZD01000042.1 | 2 | CRT55748.1 | 13747 |
| 207 | GCA_001178425.1 | 148942 | 1336 | Streptococcus equi subsp. equi | EQUI0063 | Firmicutes | CVZE01000061.1 | 2 | CRT61683.1 | 13749 |
| 208 | GCA_001179245.1 | 148942 | 1336 | Streptococcus equi subsp. equi | HO51380626 | Firmicutes | CVZF01000040.1 | 2 | CRT39243.1 | 13751 |
| 209 | GCA_001175405.1 | 148942 | 1336 | Streptococcus equi subsp. equi | EQUI0240 | Firmicutes | CVZG01000039.1 | 2 | CRT66749.1 | 13753 |
| 210 | GCA_001176385.1 | 148942 | 1336 | Streptococcus equi subsp. equi | EQUI0229 | Firmicutes | CVZH01000065.1 | 2 | CRT72248.1 | 13755 |
| 211 | GCA_001178805.1 | 148942 | 1336 | Streptococcus equi subsp. equi | EQUI0064 | Firmicutes | CVZI01000059.1 | 2 | CRT58939.1 | 13757 |
| 212 | GCA_001179125.1 | 148942 | 1336 | Streptococcus equi subsp. equi | EQUI0065 | Firmicutes | CVZJ01000061.1 | 2 | CRT49564.1 | 13759 |
| 213 | GCA_001175225.1 | 148942 | 1336 | Streptococcus equi subsp. equi | EQUI0227 | Firmicutes | CVZK01000068.1 | 2 | CRT72921.1 | 13761 |
| 214 | GCA_001176925.1 | 148942 | 1336 | Streptococcus equi subsp. equi | EQUI0231 | Firmicutes | CVZL01000044.1 | 2 | CRT74944.1 | 13763 |
| 215 | GCA_001179345.1 | 148942 | 1336 | Streptococcus equi subsp. equi | EQUI0067 | Firmicutes | CVZM01000061.1 | 2 | CRT61440.1 | 13765 |
| 216 | GCA_001176525.1 | 148942 | 1336 | Streptococcus equi subsp. equi | EQUI0068 | Firmicutes | CVZN01000058.1 | 2 | CRT76644.1 | 13767 |
| 217 | GCA_001178305.1 | 148942 | 1336 | Streptococcus equi subsp. equi | EQUI0071 | Firmicutes | CVZO01000056.1 | 2 | CRT71332.1 | 13769 |
| 218 | GCA_001176765.1 | 148942 | 1336 | Streptococcus equi subsp. equi | EQUI0069 | Firmicutes | CVZP01000060.1 | 2 | CRT68258.1 | 13771 |
| 219 | GCA_001178085.1 | 148942 | 1336 | Streptococcus equi subsp. equi | EQUI0070 | Firmicutes | CVZQ01000059.1 | 2 | CRT74820.1 | 13773 |
| 220 | GCA_001177605.1 | 148942 | 1336 | Streptococcus equi subsp. equi | EQUI0072 | Firmicutes | CVZR01000059.1 | 2 | CRT73973.1 | 13775 |
| 221 | GCA_001179065.1 | 148942 | 1336 | Streptococcus equi subsp. equi | EQUI0075 | Firmicutes | CVZS01000059.1 | 2 | CRT75021.1 | 13777 |
| 222 | GCA_001179405.1 | 148942 | 1336 | Streptococcus equi subsp. equi | EQUI0076 | Firmicutes | CVZT01000062.1 | 2 | CRT66743.1 | 13779 |
| 223 | GCA_001177545.1 | 148942 | 1336 | Streptococcus equi subsp. equi | EQUI0053 | Firmicutes | CVZU01000044.1 | 2 | CRT70587.1 | 13781 |
| 224 | GCA_001177965.1 | 148942 | 1336 | Streptococcus equi subsp. equi | EQUI0052 | Firmicutes | CVZV01000039.1 | 2 | CRT64134.1 | 13783 |
| 225 | GCA_001177065.1 | 148942 | 1336 | Streptococcus equi subsp. equi | EQUI0058 | Firmicutes | CVZW01000041.1 | 2 | CRT58016.1 | 13785 |
| 226 | GCA_001178565.1 | 148942 | 1336 | Streptococcus equi subsp. equi | EQUI0077 | Firmicutes | CVZX01000060.1 | 2 | CRT66308.1 | 13787 |
| 227 | GCA_001177485.1 | 148942 | 1336 | Streptococcus equi subsp. equi | EQUI0074 | Firmicutes | CVZY01000060.1 | 2 | CRT75771.1 | 13789 |
| 228 | GCA_001177865.1 | 148942 | 1336 | Streptococcus equi subsp. equi | EQUI0054 | Firmicutes | CWAA01000064.1 | 2 | CRT69364.1 | 13791 |
| 229 | GCA_001176905.1 | 148942 | 1336 | Streptococcus equi subsp. equi | EQUI0055 | Firmicutes | CWAB01000063.1 | 2 | CRT79535.1 | 13793 |
| 230 | GCA_001178105.1 | 148942 | 1336 | Streptococcus equi subsp. equi | EQUI0050 | Firmicutes | CWAC01000043.1 | 2 | CRT65384.1 | 13795 |
| 231 | GCA_001175245.1 | 148942 | 1336 | Streptococcus equi subsp. equi | EQUI0078 | Firmicutes | CWAD01000060.1 | 2 | CRT80463.1 | 13797 |
| 232 | GCA_001175925.1 | 148942 | 1336 | Streptococcus equi subsp. equi | EQUI0080 | Firmicutes | CWAE01000060.1 | 2 | CRT86531.1 | 13799 |
| 233 | GCA_001176325.1 | 148942 | 1336 | Streptococcus equi subsp. equi | EQUI0082 | Firmicutes | CWAF01000061.1 | 2 | CRT83007.1 | 13801 |
| 234 | GCA_001175985.1 | 148942 | 1336 | Streptococcus equi subsp. equi | EQUI0081 | Firmicutes | CWAG01000061.1 | 2 | CRT86803.1 | 13803 |
| 235 | GCA_001176605.1 | 148942 | 1336 | Streptococcus equi subsp. equi | EQUI0083 | Firmicutes | CWAH01000060.1 | 2 | CRT85044.1 | 13805 |
| 236 | GCA_001177025.1 | 148942 | 1336 | Streptococcus equi subsp. equi | EQUI0085 | Firmicutes | CWAI01000060.1 | 2 | CRT84205.1 | 13807 |
| 237 | GCA_001177285.1 | 148942 | 1336 | Streptococcus equi subsp. equi | EQUI0086 | Firmicutes | CWAJ01000043.1 | 2 | CRT81920.1 | 13809 |
| 238 | GCA_001176785.1 | 148942 | 1336 | Streptococcus equi subsp. equi | EQUI0084 | Firmicutes | CWAK01000064.1 | 2 | CRT86927.1 | 13811 |
| 239 | GCA_001177625.1 | 148942 | 1336 | Streptococcus equi subsp. equi | EQUI0087 | Firmicutes | CWAL01000044.1 | 2 | CRT82847.1 | 13813 |
| 240 | GCA_001175285.1 | 148942 | 1336 | Streptococcus equi subsp. equi | EQUI0088 | Firmicutes | CWAM01000044.1 | 2 | CRT86345.1 | 13815 |
| 241 | GCA_001175545.1 | 148942 | 1336 | Streptococcus equi subsp. equi | EQUI0079 | Firmicutes | CWAN01000059.1 | 2 | CRT89319.1 | 13817 |
| 242 | GCA_001175525.1 | 148942 | 1336 | Streptococcus equi subsp. equi | EQUI0089 | Firmicutes | CWAO01000054.1 | 2 | CRT87540.1 | 13819 |
| 243 | GCA_001175805.1 | 148942 | 1336 | Streptococcus equi subsp. equi | EQUI0090 | Firmicutes | CWAP01000063.1 | 2 | CRT90533.1 | 13821 |
| 244 | GCA_001176065.1 | 148942 | 1336 | Streptococcus equi subsp. equi | EQUI0092 | Firmicutes | CWAQ01000063.1 | 2 | CRT91761.1 | 13823 |
| 245 | GCA_001175625.1 | 148942 | 1336 | Streptococcus equi subsp. equi | EQUI0091 | Firmicutes | CWAR01000063.1 | 2 | CRU00009.1 | 13825 |
| 246 | GCA_001176265.1 | 148942 | 1336 | Streptococcus equi subsp. equi | EQUI0094 | Firmicutes | CWAS01000062.1 | 2 | CRT98477.1 | 13827 |
| 247 | GCA_001176945.1 | 148942 | 1336 | Streptococcus equi subsp. equi | EQUI0095 | Firmicutes | CWAT01000059.1 | 2 | CRT99301.1 | 13829 |
| 248 | GCA_001177265.1 | 148942 | 1336 | Streptococcus equi subsp. equi | EQUI0096 | Firmicutes | CWAU01000061.1 | 2 | CRT99600.1 | 13831 |
| 249 | GCA_001177225.1 | 148942 | 1336 | Streptococcus equi subsp. equi | EQUI0097 | Firmicutes | CWAV01000039.1 | 2 | CRU04445.1 | 13833 |
| 250 | GCA_001178005.1 | 148942 | 1336 | Streptococcus equi subsp. equi | EQUI0099 | Firmicutes | CWAW01000041.1 | 2 | CRU03267.1 | 13835 |
| 251 | GCA_001178145.1 | 148942 | 1336 | Streptococcus equi subsp. equi | EQUI0098 | Firmicutes | CWAX01000042.1 | 2 | CRU09874.1 | 13837 |
| 252 | GCA_001178785.1 | 148942 | 1336 | Streptococcus equi subsp. equi | EQUI0100 | Firmicutes | CWAY01000043.1 | 2 | CRU07135.1 | 13839 |
| 253 | GCA_001179105.1 | 148942 | 1336 | Streptococcus equi subsp. equi | EQUI0105 | Firmicutes | CWAZ01000043.1 | 2 | CRU20234.1 | 13841 |
| 254 | GCA_001178385.1 | 148942 | 1336 | Streptococcus equi subsp. equi | EQUI0106 | Firmicutes | CWBA01000062.1 | 2 | CRU18218.1 | 13843 |
| 255 | GCA_001178365.1 | 148942 | 1336 | Streptococcus equi subsp. equi | EQUI0103 | Firmicutes | CWBB01000068.1 | 2 | CRU22358.1 | 13845 |
| 256 | GCA_001179205.1 | 148942 | 1336 | Streptococcus equi subsp. equi | EQUI0107 | Firmicutes | CWBC01000062.1 | 2 | CRU18024.1 | 13847 |
| 257 | GCA_001177725.1 | 148942 | 1336 | Streptococcus equi subsp. equi | EQUI0108 | Firmicutes | CWBD01000063.1 | 2 | CRU21807.1 | 13849 |
| 258 | GCA_001177805.1 | 148942 | 1336 | Streptococcus equi subsp. equi | EQUI0109 | Firmicutes | CWBE01000063.1 | 2 | CRU20295.1 | 13851 |
| 259 | GCA_001177985.1 | 148942 | 1336 | Streptococcus equi subsp. equi | EQUI0110 | Firmicutes | CWBF01000047.1 | 2 | CRU20891.1 | 13853 |
| 260 | GCA_001176645.1 | 148942 | 1336 | Streptococcus equi subsp. equi | EQUI0114 | Firmicutes | CWBG01000041.1 | 2 | CRU31596.1 | 13855 |
| 261 | GCA_001176425.1 | 148942 | 1336 | Streptococcus equi subsp. equi | EQUI0112 | Firmicutes | CWBH01000044.1 | 2 | CRU58975.1 | 13857 |
| 262 | GCA_001176365.1 | 148942 | 1336 | Streptococcus equi subsp. equi | EQUI0113 | Firmicutes | CWBI01000040.1 | 2 | CRU85987.1 | 13859 |
| 263 | GCA_001178185.1 | 148942 | 1336 | Streptococcus equi subsp. equi | EQUI0111 | Firmicutes | CWBJ01000064.1 | 2 | CRU70022.1 | 13861 |
| 264 | GCA_900004825.1 | 148942 | 1336 | Streptococcus equi subsp. equi | EQUI0117 | Firmicutes | CWBK01000065.1 | 2 | CRU80198.1 | 13863 |
| 265 | GCA_001175085.1 | 148942 | 1336 | Streptococcus equi subsp. equi | EQUI0119 | Firmicutes | CWBL01000061.1 | 2 | CRU71456.1 | 13865 |
| 266 | GCA_001176845.1 | 148942 | 1336 | Streptococcus equi subsp. equi | EQUI0115 | Firmicutes | CWBM01000065.1 | 2 | CRU70674.1 | 13867 |
| 267 | GCA_001175425.1 | 148942 | 1336 | Streptococcus equi subsp. equi | EQUI0118 | Firmicutes | CWBN01000062.1 | 2 | CRU61491.1 | 13869 |
| 268 | GCA_001175505.1 | 148942 | 1336 | Streptococcus equi subsp. equi | EQUI0128 | Firmicutes | CWBO01000044.1 | 2 | CRU48069.1 | 13871 |
| 269 | GCA_001178225.1 | 148942 | 1336 | Streptococcus equi subsp. equi | EQUI0126 | Firmicutes | CWBP01000061.1 | 2 | CRU68120.1 | 13873 |
| 270 | GCA_001175325.1 | 148942 | 1336 | Streptococcus equi subsp. equi | EQUI0129 | Firmicutes | CWBQ01000061.1 | 2 | CRU71296.1 | 13875 |
| 271 | GCA_001179025.1 | 148942 | 1336 | Streptococcus equi subsp. equi | EQUI0120 | Firmicutes | CWBR01000065.1 | 2 | CRU93798.1 | 13877 |
| 272 | GCA_001176145.1 | 148942 | 1336 | Streptococcus equi subsp. equi | EQUI0130 | Firmicutes | CWBS01000043.1 | 2 | CRU91202.1 | 13879 |
| 273 | GCA_001177505.1 | 148942 | 1336 | Streptococcus equi subsp. equi | EQUI0127 | Firmicutes | CWBT01000042.1 | 2 | CRU91151.1 | 13881 |
| 274 | GCA_001178045.1 | 148942 | 1336 | Streptococcus equi subsp. equi | EQUI0125 | Firmicutes | CWBU01000045.1 | 2 | CRU94321.1 | 13883 |
| 275 | GCA_001178825.1 | 148942 | 1336 | Streptococcus equi subsp. equi | EQUI0123 | Firmicutes | CWBV01000042.1 | 2 | CRU82344.1 | 13885 |
| 276 | GCA_001178465.1 | 148942 | 1336 | Streptococcus equi subsp. equi | EQUI0122 | Firmicutes | CWBW01000043.1 | 2 | CRU80816.1 | 13887 |
| 277 | GCA_001175725.1 | 148942 | 1336 | Streptococcus equi subsp. equi | EQUI0131 | Firmicutes | CWBX01000064.1 | 2 | CRU91403.1 | 13889 |
| 278 | GCA_001179225.1 | 148942 | 1336 | Streptococcus equi subsp. equi | EQUI0121 | Firmicutes | CWBY01000040.1 | 2 | CRU86635.1 | 13891 |
| 279 | GCA_001177145.1 | 148942 | 1336 | Streptococcus equi subsp. equi | EQUI0134 | Firmicutes | CWBZ01000059.1 | 2 | CRU82566.1 | 13893 |
| 280 | GCA_001177045.1 | 148942 | 1336 | Streptococcus equi subsp. equi | EQUI0136 | Firmicutes | CWCA01000061.1 | 2 | CRU96729.1 | 13895 |
| 281 | GCA_001177465.1 | 148942 | 1336 | Streptococcus equi subsp. equi | EQUI0139 | Firmicutes | CWCB01000061.1 | 2 | CRU83052.1 | 13897 |
| 282 | GCA_001179305.1 | 148942 | 1336 | Streptococcus equi subsp. equi | EQUI0140 | Firmicutes | CWCC01000060.1 | 2 | CRU80987.1 | 13899 |
| 283 | GCA_001178965.1 | 148942 | 1336 | Streptococcus equi subsp. equi | EQUI0141 | Firmicutes | CWCD01000060.1 | 2 | CRU78242.1 | 13901 |
| 284 | GCA_001176665.1 | 148942 | 1336 | Streptococcus equi subsp. equi | EQUI0132 | Firmicutes | CWCE01000060.1 | 2 | CRV00464.1 | 13903 |
| 285 | GCA_001178865.1 | 148942 | 1336 | Streptococcus equi subsp. equi | EQUI0124 | Firmicutes | CWCF01000043.1 | 2 | CRV01108.1 | 13905 |
| 286 | GCA_001177425.1 | 148942 | 1336 | Streptococcus equi subsp. equi | EQUI0137 | Firmicutes | CWCG01000042.1 | 2 | CRU80203.1 | 13907 |
| 287 | GCA_001178945.1 | 148942 | 1336 | Streptococcus equi subsp. equi | EQUI0142 | Firmicutes | CWCH01000042.1 | 2 | CRU93107.1 | 13909 |
| 288 | GCA_001177305.1 | 148942 | 1336 | Streptococcus equi subsp. equi | EQUI0135 | Firmicutes | CWCI01000040.1 | 2 | CRU95695.1 | 13911 |
| 289 | GCA_001178605.1 | 148942 | 1336 | Streptococcus equi subsp. equi | EQUI0143 | Firmicutes | CWCJ01000060.1 | 2 | CRU99763.1 | 13913 |
| 290 | GCA_001177685.1 | 148942 | 1336 | Streptococcus equi subsp. equi | EQUI0138 | Firmicutes | CWCK01000040.1 | 2 | CRV05021.1 | 13915 |
| 291 | GCA_001177125.1 | 148942 | 1336 | Streptococcus equi subsp. equi | EQUI0155 | Firmicutes | CWCL01000043.1 | 2 | CRU97029.1 | 13917 |
| 292 | GCA_001175205.1 | 148942 | 1336 | Streptococcus equi subsp. equi | EQUI0156 | Firmicutes | CWCM01000063.1 | 2 | CRV01704.1 | 13919 |
| 293 | GCA_001175265.1 | 148942 | 1336 | Streptococcus equi subsp. equi | EQUI0157 | Firmicutes | CWCN01000060.1 | 2 | CRV11871.1 | 13921 |
| 294 | GCA_001175605.1 | 148942 | 1336 | Streptococcus equi subsp. equi | EQUI0158 | Firmicutes | CWCO01000063.1 | 2 | CRV20248.1 | 13923 |
| 295 | GCA_001178525.1 | 148942 | 1336 | Streptococcus equi subsp. equi | EQUI0160 | Firmicutes | CWCP01000061.1 | 2 | CRV16484.1 | 13925 |
| 296 | GCA_001176005.1 | 148942 | 1336 | Streptococcus equi subsp. equi | EQUI0145 | Firmicutes | CWCQ01000042.1 | 2 | CRV16534.1 | 13927 |
| 297 | GCA_001178885.1 | 148942 | 1336 | Streptococcus equi subsp. equi | EQUI0159 | Firmicutes | CWCR01000064.1 | 2 | CRV08843.1 | 13925 |
| 298 | GCA_001176345.1 | 148942 | 1336 | Streptococcus equi subsp. equi | EQUI0133 | Firmicutes | CWCS01000043.1 | 2 | CRV21833.1 | 13931 |
| 299 | GCA_001178505.1 | 148942 | 1336 | Streptococcus equi subsp. equi | EQUI0161 | Firmicutes | CWCT01000071.1 | 2 | CRV22383.1 | 13933 |
| 300 | GCA_001177905.1 | 148942 | 1336 | Streptococcus equi subsp. equi | EQUI0164 | Firmicutes | CWCU01000062.1 | 2 | CRV15611.1 | 13935 |
| 301 | GCA_001179005.1 | 148942 | 1336 | Streptococcus equi subsp. equi | EQUI0163 | Firmicutes | CWCV01000063.1 | 2 | CRV21784.1 | 13937 |
| 302 | GCA_001179285.1 | 148942 | 1336 | Streptococcus equi subsp. equi | EQUI0162 | Firmicutes | CWCW01000068.1 | 2 | CRV18917.1 | 13935 |
| 303 | GCA_001175785.1 | 148942 | 1336 | Streptococcus equi subsp. equi | EQUI0146 | Firmicutes | CWCX01000062.1 | 2 | CRV22810.1 | 13941 |
| 304 | GCA_001178325.1 | 148942 | 1336 | Streptococcus equi subsp. equi | EQUI0166 | Firmicutes | CWCY01000063.1 | 2 | CRV26120.1 | 13943 |
| 305 | GCA_001177565.1 | 148942 | 1336 | Streptococcus equi subsp. equi | EQUI0165 | Firmicutes | CWCZ01000062.1 | 2 | CRV22947.1 | 13945 |
| 306 | GCA_001178125.1 | 148942 | 1336 | Streptococcus equi subsp. equi | EQUI0167 | Firmicutes | CWDA01000061.1 | 2 | CRV22945.1 | 13947 |
| 307 | GCA_001177005.1 | 148942 | 1336 | Streptococcus equi subsp. equi | EQUI0168 | Firmicutes | CWDB01000062.1 | 2 | CRV23365.1 | 13945 |
| 308 | GCA_001176625.1 | 148942 | 1336 | Streptococcus equi subsp. equi | EQUI0169 | Firmicutes | CWDC01000065.1 | 2 | CRV25535.1 | 13951 |
| 309 | GCA_001175565.1 | 148942 | 1336 | Streptococcus equi subsp. equi | EQUI0147 | Firmicutes | CWDD01000044.1 | 2 | CRV23988.1 | 13953 |
| 310 | GCA_001177185.1 | 148942 | 1336 | Streptococcus equi subsp. equi | EQUI0148 | Firmicutes | CWDE01000094.1 | 2 | CRV35426.1 | 13955 |
| 311 | GCA_001176305.1 | 148942 | 1336 | Streptococcus equi subsp. equi | EQUI0149 | Firmicutes | CWDF01000064.1 | 2 | CRV28496.1 | 13957 |
| 312 | GCA_001176545.1 | 148942 | 1336 | Streptococcus equi subsp. equi | EQUI0150 | Firmicutes | CWDG01000061.1 | 2 | CRV30744.1 | 13955 |
| 313 | GCA_001176445.1 | 148942 | 1336 | Streptococcus equi subsp. equi | EQUI0152 | Firmicutes | CWDH01000059.1 | 2 | CRV37963.1 | 13961 |
| 314 | GCA_001176805.1 | 148942 | 1336 | Streptococcus equi subsp. equi | EQUI0151 | Firmicutes | CWDI01000059.1 | 2 | CRV37002.1 | 13963 |
| 315 | GCA_001176865.1 | 148942 | 1336 | Streptococcus equi subsp. equi | EQUI0154 | Firmicutes | CWDJ01000042.1 | 2 | CRV38823.1 | 13965 |
| 316 | GCA_001176685.1 | 148942 | 1336 | Streptococcus equi subsp. equi | EQUI0153 | Firmicutes | CWDK01000064.1 | 2 | CRV39782.1 | 13967 |
| 317 | GCA_001176245.1 | 148942 | 1336 | Streptococcus equi subsp. equi | EQUI0170 | Firmicutes | CWDL01000040.1 | 2 | CRV45924.1 | 13965 |
| 318 | GCA_001175945.1 | 148942 | 1336 | Streptococcus equi subsp. equi | EQUI0171 | Firmicutes | CWDM01000043.1 | 2 | CRV48900.1 | 13971 |
| 319 | GCA_001176225.1 | 148942 | 1336 | Streptococcus equi subsp. equi | EQUI0172 | Firmicutes | CWDN01000043.1 | 2 | CRV53138.1 | 13973 |
| 320 | GCA_001175465.1 | 148942 | 1336 | Streptococcus equi subsp. equi | EQUI0174 | Firmicutes | CWDO01000043.1 | 2 | CRV61840.1 | 13975 |
| 321 | GCA_001175825.1 | 148942 | 1336 | Streptococcus equi subsp. equi | EQUI0173 | Firmicutes | CWDP01000041.1 | 2 | CRV60058.1 | 13977 |
| 322 | GCA_001175125.1 | 148942 | 1336 | Streptococcus equi subsp. equi | EQUI0175 | Firmicutes | CWDQ01000043.1 | 2 | CRV55434.1 | 13975 |
| 323 | GCA_001178265.1 | 148942 | 1336 | Streptococcus equi subsp. equi | EQUI0178 | Firmicutes | CWDR01000044.1 | 2 | CRV60803.1 | 13981 |
| 324 | GCA_001178665.1 | 148942 | 1336 | Streptococcus equi subsp. equi | EQUI0179 | Firmicutes | CWDS01000044.1 | 2 | CRW03962.1 | 13983 |
| 325 | GCA_001179365.1 | 148942 | 1336 | Streptococcus equi subsp. equi | EQUI0176 | Firmicutes | CWDT01000009.1 | 2 | CRV54211.1 | 13985 |
| 326 | GCA_001179165.1 | 148942 | 1336 | Streptococcus equi subsp. equi | EQUI0177 | Firmicutes | CWDU01000042.1 | 2 | CRV83270.1 | 13987 |
| 327 | GCA_001179385.1 | 148942 | 1336 | Streptococcus equi subsp. equi | EQUI0183 | Firmicutes | CWDV01000041.1 | 2 | CRV91455.1 | 13985 |
| 328 | GCA_001175445.1 | 148942 | 1336 | Streptococcus equi subsp. equi | EQUI0184 | Firmicutes | CWDW01000042.1 | 2 | CRV92191.1 | 13991 |
| 329 | GCA_001177165.1 | 148942 | 1336 | Streptococcus equi subsp. equi | EQUI0195 | Firmicutes | CWDX01000062.1 | 2 | CRV87136.1 | 13993 |
| 330 | GCA_001177325.1 | 148942 | 1336 | Streptococcus equi subsp. equi | EQUI0196 | Firmicutes | CWDY01000065.1 | 2 | CRV84626.1 | 13995 |
| 331 | GCA_001178985.1 | 148942 | 1336 | Streptococcus equi subsp. equi | EQUI0181 | Firmicutes | CWDZ01000042.1 | 2 | CRW02988.1 | 13997 |
| 332 | GCA_001178725.1 | 148942 | 1336 | Streptococcus equi subsp. equi | EQUI0180 | Firmicutes | CWEA01000042.1 | 2 | CRV97209.1 | 13995 |
| 333 | GCA_001177765.1 | 148942 | 1336 | Streptococcus equi subsp. equi | EQUI0192 | Firmicutes | CWEB01000061.1 | 2 | CRW00524.1 | 14001 |
| 334 | GCA_001179265.1 | 148942 | 1336 | Streptococcus equi subsp. equi | EQUI0182 | Firmicutes | CWEC01000045.1 | 2 | CRW01316.1 | 14003 |
| 335 | GCA_001178285.1 | 148942 | 1336 | Streptococcus equi subsp. equi | EQUI0191 | Firmicutes | CWED01000041.1 | 2 | CRV92086.1 | 14005 |
| 336 | GCA_001177705.1 | 148942 | 1336 | Streptococcus equi subsp. equi | EQUI0194 | Firmicutes | CWEE01000065.1 | 2 | CRV95671.1 | 14007 |
| 337 | GCA_001176085.1 | 148942 | 1336 | Streptococcus equi subsp. equi | EQUI0199 | Firmicutes | CWEF01000062.1 | 2 | CRV97947.1 | 14005 |
| 338 | GCA_001175045.1 | 148942 | 1336 | Streptococcus equi subsp. equi | EQUI0185 | Firmicutes | CWEG01000008.1 | 2 | CRV78527.1 | 14011 |
| 339 | GCA_001178645.1 | 148942 | 1336 | Streptococcus equi subsp. equi | EQUI0188 | Firmicutes | CWEH01000043.1 | 2 | CRW03687.1 | 14013 |
| 340 | GCA_001175025.1 | 148942 | 1336 | Streptococcus equi subsp. equi | EQUI0198 | Firmicutes | CWEI01000062.1 | 2 | CRV92165.1 | 14015 |
| 341 | GCA_001176465.1 | 148942 | 1336 | Streptococcus equi subsp. equi | EQUI0197 | Firmicutes | CWEJ01000060.1 | 2 | CRV95850.1 | 14017 |
| 342 | GCA_001175685.1 | 148942 | 1336 | Streptococcus equi subsp. equi | EQUI0200 | Firmicutes | CWEK01000061.1 | 2 | CRV90197.1 | 14015 |
| 343 | GCA_001176205.1 | 148942 | 1336 | Streptococcus equi subsp. equi | EQUI0186 | Firmicutes | CWEL01000046.1 | 2 | CRW02430.1 | 14021 |
| 344 | GCA_001175905.1 | 148942 | 1336 | Streptococcus equi subsp. equi | EQUI0187 | Firmicutes | CWEM01000042.1 | 2 | CRW06361.1 | 14023 |
| 345 | GCA_001175745.1 | 148942 | 1336 | Streptococcus equi subsp. equi | EQUI0201 | Firmicutes | CWEN01000063.1 | 2 | CRW10290.1 | 14025 |
| 346 | GCA_001176565.1 | 148942 | 1336 | Streptococcus equi subsp. equi | EQUI0012 | Firmicutes | CWEP01000057.1 | 2 | CRV93329.1 | 14027 |
| 347 | GCA_001178445.1 | 148942 | 1336 | Streptococcus equi subsp. equi | EQUI0203 | Firmicutes | CWEQ01000063.1 | 2 | CRW10487.1 | 14029 |
| 348 | GCA_001178705.1 | 148942 | 1336 | Streptococcus equi subsp. equi | EQUI0202 | Firmicutes | CWES01000061.1 | 2 | CRW11899.1 | 14031 |
| 349 | GCA_001179465.1 | 148942 | 1336 | Streptococcus equi subsp. equi | EQUI0205 | Firmicutes | CWEV01000037.1 | 2 | CRW12157.1 | 14033 |
| 350 | GCA_001178245.1 | 148942 | 1336 | Streptococcus equi subsp. equi | EQUI0208 | Firmicutes | CWEW01000061.1 | 2 | CRW18036.1 | 14035 |
| 351 | GCA_001177925.1 | 148942 | 1336 | Streptococcus equi subsp. equi | EQUI0206 | Firmicutes | CWEX01000064.1 | 2 | CRW22900.1 | 14037 |
| 352 | GCA_001177745.1 | 148942 | 1336 | Streptococcus equi subsp. equi | EQUI0207 | Firmicutes | CWEY01000063.1 | 2 | CRW16828.1 | 14039 |
| 353 | GCA_001176185.1 | 148942 | 1336 | Streptococcus equi subsp. equi | EQUI0209 | Firmicutes | CWEZ01000060.1 | 2 | CRW17377.1 | 14041 |
| 354 | GCA_001175865.1 | 148942 | 1336 | Streptococcus equi subsp. equi | EQUI0211 | Firmicutes | CWFA01000062.1 | 2 | CRW41572.1 | 14043 |
| 355 | GCA_001175385.1 | 148942 | 1336 | Streptococcus equi subsp. equi | EQUI0212 | Firmicutes | CWFB01000064.1 | 2 | CRW33338.1 | 14045 |
| 356 | GCA_001175165.1 | 148942 | 1336 | Streptococcus equi subsp. equi | EQUI0213 | Firmicutes | CWFC01000062.1 | 2 | CRW28598.1 | 14047 |
| 357 | GCA_001176745.1 | 148942 | 1336 | Streptococcus equi subsp. equi | EQUI0216 | Firmicutes | CWFD01000040.1 | 2 | CRW38404.1 | 14049 |
| 358 | GCA_001176405.1 | 148942 | 1336 | Streptococcus equi subsp. equi | EQUI0217 | Firmicutes | CWFE01000062.1 | 2 | CRW56664.1 | 14051 |
| 359 | GCA_001177085.1 | 148942 | 1336 | Streptococcus equi subsp. equi | EQUI0214 | Firmicutes | CWFF01000066.1 | 2 | CRW57488.1 | 14053 |
| 360 | GCA_001177525.1 | 148942 | 1336 | Streptococcus equi subsp. equi | EQUI0002 | Firmicutes | CWFG01000057.1 | 2 | CRW51150.1 | 14055 |
| 361 | GCA_001176985.1 | 148942 | 1336 | Streptococcus equi subsp. equi | EQUI0215 | Firmicutes | CWFI01000066.1 | 2 | CRW56037.1 | 14057 |
| 362 | GCA_001177365.1 | 148942 | 1336 | Streptococcus equi subsp. equi | EQUI0013 | Firmicutes | CWFJ01000060.1 | 2 | CRW51019.1 | 14059 |
| 363 | GCA_001177105.1 | 148942 | 1336 | Streptococcus equi subsp. equi | EQUI0014 | Firmicutes | CWFK01000062.1 | 2 | CRW62422.1 | 14061 |
| 364 | GCA_001176885.1 | 148942 | 1336 | Streptococcus equi subsp. equi | EQUI0015 | Firmicutes | CWFL01000059.1 | 2 | CRW52635.1 | 14063 |
| 365 | GCA_001177585.1 | 148942 | 1336 | Streptococcus equi subsp. equi | EQUI0016 | Firmicutes | CWFM01000059.1 | 2 | CRW57925.1 | 14065 |
| 366 | GCA_001177825.1 | 148942 | 1336 | Streptococcus equi subsp. equi | EQUI0017 | Firmicutes | CWFN01000059.1 | 2 | CRW58490.1 | 14067 |
| 367 | GCA_001177645.1 | 148942 | 1336 | Streptococcus equi subsp. equi | EQUI0018 | Firmicutes | CWFO01000060.1 | 2 | CRW59062.1 | 14069 |
| 368 | GCA_001179325.1 | 148942 | 1336 | Streptococcus equi subsp. equi | EQUI0019 | Firmicutes | CWFS01000065.1 | 2 | CRW78794.1 | 14071 |
| 369 | GCA_001179145.1 | 148942 | 1336 | Streptococcus equi subsp. equi | EQUI0020 | Firmicutes | CWFT01000065.1 | 2 | CRW72044.1 | 14073 |
| 370 | GCA_001178745.1 | 148942 | 1336 | Streptococcus equi subsp. equi | EQUI0021 | Firmicutes | CWFU01000062.1 | 2 | CRW79959.1 | 14075 |
| 371 | GCA_001178405.1 | 148942 | 1336 | Streptococcus equi subsp. equi | EQUI0022 | Firmicutes | CWFV01000063.1 | 2 | CRW76315.1 | 14077 |
| 372 | GCA_001176165.1 | 148942 | 1336 | Streptococcus equi subsp. equi | EQUI0023 | Firmicutes | CWFW01000065.1 | 2 | CRW80108.1 | 14079 |
| 373 | GCA_001175765.1 | 148942 | 1336 | Streptococcus equi subsp. equi | EQUI0024 | Firmicutes | CWFX01000059.1 | 2 | CRW66993.1 | 14081 |
| 374 | GCA_001175705.1 | 148942 | 1336 | Streptococcus equi subsp. equi | EQUI0025 | Firmicutes | CWFY01000062.1 | 2 | CRW70529.1 | 14083 |
| 375 | GCA_001175345.1 | 148942 | 1336 | Streptococcus equi subsp. equi | EQUI0026 | Firmicutes | CWFZ01000062.1 | 2 | CRW76738.1 | 14085 |
| 376 | GCA_001175065.1 | 148942 | 1336 | Streptococcus equi subsp. equi | EQUI0027 | Firmicutes | CWGA01000061.1 | 2 | CRW76864.1 | 14087 |
| 377 | GCA_001176485.1 | 148942 | 1336 | Streptococcus equi subsp. equi | EQUI0028 | Firmicutes | CWGB01000067.1 | 2 | CRW80973.1 | 14089 |
| 378 | GCA_001176285.1 | 148942 | 1336 | Streptococcus equi subsp. equi | EQUI0029 | Firmicutes | CWGC01000064.1 | 2 | CRW81695.1 | 14091 |
| 379 | GCA_001176585.1 | 148942 | 1336 | Streptococcus equi subsp. equi | EQUI0030 | Firmicutes | CWGD01000063.1 | 2 | CRW77653.1 | 14093 |
| 380 | GCA_001177945.1 | 148942 | 1336 | Streptococcus equi subsp. equi | EQUI0031 | Firmicutes | CWGE01000064.1 | 2 | CRW79780.1 | 14095 |
| 381 | GCA_001177445.1 | 148942 | 1336 | Streptococcus equi subsp. equi | EQUI0032 | Firmicutes | CWGF01000063.1 | 2 | CRW80948.1 | 14097 |
| 382 | GCA_001285185.1 | 562 | 562 | Escherichia coli | 102485_aEPEC | Proteobacteria | CYBC01000016.1 | 2 | CTT29869.1 | 14099 |
| 383 | GCA_001286125.1 | 562 | 562 | Escherichia coli | 302710 | Proteobacteria | CYFG01000018.1 | 2 | CTZ05351.1 | 14101 |
| 384 | GCA_001286985.1 | 1408 | 1408 | Bacillus pumilus | | Firmicutes | CYHK01000004.1 | 2 | CUB16899.1 | 14103 |
| 385 | GCA_001299055.1 | 1806504 | 1806504 | Achromobacter sp. 2789STDY5608606 | 2789STDY5608606 | Proteobacteria | CYTI01000001.1 | 5 | CUI41065.1 | 14105 |
| 386 | GCA_001298995.1 | 1806492 | 1806492 | Achromobacter sp. 2789STDY5608615 | 2789STDY5608615 | Proteobacteria | CYTY01000055.1 | 3 | CUK22707.1 | 14110 |
| 387 | GCA_001564615.1 | 1639 | 1639 | Listeria monocytogenes | LM06-00444 | Firmicutes | CYUX01000002.1 | 2 | CUK50734.1 | 14113 |
| 388 | GCA_001564675.1 | 1639 | 1639 | Listeria monocytogenes | LM06-00918 | Firmicutes | CYVA01000003.1 | 2 | CUK61280.1 | 14115 |
| 389 | GCA_001564895.1 | 1639 | 1639 | Listeria monocytogenes | LM07-01042 | Firmicutes | CYVK01000002.1 | 2 | CUK91820.1 | 14117 |
| 390 | GCA_000153885.1 | 411463 | 39496 | Eubacterium ventriosum ATCC 27560 | ATCC 27560 | Firmicutes | DS264285.1 | 4 | EDM51055.1 | 14119 |
| 391 | GCA_001537545.1 | 615 | 615 | Serratia marcescens | 2880STDY5682911 | Proteobacteria | FCFC01000005.1 | 2 | CUY08442.1 | 14123 |
| 392 | GCA_001538985.1 | 615 | 615 | Serratia marcescens | 2880STDY5683036 | Proteobacteria | FCFE01000005.1 | 2 | CUZ68635.1 | 14125 |
| 393 | GCA_001538605.1 | 615 | 615 | Serratia marcescens | 2880STDY5682822 | Proteobacteria | FCFF01000005.1 | 2 | CUZ82287.1 | 14127 |
| 394 | GCA_001537885.1 | 615 | 615 | Serratia marcescens | 2880STDY5682825 | Proteobacteria | FCFG01000007.1 | 2 | CUZ53146.1 | 14129 |
| 395 | GCA_001539305.1 | 615 | 615 | Serratia marcescens | 2880STDY5683007 | Proteobacteria | FCFH01000009.1 | 2 | CVA27382.1 | 14131 |
| 396 | GCA_001537405.1 | 615 | 615 | Serratia marcescens | 2880STDY5683035 | Proteobacteria | FCFI01000002.1 | 2 | CUZ41368.1 | 14133 |
| 397 | GCA_001540125.1 | 615 | 615 | Serratia marcescens | 2880STDY5683037 | Proteobacteria | FCFJ01000004.1 | 2 | CVA08047.1 | 14135 |
| 398 | GCA_001538905.1 | 615 | 615 | Serratia marcescens | 2880STDY5682814 | Proteobacteria | FCFK01000006.1 | 2 | CUZ42305.1 | 14137 |
| 399 | GCA_001537445.1 | 615 | 615 | Serratia marcescens | 2880STDY5683014 | Proteobacteria | FCFL01000006.1 | 2 | CVA28869.1 | 14139 |
| 400 | GCA_001539185.1 | 615 | 615 | Serratia marcescens | 2880STDY5683009 | Proteobacteria | FCFM01000003.1 | 2 | CUZ16125.1 | 14141 |
| 401 | GCA_001540805.1 | 615 | 615 | Serratia marcescens | 2880STDY5682837 | Proteobacteria | FCFN01000007.1 | 2 | CUZ60995.1 | 14143 |
| 402 | GCA_001538525.1 | 615 | 615 | Serratia marcescens | 2880STDY5682824 | Proteobacteria | FCFO01000009.1 | 2 | CUZ90935.1 | 14145 |
| 403 | GCA_001539805.1 | 615 | 615 | Serratia marcescens | 2880STDY5682834 | Proteobacteria | FCFP01000006.1 | 2 | CUZ73394.1 | 14147 |
| 404 | GCA_001538705.1 | 615 | 615 | Serratia marcescens | 2880STDY5683032 | Proteobacteria | FCFQ01000004.1 | 2 | CVA13553.1 | 14149 |
| 405 | GCA_001539125.1 | 615 | 615 | Serratia marcescens | 2880STDY5683011 | Proteobacteria | FCFR01000005.1 | 2 | CVA22943.1 | 14151 |
| 406 | GCA_001538465.1 | 615 | 615 | Serratia marcescens | 2880STDY5683010 | Proteobacteria | FCFS01000001.1 | 2 | CUY16546.1 | 14153 |
| 407 | GCA_001539505.1 | 615 | 615 | Serratia marcescens | 2880STDY5682831 | Proteobacteria | FCFT01000005.1 | 2 | CUZ58663.1 | 14155 |
| 408 | GCA_001538485.1 | 615 | 615 | Serratia marcescens | 2880STDY5683021 | Proteobacteria | FCFU01000011.1 | 2 | CUZ73629.1 | 14157 |
| 409 | GCA_001539785.1 | 615 | 615 | Serratia marcescens | 2880STDY5682827 | Proteobacteria | FCFV01000002.1 | 2 | CUZ84855.1 | 14159 |
| 410 | GCA_001537205.1 | 615 | 615 | Serratia marcescens | 2880STDY5682828 | Proteobacteria | FCFW01000002.1 | 2 | CUZ51222.1 | 14161 |
| 411 | GCA_001536485.1 | 615 | 615 | Serratia marcescens | 2880STDY5682815 | Proteobacteria | FCFX01000005.1 | 2 | CVA06032.1 | 14163 |
| 412 | GCA_001537765.1 | 615 | 615 | Serratia marcescens | 2880STDY5682820 | Proteobacteria | FCFY01000007.1 | 2 | CUZ66191.1 | 14165 |
| 413 | GCA_001537525.1 | 615 | 615 | Serratia marcescens | 2880STDY5682816 | Proteobacteria | FCFZ01000005.1 | 2 | CUZ96331.1 | 14167 |
| 414 | GCA_001540665.1 | 615 | 615 | Serratia marcescens | 2880STDY5683018 | Proteobacteria | FCGA01000006.1 | 2 | CUZ56035.1 | 14169 |
| 415 | GCA_001538625.1 | 615 | 615 | Serratia marcescens | 2880STDY5682836 | Proteobacteria | FCGB01000003.1 | 2 | CUZ47627.1 | 14171 |
| 416 | GCA_001537105.1 | 615 | 615 | Serratia marcescens | 2880STDY5683024 | Proteobacteria | FCGC01000005.1 | 2 | CUZ65513.1 | 14173 |
| 417 | GCA_001537145.1 | 615 | 615 | Serratia marcescens | 2880STDY5682819 | Proteobacteria | FCGD01000005.1 | 2 | CUZ64473.1 | 14175 |
| 418 | GCA_001539985.1 | 615 | 615 | Serratia marcescens | 2880STDY5683033 | Proteobacteria | FCGF01000007.1 | 2 | CUZ76085.1 | 14177 |
| 419 | GCA_001536605.1 | 615 | 615 | Serratia marcescens | 2880STDY5683026 | Proteobacteria | FCGG01000006.1 | 2 | CVA13444.1 | 14179 |
| 420 | GCA_001537845.1 | 615 | 615 | Serratia marcescens | 2880STDY5682823 | Proteobacteria | FCGH01000006.1 | 2 | CVA27078.1 | 14181 |
| 421 | GCA_001539225.1 | 615 | 615 | Serratia marcescens | 2880STDY5683013 | Proteobacteria | FCGI01000005.1 | 2 | CVA15880.1 | 14183 |
| 422 | GCA_001540225.1 | 615 | 615 | Serratia marcescens | 2880STDY5683031 | Proteobacteria | FCGJ01000005.1 | 2 | CUZ46954.1 | 14185 |
| 423 | GCA_001537565.1 | 615 | 615 | Serratia marcescens | 2880STDY5683034 | Proteobacteria | FCGK01000008.1 | 2 | CUZ31026.1 | 14187 |
| 424 | GCA_001539965.1 | 615 | 615 | Serratia marcescens | 2880STDY5682829 | Proteobacteria | FCGL01000002.1 | 2 | CUZ02629.1 | 14189 |
| 425 | GCA_001537645.1 | 615 | 615 | Serratia marcescens | 2880STDY5682830 | Proteobacteria | FCGM01000004.1 | 2 | CUZ51326.1 | 14191 |
| 426 | GCA_001539485.1 | 615 | 615 | Serratia marcescens | 2880STDY5683008 | Proteobacteria | FCGN01000006.1 | 2 | CUZ55076.1 | 14193 |
| 427 | GCA_001537285.1 | 615 | 615 | Serratia marcescens | 2880STDY5683022 | Proteobacteria | FCGO01000004.1 | 2 | CVA20194.1 | 14195 |
| 428 | GCA_001539645.1 | 615 | 615 | Serratia marcescens | 2880STDY5682838 | Proteobacteria | FCGP01000007.1 | 2 | CUZ69684.1 | 14197 |
| 429 | GCA_001538765.1 | 615 | 615 | Serratia marcescens | 2880STDY5682826 | Proteobacteria | FCGQ01000005.1 | 2 | CUZ82709.1 | 14199 |
| 430 | GCA_001537825.1 | 615 | 615 | Serratia marcescens | 2880STDY5683030 | Proteobacteria | FCGR01000003.1 | 2 | CUZ92205.1 | 14201 |
| 431 | GCA_001538195.1 | 615 | 615 | Serratia marcescens | 2880STDY5683020 | Proteobacteria | FCGS01000007.1 | 2 | CUZ80077.1 | 14203 |
| 432 | GCA_001540185.1 | 615 | 615 | Serratia marcescens | 2880STDY5682832 | Proteobacteria | FCGT01000002.1 | 2 | CUZ43216.1 | 14205 |
| 433 | GCA_001539025.1 | 615 | 615 | Serratia marcescens | 2880STDY5682818 | Proteobacteria | FCGU01000004.1 | 2 | CVA39165.1 | 14207 |
| 434 | GCA_001540205.1 | 615 | 615 | Serratia marcescens | 2880STDY5682842 | Proteobacteria | FCGV01000008.1 | 2 | CVA66719.1 | 14209 |
| 435 | GCA_001539725.1 | 615 | 615 | Serratia marcescens | 2880STDY5682839 | Proteobacteria | FCGW01000003.1 | 2 | CUZ78091.1 | 14211 |
| 436 | GCA_001537425.1 | 615 | 615 | Serratia marcescens | 2880STDY5682840 | Proteobacteria | FCGX01000008.1 | 2 | CUZ53769.1 | 14213 |
| 437 | GCA_001540725.1 | 615 | 615 | Serratia marcescens | 2880STDY5682844 | Proteobacteria | FCGY01000002.1 | 2 | CVA07127.1 | 14215 |
| 438 | GCA_001539705.1 | 615 | 615 | Serratia marcescens | 2880STDY5682843 | Proteobacteria | FCGZ01000005.1 | 2 | CUZ96183.1 | 14217 |
| 439 | GCA_001537325.1 | 615 | 615 | Serratia marcescens | 2880STDY5682845 | Proteobacteria | FCHA01000004.1 | 2 | CVA63405.1 | 14219 |
| 440 | GCA_001538805.1 | 615 | 615 | Serratia marcescens | 2880STDY5682847 | Proteobacteria | FCHB01000006.1 | 2 | CVB19728.1 | 14221 |
| 441 | GCA_001537025.1 | 615 | 615 | Serratia marcescens | 2880STDY5682846 | Proteobacteria | FCHC01000005.1 | 2 | CVB15259.1 | 14223 |
| 442 | GCA_001538445.1 | 615 | 615 | Serratia marcescens | 2880STDY5682848 | Proteobacteria | FCHD01000004.1 | 2 | CVB18641.1 | 14225 |
| 443 | GCA_001540265.1 | 615 | 615 | Serratia marcescens | 2880STDY5682849 | Proteobacteria | FCHE01000016.1 | 2 | CVC33418.1 | 14227 |
| 444 | GCA_001539365.1 | 615 | 615 | Serratia marcescens | 2880STDY5682850 | Proteobacteria | FCHF01000016.1 | 2 | CVC43508.1 | 14229 |
| 445 | GCA_001537605.1 | 615 | 615 | Serratia marcescens | 2880STDY5682851 | Proteobacteria | FCHG01000004.1 | 2 | CVB44191.1 | 14231 |
| 446 | GCA_001538725.1 | 615 | 615 | Serratia marcescens | 2880STDY5682852 | Proteobacteria | FCHH01000006.1 | 2 | CVC13530.1 | 14233 |
| 447 | GCA_001536765.1 | 615 | 615 | Serratia marcescens | 2880STDY5682859 | Proteobacteria | FCHI01000001.1 | 2 | CVB24153.1 | 14235 |
| 448 | GCA_001540425.1 | 615 | 615 | Serratia marcescens | 2880STDY5682855 | Proteobacteria | FCHJ01000002.1 | 2 | CVB63296.1 | 14237 |
| 449 | GCA_001539265.1 | 615 | 615 | Serratia marcescens | 2880STDY5682854 | Proteobacteria | FCHK01000007.1 | 2 | CVB59022.1 | 14239 |
| 450 | GCA_001536505.1 | 615 | 615 | Serratia marcescens | 2880STDY5682857 | Proteobacteria | FCHL01000009.1 | 2 | CVB73355.1 | 14241 |
| 451 | GCA_001539765.1 | 615 | 615 | Serratia marcescens | 2880STDY5682858 | Proteobacteria | FCHM01000001.1 | 2 | CVA22576.1 | 14243 |
| 452 | GCA_001536445.1 | 615 | 615 | Serratia marcescens | 2880STDY5682856 | Proteobacteria | FCHN01000007.1 | 2 | CVC54922.1 | 14245 |
| 453 | GCA_001536345.1 | 615 | 615 | Serratia marcescens | 2880STDY5682861 | Proteobacteria | FCHO01000009.1 | 2 | CVC47630.1 | 14247 |
| 454 | GCA_001539585.1 | 615 | 615 | Serratia marcescens | 2880STDY5682863 | Proteobacteria | FCHP01000005.1 | 2 | CVC16906.1 | 14249 |
| 455 | GCA_001540365.1 | 615 | 615 | Serratia marcescens | 2880STDY5682862 | Proteobacteria | FCHQ01000002.1 | 2 | CVA94601.1 | 14251 |
| 456 | GCA_001536465.1 | 615 | 615 | Serratia marcescens | 2880STDY5682864 | Proteobacteria | FCHR01000005.1 | 2 | CVB98029.1 | 14253 |
| 457 | GCA_001537225.1 | 615 | 615 | Serratia marcescens | 2880STDY5682866 | Proteobacteria | FCHS01000005.1 | 2 | CVB27596.1 | 14255 |
| 458 | GCA_001539885.1 | 615 | 615 | Serratia marcescens | 2880STDY5682865 | Proteobacteria | FCHT01000005.1 | 2 | CVC12754.1 | 14257 |
| 459 | GCA_001539845.1 | 615 | 615 | Serratia marcescens | 2880STDY5682867 | Proteobacteria | FCHU01000005.1 | 2 | CVB94192.1 | 14259 |
| 460 | GCA_001538425.1 | 615 | 615 | Serratia marcescens | 2880STDY5682868 | Proteobacteria | FCHV01000005.1 | 2 | CVC34459.1 | 14261 |
| 461 | GCA_001537485.1 | 615 | 615 | Serratia marcescens | 2880STDY5682869 | Proteobacteria | FCHW01000006.1 | 2 | CVC37208.1 | 14263 |
| 462 | GCA_001540525.1 | 615 | 615 | Serratia marcescens | 2880STDY5682870 | Proteobacteria | FCHX01000005.1 | 2 | CVC09911.1 | 14265 |
| 463 | GCA_001537245.1 | 615 | 615 | Serratia marcescens | 2880STDY5682871 | Proteobacteria | FCHY01000004.1 | 2 | CVB52010.1 | 14267 |
| 464 | GCA_001537345.1 | 615 | 615 | Serratia marcescens | 2880STDY5682872 | Proteobacteria | FCHZ01000007.1 | 2 | CVB83712.1 | 14269 |
| 465 | GCA_001536985.1 | 615 | 615 | Serratia marcescens | 2880STDY5682874 | Proteobacteria | FCIA01000006.1 | 2 | CVB86127.1 | 14271 |
| 466 | GCA_001539925.1 | 615 | 615 | Serratia marcescens | 2880STDY5682875 | Proteobacteria | FCIB01000006.1 | 2 | CVC63966.1 | 14273 |
| 467 | GCA_001539425.1 | 615 | 615 | Serratia marcescens | 2880STDY5682877 | Proteobacteria | FCIC01000002.1 | 2 | CVB86015.1 | 14275 |
| 468 | GCA_001537465.1 | 615 | 615 | Serratia marcescens | 2880STDY5682878 | Proteobacteria | FCID01000006.1 | 2 | CVC85484.1 | 14277 |
| 469 | GCA_001540385.1 | 615 | 615 | Serratia marcescens | 2880STDY5682880 | Proteobacteria | FCIE01000007.1 | 2 | CVC33567.1 | 14279 |
| 470 | GCA_001540605.1 | 615 | 615 | Serratia marcescens | 2880STDY5682879 | Proteobacteria | FCIF01000008.1 | 2 | CVC90980.1 | 14281 |
| 471 | GCA_001537665.1 | 615 | 615 | Serratia marcescens | 2880STDY5682881 | Proteobacteria | FCIG01000006.1 | 2 | CVC23364.1 | 14283 |
| 472 | GCA_001539345.1 | 615 | 615 | Serratia marcescens | 2880STDY5682884 | Proteobacteria | FCIH01000009.1 | 2 | CVC01499.1 | 14285 |
| 473 | GCA_001540625.1 | 615 | 615 | Serratia marcescens | 2880STDY5682885 | Proteobacteria | FCII01000005.1 | 2 | CVC17928.1 | 14287 |
| 474 | GCA_001536685.1 | 615 | 615 | Serratia marcescens | 2880STDY5682882 | Proteobacteria | FCIJ01000008.1 | 2 | CVC49211.1 | 14289 |
| 475 | GCA_001538825.1 | 615 | 615 | Serratia marcescens | 2880STDY5682883 | Proteobacteria | FCIK01000010.1 | 2 | CVD13430.1 | 14291 |
| 476 | GCA_001538365.1 | 615 | 615 | Serratia marcescens | 2880STDY5682887 | Proteobacteria | FCIL01000005.1 | 2 | CVC16315.1 | 14293 |
| 477 | GCA_001539745.1 | 615 | 615 | Serratia marcescens | 2880STDY5682889 | Proteobacteria | FCIM01000006.1 | 2 | CVC38417.1 | 14295 |
| 478 | GCA_001538345.1 | 615 | 615 | Serratia marcescens | 2880STDY5682888 | Proteobacteria | FCIN01000006.1 | 2 | CVC81451.1 | 14297 |
| 479 | GCA_001540765.1 | 615 | 615 | Serratia marcescens | 2880STDY5682892 | Proteobacteria | FCIO01000006.1 | 2 | CVC81532.1 | 14299 |
| 480 | GCA_001540325.1 | 615 | 615 | Serratia marcescens | 2880STDY5682891 | Proteobacteria | FCIP01000007.1 | 2 | CVC86644.1 | 14301 |
| 481 | GCA_001540305.1 | 615 | 615 | Serratia marcescens | 2880STDY5682890 | Proteobacteria | FCIQ01000005.1 | 2 | CVC98809.1 | 14303 |
| 482 | GCA_001539565.1 | 615 | 615 | Serratia marcescens | 2880STDY5682893 | Proteobacteria | FCIR01000006.1 | 2 | CVC91105.1 | 14305 |
| 483 | GCA_001540105.1 | 615 | 615 | Serratia marcescens | 2880STDY5682902 | Proteobacteria | FCIS01000005.1 | 2 | CVC94637.1 | 14307 |
| 484 | GCA_001539865.1 | 615 | 615 | Serratia marcescens | 2880STDY5682903 | Proteobacteria | FCIT01000007.1 | 2 | CVC52261.1 | 14309 |
| 485 | GCA_001539085.1 | 615 | 615 | Serratia marcescens | 2880STDY5682904 | Proteobacteria | FCIU01000005.1 | 2 | CVC98188.1 | 14311 |
| 486 | GCA_001537065.1 | 615 | 615 | Serratia marcescens | 2880STDY5682905 | Proteobacteria | FCIV01000001.1 | 2 | CVB21709.1 | 14313 |
| 487 | GCA_001536725.1 | 615 | 615 | Serratia marcescens | 2880STDY5682906 | Proteobacteria | FCIW01000004.1 | 2 | CVC48171.1 | 14315 |
| 488 | GCA_001538645.1 | 615 | 615 | Serratia marcescens | 2880STDY5682907 | Proteobacteria | FCIX01000005.1 | 2 | CVC71605.1 | 14317 |
| 489 | GCA_001539145.1 | 615 | 615 | Serratia marcescens | 2880STDY5682908 | Proteobacteria | FCIY01000004.1 | 2 | CVC84156.1 | 14319 |
| 490 | GCA_001539385.1 | 615 | 615 | Serratia marcescens | 2880STDY5682913 | Proteobacteria | FCIZ01000002.1 | 2 | CVC59811.1 | 14321 |
| 491 | GCA_001537385.1 | 1805636 | 1805636 | Serratia sp. 2880STDY5682894 | 2880STDY5682894 | Proteobacteria | FCJA01000011.1 | 2 | CVE09029.1 | 14323 |
| 492 | GCA_001537125.1 | 615 | 615 | Serratia marcescens | 2880STDY5682916 | Proteobacteria | FCJB01000006.1 | 2 | CVD69842.1 | 14325 |
| 493 | GCA_001540245.1 | 615 | 615 | Serratia marcescens | 2880STDY5682918 | Proteobacteria | FCJC01000003.1 | 2 | CVD51978.1 | 14327 |
| 494 | GCA_001540285.1 | 615 | 615 | Serratia marcescens | 2880STDY5682917 | Proteobacteria | FCJD01000005.1 | 2 | CVD94616.1 | 14329 |
| 495 | GCA_001540485.1 | 615 | 615 | Serratia marcescens | 2880STDY5682919 | Proteobacteria | FCJE01000006.1 | 2 | CVD41075.1 | 14331 |
| 496 | GCA_001539245.1 | 615 | 615 | Serratia marcescens | 2880STDY5682921 | Proteobacteria | FCJF01000005.1 | 2 | CVD28911.1 | 14333 |
| 497 | GCA_001537185.1 | 615 | 615 | Serratia marcescens | 2880STDY5682924 | Proteobacteria | FCJG01000001.1 | 2 | CVC37101.1 | 14335 |
| 498 | GCA_001537625.1 | 615 | 615 | Serratia marcescens | 2880STDY5682926 | Proteobacteria | FCJH01000006.1 | 2 | CVE33560.1 | 14337 |
| 499 | GCA_001536385.1 | 615 | 615 | Serratia marcescens | 2880STDY5682927 | Proteobacteria | FCJI01000001.1 | 2 | CVC40389.1 | 14339 |
| 500 | GCA_001536405.1 | 615 | 615 | Serratia marcescens | 2880STDY5682928 | Proteobacteria | FCJJ01000009.1 | 2 | CVE27784.1 | 14341 |
| 501 | GCA_001536845.1 | 615 | 615 | Serratia marcescens | 2880STDY5682929 | Proteobacteria | FCJK01000007.1 | 2 | CVE60658.1 | 14343 |
| 502 | GCA_001537265.1 | 1805637 | 1805637 | Serratia sp. 2880STDY5682895 | 2880STDY5682895 | Proteobacteria | FCJL01000004.1 | 2 | CVE69225.1 | 14345 |
| 503 | GCA_001540145.1 | 615 | 615 | Serratia marcescens | 2880STDY5682932 | Proteobacteria | FCJM01000004.1 | 2 | CVE06185.1 | 14347 |
| 504 | GCA_001538885.1 | 615 | 615 | Serratia marcescens | 2880STDY5682931 | Proteobacteria | FCJN01000006.1 | 2 | CVE70644.1 | 14349 |
| 505 | GCA_001538945.1 | 615 | 615 | Serratia marcescens | 2880STDY5682933 | Proteobacteria | FCJO01000002.1 | 2 | CVD68108.1 | 14351 |
| 506 | GCA_001539285.1 | 615 | 615 | Serratia marcescens | 2880STDY5682936 | Proteobacteria | FCJP01000008.1 | 2 | CVE19652.1 | 14353 |
| 507 | GCA_001538965.1 | 615 | 615 | Serratia marcescens | 2880STDY5682938 | Proteobacteria | FCJQ01000005.1 | 2 | CVE94858.1 | 14355 |
| 508 | GCA_001538745.1 | 615 | 615 | Serratia marcescens | 2880STDY5682934 | Proteobacteria | FCJR01000005.1 | 2 | CVE73969.1 | 14357 |
| 509 | GCA_001539405.1 | 615 | 615 | Serratia marcescens | 2880STDY5682937 | Proteobacteria | FCJS01000004.1 | 2 | CVE69307.1 | 14359 |
| 510 | GCA_001540745.1 | 615 | 615 | Serratia marcescens | 2880STDY5682896 | Proteobacteria | FCJU01000008.1 | 2 | CVD84033.1 | 14361 |
| 511 | GCA_001540025.1 | 615 | 615 | Serratia marcescens | 2880STDY5682940 | Proteobacteria | FCJV01000010.1 | 2 | CVE29057.1 | 14363 |
| 512 | GCA_001539625.1 | 615 | 615 | Serratia marcescens | 2880STDY5682943 | Proteobacteria | FCJW01000006.1 | 2 | CVD89429.1 | 14365 |
| 513 | GCA_001536965.1 | 615 | 615 | Serratia marcescens | 2880STDY5682942 | Proteobacteria | FCJX01000004.1 | 2 | CVE62947.1 | 14367 |
| 514 | GCA_001538505.1 | 615 | 615 | Serratia marcescens | 2880STDY5682945 | Proteobacteria | FCJY01000006.1 | 2 | CVE95724.1 | 14369 |
| 515 | GCA_001538005.1 | 615 | 615 | Serratia marcescens | 2880STDY5682947 | Proteobacteria | FCJZ01000006.1 | 2 | CVF11414.1 | 14371 |
| 516 | GCA_001537005.1 | 615 | 615 | Serratia marcescens | 2880STDY5682951 | Proteobacteria | FCKA01000009.1 | 2 | CVF28618.1 | 14373 |
| 517 | GCA_001536895.1 | 615 | 615 | Serratia marcescens | 2880STDY5682950 | Proteobacteria | FCKB01000001.1 | 2 | CVC97408.1 | 14375 |
| 518 | GCA_001537365.1 | 615 | 615 | Serratia marcescens | 2880STDY5682897 | Proteobacteria | FCKC01000002.1 | 2 | CVD52669.1 | 14377 |
| 519 | GCA_001536525.1 | 615 | 615 | Serratia marcescens | 2880STDY5682952 | Proteobacteria | FCKD01000005.1 | 2 | CVE22718.1 | 14379 |
| 520 | GCA_001539545.1 | 615 | 615 | Serratia marcescens | 2880STDY5682953 | Proteobacteria | FCKE01000005.1 | 2 | CVE97488.1 | 14381 |
| 521 | GCA_001539665.1 | 615 | 615 | Serratia marcescens | 2880STDY5682954 | Proteobacteria | FCKF01000005.1 | 2 | CVF28196.1 | 14383 |
| 522 | GCA_001536325.1 | 615 | 615 | Serratia marcescens | 2880STDY5682955 | Proteobacteria | FCKG01000004.1 | 2 | CVE60557.1 | 14385 |
| 523 | GCA_001539325.1 | 615 | 615 | Serratia marcescens | 2880STDY5682956 | Proteobacteria | FCKH01000006.1 | 2 | CVE66029.1 | 14387 |
| 524 | GCA_001540825.1 | 615 | 615 | Serratia marcescens | 2880STDY5682957 | Proteobacteria | FCKI01000006.1 | 2 | CVF01432.1 | 14389 |
| 525 | GCA_001540005.1 | 615 | 615 | Serratia marcescens | 2880STDY5682958 | Proteobacteria | FCKJ01000007.1 | 2 | CVE93279.1 | 14391 |
| 526 | GCA_001536625.1 | 615 | 615 | Serratia marcescens | 2880STDY5682959 | Proteobacteria | FCKK01000007.1 | 2 | CVF50179.1 | 14393 |
| 527 | GCA_001539905.1 | 615 | 615 | Serratia marcescens | 2880STDY5682961 | Proteobacteria | FCKL01000003.1 | 2 | CVF09863.1 | 14395 |
| 528 | GCA_001536665.1 | 615 | 615 | Serratia marcescens | 2880STDY5682960 | Proteobacteria | FCKM01000009.1 | 2 | CVE63433.1 | 14397 |
| 529 | GCA_001539205.1 | 615 | 615 | Serratia marcescens | 2880STDY5682962 | Proteobacteria | FCKN01000002.1 | 2 | CVE05426.1 | 14399 |
| 530 | GCA_001540685.1 | 615 | 615 | Serratia marcescens | 2880STDY5682899 | Proteobacteria | FCKO01000003.1 | 2 | CVE67637.1 | 14401 |
| 531 | GCA_001539945.1 | 615 | 615 | Serratia marcescens | 2880STDY5682963 | Proteobacteria | FCKP01000005.1 | 2 | CVE73588.1 | 14403 |
| 532 | GCA_001536705.1 | 615 | 615 | Serratia marcescens | 2880STDY5682964 | Proteobacteria | FCKQ01000006.1 | 2 | CVF13093.1 | 14405 |
| 533 | GCA_001539445.1 | 615 | 615 | Serratia marcescens | 2880STDY5682965 | Proteobacteria | FCKR01000003.1 | 2 | CVE92971.1 | 14407 |
| 534 | GCA_001538685.1 | 615 | 615 | Serratia marcescens | 2880STDY5682967 | Proteobacteria | FCKS01000007.1 | 2 | CVF15693.1 | 14409 |
| 535 | GCA_001536945.1 | 615 | 615 | Serratia marcescens | 2880STDY5682966 | Proteobacteria | FCKT01000001.1 | 2 | CVE70328.1 | 14411 |
| 536 | GCA_001538405.1 | 615 | 615 | Serratia marcescens | 2880STDY5682968 | Proteobacteria | FCKU01000005.1 | 2 | CVF77852.1 | 14413 |
| 537 | GCA_001538115.1 | 615 | 615 | Serratia marcescens | 2880STDY5682971 | Proteobacteria | FCKV01000009.1 | 2 | CVF08013.1 | 14415 |
| 538 | GCA_001540545.1 | 615 | 615 | Serratia marcescens | 2880STDY5682969 | Proteobacteria | FCKW01000004.1 | 2 | CVF84175.1 | 14417 |
| 539 | GCA_001540345.1 | 615 | 615 | Serratia marcescens | 2880STDY5682970 | Proteobacteria | FCKX01000005.1 | 2 | CVF82181.1 | 14419 |
| 540 | GCA_001540705.1 | 615 | 615 | Serratia marcescens | 2880STDY5682973 | Proteobacteria | FCKZ01000006.1 | 2 | CVG26740.1 | 14421 |
| 541 | GCA_001537585.1 | 615 | 615 | Serratia marcescens | 2880STDY5682974 | Proteobacteria | FCLA01000006.1 | 2 | CVG63931.1 | 14423 |
| 542 | GCA_001540445.1 | 615 | 615 | Serratia marcescens | 2880STDY5682976 | Proteobacteria | FCLB01000006.1 | 2 | CVG49466.1 | 14425 |
| 543 | GCA_001536645.1 | 615 | 615 | Serratia marcescens | 2880STDY5682977 | Proteobacteria | FCLC01000007.1 | 2 | CVF96122.1 | 14427 |
| 544 | GCA_001538585.1 | 615 | 615 | Serratia marcescens | 2880STDY5682979 | Proteobacteria | FCLD01000006.1 | 2 | CVG60878.1 | 14429 |
| 545 | GCA_001539825.1 | 615 | 615 | Serratia marcescens | 2880STDY5682978 | Proteobacteria | FCLE01000011.1 | 2 | CVG18609.1 | 14431 |
| 546 | GCA_001536365.1 | 615 | 615 | Serratia marcescens | 2880STDY5682980 | Proteobacteria | FCLF01000004.1 | 2 | CVG60220.1 | 14433 |
| 547 | GCA_001540505.1 | 615 | 615 | Serratia marcescens | 2880STDY5682982 | Proteobacteria | FCLG01000005.1 | 2 | CVG00307.1 | 14435 |
| 548 | GCA_001540045.1 | 615 | 615 | Serratia marcescens | 2880STDY5682981 | Proteobacteria | FCLH01000005.1 | 2 | CVG18150.1 | 14437 |
| 549 | GCA_001539685.1 | 615 | 615 | Serratia marcescens | 2880STDY5682983 | Proteobacteria | FCLI01000006.1 | 2 | CVG66356.1 | 14439 |
| 550 | GCA_001539605.1 | 615 | 615 | Serratia marcescens | 2880STDY5682984 | Proteobacteria | FCLJ01000002.1 | 2 | CVF82688.1 | 14441 |
| 551 | GCA_001564475.1 | 615 | 615 | Serratia marcescens | 2880STDY5682985 | Proteobacteria | FCLK01000006.1 | 2 | CVG27221.1 | 14443 |
| 552 | GCA_001537705.1 | 615 | 615 | Serratia marcescens | 2880STDY5682986 | Proteobacteria | FCLL01000011.1 | 2 | CVH08342.1 | 14445 |
| 553 | GCA_001540785.1 | 615 | 615 | Serratia marcescens | 2880STDY5682987 | Proteobacteria | FCLM01000006.1 | 2 | CVG82373.1 | 14447 |
| 554 | GCA_001540065.1 | 615 | 615 | Serratia marcescens | 2880STDY5682990 | Proteobacteria | FCLN01000007.1 | 2 | CVG89997.1 | 14449 |
| 555 | GCA_001540585.1 | 615 | 615 | Serratia marcescens | 2880STDY5682991 | Proteobacteria | FCLO01000004.1 | 2 | CVG75154.1 | 14451 |
| 556 | GCA_001536745.1 | 615 | 615 | Serratia marcescens | 2880STDY5682992 | Proteobacteria | FCLP01000006.1 | 2 | CVG91933.1 | 14453 |
| 557 | GCA_001538865.1 | 615 | 615 | Serratia marcescens | 2880STDY5682993 | Proteobacteria | FCLQ01000006.1 | 2 | CVG61761.1 | 14455 |
| 558 | GCA_001536545.1 | 615 | 615 | Serratia marcescens | 2880STDY5682994 | Proteobacteria | FCLR01000006.1 | 2 | CVG55708.1 | 14457 |
| 559 | GCA_001537925.1 | 615 | 615 | Serratia marcescens | 2880STDY5682995 | Proteobacteria | FCLS01000005.1 | 2 | CVG99558.1 | 14459 |
| 560 | GCA_001538925.1 | 615 | 615 | Serratia marcescens | 2880STDY5682901 | Proteobacteria | FCLT01000009.1 | 2 | CVG85830.1 | 14461 |
| 561 | GCA_001538845.1 | 615 | 615 | Serratia marcescens | 2880STDY5682996 | Proteobacteria | FCLU01000006.1 | 2 | CVH13287.1 | 14463 |
| 562 | GCA_001536425.1 | 615 | 615 | Serratia marcescens | 2880STDY5682998 | Proteobacteria | FCLV01000007.1 | 2 | CVH22095.1 | 14465 |
| 563 | GCA_001540165.1 | 615 | 615 | Serratia marcescens | 2880STDY5682997 | Proteobacteria | FCLW01000007.1 | 2 | CVG79620.1 | 14467 |
| 564 | GCA_001540565.1 | 615 | 615 | Serratia marcescens | 2880STDY5683002 | Proteobacteria | FCLX01000006.1 | 2 | CVH31735.1 | 14469 |
| 565 | GCA_001537085.1 | 615 | 615 | Serratia marcescens | 2880STDY5683001 | Proteobacteria | FCLY01000002.1 | 2 | CVG61510.1 | 14471 |
| 566 | GCA_001539005.1 | 615 | 615 | Serratia marcescens | 2880STDY5682873 | Proteobacteria | FCLZ01000001.1 | 2 | CVF47731.1 | 14473 |
| 567 | GCA_001538565.1 | 615 | 615 | Serratia marcescens | 2880STDY5683004 | Proteobacteria | FCMA01000007.1 | 2 | CVH23270.1 | 14475 |
| 568 | GCA_001537745.1 | 615 | 615 | Serratia marcescens | 2880STDY5683003 | Proteobacteria | FCMB01000010.1 | 2 | CVG86995.1 | 14477 |
| 569 | GCA_001538385.1 | 615 | 615 | Serratia marcescens | 2880STDY5682835 | Proteobacteria | FCMC01000007.1 | 2 | CVG92563.1 | 14479 |
| 570 | GCA_001537685.1 | 615 | 615 | Serratia marcescens | 2880STDY5682853 | Proteobacteria | FCMD01000007.1 | 2 | CVH34087.1 | 14481 |
| 571 | GCA_001537905.1 | 615 | 615 | Serratia marcescens | 2880STDY5682876 | Proteobacteria | FCME01000005.1 | 2 | CVG73776.1 | 14483 |
| 572 | GCA_001537505.1 | 615 | 615 | Serratia marcescens | 2880STDY5682898 | Proteobacteria | FCMF01000005.1 | 2 | CVH31066.1 | 14485 |
| 573 | GCA_001538275.1 | 615 | 615 | Serratia marcescens | 2880STDY5682912 | Proteobacteria | FCMG01000007.1 | 2 | CVH30715.1 | 14487 |
| 574 | GCA_001537045.1 | 615 | 615 | Serratia marcescens | 2880STDY5682914 | Proteobacteria | FCMH01000006.1 | 2 | CVG97897.1 | 14489 |
| 575 | GCA_001540465.1 | 615 | 615 | Serratia marcescens | 2880STDY5682915 | Proteobacteria | FCMI01000011.1 | 2 | CVH42932.1 | 14491 |
| 576 | GCA_001540085.1 | 615 | 615 | Serratia marcescens | 2880STDY5682925 | Proteobacteria | FCMJ01000003.1 | 2 | CVH11685.1 | 14493 |
| 577 | GCA_001536585.1 | 615 | 615 | Serratia marcescens | 2880STDY5682922 | Proteobacteria | FCMK01000007.1 | 2 | CVH39732.1 | 14495 |
| 578 | GCA_001537305.1 | 615 | 615 | Serratia marcescens | 2880STDY5682930 | Proteobacteria | FCML01000005.1 | 2 | CVH33868.1 | 14497 |
| 579 | GCA_001538325.1 | 615 | 615 | Serratia marcescens | 2880STDY5682939 | Proteobacteria | FCMM01000005.1 | 2 | CVG91272.1 | 14499 |
| 580 | GCA_001537165.1 | 615 | 615 | Serratia marcescens | 2880STDY5682944 | Proteobacteria | FCMN01000005.1 | 2 | CVH37766.1 | 14501 |
| 581 | GCA_001540405.1 | 615 | 615 | Serratia marcescens | 2880STDY5682948 | Proteobacteria | FCMO01000007.1 | 2 | CVH21028.1 | 14503 |
| 582 | GCA_001537865.1 | 615 | 615 | Serratia marcescens | 2880STDY5682949 | Proteobacteria | FCMP01000001.1 | 2 | CVG01710.1 | 14505 |
| 583 | GCA_001538665.1 | 615 | 615 | Serratia marcescens | 2880STDY5682975 | Proteobacteria | FCMQ01000009.1 | 2 | CVH35272.1 | 14507 |
| 584 | GCA_001536565.1 | 615 | 615 | Serratia marcescens | 2880STDY5682999 | Proteobacteria | FCMS01000001.1 | 2 | CVH07248.1 | 14509 |
| 585 | GCA_001539465.1 | 615 | 615 | Serratia marcescens | 2880STDY5683000 | Proteobacteria | FCMT01000008.1 | 2 | CVH30929.1 | 14511 |
| 586 | GCA_001537805.1 | 615 | 615 | Serratia marcescens | 2880STDY5683016 | Proteobacteria | FCMU01000006.1 | 2 | CVH50698.1 | 14513 |
| 587 | GCA_001539525.1 | 615 | 615 | Serratia marcescens | 2880STDY5683027 | Proteobacteria | FCMV01000005.1 | 2 | CVH40520.1 | 14515 |
| 588 | GCA_001539105.1 | 615 | 615 | Serratia marcescens | 2880STDY5683015 | Proteobacteria | FCMW01000009.1 | 2 | CVH64627.1 | 14517 |
| 589 | GCA_001537785.1 | 615 | 615 | Serratia marcescens | 2880STDY5683006 | Proteobacteria | FCMX01000005.1 | 2 | CVH70545.1 | 14519 |
| 590 | GCA_001540645.1 | 615 | 615 | Serratia marcescens | 2880STDY5683019 | Proteobacteria | FCMY01000005.1 | 2 | CVH72214.1 | 14521 |
| 591 | GCA_001538545.1 | 615 | 615 | Serratia marcescens | 2880STDY5683017 | Proteobacteria | FCMZ01000004.1 | 2 | CVH65591.1 | 14523 |
| 592 | GCA_001544575.1 | 1353886 | 1353886 | Burkholderia cordobensis | | Proteobacteria | FCNY01000004.1 | 2 | CVJ13885.1 | 14525 |
| 593 | GCA_001544455.1 | 196367 | 196367 | Paraburkholderia sordidicola | | Proteobacteria | FCOC01000002.1 | 3 | CVJ11200.1 | 14527 |
| 594 | GCA_001544535.1 | 326476 | 326476 | Paraburkholderia choica | | Proteobacteria | FCON01000032.1 | 2 | CVJ34937.1 | 14530 |
| 595 | GCA_900022065.1 | 1639 | 1639 | Listeria monocytogenes | 2842STDY5753889 | Firmicutes | FFEW01000009.1 | 2 | CWV39688.1 | 14532 |
| 596 | GCA_900034805.1 | 1639 | 1639 | Listeria monocytogenes | 2842STDY5753890 | Firmicutes | FFGS01000008.1 | 2 | CWW37500.1 | 14534 |
| 597 | GCA_900051225.1 | 1313 | 1313 | Streptococcus pneumoniae | 2245STDY5982743 | Firmicutes | FHVI01000002.1 | 3 | CYO51328.1 | 14536 |
| 598 | GCA_900059415.1 | 1307 | 1307 | Streptococcus suis | LSS12 | Firmicutes | FIFP01000001.1 | 2 | CYT98259.1 | 14539 |
| 599 | GCA_900049685.1 | 1307 | 1307 | Streptococcus suis | FX275 | Firmicutes | FISX01000005.1 | 3 | CZB10988.1 | 14541 |
| 600 | GCA_900058075.1 | 1307 | 1307 | Streptococcus suis | FX483_3 | Firmicutes | FITF01000040.1 | 3 | CZB35771.1 | 14544 |
| 601 | GCA_900050515.1 | 1313 | 1313 | Streptococcus pneumoniae | 72D37909 | Firmicutes | FIWN01000018.1 | 2 | CZD24115.1 | 14547 |
| 602 | GCA_900052575.1 | 1313 | 1313 | Streptococcus pneumoniae | D30716 | Firmicutes | FIXA01000003.1 | 2 | CZC77630.1 | 14549 |
| 603 | GCA_900049745.1 | 1313 | 1313 | Streptococcus pneumoniae | A32279 | Firmicutes | FIXS01000003.1 | 2 | CZD72536.1 | 14551 |
| 604 | GCA_900051625.1 | 1313 | 1313 | Streptococcus pneumoniae | C14560X | Firmicutes | FIXT01000039.1 | 2 | CZE23674.1 | 14553 |
| 605 | GCA_000026585.1 | 553482 | 1336 | Streptococcus equi subsp. equi | 4047 | Firmicutes | FM204883.1 | 2 | CAW93164.1 | 14555 |
| | | | | 4047 | | | | | | |
| 606 | GCA_000209955.1 | 657317 | 39491 | [Eubacterium] rectale M104/1 | M104/1 | Firmicutes | FP929043.1 | 2 | CBK94114.1 | 14557 |
| 607 | GCA_000236925.1 | 985002 | 985002 | Staphylococcus argenteus | MSHR1132 | Firmicutes | FR821777.2 | 3 | CCE59808.1 | 14559 |
| 608 | GCA_000435855.1 | 1262967 | 1262967 | Ruminococcus sp. CAG:9 | | Firmicutes | FR896087.1 | 3 | CDD80086.1 | 14562 |
| 609 | GCA_000156515.1 | 553973 | 89153 | [Clostridium] hylemonae DSM 15053 | DSM 15053 | Firmicutes | GG657761.1 | 2 | EEG72544.1 | 14565 |
| 610 | GCA_000160115.1 | 626523 | 177972 | Shuttleworthia satelles DSM 14600 | DSM 14600 | Firmicutes | GG665867.1 | 4 | EEP27313.1 | 14567 |
| 611 | GCA_000159095.1 | 525255 | 33036 | Anaerococcus tetradius ATCC 35098 | ATCC 35098 | Firmicutes | GG666297.1 | 2 | EEI83075.1 | 14571 |
| 612 | GCA_000157535.1 | 565657 | 1352 | Enterococcus faecium 1,231,502 | 1,231,502 | Firmicutes | GG688488.1 | 3 | EEV44995.1 | 14573 |
| 613 | GCA_000159955.1 | 621372 | 652715 | Paenibacillus sp. oral taxon 786 str. D14 | D14 | Firmicutes | GG695991.1 | 2 | EES71591.1 | 14576 |
| 614 | GCA_000162075.1 | 575587 | 40215 | Acinetobacter junii SH205 | SH205 | Proteobacteria | GG705011.1 | 3 | EEY94494.1 | 14578 |
| 615 | GCA_000148025.1 | 749520 | 1352 | Enterococcus faecium TX0082 | TX0082 | Firmicutes | GL455872.1 | 3 | EFS10290.1 | 14581 |
| 616 | GCA_000195045.1 | 888818 | 1305 | Streptococcus sanguinis SK408 | SK408 | Firmicutes | GL878559.1 | 3 | EGF19709.1 | 14584 |
| 617 | GCA_000213555.1 | 742766 | 156974 | Dysgonomonas gadei ATCC BAA-286 | ATCC BAA-286 | Bacteroidetes | GL891989.1 | 3 | EGK00063.1 | 14587 |
| 618 | GCA_000328705.1 | 1179773 | 103731 | Saccharothrix espanaensis DSM 44229 | type strain: | Actinobacteria | HE804045.1 | 2 | CCH29383.1 | 14590 |
| | | | | | DSM 44229 | | | | | |
| 619 | GCA_000313065.1 | 1208659 | 518 | Bordetella bronchiseptica Bbr77 | Bbr77 | Proteobacteria | HE983628.1 | 2 | CCN04569.1 | 14592 |
| 620 | GCA_000513215.1 | 273526 | 615 | Serratia marcescens subsp. marcescens Db11 | Db11 | Proteobacteria | HG326223.1 | 2 | CDG13494.1 | 14594 |
| 621 | GCA_000736695.1 | 1398204 | 40576 | Xenorhabdus bovienii str. kraussei Becker | kraussei Becker | Proteobacteria | HG428180.1 | 2 | CDH26046.1 | 14596 |
| | | | | Underwood | Underwood | | | | | |
| 622 | GCA_000632355.1 | 1442605 | 1352 | Enterococcus faecium VSE1036 | VSE1036 | Firmicutes | JAAJ01000002.1 | 3 | EZP94706.1 | 14598 |
| 623 | GCA_000632295.1 | 1442604 | 1352 | Enterococcus faecium VRE0576 | VRE0576 | Firmicutes | JAAK01000036.1 | 3 | EZP99085.1 | 14601 |
| 624 | GCA_000632315.1 | 1442606 | 1352 | Enterococcus faecium VRE1044 | VRE1044 | Firmicutes | JAAL01000002.1 | 3 | EZP92278.1 | 14604 |
| 625 | GCA_000523375.1 | 1449358 | 670 | Vibrio parahaemolyticus M0605 | M0605 | Proteobacteria | JALL01000080.1 | 2 | ETZ11576.1 | 14607 |
| 626 | GCA_000633575.2 | 1450518 | 440518 | Sphingobium lucknowense F2 | F2 | Proteobacteria | JANF02000091.1 | 2 | KER34865.1 | 14609 |
| 627 | GCA_000564995.1 | 1190620 | 1190620 | Atopobium sp. ICM42b | ICM42b | Actinobacteria | JDFH01000020.1 | 2 | EWC94460.1 | 14611 |
| 628 | GCA_001589275.1 | 56 | 56 | Sorangium cellulosum | So0003-19-2 | Proteobacteria | JELZ01001521.1 | 2 | KYF75625.1 | 14613 |
| 629 | GCA_001589185.1 | 56 | 56 | Sorangium cellulosum | So0011-07 | Proteobacteria | JEMB01003116.1 | 2 | KYF75483.1 | 14615 |
| 630 | GCA_000581895.1 | 1310692 | 470 | Acinetobacter baumannii 532279 | 532279 | Proteobacteria | JEYH01000003.1 | 6 | EXE88617.1 | 14617 |
| 631 | GCA_000695685.1 | 212667 | 212667 | Vibrio fortis | Dalian14 | Proteobacteria | JFFR01000027.1 | 2 | KDN26971.1 | 14623 |
| 632 | GCA_000705595.1 | 1408224 | 194963 | Sinorhizobium americanum CCGM7 | CCGM7 | Proteobacteria | JFG001000039.1 | 3 | KEC78309.1 | 14625 |
| 633 | GCA_000689815.1 | 1331227 | 518 | Bordetella bronchiseptica MBORD675 | MBORD675 | Proteobacteria | JGX001000020.1 | 2 | KDC94426.1 | 14628 |
| 634 | GCA_000227315.1 | 997350 | 33030 | Peptoniphilus indolicus ATCC 29427 | ATCC 29427 | Firmicutes | JH165061.1 | 2 | EGY80387.1 | 14630 |
| 635 | GCA_000234335.1 | 543736 | 37919 | Rhodococcus opacus PD630 | PD630 | Actinobacteria | JH377359.1 | 2 | EHI41035.1 | 14632 |
| 636 | GCA_000235505.1 | 742737 | 154046 | Hungatella hathewayi WAL-18680 | WAL-18680 | Firmicutes | JH379027.1 | 2 | EHI61291.1 | 14634 |
| 637 | GCA_000243215.1 | 742817 | 626933 | Odoribacter laneus YIT 12061 | YIT 12061 | Bacteroidetes | JH594596.1 | 3 | EHP50820.1 | 14636 |
| 638 | GCA_000245755.1 | 883114 | 40091 | Helcococcus kunzii ATCC 51366 | ATCC 51366 | Firmicutes | JH601089.1 | 2 | EHR31702.1 | 14639 |
| 639 | GCA_000273035.1 | 997875 | 357276 | Bacteroides dorei CL02T00C15 | CL02T00C15 | Bacteroidetes | JH724115.1 | 4 | EIY18768.1 | 14641 |
| 640 | GCA_000273055.1 | 997876 | 357276 | Bacteroides dorei CL02T12C06 | CL02T12C06 | Bacteroidetes | JH724132.1 | 4 | EIY40460.1 | 14645 |
| 641 | GCA_000273765.1 | 997880 | 817 | Bacteroides fragilis CL05T00C42 | CL05T00C42 | Bacteroidetes | JH724188.1 | 2 | EIY98048.1 | 14649 |
| 642 | GCA_000273765.1 | 997880 | 817 | Bacteroides fragilis CL05T00C42 | CL05T00C42 | Bacteroidetes | JH724189.1 | 2 | EIY91470.1 | 14651 |
| 643 | GCA_000273765.1 | 997880 | 817 | Bacteroides fragilis CL05T00C42 | CL05T00C42 | Bacteroidetes | JH724190.1 | 2 | EIY90206.1 | 14653 |
| 644 | GCA_000273135.1 | 997881 | 817 | Bacteroides fragilis CL05T12C13 | CL05T12C13 | Bacteroidetes | JH724193.1 | 2 | EIY98754.1 | 14655 |
| 645 | GCA_000273135.1 | 997881 | 817 | Bacteroides fragilis CL05T12C13 | CL05T12C13 | Bacteroidetes | JH724195.1 | 2 | EIY95127.1 | 14657 |
| 646 | GCA_000273135.1 | 997881 | 817 | Bacteroides fragilis CL05T12C13 | CL05T12C13 | Bacteroidetes | JH724196.1 | 2 | EIY94597.1 | 14659 |
| 647 | GCA_000273135.1 | 997881 | 817 | Bacteroides fragilis CL05T12C13 | CL05T12C13 | Bacteroidetes | JH724198.1 | 2 | EIY90857.1 | 14661 |
| 648 | GCA_000290655.1 | 1053250 | 1396 | Bacillus cereus VDM062 | VDM062 | Firmicutes | JH791805.1 | 2 | EJS10770.1 | 14663 |
| 649 | GCA_000290695.1 | 1053247 | 1396 | Bacillus cereus VDM022 | VDM022 | Firmicutes | JH791837.1 | 2 | EJS00271.1 | 14665 |
| 650 | GCA_000291275.1 | 1053222 | 1396 | Bacillus cereus MSX-D12 | MSX-D12 | Firmicutes | JH792019.1 | 3 | EJR09240.1 | 14667 |
| 651 | GCA_000293705.1 | 1053201 | 1396 | Bacillus cereus HuA2-1 | HuA2-1 | Firmicutes | JH804676.1 | 2 | EJV74397.1 | 14670 |
| 652 | GCA_000293985.2 | 1134784 | 1351 | Enterococcus faecalis 599 | 599 | Firmicutes | JH805574.1 | 3 | EJU93680.1 | 14672 |
| 653 | GCA_000294835.2 | 1134840 | 1352 | Enterococcus faecium S447 | S447 | Firmicutes | JH806853.1 | 3 | EJX46905.1 | 14675 |
| 654 | GCA_000294955.2 | 1134834 | 1352 | Enterococcus faecium R446 | R446 | Firmicutes | JH808093.1 | 3 | EJX62525.1 | 14678 |
| 655 | GCA_000294975.2 | 1134833 | 1352 | Enterococcus faecium P1986 | P1986 | Firmicutes | JH808384.1 | 3 | EJX62294.1 | 14681 |
| 656 | GCA_000294915.2 | 1134836 | 1352 | Enterococcus faecium R496 | R496 | Firmicutes | JH808647.1 | 3 | EJX50428.1 | 14684 |
| 657 | GCA_000295015.1 | 1134831 | 1352 | Enterococcus faecium P1140 | P1140 | Firmicutes | JH809135.1 | 3 | EJX67854.1 | 14687 |
| 658 | GCA_000295075.2 | 1134823 | 1352 | Enterococcus faecium ERV168 | ERV168 | Firmicutes | JH809674.1 | 3 | EJX96647.1 | 14690 |
| 659 | GCA_000295235.2 | 1134822 | 1352 | Enterococcus faecium ERV165 | ERV165 | Firmicutes | JH811082.1 | 3 | EJX94481.1 | 14693 |
| 660 | GCA_000295255.2 | 1134821 | 1352 | Enterococcus faecium ERV161 | ERV161 | Firmicutes | JH811267.1 | 3 | EJX98618.1 | 14696 |
| 661 | GCA_000295355.2 | 1134820 | 1352 | Enterococcus faecium ERV102 | ERV102 | Firmicutes | JH811829.1 | 3 | EJY06338.1 | 14699 |
| 662 | GCA_000295395.2 | 1134816 | 1352 | Enterococcus faecium C621 | C621 | Firmicutes | JH813401.1 | 3 | EJY12738.1 | 14702 |
| 663 | GCA_000295455.2 | 1134818 | 1352 | Enterococcus faecium E422 | E422 | Firmicutes | JH814230.1 | 3 | EJY15300.1 | 14705 |
| 664 | GCA_000298035.1 | 1073385 | 654 | Aeromonas veronii AMC35 | AMC35 | Proteobacteria | JH815589.1 | 3 | EKB22093.1 | 14708 |
| 665 | GCA_000302795.1 | 1154761 | 317 | Pseudomonas syringae pv. avellanae str. | ISPaVe013 | Proteobacteria | JH951825.1 | 2 | EKG43671.1 | 14711 |
| | | | | ISPaVe013 | | | | | | |
| 666 | GCA_000601255.1 | 1444050 | 562 | Escherichia coli 1-176-05_S1_C1 | 1-176-05_S1_C1 | Proteobacteria | JHDH01000118.1 | 2 | EYD87721.1 | 14713 |
| 667 | GCA_000682795.1 | 1413578 | 1280 | Staphylococcus aureus ZTA11/03130-3ST | ZTA11/03130-3ST | Firmicutes | JIFC01000010.1 | 3 | EZR33643.1 | 14715 |
| 668 | GCA_000682815.1 | 1413583 | 1280 | Staphylococcus aureus ZTA09/03739-9HSA | ZTA09/03739-9HSA | Firmicutes | JIFJ01000017.1 | 3 | EZR32908.1 | 14718 |
| 669 | GCA_000682835.1 | 1413575 | 1280 | Staphylococcus aureus ZTA09/03576-9HST | ZTA09/03576-9HST | Firmicutes | JIFL01000015.1 | 3 | EZR32079.1 | 14721 |
| 670 | GCA_000682855.1 | 1422806 | 1280 | Staphylococcus aureus VET1918S | VET1918S | Firmicutes | JIFS01000014.1 | 3 | EZR40124.1 | 14724 |
| 671 | GCA_000682875.1 | 1422751 | 1280 | Staphylococcus aureus VET1915R | VET1915R | Firmicutes | JIFU01000012.1 | 3 | EZR39627.1 | 14727 |
| 672 | GCA_000682895.1 | 1422746 | 1280 | Staphylococcus aureus VET1910R | VET1910R | Firmicutes | JIFZ01000014.1 | 3 | EZR44611.1 | 14730 |
| 673 | GCA_000682915.1 | 1422743 | 1280 | Staphylococcus aureus VET1907R | VET1907R | Firmicutes | JIGC01000014.1 | 3 | EZR45907.1 | 14733 |
| 674 | GCA_000682935.1 | 1422737 | 1280 | Staphylococcus aureus VET1898R | VET1898R | Firmicutes | JIGI01000039.1 | 3 | EZR45668.1 | 14736 |
| 675 | GCA_000682955.1 | 1422735 | 1280 | Staphylococcus aureus VET1896R | VET1896R | Firmicutes | JIGK01000023.1 | 3 | EZR50025.1 | 14739 |
| 676 | GCA_000682975.1 | 1422726 | 1280 | Staphylococcus aureus VET1876R | VET1876R | Firmicutes | JIGT01000015.1 | 3 | EZR55035.1 | 14742 |
| 677 | GCA_000682995.1 | 1422721 | 1280 | Staphylococcus aureus VET1869R | VET1869R | Firmicutes | JIGY01000015.1 | 3 | EZR57945.1 | 14745 |
| 678 | GCA_000683015.1 | 1422713 | 1280 | Staphylococcus aureus VET1858R | VET1858R | Firmicutes | JIHG01000011.1 | 3 | EZR61549.1 | 14748 |
| 679 | GCA_000683035.1 | 1422699 | 1280 | Staphylococcus aureus VET1842R | VET1842R | Firmicutes | JIHU01000011.1 | 3 | EZR61336.1 | 14751 |
| 680 | GCA_000683055.1 | 1422694 | 1280 | Staphylococcus aureus VET1833R | VET1833R | Firmicutes | JIHZ01000024.1 | 3 | EZR64331.1 | 14754 |
| 681 | GCA_000683075.1 | 1422793 | 1280 | Staphylococcus aureus VET1515S | VET1515S | Firmicutes | JIIN01000014.1 | 3 | EZR68241.1 | 14757 |
| 682 | GCA_000683095.1 | 1422788 | 1280 | Staphylococcus aureus VET1422S | VET1422S | Firmicutes | JIIS01000014.1 | 3 | EZR69014.1 | 14760 |
| 683 | GCA_000683115.1 | 1422787 | 1280 | Staphylococcus aureus VET1419S | VET1419S | Firmicutes | JIIT01000011.1 | 3 | EZR71841.1 | 14763 |
| 684 | GCA_000683175.1 | 1422779 | 1280 | Staphylococcus aureus VET1103S | VET1103S | Firmicutes | JIJB01000012.1 | 3 | EZR76991.1 | 14766 |
| 685 | GCA_000683195.1 | 1422762 | 1280 | Staphylococcus aureus VET0798S | VET0798S | Firmicutes | JIJR01000008.1 | 3 | EZR83388.1 | 14769 |
| 686 | GCA_000683215.1 | 1422759 | 1280 | Staphylococcus aureus VET0765S | VET0765S | Firmicutes | JIJU01000014.1 | 3 | EZR85552.1 | 14772 |
| 687 | GCA_000683235.1 | 1422753 | 1280 | Staphylococcus aureus VET0612S | VET0612S | Firmicutes | JIKA01000011.1 | 3 | EZR86482.1 | 14775 |
| 688 | GCA_000683255.1 | 1422690 | 1280 | Staphylococcus aureus VET0489R | VET0489R | Firmicutes | JIKD01000012.1 | 3 | EZR91407.1 | 14778 |
| 689 | GCA_000683275.1 | 1422684 | 1280 | Staphylococcus aureus VET0473R | VET0473R | Firmicutes | JIKJ01000007.1 | 3 | EZR97101.1 | 14781 |
| 690 | GCA_000683295.1 | 1422683 | 1280 | Staphylococcus aureus VET0472R | VET0472R | Firmicutes | JIKK01000013.1 | 3 | EZR91808.1 | 14784 |
| 691 | GCA_000683315.1 | 1422682 | 1280 | Staphylococcus aureus VET0471R | VET0471R | Firmicutes | JIKL01000010.1 | 3 | EZS01238.1 | 14787 |
| 692 | GCA_000683335.1 | 1422680 | 1280 | Staphylococcus aureus VET0469R | VET0469R | Firmicutes | JIKN01000014.1 | 3 | EZR98553.1 | 14790 |
| 693 | GCA_000683355.1 | 1422678 | 1280 | Staphylococcus aureus VET0467R | VET0467R | Firmicutes | JIKP01000012.1 | 3 | EZS03613.1 | 14793 |
| 694 | GCA_000683375.1 | 1422659 | 1280 | Staphylococcus aureus VET0437R | VET0437R | Firmicutes | JILI01000022.1 | 3 | EZS03317.1 | 14796 |
| 695 | GCA_000683395.1 | 1422658 | 1280 | Staphylococcus aureus VET0436R | VET0436R | Firmicutes | JILJ01000008.1 | 3 | EZS19480.1 | 14799 |
| 696 | GCA_000683415.1 | 1422650 | 1280 | Staphylococcus aureus VET0426R | VET0426R | Firmicutes | JILR01000018.1 | 3 | EZS08904.1 | 14802 |
| 697 | GCA_000683435.1 | 1422648 | 1280 | Staphylococcus aureus VET0424R | VET0424R | Firmicutes | JILT01000015.1 | 3 | EZS11744.1 | 14805 |
| 698 | GCA_000683455.1 | 1422646 | 1280 | Staphylococcus aureus VET0422R | VET0422R | Firmicutes | JILV01000006.1 | 3 | EZS15735.1 | 14808 |
| 699 | GCA_000683475.1 | 1422641 | 1280 | Staphylococcus aureus VET0414R | VET0414R | Firmicutes | JIMA01000009.1 | 3 | EZS17716.1 | 14811 |
| 700 | GCA_000683495.1 | 1422631 | 1280 | Staphylococcus aureus VET0400R | VET0400R | Firmicutes | JIMK01000012.1 | 3 | EZS22505.1 | 14814 |
| 701 | GCA_000683515.1 | 1422615 | 1280 | Staphylococcus aureus VET0368R | VET0368R | Firmicutes | JINA01000007.1 | 3 | EZS28196.1 | 14817 |
| 702 | GCA_000683535.1 | 1422610 | 1280 | Staphylococcus aureus VET0361R | VET0361R | Firmicutes | JINE01000013.1 | 3 | EZS23872.1 | 14820 |
| 703 | GCA_000683555.1 | 1422607 | 1280 | Staphylococcus aureus VET0358R | VET0358R | Firmicutes | JINH01000013.1 | 3 | EZS29422.1 | 14823 |
| 704 | GCA_000683575.1 | 1422604 | 1280 | Staphylococcus aureus VET0353R | VET0353R | Firmicutes | JINK01000012.1 | 3 | EZS31414.1 | 14826 |
| 705 | GCA_000683595.1 | 1422602 | 1280 | Staphylococcus aureus VET0343R | VET0343R | Firmicutes | JINM01000020.1 | 3 | EZS33213.1 | 14829 |
| 706 | GCA_000683615.1 | 1422601 | 1280 | Staphylococcus aureus VET0342R | VET0342R | Firmicutes | JINN01000024.1 | 3 | EZS35185.1 | 14832 |
| 707 | GCA_000683635.1 | 1422592 | 1280 | Staphylococcus aureus VET0332R | VET0332R | Firmicutes | JINW01000011.1 | 3 | EZS39162.1 | 14835 |
| 708 | GCA_000683655.1 | 1422584 | 1280 | Staphylococcus aureus VET0319R | VET0319R | Firmicutes | JIOE01000008.1 | 3 | EZS43277.1 | 14838 |
| 709 | GCA_000683675.1 | 1422573 | 1280 | Staphylococcus aureus VET0306R | VET0306R | Firmicutes | JIOP01000015.1 | 3 | EZS45538.1 | 14841 |
| 710 | GCA_000683695.1 | 1422568 | 1280 | Staphylococcus aureus VET0301R | VET0301R | Firmicutes | JIOU01000001.1 | 3 | EZS50847.1 | 14844 |
| 711 | GCA_000683715.1 | 1422565 | 1280 | Staphylococcus aureus VET0298R | VET0298R | Firmicutes | JIOX01000011.1 | 3 | EZS49647.1 | 14847 |
| 712 | GCA_000683735.1 | 1422560 | 1280 | Staphylococcus aureus VET0293R | VET0293R | Firmicutes | JIPC01000010.1 | 3 | EZS53448.1 | 14850 |
| 713 | GCA_000683755.1 | 1422532 | 1280 | Staphylococcus aureus VET0251R | VET0251R | Firmicutes | JIQE01000003.1 | 3 | EZS57832.1 | 14853 |
| 714 | GCA_000683775.1 | 1422529 | 1280 | Staphylococcus aureus VET0244R | VET0244R | Firmicutes | JIQH01000007.1 | 3 | EZS59105.1 | 14856 |
| 715 | GCA_000683795.1 | 1422524 | 1280 | Staphylococcus aureus VET0235R | VET0235R | Firmicutes | JIQM01000010.1 | 3 | EZS59928.1 | 14859 |
| 716 | GCA_000683815.1 | 1422523 | 1280 | Staphylococcus aureus VET0232R | VET0232R | Firmicutes | JIQN01000013.1 | 3 | EZS62658.1 | 14862 |
| 717 | GCA_000683835.1 | 1422521 | 1280 | Staphylococcus aureus VET0229R | VET0229R | Firmicutes | JIQP01000009.1 | 3 | EZS64792.1 | 14865 |
| 718 | GCA_000683855.1 | 1422515 | 1280 | Staphylococcus aureus VET0219R | VET0219R | Firmicutes | JIQV01000013.1 | 3 | EZS69843.1 | 14868 |
| 719 | GCA_000683875.1 | 1422503 | 1280 | Staphylococcus aureus VET0203R | VET0203R | Firmicutes | JIRD01000012.1 | 3 | EZS69138.1 | 14871 |
| 720 | GCA_000683895.1 | 1422497 | 1280 | Staphylococcus aureus VET0197R | VET0197R | Firmicutes | JIRG01000010.1 | 3 | EZS72362.1 | 14874 |
| 721 | GCA_000683915.1 | 1422491 | 1280 | Staphylococcus aureus VET0191R | VET0191R | Firmicutes | JIRL01000031.1 | 3 | EZS75507.1 | 14877 |
| 722 | GCA_000683935.1 | 1422485 | 1280 | Staphylococcus aureus VET0184R | VET0184R | Firmicutes | JIRP01000014.1 | 3 | EZS76928.1 | 14880 |
| 723 | GCA_000683955.1 | 1422484 | 1280 | Staphylococcus aureus VET0183R | VET0183R | Firmicutes | JIRQ01000012.1 | 3 | EZS80907.1 | 14883 |
| 724 | GCA_000683975.1 | 1422471 | 1280 | Staphylococcus aureus VET0159R | VET0159R | Firmicutes | JISD01000013.1 | 3 | EZS87845.1 | 14886 |
| 725 | GCA_000683995.1 | 1422470 | 1280 | Staphylococcus aureus VET0158R | VET0158R | Firmicutes | JISE01000012.1 | 3 | EZS84438.1 | 14889 |
| 726 | GCA_000684015.1 | 1422469 | 1280 | Staphylococcus aureus VET0157R | VET0157R | Firmicutes | JISF01000014.1 | 3 | EZS87769.1 | 14892 |
| 727 | GCA_000684035.1 | 1422466 | 1280 | Staphylococcus aureus VET0154R | VET0154R | Firmicutes | JISI01000011.1 | 3 | EZS90163.1 | 14895 |
| 728 | GCA_000684055.1 | 1422463 | 1280 | Staphylococcus aureus VET0150R | VET0150R | Firmicutes | JISL01000013.1 | 3 | EZS94702.1 | 14898 |
| 729 | GCA_000684075.1 | 1422461 | 1280 | Staphylococcus aureus VET0141R | VET0141R | Firmicutes | JISN01000008.1 | 3 | EZS98281.1 | 14901 |
| 730 | GCA_000684095.1 | 1422459 | 1280 | Staphylococcus aureus VET0136R | VET0136R | Firmicutes | JISP01000015.1 | 3 | EZT00071.1 | 14904 |
| 731 | GCA_000684115.1 | 1422450 | 1280 | Staphylococcus aureus VET0125R | VET0125R | Firmicutes | JISY01000005.1 | 3 | EZT04301.1 | 14907 |
| 732 | GCA_000684135.1 | 1422447 | 1280 | Staphylococcus aureus VET0120R | VET0120R | Firmicutes | JITB01000012.1 | 3 | EZT04247.1 | 14910 |
| 733 | GCA_000684155.1 | 1422441 | 1280 | Staphylococcus aureus VET0113R | VET0113R | Firmicutes | JITH01000016.1 | 3 | EZT06690.1 | 14913 |
| 734 | GCA_000684175.1 | 1422439 | 1280 | Staphylococcus aureus VET0111R | VET0111R | Firmicutes | JITJ01000011.1 | 3 | EZT09552.1 | 14916 |
| 735 | GCA_000684195.1 | 1422433 | 1280 | Staphylococcus aureus VET0102R | VET0102R | Firmicutes | JITP01000023.1 | 3 | EZT09961.1 | 14919 |
| 736 | GCA_000684215.1 | 1422415 | 1280 | Staphylococcus aureus VET0081R | VET0081R | Firmicutes | JIUH01000008.1 | 3 | EZT16280.1 | 14922 |
| 737 | GCA_000684235.1 | 1422413 | 1280 | Staphylococcus aureus VET0078R | VET0078R | Firmicutes | JIUJ01000012.1 | 3 | EZT18988.1 | 14925 |
| 738 | GCA_000684255.1 | 1422397 | 1280 | Staphylococcus aureus VET0058R | VET0058R | Firmicutes | JIUZ01000012.1 | 3 | EZT18347.1 | 14928 |
| 739 | GCA_000684275.1 | 1422390 | 1280 | Staphylococcus aureus VET0050R | VET0050R | Firmicutes | JIVG01000012.1 | 3 | EZT23523.1 | 14931 |
| 740 | GCA_000684295.1 | 1413450 | 1280 | Staphylococcus aureus VE08/02242ST1 | VE08/02242ST1 | Firmicutes | JIVI01000014.1 | 3 | EZT25332.1 | 14934 |
| 741 | GCA_000684315.1 | 1413603 | 1280 | Staphylococcus aureus USA_6 | USA_6 | Firmicutes | JIV001000013.1 | 3 | EZT27375.1 | 14937 |
| 742 | GCA_000684335.1 | 1413566 | 1280 | Staphylococcus aureus Tur-5 | Tur-5 | Firmicutes | JIVW01000016.1 | 3 | EZT32068.1 | 14940 |
| 743 | GCA_000684355.1 | 1413553 | 1280 | Staphylococcus aureus Tur-4 | Tur-4 | Firmicutes | JIVX01000016.1 | 3 | EZT32807.1 | 14943 |
| 744 | GCA_000684375.1 | 1413487 | 1280 | Staphylococcus aureus S64_POEL | S64_POEL | Firmicutes | JIWP01000013.1 | 3 | EZT35387.1 | 14946 |
| 745 | GCA_000684395.1 | 1413486 | 1280 | Staphylococcus aureus S63_POEL | S63_POEL | Firmicutes | JIWQ01000014.1 | 3 | EZT42046.1 | 14949 |
| 746 | GCA_000684415.1 | 1413565 | 1280 | Staphylococcus aureus Rd.290 | Rd.290 | Firmicutes | JIXA01000010.1 | 3 | EZT39172.1 | 14952 |
| 747 | GCA_000684435.1 | 1413494 | 1280 | Staphylococcus aureus MSSA-47 | MSSA-47 | Firmicutes | JIX001000015.1 | 3 | EZT44508.1 | 14955 |
| 748 | GCA_000684455.1 | 1413493 | 1280 | Staphylococcus aureus MSSA-37 | MSSA-37 | Firmicutes | JIXP01000012.1 | 3 | EZT47451.1 | 14958 |
| 749 | GCA_000684475.1 | 1413496 | 1280 | Staphylococcus aureus MSSA-123 | MSSA-123 | Firmicutes | JIXQ01000009.1 | 3 | EZT50536.1 | 14961 |
| 750 | GCA_000684495.1 | 1413536 | 1280 | Staphylococcus aureus GD2010-169 | GD2010-169 | Firmicutes | JIXZ01000015.1 | 3 | EZT52625.1 | 14964 |
| 751 | GCA_000684515.1 | 1413535 | 1280 | Staphylococcus aureus GD2010-159 | GD2010-159 | Firmicutes | JIYB01000010.1 | 3 | EZT54280.1 | 14967 |
| 752 | GCA_000684535.1 | 1413473 | 1280 | Staphylococcus aureus C3452 | C3452 | Firmicutes | JIZF01000012.1 | 3 | EZT57811.1 | 14970 |
| 753 | GCA_000684555.1 | 1413511 | 1280 | Staphylococcus aureus C0676 | C0676 | Firmicutes | JIZR01000010.1 | 3 | EZT60957.1 | 14973 |
| 754 | GCA_000684575.1 | 1413507 | 1280 | Staphylococcus aureus C0626 | C0626 | Firmicutes | JIZV01000007.1 | 3 | EZT61426.1 | 14976 |
| 755 | GCA_000684595.1 | 1413325 | 1280 | Staphylococcus aureus 81629 | 81629 | Firmicutes | JJAH01000015.1 | 3 | EZT65757.1 | 14979 |
| 756 | GCA_000684615.1 | 1413343 | 1280 | Staphylococcus aureus 63-D10 | 63-D10 | Firmicutes | JJAN01000014.1 | 3 | EZT68345.1 | 14982 |
| 757 | GCA_000684635.1 | 1413388 | 1280 | Staphylococcus aureus 53180-1 | 53180-1 | Firmicutes | JJAW01000011.1 | 3 | EZT68418.1 | 14985 |
| 758 | GCA_000684655.1 | 1413547 | 1280 | Staphylococcus aureus 45(2607) | 45(2607) | Firmicutes | JJAZ01000013.1 | 3 | EZT73755.1 | 14988 |
| 759 | GCA_000684675.1 | 1413544 | 1280 | Staphylococcus aureus 28(3K2-5) | 28(3K2-5) | Firmicutes | JJBI01000015.1 | 3 | EZT75322.1 | 14991 |
| 760 | GCA_000684695.1 | 1413543 | 1280 | Staphylococcus aureus 22(2K81-5) | 22(2K81-5) | Firmicutes | JJBX01000016.1 | 3 | EZT77630.1 | 14994 |
| 761 | GCA_000684715.1 | 1413522 | 1280 | Staphylococcus aureus 2011-60-2275-7 | 2011-60-2275-7 | Firmicutes | JJBY01000031.1 | 3 | EZT80087.1 | 14997 |
| 762 | GCA_000684735.1 | 1413394 | 1280 | Staphylococcus aureus 1484-9 | 1484-9 | Firmicutes | JJCS01000014.1 | 3 | EZT82073.1 | 15000 |
| 763 | GCA_000684795.1 | 1413430 | 1280 | Staphylococcus aureus 1111001578 | 1111001578 | Firmicutes | JJDU01000014.1 | 3 | EZT89290.1 | 15003 |
| 764 | GCA_000684815.1 | 1413357 | 1280 | Staphylococcus aureus 10S00488 | 10S00488 | Firmicutes | JJEI01000012.1 | 3 | EZT93146.1 | 15006 |
| 765 | GCA_000684835.1 | 1413560 | 1280 | Staphylococcus aureus 1(04GN_04-02-52-07) | 1(04GN_04-02-52-07) | Firmicutes | JJEJ01000010.1 | 3 | EZT96081.1 | 15009 |
| 766 | GCA_000684855.1 | 1413356 | 1280 | Staphylococcus aureus 09S01694 | 09S01694 | Firmicutes | JJEK01000015.1 | 3 | EZT99582.1 | 15012 |
| 767 | GCA_000684875.1 | 1413349 | 1280 | Staphylococcus aureus 09-00736 | 09-00736 | Firmicutes | JJEM01000015.1 | 3 | EZU00841.1 | 15015 |
| 768 | GCA_000684895.1 | 1413346 | 1280 | Staphylococcus aureus 08-01229 | 08-01229 | Firmicutes | JJET01000013.1 | 3 | EZU03294.1 | 15018 |
| 769 | GCA_000684915.1 | 1413345 | 1280 | Staphylococcus aureus 08-01062 | 08-01062 | Firmicutes | JJEW01000012.1 | 3 | EZU07140.1 | 15021 |
| 770 | GCA_000684955.1 | 1413344 | 1280 | Staphylococcus aureus 08-01059 | 08-01059 | Firmicutes | JJEX01000015.1 | 3 | EZU08872.1 | 15024 |
| 771 | GCA_000627945.1 | 1444105 | 562 | Escherichia coli 1-176-05_S1_C3 | 1-176-05_S1_C3 | Proteobacteria | JJLY01000082.1 | 2 | EZK05852.1 | 15027 |
| 772 | GCA_000627905.1 | 1444078 | 562 | Escherichia coli 1-176-05_S1_C2 | 1-176-05_S1_C2 | Proteobacteria | JJMA01000042.1 | 2 | EZK20524.1 | 15029 |
| 773 | GCA_000705535.1 | 95486 | 95486 | Burkholderia cenocepacia | 869T2 | Proteobacteria | JJOA01000083.1 | 3 | KEA54804.1 | 15031 |
| 774 | GCA_000764325.1 | 29495 | 29495 | Vibrio navarrensis | ATCC 51183 | Proteobacteria | JMCG01000001.1 | 2 | KGK10824.1 | 15034 |
| 775 | GCA_000695795.1 | 1492738 | 1492738 | Flavobacterium seoulense | EM1321 | Bacteroidetes | JNCA01000003.1 | 3 | KDN56466.1 | 15036 |
| 776 | GCA_000699865.1 | 1339352 | 821 | Bacteroides vulgatus str. 3975 RP4 | 3975 RP4 | Bacteroidetes | JNHM01000174.1 | 3 | KDS43697.1 | 15039 |
| 777 | GCA_000700705.1 | 1444060 | 562 | Escherichia coli 4-203-08_S1_C1 | 4-203-08_S1_C1 | Proteobacteria | JNMY01000013.1 | 2 | KDU61955.1 | 15042 |
| 778 | GCA_000704125.1 | 1444070 | 562 | Escherichia coli 2-222-05_S1_C2 | 2-222-05_S1_C2 | Proteobacteria | JNQL01000002.1 | 2 | KDX77544.1 | 15044 |
| 779 | GCA_000704285.1 | 1444098 | 562 | Escherichia coli 2-222-05_S1_C3 | 2-222-05_S1_C3 | Proteobacteria | JNQM01000001.1 | 2 | KDX82612.1 | 15046 |
| 780 | GCA_000704405.1 | 1444183 | 562 | Escherichia coli 2-427-07_S3_C3 | 2-427-07_S3_C3 | Proteobacteria | JNQY01000031.1 | 2 | KDY27416.1 | 15048 |
| 781 | GCA_000707425.1 | 670 | 670 | Vibrio parahaemolyticus | CFSAN007430 | Proteobacteria | JNSN01000106.1 | 2 | KED12527.1 | 15050 |
| 782 | GCA_000707385.1 | 670 | 670 | Vibrio parahaemolyticus | CFSAN007431 | Proteobacteria | JNSO01000031.1 | 2 | KED15841.1 | 15052 |
| 783 | GCA_000707465.1 | 670 | 670 | Vibrio parahaemolyticus | CFSAN007433 | Proteobacteria | JNSQ01000049.1 | 3 | KED29323.1 | 15054 |
| 784 | GCA_000707485.1 | 670 | 670 | Vibrio parahaemolyticus | CFSAN007434 | Proteobacteria | JNSR01000049.1 | 3 | KED25553.1 | 15057 |
| 785 | GCA_000707505.1 | 670 | 670 | Vibrio parahaemolyticus | CFSAN007435 | Proteobacteria | JNSS01000023.1 | 3 | KED36896.1 | 15060 |
| 786 | GCA_000706885.1 | 670 | 670 | Vibrio parahaemolyticus | CFSAN007436 | Proteobacteria | JNST01000065.1 | 2 | KED34398.1 | 15063 |
| 787 | GCA_000707685.1 | 670 | 670 | Vibrio parahaemolyticus | CFSAN007446 | Proteobacteria | JNTD01000023.1 | 2 | KED69849.1 | 15065 |
| 788 | GCA_000764405.1 | 70775 | 70775 | Pseudomonas plecoglossicida | TND35 | Proteobacteria | JOJY01000001.1 | 3 | KGK23635.1 | 15067 |
| 789 | GCA_000713945.1 | 1444088 | 562 | Escherichia coli 4-203-08_S1_C2 | 4-203-08_S1_C2 | Proteobacteria | JOQF01000029.1 | 2 | KEK91460.1 | 15070 |
| 790 | GCA_000713975.1 | 1444113 | 562 | Escherichia coli 4-203-08_S1_C3 | 4-203-08_S1_C3 | Proteobacteria | JOQG01000030.1 | 2 | KEK94906.1 | 15072 |
| 791 | GCA_000713975.1 | 1444113 | 562 | Escherichia coli 4-203-08_S1_C3 | 4-203-08_S1_C3 | Proteobacteria | JOQG01000030.1 | 2 | KEK94966.1 | 15074 |
| 792 | GCA_000713975.1 | 1444113 | 562 | Escherichia coli 4-203-08_S1_C3 | 4-203-08_S1_C3 | Proteobacteria | JOQG01000115.1 | 2 | KEK89446.1 | 15076 |
| 793 | GCA_000722685.1 | 28037 | 28037 | Streptococcus mitis | SK667 | Firmicutes | JPFV01000011.1 | 3 | KEQ37439.1 | 15078 |
| 794 | GCA_000722755.1 | 28037 | 28037 | Streptococcus mitis | SK578 | Firmicutes | JPFY01000013.1 | 3 | KEQ45048.1 | 15081 |
| 795 | GCA_000734475.1 | 615 | 615 | Serratia marcescens | YDC563 | Proteobacteria | JPOB01000015.1 | 2 | KFB55438.1 | 15084 |
| 796 | GCA_000738535.1 | 615 | 615 | Serratia marcescens | MCB | Proteobacteria | JPQY01000010.1 | 2 | KFF79466.1 | 15086 |
| 797 | GCA_000738105.1 | 180957 | 554 | Pectobacterium carotovorum subsp. brasiliense | CFIA1009 | Proteobacteria | JPSN01000039.1 | 5 | KFF62084.1 | 15088 |
| 798 | GCA_001466295.1 | 1639 | 1639 | Listeria monocytogenes | G4599 | Firmicutes | JPTX01000012.1 | 2 | KTA63996.1 | 15093 |
| 799 | GCA_001190115.1 | 1089447 | 714 | Aggregatibacter actinomycetemcomitans | RHAA1 | Proteobacteria | JPZI01000001.1 | 2 | KNE78570.1 | 15095 |
| | | | | RhAA1 | | | | | | |
| 800 | GCA_000743165.1 | 672 | 672 | Vibrio vulnificus | 2322 | Proteobacteria | JQDS01000004.1 | 3 | KFK51887.1 | 15097 |
| 801 | GCA_000754695.1 | 180957 | 554 | Pectobacterium carotovorum subsp. brasiliense | LMG 21371 | Proteobacteria | JQOE01000001.1 | 2 | KGA25874.1 | 15100 |
| 802 | GCA_000768895.1 | 1515614 | 1515614 | Porphyromonas sp. COT-108 OH2963 | COT-108 OH2963 | Bacteroidetes | JRAP01000021.1 | 2 | KGN93833.1 | 15102 |
| 803 | GCA_000764975.1 | 1352 | 1352 | Enterococcus faecium | UC7266 | Firmicutes | JRJW01000071.1 | 3 | KGK75437.1 | 15104 |
| 804 | GCA_000759165.1 | 1401072 | 28125 | Prevotella bivia DNF00650 | DNF00650 | Bacteroidetes | JRNM01000003.1 | 3 | KGF38953.1 | 15107 |
| 805 | GCA_000785785.1 | 1349 | 1349 | Streptococcus uberis | CAIM 1894 | Firmicutes | JRQN01000035.1 | 2 | KHD43839.1 | 15110 |
| 806 | GCA_000772505.1 | 1352 | 1352 | Enterococcus faecium | VRE3 | Firmicutes | JSET01000005.1 | 3 | KGQ80278.1 | 15112 |
| 807 | GCA_000817445.1 | 715 | 715 | Actinobacillus pleuropneumoniae | 1022 | Proteobacteria | JSVF01000019.1 | 3 | KIE90685.1 | 15115 |
| 808 | GCA_000817465.1 | 715 | 715 | Actinobacillus pleuropneumoniae | 460 | Proteobacteria | JSVG01000021.1 | 3 | KIE90602.1 | 15118 |
| 809 | GCA_000817515.1 | 715 | 715 | Actinobacillus pleuropneumoniae | 780 | Proteobacteria | JSVV01000021.1 | 3 | KIE97285.1 | 15121 |
| 810 | GCA_000817535.1 | 715 | 715 | Actinobacillus pleuropneumoniae | 597 | Proteobacteria | JSVX01000022.1 | 3 | KIE97672.1 | 15124 |
| 811 | GCA_000817525.1 | 715 | 715 | Actinobacillus pleuropneumoniae | 5651 | Proteobacteria | JSVY01000018.1 | 3 | KIE96199.1 | 15127 |
| 812 | GCA_000817485.1 | 715 | 715 | Actinobacillus pleuropneumoniae | 518 | Proteobacteria | JSVZ01000017.1 | 3 | KIE90357.1 | 15130 |
| 813 | GCA_000803215.1 | 554 | 554 | Pectobacterium carotovorum | M022 | Proteobacteria | JSXC01000002.1 | 5 | KHN56276.1 | 15133 |
| 814 | GCA_000827155.1 | 1280 | 1280 | Staphylococcus aureus | K12PJN53 | Firmicutes | JSYA01000018.1 | 3 | KII20612.1 | 15138 |
| 815 | GCA_000817375.1 | 562 | 562 | Escherichia coli | SCB11 | Proteobacteria | JSYT01000001.1 | 2 | KIE70777.1 | 15141 |
| 816 | GCA_000783635.1 | 644 | 644 | Aeromonas hydrophila | FDAARGOS_78 | Proteobacteria | JTBD01000005.1 | 2 | KGY52609.1 | 15143 |
| 817 | GCA_000783915.1 | 615 | 615 | Serratia marcescens | FDAARGOS_65 | Proteobacteria | JTBR01000001.1 | 2 | KGZ13596.1 | 15145 |
| 818 | GCA_000803085.1 | 1315273 | 137779 | Pseudoalteromonas flavipulchra NCIMB | ATCC BAA-314 | Proteobacteria | JTDZ01000035.1 | 2 | KHM45375.1 | 15147 |
| | | | | 2033 = ATCC BAA-314 | | | | | | |
| 819 | GCA_000814675.1 | 77608 | 77608 | Pseudoalteromonas distincta | ATCC 700518 | Proteobacteria | JWIG01000011.1 | 2 | KID39107.1 | 15149 |
| 820 | GCA_000805875.1 | 615 | 615 | Serratia marcescens | RM66262 | Proteobacteria | JWL001000004.1 | 2 | KHO41399.1 | 15151 |
| 821 | GCA_000830335.1 | 40479 | 2095 | Mycoplasma capricolum subsp. capricolum | GM508D | Tenericutes | JXQB01000001.1 | 2 | KIM13727.1 | 15153 |
| 822 | GCA_001042915.1 | 47884 | 47884 | Pseudomonas taetrolens | DSM 21104 | Proteobacteria | JYLA01000003.1 | 2 | KMM85341.1 | 15155 |
| 823 | GCA_000321685.1 | 1138891 | 1352 | Enterococcus faecium EnGen0011 | E1185 | Firmicutes | KB029511.1 | 3 | ELA78317.1 | 15157 |
| 824 | GCA_000322365.1 | 1138931 | 1352 | Enterococcus faecium EnGen0051 | E1644 | Firmicutes | KB030041.1 | 3 | ELB72564.1 | 15160 |
| 825 | GCA_000322385.1 | 1138932 | 1352 | Enterococcus faecium EnGen0050 | E2369 | Firmicutes | KB030078.1 | 3 | ELB70911.1 | 15163 |
| 826 | GCA_000322405.1 | 1138933 | 1352 | Enterococcus faecium EnGen0046 | E2560 | Firmicutes | KB030094.1 | 3 | ELB76087.1 | 15166 |
| 827 | GCA_000322465.1 | 1138936 | 1352 | Enterococcus faecium EnGen0049 | E6045 | Firmicutes | KB030126.1 | 3 | ELB84571.1 | 15169 |
| 828 | GCA_000322445.1 | 1138935 | 1352 | Enterococcus faecium EnGen0045 | E6012 | Firmicutes | KB030159.1 | 3 | ELB85483.1 | 15172 |
| 829 | GCA_000314675.2 | 883078 | 56946 | Afipia broomeae ATCC 49717 | ATCC 49717 | Proteobacteria | KB375284.1 | 2 | EKS34044.1 | 15175 |
| 830 | GCA_000350765.1 | 1169335 | 562 | Escherichia coli KTE16 | KTE16 | Proteobacteria | KB732288.1 | 2 | ELC28356.1 | 15177 |
| 831 | GCA_000351265.1 | 1181770 | 562 | Escherichia coli KTE224 | KTE224 | Proteobacteria | KB732567.1 | 2 | ELD53295.1 | 15179 |
| 832 | GCA_000352025.1 | 1182736 | 562 | Escherichia coli KTE169 | KTE169 | Proteobacteria | KB732976.1 | 2 | ELF38886.1 | 15181 |
| 833 | GCA_000352185.1 | 1169359 | 562 | Escherichia coli KTE42 | KTE42 | Proteobacteria | KB733011.1 | 2 | ELF73880.1 | 15183 |
| 834 | GCA_000352805.1 | 1181740 | 562 | Escherichia coli KTE194 | KTE194 | Proteobacteria | KB733150.1 | 2 | ELH15113.1 | 15185 |
| 835 | GCA_000352225.1 | 1169360 | 562 | Escherichia coli KTE43 | KTE43 | Proteobacteria | KB733426.1 | 2 | ELF82585.1 | 15187 |
| 836 | GCA_000368165.1 | 1217669 | 28090 | Acinetobacter Iwoffii NIPH 715 | NIPH 715 | Proteobacteria | KB849267.1 | 3 | ENU62565.1 | 15189 |
| 837 | GCA_000369545.1 | 1217702 | 1217702 | Acinetobacter sp. NIPH 1867 | NIPH 1867 | Proteobacteria | KB850085.1 | 3 | ENX56755.1 | 15192 |
| 838 | GCA_000369685.1 | 1144665 | 1144665 | Acinetobacter sp. CIP 102136 | CIP 102136 | Proteobacteria | KB850142.1 | 2 | ENX19931.1 | 15195 |
| 839 | GCA_000369725.1 | 1144662 | 1144662 | Acinetobacter sp. CIP 101966 | CIP 101966 | Proteobacteria | KB850160.1 | 3 | ENX27881.1 | 15197 |
| 840 | GCA_000371465.1 | 999411 | 179628 | Clostridium colicanis 209318 | 209318 | Firmicutes | KB850956.1 | 3 | ENZ03437.1 | 15200 |
| 841 | GCA_000371465.1 | 999411 | 179628 | Clostridium colicanis 209318 | 209318 | Firmicutes | KB850956.1 | 3 | ENZ02555.1 | 15203 |
| 842 | GCA_000393775.1 | 1158555 | 1352 | Enterococcus faecium EnGen0265 | UAA1484 | Firmicutes | KB946149.1 | 3 | EOH58476.1 | 15206 |
| 843 | GCA_000394575.1 | 1158644 | 1352 | Enterococcus faecium EnGen0320 | UAA949 | Firmicutes | KB946824.1 | 3 | EOL74786.1 | 15209 |
| 844 | GCA_000394595.1 | 1158645 | 1352 | Enterococcus faecium EnGen0322 | UAA950 | Firmicutes | KB946830.1 | 3 | EOI52382.1 | 15212 |
| 845 | GCA_000395645.1 | 1157463 | 1352 | Enterococcus faecium EnGen0168 | UAA725 | Firmicutes | KB947813.1 | 3 | EOG00796.1 | 15215 |
| 846 | GCA_000395665.1 | 1157464 | 1352 | Enterococcus faecium EnGen0169 | UAA825 | Firmicutes | KB947831.1 | 3 | EOG00999.1 | 15218 |
| 847 | GCA_000395825.1 | 1157472 | 1352 | Enterococcus faecium EnGen0177 | VRE 108 | Firmicutes | KB948035.1 | 3 | EOG17544.1 | 15221 |
| 848 | GCA_000395865.1 | 1157474 | 1352 | Enterococcus faecium EnGen0179 | VRE 13 | Firmicutes | KB948120.1 | 3 | EOG17727.1 | 15224 |
| 849 | GCA_000395885.1 | 1157475 | 1352 | Enterococcus faecium EnGen0180 | VRE 84 | Firmicutes | KB948121.1 | 3 | EOG29141.1 | 15227 |
| 850 | GCA_000396925.1 | 1158543 | 1352 | Enterococcus faecium EnGen0255 | UAA951 | Firmicutes | KB949696.1 | 3 | EOM31821.1 | 15230 |
| 851 | GCA_000399545.1 | 1053235 | 1396 | Bacillus cereus VD140 | VD140 | Firmicutes | KB976803.1 | 2 | EOQ01914.1 | 15233 |
| 852 | GCA_000406925.1 | 1121865 | 1355 | Enterococcus columbae DSM 7374 = | ATCC 51263 | Firmicutes | KE136347.1 | 2 | EOT43559.1 | 15235 |
| | | | | ATCC 51263 | | | | | | |
| 853 | GCA_000407225.1 | 1121865 | 1355 | Enterococcus columbae DSM 7374 = | ATCC 51263 | Firmicutes | KE136492.1 | 2 | EOW87387.1 | 15237 |
| | | | | ATCC 51263 | | | | | | |
| 854 | GCA_000411115.1 | 641143 | 45242 | Capnocytophaga granulosa ATCC 51502 | ATCC 51502 | Bacteroidetes | KE150244.1 | 4 | EPD26424.1 | 15239 |
| 855 | GCA_000415365.1 | 1244150 | 1352 | Enterococcus faecium LA4B-2 | LA4B-2 | Firmicutes | KE352415.1 | 2 | EPI22405.1 | 15243 |
| 856 | GCA_000456145.1 | 1280963 | 562 | Escherichia coli HVH 9 (4-6942539) | HVH 9 (4-6942539) | Proteobacteria | KE698882.1 | 2 | EQN31627.1 | 15245 |
| 857 | GCA_000456585.1 | 1280988 | 562 | Escherichia coli HVH 38 (4-2774682) | HVH 38 (4-2774682) | Proteobacteria | KE699187.1 | 2 | EQO47878.1 | 15247 |
| 858 | GCA_000456745.1 | 1280996 | 562 | Escherichia coli HVH 46 (4-2758776) | HVH 46 (4-2758776) | Proteobacteria | KE699286.1 | 2 | EQO88544.1 | 15249 |
| 859 | GCA_000458275.1 | 1281086 | 562 | Escherichia coli HVH 153 (3-9344314) | HVH 153 (3-9344314) | Proteobacteria | KE700288.1 | 2 | EQS52095.1 | 15251 |
| 860 | GCA_000460435.1 | 1281198 | 562 | Escherichia coli UMEA 3160-1 | UMEA 3160-1 | Proteobacteria | KE701742.1 | 2 | EQX21241.1 | 15253 |
| 861 | GCA_000469405.1 | 888055 | 157687 | Leptotrichia wadei F0279 | F0279 | Fusobacteria | KI271427.1 | 2 | ERK54360.1 | 15255 |
| 862 | GCA_000481425.1 | 1402514 | 287 | Pseudomonas aeruginosa BWHPSA014 | BWHPSA014 | Proteobacteria | KI519076.1 | 3 | ERW54756.1 | 15257 |
| 863 | GCA_000481625.1 | 1402504 | 287 | Pseudomonas aeruginosa BWHPSA004 | BWHPSA004 | Proteobacteria | KI519157.1 | 3 | ERW94009.1 | 15260 |
| 864 | GCA_000507745.1 | 1073373 | 1305 | Streptococcus sanguinis CC94A | CC94A | Firmicutes | KI669394.1 | 3 | ETD07628.1 | 15263 |
| 865 | GCA_000519605.1 | 1391479 | 1351 | Enterococcus faecalis EnGen0409 | EnGen0409 | Firmicutes | KI912997.1 | 3 | ETU12932.1 | 15266 |
| 866 | GCA_000521925.1 | 1400186 | 615 | Serratia marcescens BIDMC 44 | BIDMC 44 | Proteobacteria | KI929263.1 | 2 | ETX46915.1 | 15269 |
| 867 | GCA_000599425.1 | 1348563 | 28901 | Salmonella enterica subsp. enterica serovar | 05-2929 | Proteobacteria | KK082454.1 | 2 | EXX84012.1 | 15271 |
| | | | | Namur str. 05-2929 | | | | | | |
| 868 | GCA_000633715.1 | 1445864 | 615 | Serratia marcescens BIDMC 80 | BIDMC 80 | Proteobacteria | KK214322.1 | 2 | EZQ69339.1 | 15273 |
| 869 | GCA_000636175.1 | 1413352 | 1280 | Staphylococcus aureus 08-01084 | 08-01084 | Firmicutes | KK218077.1 | 3 | EZU15808.1 | 15275 |
| 870 | GCA_000636195.1 | 1413353 | 1280 | Staphylococcus aureus 08-01085 | 08-01085 | Firmicutes | KK218112.1 | 3 | EZU14925.1 | 15278 |
| 871 | GCA_000636215.1 | 1413347 | 1280 | Staphylococcus aureus 08-01728 | 08-01728 | Firmicutes | KK218139.1 | 3 | EZU22369.1 | 15281 |
| 872 | GCA_000636255.1 | 1413597 | 1280 | Staphylococcus aureus 08134-6 | 08134-6 | Firmicutes | KK218219.1 | 3 | EZU24877.1 | 15284 |
| 873 | GCA_000636275.1 | 1413598 | 1280 | Staphylococcus aureus 08139-6 | 08139-6 | Firmicutes | KK218244.1 | 3 | EZU30074.1 | 15287 |
| 874 | GCA_000636295.1 | 1413599 | 1280 | Staphylococcus aureus 08142-8 | 08142-8 | Firmicutes | KK218289.1 | 3 | EZU33076.1 | 15290 |
| 875 | GCA_000636315.1 | 1413600 | 1280 | Staphylococcus aureus 08143-5 | 08143-5 | Firmicutes | KK218349.1 | 3 | EZU39423.1 | 15293 |
| 876 | GCA_000636335.1 | 1413355 | 1280 | Staphylococcus aureus 09S00475 | 09S00475 | Firmicutes | KK218433.1 | 3 | EZU35477.1 | 15296 |
| 877 | GCA_000636355.1 | 1413358 | 1280 | Staphylococcus aureus 10S01493 | 10S01493 | Firmicutes | KK218470.1 | 3 | EZU41791.1 | 15299 |
| 878 | GCA_000636375.1 | 1413423 | 1280 | Staphylococcus aureus 110802495 | 110802495 | Firmicutes | KK218519.1 | 3 | EZU42124.1 | 15302 |
| 879 | GCA_000636395.1 | 1413418 | 1280 | Staphylococcus aureus 1110601704 | 1110601704 | Firmicutes | KK218547.1 | 3 | EZU46569.1 | 15305 |
| 880 | GCA_000636415.1 | 1413419 | 1280 | Staphylococcus aureus 1110601896 | 1110601896 | Firmicutes | KK218599.1 | 3 | EZU46770.1 | 15308 |
| 881 | GCA_000636435.1 | 1413420 | 1280 | Staphylococcus aureus 1110700562 | 1110700562 | Firmicutes | KK218635.1 | 3 | EZU48615.1 | 15311 |
| 882 | GCA_000636455.1 | 1413421 | 1280 | Staphylococcus aureus 1110700610 | 1110700610 | Firmicutes | KK218658.1 | 3 | EZU52018.1 | 15314 |
| 883 | GCA_000636475.1 | 1413422 | 1280 | Staphylococcus aureus 1110701127 | 1110701127 | Firmicutes | KK218690.1 | 3 | EZU55227.1 | 15317 |
| 884 | GCA_000636495.1 | 1413424 | 1280 | Staphylococcus aureus 1110802883 | 1110802883 | Firmicutes | KK218732.1 | 3 | EZU56168.1 | 15320 |
| 885 | GCA_000636535.1 | 1413426 | 1280 | Staphylococcus aureus 1110807699 | 1110807699 | Firmicutes | KK218822.1 | 3 | EZU61337.1 | 15323 |
| 886 | GCA_000636555.1 | 1413427 | 1280 | Staphylococcus aureus 1110904178 | 1110904178 | Firmicutes | KK218847.1 | 3 | EZU65300.1 | 15326 |
| 887 | GCA_000636635.1 | 1413432 | 1280 | Staphylococcus aureus 1111101949 | 1111101949 | Firmicutes | KK219058.1 | 3 | EZU73662.1 | 15329 |
| 888 | GCA_000636655.1 | 1413433 | 1280 | Staphylococcus aureus 1111102620 | 1111102620 | Firmicutes | KK219075.1 | 3 | EZU80187.1 | 15332 |
| 889 | GCA_000636675.1 | 1413434 | 1280 | Staphylococcus aureus 1111200013 | 1111200013 | Firmicutes | KK219116.1 | 3 | EZU80949.1 | 15335 |
| 890 | GCA_000636695.1 | 1413435 | 1280 | Staphylococcus aureus 1111203374 | 1111203374 | Firmicutes | KK219160.1 | 3 | EZU82981.1 | 15338 |
| 891 | GCA_000636715.1 | 1413436 | 1280 | Staphylococcus aureus 1111205429 | 1111205429 | Firmicutes | KK219204.1 | 3 | EZU87062.1 | 15341 |
| 892 | GCA_000636735.1 | 1413437 | 1280 | Staphylococcus aureus 1111206270 | 1111206270 | Firmicutes | KK219261.1 | 3 | EZU88265.1 | 15344 |
| 893 | GCA_000636755.1 | 1413587 | 1280 | Staphylococcus aureus 11P4 | 11P4 | Firmicutes | KK219305.1 | 3 | EZU90294.1 | 15347 |
| 894 | GCA_000636775.1 | 1413588 | 1280 | Staphylococcus aureus 11P8 | 11P8 | Firmicutes | KK219338.1 | 3 | EZU94768.1 | 15350 |
| 895 | GCA_000636815.1 | 1413360 | 1280 | Staphylococcus aureus 11S00627 | 11S00627 | Firmicutes | KK219434.1 | 3 | EZU96101.1 | 15353 |
| 896 | GCA_000636855.1 | 1413363 | 1280 | Staphylococcus aureus 11S01586 | 11S01586 | Firmicutes | KK219518.1 | 3 | EZV02408.1 | 15356 |
| 897 | GCA_000636895.1 | 1413491 | 1280 | Staphylococcus aureus 122 | 122 | Firmicutes | KK219580.1 | 3 | EZV09969.1 | 15359 |
| 898 | GCA_000636915.1 | 1413416 | 1280 | Staphylococcus aureus 12464 | 12464 | Firmicutes | KK219611.1 | 3 | EZV11275.1 | 15362 |
| 899 | GCA_000636955.1 | 1413365 | 1280 | Staphylococcus aureus 12S00579 | 12S00579 | Firmicutes | KK219698.1 | 3 | EZV17198.1 | 15365 |
| 900 | GCA_000636975.1 | 1413366 | 1280 | Staphylococcus aureus 12S00881 | 12S00881 | Firmicutes | KK219743.1 | 3 | EZV18375.1 | 15368 |
| 901 | GCA_000636995.1 | 1413368 | 1280 | Staphylococcus aureus 12S01153 | 12S01153 | Firmicutes | KK219769.1 | 3 | EZV22691.1 | 15371 |
| 902 | GCA_000637015.1 | 1413369 | 1280 | Staphylococcus aureus 12S01399 | 12S01399 | Firmicutes | KK219813.1 | 3 | EZV23635.1 | 15374 |
| 903 | GCA_000637055.1 | 1413371 | 1280 | Staphylococcus aureus 12-ST01988 | 12-ST01988 | Firmicutes | KK219900.1 | 3 | EZV30021.1 | 15377 |
| 904 | GCA_000637095.1 | 1413562 | 1280 | Staphylococcus aureus 14(11MN_17- | 14(11MN_17- | Firmicutes | KK219997.1 | 3 | EZV34240.1 | 15380 |
| | | | | 08-66-05) | 08-66-05) | | | | | |
| 905 | GCA_000637115.1 | 1413401 | 1280 | Staphylococcus aureus 150211/pool 1 | 150211/pool 1 | Firmicutes | KK220038.1 | 3 | EZV37879.1 | 15383 |
| 906 | GCA_000637135.1 | 1413558 | 1280 | Staphylococcus aureus 16(11S1S4-09) | 16(115154-09) | Firmicutes | KK220079.1 | 3 | EZV41499.1 | 15386 |
| 907 | GCA_000637155.1 | 1413402 | 1280 | Staphylococcus aureus 18439-17 | 18439-17 | Firmicutes | KK220114.1 | 3 | EZV40173.1 | 15389 |
| 908 | GCA_000637175.1 | 1413405 | 1280 | Staphylococcus aureus 18439-62 | 18439-62 | Firmicutes | KK220145.1 | 3 | EZV45691.1 | 15392 |
| 909 | GCA_000637215.1 | 1413333 | 1280 | Staphylococcus aureus 19571 | 19571 | Firmicutes | KK220240.1 | 3 | EZV49483.1 | 15395 |
| 910 | GCA_000637235.1 | 1413561 | 1280 | Staphylococcus aureus 2(04HN_17- | 2(04HN_17- | Firmicutes | KK220279.1 | 3 | EZV51743.1 | 15398 |
| | | | | 03-52-05) | 03-52-05) | | | | | |
| 911 | GCA_000637255.1 | 1413519 | 1280 | Staphylococcus aureus 2009-60-561-1 | 2009-60-561-1 | Firmicutes | KK220312.1 | 3 | EZV56161.1 | 15401 |
| 912 | GCA_000637275.1 | 1413514 | 1280 | Staphylococcus aureus 2010-60-1240-1 | 2010-60-1240-1 | Firmicutes | KK220355.1 | 3 | EZV60061.1 | 15404 |
| 913 | GCA_000637295.1 | 1413328 | 1280 | Staphylococcus aureus 2010-60-6063-29 | 2010-60-6063-29 | Firmicutes | KK220412.1 | 3 | EZV56179.1 | 15407 |
| 914 | GCA_000637315.1 | 1413516 | 1280 | Staphylococcus aureus 2010-60-6063-39 | 2010-60-6063-39 | Firmicutes | KK220436.1 | 3 | EZV62995.1 | 15410 |
| 915 | GCA_000637355.1 | 1413517 | 1280 | Staphylococcus aureus 2010-60-6511-39 | 2010-60-6511-39 | Firmicutes | KK220514.1 | 3 | EZV68414.1 | 15413 |
| 916 | GCA_000637395.1 | 1413329 | 1280 | Staphylococcus aureus 2010-60-7626-19 | 2010-60-7626-19 | Firmicutes | KK220613.1 | 3 | EZV73439.1 | 15416 |
| 917 | GCA_000637415.1 | 1413524 | 1280 | Staphylococcus aureus 2011-60-1490-31 | 2011-60-1490-31 | Firmicutes | KK220641.1 | 3 | EZV79302.1 | 15419 |
| 918 | GCA_000637435.1 | 1413523 | 1280 | Staphylococcus aureus 2011-60-2078-5 | 2011-60-2078-5 | Firmicutes | KK220717.1 | 3 | EZV78174.1 | 15422 |
| 919 | GCA_000637455.1 | 1413330 | 1280 | Staphylococcus aureus 2011-60-2256-5 | 2011-60-2256-5 | Firmicutes | KK220763.1 | 3 | EZV80246.1 | 15425 |
| 920 | GCA_000637475.1 | 1413521 | 1280 | Staphylococcus aureus 2011-60-2275-1 | 2011-60-2275-1 | Firmicutes | KK220803.1 | 3 | EZV86033.1 | 15428 |
| 921 | GCA_000637495.1 | 1413334 | 1280 | Staphylococcus aureus 22825 | 22825 | Firmicutes | KK220854.1 | 3 | EZV85085.1 | 15431 |
| 922 | GCA_000637515.1 | 1413336 | 1280 | Staphylococcus aureus 22835 | 22835 | Firmicutes | KK220886.1 | 3 | EZV88945.1 | 15434 |
| 923 | GCA_000637535.1 | 1413337 | 1280 | Staphylococcus aureus 22837 | 22837 | Firmicutes | KK220922.1 | 3 | EZV92667.1 | 15437 |
| 924 | GCA_000637555.1 | 1413338 | 1280 | Staphylococcus aureus 22838 | 22838 | Firmicutes | KK220954.1 | 3 | EZV94448.1 | 15440 |
| 925 | GCA_000637575.1 | 1413339 | 1280 | Staphylococcus aureus 22841 | 22841 | Firmicutes | KK220987.1 | 3 | EZV97126.1 | 15443 |
| 926 | GCA_000637595.1 | 1413340 | 1280 | Staphylococcus aureus 22843 | 22843 | Firmicutes | KK221024.1 | 3 | EZV98957.1 | 15446 |
| 927 | GCA_000637615.1 | 1413341 | 1280 | Staphylococcus aureus 22846 | 22846 | Firmicutes | KK221058.1 | 3 | EZW01628.1 | 15449 |
| 928 | GCA_000637635.1 | 1413438 | 1280 | Staphylococcus aureus 22P79 | 22P79 | Firmicutes | KK221090.1 | 3 | EZW04546.1 | 15452 |
| 929 | GCA_000637655.1 | 1413342 | 1280 | Staphylococcus aureus 23237 | 23237 | Firmicutes | KK221128.1 | 3 | EZW06685.1 | 15455 |
| 930 | GCA_000637675.1 | 1413414 | 1280 | Staphylococcus aureus 2393-15 | 2393-15 | Firmicutes | KK221165.1 | 3 | EZW08828.1 | 15458 |
| 931 | GCA_000637695.1 | 1413415 | 1280 | Staphylococcus aureus 2393-19 | 2393-19 | Firmicutes | KK221201.1 | 3 | EZW10960.1 | 15461 |
| 932 | GCA_000637715.1 | 1413545 | 1280 | Staphylococcus aureus 25(2889) | 25(2889) | Firmicutes | KK221232.1 | 3 | EZW14699.1 | 15464 |
| 933 | GCA_000637735.1 | 1413406 | 1280 | Staphylococcus aureus 27999-3 | 27999-3 | Firmicutes | KK221262.1 | 3 | EZW17376.1 | 15467 |
| 934 | GCA_000637775.1 | 1413589 | 1280 | Staphylococcus aureus 36P1 | 36P1 | Firmicutes | KK221358.1 | 3 | EZW21157.1 | 15470 |
| 935 | GCA_000637795.1 | 1413590 | 1280 | Staphylococcus aureus 36P5 | 36P5 | Firmicutes | KK221386.1 | 3 | EZW24847.1 | 15473 |
| 936 | GCA_000637815.1 | 1413559 | 1280 | Staphylococcus aureus 37(18S2S5-05) | 37(18S2S5-05) | Firmicutes | KK221416.1 | 3 | EZW30609.1 | 15476 |
| 937 | GCA_000637835.1 | 1413592 | 1280 | Staphylococcus aureus 40P10 | 40P10 | Firmicutes | KK221466.1 | 3 | EZW29484.1 | 15479 |
| 938 | GCA_000637855.1 | 1413591 | 1280 | Staphylococcus aureus 40P5 1_1 | 40P5 1_1 | Firmicutes | KK221506.1 | 3 | EZW34093.1 | 15482 |
| 939 | GCA_000637875.1 | 1413593 | 1280 | Staphylococcus aureus 43P3 | 43P3 | Firmicutes | KK221549.1 | 3 | EZW34360.1 | 15485 |
| 940 | GCA_000637895.1 | 1413594 | 1280 | Staphylococcus aureus 43P8 | 43P8 | Firmicutes | KK221571.1 | 3 | EZW38692.1 | 15488 |
| 941 | GCA_000637915.1 | 1413546 | 1280 | Staphylococcus aureus 44(2608) | 44(2608) | Firmicutes | KK221597.1 | 3 | EZW42269.1 | 15491 |
| 942 | GCA_000637935.1 | 1413595 | 1280 | Staphylococcus aureus 47P5 | 47P5 | Firmicutes | KK221644.1 | 3 | EZW41573.1 | 15494 |
| 943 | GCA_000637955.1 | 1413596 | 1280 | Staphylococcus aureus 47P9 | 47P9 | Firmicutes | KK221684.1 | 3 | EZW45924.1 | 15497 |
| 944 | GCA_000637975.1 | 1413384 | 1280 | Staphylococcus aureus 5670-1 | 5670-1 | Firmicutes | KK221721.1 | 3 | EZW48566.1 | 15500 |
| 945 | GCA_000637995.1 | 1413410 | 1280 | Staphylococcus aureus 56824-10 | 56824-10 | Firmicutes | KK221759.1 | 3 | EZW51956.1 | 15503 |
| 946 | GCA_000638015.1 | 1413411 | 1280 | Staphylococcus aureus 56824-15 | 56824-15 | Firmicutes | KK221811.1 | 3 | EZW52897.1 | 15506 |
| 947 | GCA_000638035.1 | 1413407 | 1280 | Staphylococcus aureus 56824-2 | 56824-2 | Firmicutes | KK221853.1 | 3 | EZW54604.1 | 15509 |
| 948 | GCA_000638055.1 | 1413412 | 1280 | Staphylococcus aureus 56824-21 | 56824-21 | Firmicutes | KK221878.1 | 3 | EZW61228.1 | 15512 |
| 949 | GCA_000638075.1 | 1413408 | 1280 | Staphylococcus aureus 56824-5 | 56824-5 | Firmicutes | KK221926.1 | 3 | EZW59349.1 | 15515 |
| 950 | GCA_000638095.1 | 1413409 | 1280 | Staphylococcus aureus 56824-7 | 56824-7 | Firmicutes | KK221958.1 | 3 | EZW64575.1 | 15518 |
| 951 | GCA_000638135.1 | 1413385 | 1280 | Staphylococcus aureus 6665-5 | 6665-5 | Firmicutes | KK222053.1 | 3 | EZW67819.1 | 15521 |
| 952 | GCA_000638155.1 | 1413395 | 1280 | Staphylococcus aureus 75495-3 | 75495-3 | Firmicutes | KK222088.1 | 3 | EZW72066.1 | 15524 |
| 953 | GCA_000638175.1 | 1413396 | 1280 | Staphylococcus aureus 76669-6 | 76669-6 | Firmicutes | KK222133.1 | 3 | EZW73745.1 | 15527 |
| 954 | GCA_000638215.1 | 1413324 | 1280 | Staphylococcus aureus 81070 | 81070 | Firmicutes | KK222240.1 | 3 | EZW78367.1 | 15530 |
| 955 | GCA_000638235.1 | 1413397 | 1280 | Staphylococcus aureus 84069-2 | 84069-2 | Firmicutes | KK222292.1 | 3 | EZW78068.1 | 15533 |
| 956 | GCA_000638255.1 | 1413398 | 1280 | Staphylococcus aureus 86770-7 | 86770-7 | Firmicutes | KK222314.1 | 3 | EZW85425.1 | 15536 |
| 957 | GCA_000638275.1 | 1413389 | 1280 | Staphylococcus aureus 87807-1 | 87807-1 | Firmicutes | KK222349.1 | 3 | EZW86269.1 | 15539 |
| 958 | GCA_000638295.1 | 1413390 | 1280 | Staphylococcus aureus 87807-11 | 87807-11 | Firmicutes | KK222381.1 | 3 | EZW90701.1 | 15542 |
| 959 | GCA_000638315.1 | 1413392 | 1280 | Staphylococcus aureus 87807-12 | 87807-12 | Firmicutes | KK222425.1 | 3 | EZW93348.1 | 15545 |
| 960 | GCA_000638335.1 | 1413393 | 1280 | Staphylococcus aureus 87807-16 | 87807-16 | Firmicutes | KK222467.1 | 3 | EZW94212.1 | 15548 |
| 961 | GCA_000638355.1 | 1413391 | 1280 | Staphylococcus aureus 87807-9 | 87807-9 | Firmicutes | KK222503.1 | 3 | EZW97015.1 | 15551 |
| 962 | GCA_000638375.1 | 1413399 | 1280 | Staphylococcus aureus 88088-1 | 88088-1 | Firmicutes | KK222532.1 | 3 | EZX00539.1 | 15554 |
| 963 | GCA_000638395.1 | 1413400 | 1280 | Staphylococcus aureus 88088-2 | 88088-2 | Firmicutes | KK222577.1 | 3 | EZX02277.1 | 15557 |
| 964 | GCA_000638415.1 | 1413586 | 1280 | Staphylococcus aureus 9P9 | 9P9 | Firmicutes | KK222619.1 | 3 | EZX04400.1 | 15560 |
| 965 | GCA_000638435.1 | 1413383 | 1280 | Staphylococcus aureus BG407 | BG407 | Firmicutes | KK222651.1 | 3 | EZX08872.1 | 15563 |
| 966 | GCA_000638475.1 | 1413509 | 1280 | Staphylococcus aureus C0637 | C0637 | Firmicutes | KK222726.1 | 3 | EZX10608.1 | 15566 |
| 967 | GCA_000638515.1 | 1413466 | 1280 | Staphylococcus aureus C1655 | C1655 | Firmicutes | KK222789.1 | 3 | EZX16970.1 | 15569 |
| 968 | GCA_000638535.1 | 1413470 | 1280 | Staphylococcus aureus C1673 | C1673 | Firmicutes | KK222826.1 | 3 | EZX19510.1 | 15572 |
| 969 | GCA_000638555.1 | 1413461 | 1280 | Staphylococcus aureus C1842 | C1842 | Firmicutes | KK222863.1 | 3 | EZX23730.1 | 15575 |
| 970 | GCA_000638575.1 | 1413458 | 1280 | Staphylococcus aureus C1891 | C1891 | Firmicutes | KK222914.1 | 3 | EZX26911.1 | 15578 |
| 971 | GCA_000638595.1 | 1413459 | 1280 | Staphylococcus aureus C1894 | C1894 | Firmicutes | KK222954.1 | 3 | EZX30320.1 | 15581 |
| 972 | GCA_000638615.1 | 1413481 | 1280 | Staphylococcus aureus C2549 | C2549 | Firmicutes | KK222984.1 | 3 | EZX30781.1 | 15584 |
| 973 | GCA_000638635.1 | 1413482 | 1280 | Staphylococcus aureus C2679 | C2679 | Firmicutes | KK223018.1 | 3 | EZX33812.1 | 15587 |
| 974 | GCA_000638655.1 | 1413467 | 1280 | Staphylococcus aureus C2706 | C2706 | Firmicutes | KK223042.1 | 3 | EZX38408.1 | 15590 |
| 975 | GCA_000638675.1 | 1413474 | 1280 | Staphylococcus aureus C2928 | C2928 | Firmicutes | KK223082.1 | 3 | EZX39864.1 | 15593 |
| 976 | GCA_000638695.1 | 1413472 | 1280 | Staphylococcus aureus C2930 | C2930 | Firmicutes | KK223136.1 | 3 | EZX38524.1 | 15596 |
| 977 | GCA_000638715.1 | 1413475 | 1280 | Staphylococcus aureus C2942 | C2942 | Firmicutes | KK223163.1 | 3 | EZX45515.1 | 15599 |
| 978 | GCA_000638735.1 | 1413454 | 1280 | Staphylococcus aureus C3489 | C3489 | Firmicutes | KK223216.1 | 3 | EZX46731.1 | 15602 |
| 979 | GCA_000638755.1 | 1413476 | 1280 | Staphylococcus aureus C3672 | C3672 | Firmicutes | KK223267.1 | 3 | EZX48305.1 | 15605 |
| 980 | GCA_000638775.1 | 1413456 | 1280 | Staphylococcus aureus C3865 | C3865 | Firmicutes | KK223311.1 | 3 | EZX53235.1 | 15608 |
| 981 | GCA_000638795.1 | 1413483 | 1280 | Staphylococcus aureus C3965 | C3965 | Firmicutes | KK223341.1 | 3 | EZX53550.1 | 15611 |
| 982 | GCA_000638815.1 | 1413477 | 1280 | Staphylococcus aureus C4151 | C4151 | Firmicutes | KK223372.1 | 3 | EZX56516.1 | 15614 |
| 983 | GCA_000638835.1 | 1413471 | 1280 | Staphylococcus aureus C4155 | C4155 | Firmicutes | KK223399.1 | 3 | EZX60548.1 | 15617 |
| 984 | GCA_000638855.1 | 1413457 | 1280 | Staphylococcus aureus C4668 | C4668 | Firmicutes | KK223430.1 | 3 | EZX62512.1 | 15620 |
| 985 | GCA_000638875.1 | 1413455 | 1280 | Staphylococcus aureus C5086 | C5086 | Firmicutes | KK223462.1 | 3 | EZX64345.1 | 15623 |
| 986 | GCA_000638895.1 | 1413480 | 1280 | Staphylococcus aureus C5453 | C5453 | Firmicutes | KK223489.1 | 3 | EZX67972.1 | 15626 |
| 987 | GCA_000638915.1 | 1413549 | 1280 | Staphylococcus aureus Chi-10 | Chi-10 | Firmicutes | KK223517.1 | 3 | EZX70983.1 | 15629 |
| 988 | GCA_000638935.1 | 1413548 | 1280 | Staphylococcus aureus Chi-4 | Chi-4 | Firmicutes | KK223557.1 | 3 | EZX70899.1 | 15632 |
| 989 | GCA_000638955.1 | 1413550 | 1280 | Staphylococcus aureus Chi-8 | Chi-8 | Firmicutes | KK223582.1 | 3 | EZX78545.1 | 15635 |
| 990 | GCA_000638975.1 | 1413577 | 1280 | Staphylococcus aureus DICM09/ | DICM09/ | Firmicutes | KK223626.1 | 3 | EZX83217.1 | 15638 |
| | | | | 00997-9HST2 | 00997-9HST2 | | | | | |
| 991 | GCA_000638995.1 | 1413580 | 1280 | Staphylococcus aureus DICM09/ | DICM09/ | Firmicutes | KK223686.1 | 3 | EZX78168.1 | 15641 |
| | | | | 01587-13HST | 01587-13HST | | | | | |
| 992 | GCA_000639015.1 | 1413439 | 1280 | Staphylococcus aureus FP_N239 | FP_N239 | Firmicutes | KK223720.1 | 3 | EZX83512.1 | 15644 |
| 993 | GCA_000639035.1 | 1413440 | 1280 | Staphylococcus aureus FP_N5203 OX | FP_N5203 OX | Firmicutes | KK223754.1 | 3 | EZX85564.1 | 15647 |
| 994 | GCA_000639055.1 | 1413441 | 1280 | Staphylococcus aureus FP_N5208 OX | FP_N5208 OX | Firmicutes | KK223787.1 | 3 | EZX88439.1 | 15650 |
| 995 | GCA_000639075.1 | 1413567 | 1280 | Staphylococcus aureus GD2010-052 | GD2010-052 | Firmicutes | KK223829.1 | 3 | EZX90794.1 | 15653 |
| 996 | GCA_000639095.1 | 1413568 | 1280 | Staphylococcus aureus GD2010-061 | GD2010-061 | Firmicutes | KK223867.1 | 3 | EZX93307.1 | 15656 |
| 997 | GCA_000639115.1 | 1413526 | 1280 | Staphylococcus aureus GD2010-090 | GD2010-090 | Firmicutes | KK223898.1 | 3 | EZX97302.1 | 15659 |
| 998 | GCA_000639135.1 | 1413569 | 1280 | Staphylococcus aureus GD2010-102 | GD2010-102 | Firmicutes | KK223946.1 | 3 | EZX98401.1 | 15662 |
| 999 | GCA_000639155.1 | 1413528 | 1280 | Staphylococcus aureus GD2010-107 | GD2010-107 | Firmicutes | KK223977.1 | 3 | EZY04106.1 | 15665 |
| 1000 | GCA_000639175.1 | 1413527 | 1280 | Staphylococcus aureus GD2010-110 | GD2010-110 | Firmicutes | KK224019.1 | 3 | EZY04548.1 | 15668 |
| 1001 | GCA_000639195.1 | 1413530 | 1280 | Staphylococcus aureus GD2010-112 | GD2010-112 | Firmicutes | KK224053.1 | 3 | EZY06602.1 | 15671 |
| 1002 | GCA_000639215.1 | 1413529 | 1280 | Staphylococcus aureus GD2010-115 | GD2010-115 | Firmicutes | KK224086.1 | 3 | EZY11332.1 | 15674 |
| 1003 | GCA_000639235.1 | 1413531 | 1280 | Staphylococcus aureus GD2010-131 | GD2010-131 | Firmicutes | KK224135.1 | 3 | EZY13792.1 | 15677 |
| 1004 | GCA_000639255.1 | 1413532 | 1280 | Staphylococcus aureus GD2010-147 | GD2010-147 | Firmicutes | KK224189.1 | 3 | EZY14132.1 | 15680 |
| 1005 | GCA_000639275.1 | 1413533 | 1280 | Staphylococcus aureus GD2010-155 | GD2010-155 | Firmicutes | KK224222.1 | 3 | EZY14216.1 | 15683 |
| 1006 | GCA_000639295.1 | 1413534 | 1280 | Staphylococcus aureus GD2010-158 | GD2010-158 | Firmicutes | KK224237.1 | 3 | EZY21814.1 | 15686 |
| 1007 | GCA_000639315.1 | 1413537 | 1280 | Staphylococcus aureus GD2010-168 | GD2010-168 | Firmicutes | KK224279.1 | 3 | EZY21674.1 | 15689 |
| 1008 | GCA_000639335.1 | 1413525 | 1280 | Staphylococcus aureus GD2010-177 | GD2010-177 | Firmicutes | KK224318.1 | 3 | EZY24519.1 | 15692 |
| 1009 | GCA_000639355.1 | 1413323 | 1280 | Staphylococcus aureus M118-B | M118-B | Firmicutes | KK224362.1 | 3 | EZY26573.1 | 15695 |
| 1010 | GCA_000639375.1 | 1413442 | 1280 | Staphylococcus aureus M267-1 | M267-1 | Firmicutes | KK224385.1 | 3 | EZY29473.1 | 15698 |
| 1011 | GCA_000639395.1 | 1413443 | 1280 | Staphylococcus aureus M357 | M357 | Firmicutes | KK224412.1 | 3 | EZY31974.1 | 15701 |
| 1012 | GCA_000639415.1 | 1413444 | 1280 | Staphylococcus aureus M457-1 | M457-1 | Firmicutes | KK224434.1 | 3 | EZY36828.1 | 15704 |
| 1013 | GCA_000639435.1 | 1413445 | 1280 | Staphylococcus aureus M520-1 | M520-1 | Firmicutes | KK224471.1 | 3 | EZY36641.1 | 15707 |
| 1014 | GCA_000639455.1 | 1413495 | 1280 | Staphylococcus aureus MRSA-118 | MRSA-118 | Firmicutes | KK224503.1 | 3 | EZY38136.1 | 15710 |
| 1015 | GCA_000639475.1 | 1413497 | 1280 | Staphylococcus aureus MRSA-136 | MRSA-136 | Firmicutes | KK224533.1 | 3 | EZY43514.1 | 15713 |
| 1016 | GCA_000639495.1 | 1413492 | 1280 | Staphylococcus aureus MSSA-93 | MSSA-93 | Firmicutes | KK224580.1 | 3 | EZY44867.1 | 15716 |
| 1017 | GCA_000639515.1 | 1413498 | 1280 | Staphylococcus aureus N0426 | N0426 | Firmicutes | KK224621.1 | 3 | EZY46959.1 | 15719 |
| 1018 | GCA_000639535.1 | 1413499 | 1280 | Staphylococcus aureus N1343 | N1343 | Firmicutes | KK224655.1 | 3 | EZY51217.1 | 15722 |
| 1019 | GCA_000639555.1 | 1413512 | 1280 | Staphylococcus aureus P0218 | P0218 | Firmicutes | KK224694.1 | 3 | EZY52189.1 | 15725 |
| 1020 | GCA_000639575.1 | 1413489 | 1280 | Staphylococcus aureus PA11 | PA11 | Firmicutes | KK224731.1 | 3 | EZY54364.1 | 15728 |
| 1021 | GCA_000639595.1 | 1413490 | 1280 | Staphylococcus aureus PA57 | PA57 | Firmicutes | KK224756.1 | 3 | EZY58964.1 | 15731 |
| 1022 | GCA_000639635.1 | 1413501 | 1280 | Staphylococcus aureus R0353 | R0353 | Firmicutes | KK224861.1 | 3 | EZY61861.1 | 15734 |
| 1023 | GCA_000639655.1 | 1413502 | 1280 | Staphylococcus aureus R0357 | R0357 | Firmicutes | KK224908.1 | 3 | EZY66174.1 | 15737 |
| 1024 | GCA_000639675.1 | 1413503 | 1280 | Staphylococcus aureus R0487 | R0487 | Firmicutes | KK224950.1 | 3 | EZY70311.1 | 15740 |
| 1025 | GCA_000639695.1 | 1413504 | 1280 | Staphylococcus aureus R0545 | R0545 | Firmicutes | KK225002.1 | 3 | EZY70617.1 | 15743 |
| 1026 | GCA_000639715.1 | 1413505 | 1280 | Staphylococcus aureus R0611 | R0611 | Firmicutes | KK225056.1 | 3 | EZY75196.1 | 15746 |
| 1027 | GCA_000639735.1 | 1413506 | 1280 | Staphylococcus aureus R0615 | R0615 | Firmicutes | KK225109.1 | 3 | EZY78995.1 | 15749 |
| 1028 | GCA_000639755.1 | 1413538 | 1280 | Staphylococcus aureus Rd.3 | Rd.3 | Firmicutes | KK225169.1 | 3 | EZY77812.1 | 15752 |
| 1029 | GCA_000639775.1 | 1413540 | 1280 | Staphylococcus aureus Rd.40 | Rd.40 | Firmicutes | KK225209.1 | 3 | EZY80413.1 | 15755 |
| 1030 | GCA_000639795.1 | 1413541 | 1280 | Staphylococcus aureus Rd.51 | Rd.51 | Firmicutes | KK225236.1 | 3 | EZY85273.1 | 15758 |
| 1031 | GCA_000639815.1 | 1413563 | 1280 | Staphylococcus aureus Rd.545 | Rd.545 | Firmicutes | KK225257.1 | 3 | EZY90749.1 | 15761 |
| 1032 | GCA_000639835.1 | 1413542 | 1280 | Staphylococcus aureus Rd.60 | Rd.60 | Firmicutes | KK225318.1 | 3 | EZY86733.1 | 15764 |
| 1033 | GCA_000639855.1 | 1413564 | 1280 | Staphylococcus aureus Rd.614 | Rd.614 | Firmicutes | KK225337.1 | 3 | EZY93710.1 | 15767 |
| 1034 | GCA_000639875.1 | 1413539 | 1280 | Staphylococcus aureus Rd.9 | Rd.9 | Firmicutes | KK225372.1 | 3 | EZY96337.1 | 15770 |
| 1035 | GCA_000639895.1 | 1413484 | 1280 | Staphylococcus aureus S56_POEL | S56_POEL | Firmicutes | KK225426.1 | 3 | EZY99137.1 | 15773 |
| 1036 | GCA_000639915.1 | 1413485 | 1280 | Staphylococcus aureus S62_POEL | S62_POEL | Firmicutes | KK225491.1 | 3 | EZZ00577.1 | 15776 |
| 1037 | GCA_000639935.1 | 1413488 | 1280 | Staphylococcus aureus S69_POEL | S69_POEL | Firmicutes | KK225547.1 | 3 | EZZ04415.1 | 15779 |
| 1038 | GCA_000639955.1 | 1413446 | 1280 | Staphylococcus aureus SARM C4155 | SARM C4155 | Firmicutes | KK225609.1 | 3 | EZZ04097.1 | 15782 |
| 1039 | GCA_000639975.1 | 1413447 | 1280 | Staphylococcus aureus SARM C5621 | SARM C5621 | Firmicutes | KK225630.1 | 3 | EZZ07028.1 | 15785 |
| 1040 | GCA_000639995.1 | 1413382 | 1280 | Staphylococcus aureus Sau 194 | Sau 194 | Firmicutes | KK225664.1 | 3 | EZZ11502.1 | 15788 |
| 1041 | GCA_000640015.1 | 1413374 | 1280 | Staphylococcus aureus Sau 44 | Sau 44 | Firmicutes | KK225696.1 | 3 | EZZ12223.1 | 15791 |
| 1042 | GCA_000640035.1 | 1413375 | 1280 | Staphylococcus aureus Sau 46 | Sau 46 | Firmicutes | KK225732.1 | 3 | EZZ13376.1 | 15794 |
| 1043 | GCA_000640055.1 | 1413376 | 1280 | Staphylococcus aureus Sau 47 | Sau 47 | Firmicutes | KK225762.1 | 3 | EZZ20017.1 | 15797 |
| 1044 | GCA_000640075.1 | 1413377 | 1280 | Staphylococcus aureus Sau 74 | Sau 74 | Firmicutes | KK225802.1 | 3 | EZZ20493.1 | 15800 |
| 1045 | GCA_000640095.1 | 1413378 | 1280 | Staphylococcus aureus Sau 93 | Sau 93 | Firmicutes | KK225836.1 | 3 | EZZ22879.1 | 15803 |
| 1046 | GCA_000640115.1 | 1413379 | 1280 | Staphylococcus aureus Sau 95 | Sau 95 | Firmicutes | KK225869.1 | 3 | EZZ27504.1 | 15806 |
| 1047 | GCA_000640135.1 | 1413380 | 1280 | Staphylococcus aureus Sau 98 | Sau 98 | Firmicutes | KK225900.1 | 3 | EZZ27419.1 | 15809 |
| 1048 | GCA_000640175.1 | 1413555 | 1280 | Staphylococcus aureus Tur-12 | Tur-12 | Firmicutes | KK225980.1 | 3 | EZZ33553.1 | 15812 |
| 1049 | GCA_000640195.1 | 1413556 | 1280 | Staphylococcus aureus Tur-15 | Tur-15 | Firmicutes | KK226022.1 | 3 | EZZ35199.1 | 15815 |
| 1050 | GCA_000640215.1 | 1413373 | 1280 | Staphylococcus aureus Tur-16 | Tur-16 | Firmicutes | KK226052.1 | 3 | EZZ38883.1 | 15818 |
| 1051 | GCA_000640235.1 | 1413551 | 1280 | Staphylococcus aureus Tur-20 | Tur-20 | Firmicutes | KK226092.1 | 3 | EZZ42314.1 | 15821 |
| 1052 | GCA_000640255.1 | 1413552 | 1280 | Staphylococcus aureus Tur-22 | Tur-22 | Firmicutes | KK226129.1 | 3 | EZZ43690.1 | 15824 |
| 1053 | GCA_000640275.1 | 1413554 | 1280 | Staphylococcus aureus Tur-6 | Tur-6 | Firmicutes | KK226169.1 | 3 | EZZ46493.1 | 15827 |
| 1054 | GCA_000640295.1 | 1413331 | 1280 | Staphylococcus aureus UB 08-116 | UB 08-116 | Firmicutes | KK226203.1 | 3 | EZZ50763.1 | 15830 |
| 1055 | GCA_000640315.1 | 1413332 | 1280 | Staphylococcus aureus UB 08-172 | UB 08-172 | Firmicutes | KK226235.1 | 3 | EZZ51037.1 | 15833 |
| 1056 | GCA_000640335.1 | 1413602 | 1280 | Staphylococcus aureus USA_1 | USA_1 | Firmicutes | KK226264.1 | 3 | EZZ53438.1 | 15836 |
| 1057 | GCA_000640355.1 | 1413607 | 1280 | Staphylococcus aureus USA_11 | USA_11 | Firmicutes | KK226275.1 | 3 | EZZ62216.1 | 15839 |
| 1058 | GCA_000640375.1 | 1413608 | 1280 | Staphylococcus aureus USA_12 | USA_12 | Firmicutes | KK226308.1 | 3 | EZZ58809.1 | 15842 |
| 1059 | GCA_000640395.1 | 1413609 | 1280 | Staphylococcus aureus USA_15 | USA_15 | Firmicutes | KK226326.1 | 3 | EZZ63777.1 | 15845 |
| 1060 | GCA_000640415.1 | 1413605 | 1280 | Staphylococcus aureus USA_8 | USA_8 | Firmicutes | KK226363.1 | 3 | EZZ66976.1 | 15848 |
| 1061 | GCA_000640435.1 | 1413606 | 1280 | Staphylococcus aureus USA_9 | USA_9 | Firmicutes | KK226405.1 | 3 | EZZ65105.1 | 15851 |
| 1062 | GCA_000640455.1 | 1413604 | 1280 | Staphylococcus aureus USA7 | USA7 | Firmicutes | KK226422.1 | 3 | EZZ70714.1 | 15854 |
| 1063 | GCA_000640475.1 | 1413448 | 1280 | Staphylococcus aureus VE07/03048STA | VE07/03048STA | Firmicutes | KK226453.1 | 3 | EZZ73603.1 | 15857 |
| 1064 | GCA_000640495.1 | 1413449 | 1280 | Staphylococcus aureus VE08/02126ST1 | VE08/02126ST1 | Firmicutes | KK226495.1 | 3 | EZZ75114.1 | 15860 |
| 1065 | GCA_000640515.1 | 1413451 | 1280 | Staphylococcus aureus VE08/02244ST1 | VE08/02244ST1 | Firmicutes | KK226529.1 | 3 | EZZ75511.1 | 15863 |
| 1066 | GCA_000640535.1 | 1422391 | 1280 | Staphylococcus aureus VET0051R | VET0051R | Firmicutes | KK226556.1 | 3 | EZZ82800.1 | 15866 |
| 1067 | GCA_000640555.1 | 1422392 | 1280 | Staphylococcus aureus VET0052R | VET0052R | Firmicutes | KK226598.1 | 3 | EZZ83623.1 | 15869 |
| 1068 | GCA_000640575.1 | 1422393 | 1280 | Staphylococcus aureus VET0053R | VET0053R | Firmicutes | KK226639.1 | 3 | EZZ82655.1 | 15872 |
| 1069 | GCA_000640595.1 | 1422394 | 1280 | Staphylococcus aureus VET0054R | VET0054R | Firmicutes | KK226674.1 | 3 | EZZ89015.1 | 15875 |
| 1070 | GCA_000640615.1 | 1422395 | 1280 | Staphylococcus aureus VET0055R | VET0055R | Firmicutes | KK226711.1 | 3 | EZZ92962.1 | 15878 |
| 1071 | GCA_000640635.1 | 1422396 | 1280 | Staphylococcus aureus VET0057R | VET0057R | Firmicutes | KK226773.1 | 3 | EZZ92684.1 | 15881 |
| 1072 | GCA_000640655.1 | 1422398 | 1280 | Staphylococcus aureus VET0059R | VET0059R | Firmicutes | KK226834.1 | 3 | EZZ95684.1 | 15884 |
| 1073 | GCA_000640675.1 | 1422399 | 1280 | Staphylococcus aureus VET0060R | VET0060R | Firmicutes | KK226872.1 | 3 | KAA05377.1 | 15887 |
| 1074 | GCA_000640695.1 | 1422400 | 1280 | Staphylococcus aureus VET0061R | VET0061R | Firmicutes | KK226919.1 | 3 | KAA05544.1 | 15890 |
| 1075 | GCA_000640715.1 | 1422401 | 1280 | Staphylococcus aureus VET0062R | VET0062R | Firmicutes | KK226958.1 | 3 | KAA05953.1 | 15893 |
| 1076 | GCA_000640735.1 | 1422402 | 1280 | Staphylococcus aureus VET0063R | VET0063R | Firmicutes | KK226999.1 | 3 | KAA13000.1 | 15896 |
| 1077 | GCA_000640755.1 | 1422403 | 1280 | Staphylococcus aureus VET0065R | VET0065R | Firmicutes | KK227042.1 | 3 | KAA12393.1 | 15899 |
| 1078 | GCA_000640775.1 | 1422404 | 1280 | Staphylococcus aureus VET0066R | VET0066R | Firmicutes | KK227076.1 | 3 | KAA13619.1 | 15902 |
| 1079 | GCA_000640795.1 | 1422405 | 1280 | Staphylococcus aureus VET0067R | VET0067R | Firmicutes | KK227106.1 | 3 | KAA22643.1 | 15905 |
| 1080 | GCA_000640815.1 | 1422406 | 1280 | Staphylococcus aureus VET0069R | VET0069R | Firmicutes | KK227159.1 | 3 | KAA21033.1 | 15908 |
| 1081 | GCA_000640835.1 | 1422407 | 1280 | Staphylococcus aureus VET0070R | VET0070R | Firmicutes | KK227206.1 | 3 | KAA21282.1 | 15911 |
| 1082 | GCA_000640855.1 | 1422408 | 1280 | Staphylococcus aureus VET0072R | VET0072R | Firmicutes | KK227240.1 | 3 | KAA28470.1 | 15914 |
| 1083 | GCA_000640875.1 | 1422409 | 1280 | Staphylococcus aureus VET0073R | VET0073R | Firmicutes | KK227288.1 | 3 | KAA29978.1 | 15917 |
| 1084 | GCA_000640895.1 | 1422410 | 1280 | Staphylococcus aureus VET0075R | VET0075R | Firmicutes | KK227338.1 | 3 | KAA28571.1 | 15920 |
| 1085 | GCA_000640915.1 | 1422411 | 1280 | Staphylococcus aureus VET0076R | VET0076R | Firmicutes | KK227375.1 | 3 | KAA35386.1 | 15923 |
| 1086 | GCA_000640935.1 | 1422412 | 1280 | Staphylococcus aureus VET0077R | VET0077R | Firmicutes | KK227403.1 | 3 | KAA38915.1 | 15926 |
| 1087 | GCA_000640955.1 | 1422414 | 1280 | Staphylococcus aureus VET0080R | VET0080R | Firmicutes | KK227448.1 | 3 | KAA39462.1 | 15929 |
| 1088 | GCA_000640975.1 | 1422416 | 1280 | Staphylococcus aureus VET0083R | VET0083R | Firmicutes | KK227491.1 | 3 | KAA42954.1 | 15932 |
| 1089 | GCA_000640995.1 | 1422417 | 1280 | Staphylococcus aureus VET0084R | VET0084R | Firmicutes | KK227523.1 | 3 | KAA45225.1 | 15935 |
| 1090 | GCA_000641015.1 | 1422418 | 1280 | Staphylococcus aureus VET0085R | VET0085R | Firmicutes | KK227565.1 | 3 | KAA46801.1 | 15938 |
| 1091 | GCA_000641035.1 | 1422419 | 1280 | Staphylococcus aureus VET0086R | VET0086R | Firmicutes | KK227605.1 | 3 | KAA49913.1 | 15941 |
| 1092 | GCA_000641055.1 | 1422420 | 1280 | Staphylococcus aureus VET0087R | VET0087R | Firmicutes | KK227638.1 | 3 | KAA51796.1 | 15944 |
| 1093 | GCA_000641075.1 | 1422421 | 1280 | Staphylococcus aureus VET0088R | VET0088R | Firmicutes | KK227658.1 | 3 | KAA59416.1 | 15947 |
| 1094 | GCA_000641095.1 | 1422422 | 1280 | Staphylococcus aureus VET0089R | VET0089R | Firmicutes | KK227710.1 | 3 | KAA58407.1 | 15950 |
| 1095 | GCA_000641115.1 | 1422423 | 1280 | Staphylococcus aureus VET0090R | VET0090R | Firmicutes | KK227736.1 | 3 | KAA61962.1 | 15953 |
| 1096 | GCA_000641135.1 | 1422424 | 1280 | Staphylococcus aureus VET0091R | VET0091R | Firmicutes | KK227783.1 | 3 | KAA63552.1 | 15956 |
| 1097 | GCA_000641155.1 | 1422425 | 1280 | Staphylococcus aureus VET0092R | VET0092R | Firmicutes | KK227826.1 | 3 | KAA66140.1 | 15959 |
| 1098 | GCA_000641175.1 | 1422426 | 1280 | Staphylococcus aureus VET0093R | VET0093R | Firmicutes | KK227870.1 | 3 | KAA68224.1 | 15962 |
| 1099 | GCA_000641195.1 | 1422427 | 1280 | Staphylococcus aureus VET0094R | VET0094R | Firmicutes | KK227907.1 | 3 | KAA73513.1 | 15965 |
| 1100 | GCA_000641215.1 | 1422428 | 1280 | Staphylococcus aureus VET0095R | VET0095R | Firmicutes | KK227954.1 | 3 | KAA74080.1 | 15968 |
| 1101 | GCA_000641235.1 | 1422429 | 1280 | Staphylococcus aureus VET0097R | VET0097R | Firmicutes | KK227993.1 | 3 | KAA76198.1 | 15971 |
| 1102 | GCA_000641255.1 | 1422430 | 1280 | Staphylococcus aureus VET0098R | VET0098R | Firmicutes | KK228029.1 | 3 | KAA79422.1 | 15974 |
| 1103 | GCA_000641275.1 | 1422431 | 1280 | Staphylococcus aureus VET0099R | VET0099R | Firmicutes | KK228070.1 | 3 | KAA82180.1 | 15977 |
| 1104 | GCA_000641295.1 | 1422432 | 1280 | Staphylococcus aureus VET0101R | VET0101R | Firmicutes | KK228126.1 | 3 | KAA82201.1 | 15980 |
| 1105 | GCA_000641315.1 | 1422434 | 1280 | Staphylococcus aureus VET0103R | VET0103R | Firmicutes | KK228153.1 | 3 | KAA86323.1 | 15983 |
| 1106 | GCA_000641335.1 | 1422435 | 1280 | Staphylococcus aureus VET0104R | VET0104R | Firmicutes | KK228187.1 | 3 | KAA89640.1 | 15986 |
| 1107 | GCA_000641355.1 | 1422436 | 1280 | Staphylococcus aureus VET0105R | VET0105R | Firmicutes | KK228218.1 | 3 | KAA93204.1 | 15989 |
| 1108 | GCA_000641375.1 | 1422437 | 1280 | Staphylococcus aureus VET0107R | VET0107R | Firmicutes | KK228279.1 | 3 | KAA93403.1 | 15992 |
| 1109 | GCA_000641395.1 | 1422438 | 1280 | Staphylococcus aureus VET0110R | VET0110R | Firmicutes | KK228324.1 | 3 | KAA96433.1 | 15995 |
| 1110 | GCA_000641415.1 | 1422440 | 1280 | Staphylococcus aureus VET0112R | VET0112R | Firmicutes | KK228363.1 | 3 | KAB00569.1 | 15998 |
| 1111 | GCA_000641435.1 | 1422442 | 1280 | Staphylococcus aureus VET0114R | VET0114R | Firmicutes | KK228395.1 | 3 | KAB03847.1 | 16001 |
| 1112 | GCA_000641455.1 | 1422443 | 1280 | Staphylococcus aureus VET0115R | VET0115R | Firmicutes | KK228451.1 | 3 | KAB06658.1 | 16004 |
| 1113 | GCA_000641475.1 | 1422444 | 1280 | Staphylococcus aureus VET0116R | VET0116R | Firmicutes | KK228505.1 | 3 | KAB08922.1 | 16007 |
| 1114 | GCA_000641495.1 | 1422445 | 1280 | Staphylococcus aureus VET0117R | VET0117R | Firmicutes | KK228551.1 | 3 | KAB10432.1 | 16010 |
| 1115 | GCA_000641515.1 | 1422446 | 1280 | Staphylococcus aureus VET0119R | VET0119R | Firmicutes | KK228588.1 | 3 | KAB11616.1 | 16013 |
| 1116 | GCA_000641535.1 | 1422448 | 1280 | Staphylococcus aureus VET0123R | VET0123R | Firmicutes | KK228618.1 | 3 | KAB16350.1 | 16016 |
| 1117 | GCA_000641555.1 | 1422449 | 1280 | Staphylococcus aureus VET0124R | VET0124R | Firmicutes | KK228659.1 | 3 | KAB18689.1 | 16019 |
| 1118 | GCA_000641575.1 | 1422451 | 1280 | Staphylococcus aureus VET0126R | VET0126R | Firmicutes | KK228701.1 | 3 | KAB19935.1 | 16022 |
| 1119 | GCA_000641595.1 | 1422452 | 1280 | Staphylococcus aureus VET0127R | VET0127R | Firmicutes | KK228748.1 | 3 | KAB24080.1 | 16025 |
| 1120 | GCA_000641615.1 | 1422453 | 1280 | Staphylococcus aureus VET0128R | VET0128R | Firmicutes | KK228781.1 | 3 | KAB29327.1 | 16028 |
| 1121 | GCA_000641635.1 | 1422454 | 1280 | Staphylococcus aureus VET0129R | VET0129R | Firmicutes | KK228823.1 | 3 | KAB29477.1 | 16031 |
| 1122 | GCA_000641655.1 | 1422455 | 1280 | Staphylococcus aureus VET0130R | VET0130R | Firmicutes | KK228852.1 | 3 | KAB32012.1 | 16034 |
| 1123 | GCA_000641675.1 | 1422456 | 1280 | Staphylococcus aureus VET0132R | VET0132R | Firmicutes | KK228890.1 | 3 | KAB33825.1 | 16037 |
| 1124 | GCA_000641695.1 | 1422457 | 1280 | Staphylococcus aureus VET0133R | VET0133R | Firmicutes | KK228932.1 | 3 | KAB37793.1 | 16040 |
| 1125 | GCA_000641715.1 | 1422458 | 1280 | Staphylococcus aureus VET0134R | VET0134R | Firmicutes | KK228988.1 | 3 | KAB38132.1 | 16043 |
| 1126 | GCA_000641735.1 | 1422460 | 1280 | Staphylococcus aureus VET0140R | VET0140R | Firmicutes | KK229019.1 | 3 | KAB42667.1 | 16046 |
| 1127 | GCA_000641755.1 | 1422462 | 1280 | Staphylococcus aureus VET0148R | VET0148R | Firmicutes | KK229051.1 | 3 | KAB46003.1 | 16049 |
| 1128 | GCA_000641775.1 | 1422464 | 1280 | Staphylococcus aureus VET0151R | VET0151R | Firmicutes | KK229081.1 | 3 | KAB45741.1 | 16052 |
| 1129 | GCA_000641795.1 | 1422465 | 1280 | Staphylococcus aureus VET0152R | VET0152R | Firmicutes | KK229110.1 | 3 | KAB51677.1 | 16055 |
| 1130 | GCA_000641815.1 | 1422467 | 1280 | Staphylococcus aureus VET0155R | VET0155R | Firmicutes | KK229172.1 | 3 | KAB53193.1 | 16058 |
| 1131 | GCA_000641835.1 | 1422468 | 1280 | Staphylococcus aureus VET0156R | VET0156R | Firmicutes | KK229219.1 | 3 | KAB55784.1 | 16061 |
| 1132 | GCA_000641855.1 | 1422472 | 1280 | Staphylococcus aureus VET0161R | VET0161R | Firmicutes | KK229266.1 | 3 | KAB58082.1 | 16064 |
| 1133 | GCA_000641875.1 | 1422473 | 1280 | Staphylococcus aureus VET0162R | VET0162R | Firmicutes | KK229299.1 | 3 | KAB59419.1 | 16067 |
| 1134 | GCA_000641895.1 | 1422474 | 1280 | Staphylococcus aureus VET0164R | VET0164R | Firmicutes | KK229332.1 | 3 | KAB62993.1 | 16070 |
| 1135 | GCA_000641915.1 | 1422475 | 1280 | Staphylococcus aureus VET0165R | VET0165R | Firmicutes | KK229377.1 | 3 | KAB66109.1 | 16073 |
| 1136 | GCA_000641935.1 | 1422476 | 1280 | Staphylococcus aureus VET0166R | VET0166R | Firmicutes | KK229442.1 | 3 | KAB66874.1 | 16076 |
| 1137 | GCA_000641955.1 | 1422477 | 1280 | Staphylococcus aureus VET0167R | VET0167R | Firmicutes | KK229493.1 | 3 | KAB70776.1 | 16079 |
| 1138 | GCA_000641975.1 | 1422478 | 1280 | Staphylococcus aureus VET0171R | VET0171R | Firmicutes | KK229539.1 | 3 | KAB73064.1 | 16082 |
| 1139 | GCA_000641995.1 | 1422479 | 1280 | Staphylococcus aureus VET0176R | VET0176R | Firmicutes | KK229579.1 | 3 | KAB75150.1 | 16085 |
| 1140 | GCA_000642015.1 | 1422480 | 1280 | Staphylococcus aureus VET0177R | VET0177R | Firmicutes | KK229612.1 | 3 | KAB78038.1 | 16088 |
| 1141 | GCA_000642035.1 | 1422481 | 1280 | Staphylococcus aureus VET0178R | VET0178R | Firmicutes | KK229644.1 | 3 | KAB81593.1 | 16091 |
| 1142 | GCA_000642055.1 | 1422482 | 1280 | Staphylococcus aureus VET0179R | VET0179R | Firmicutes | KK229686.1 | 3 | KAB84387.1 | 16094 |
| 1143 | GCA_000642075.1 | 1422483 | 1280 | Staphylococcus aureus VET0180R | VET0180R | Firmicutes | KK229729.1 | 3 | KAB84694.1 | 16097 |
| 1144 | GCA_000642095.1 | 1422488 | 1280 | Staphylococcus aureus VET0188R | VET0188R | Firmicutes | KK229754.1 | 3 | KAB91416.1 | 16100 |
| 1145 | GCA_000642115.1 | 1422489 | 1280 | Staphylococcus aureus VET0189R | VET0189R | Firmicutes | KK229800.1 | 3 | KAB92906.1 | 16103 |
| 1146 | GCA_000642135.1 | 1422490 | 1280 | Staphylococcus aureus VET0190R | VET0190R | Firmicutes | KK229842.1 | 3 | KAB93617.1 | 16106 |
| 1147 | GCA_000642155.1 | 1422492 | 1280 | Staphylococcus aureus VET0192R | VET0192R | Firmicutes | KK229894.1 | 3 | KAB98475.1 | 16109 |
| 1148 | GCA_000642175.1 | 1422493 | 1280 | Staphylococcus aureus VET0193R | VET0193R | Firmicutes | KK229956.1 | 3 | KAB98436.1 | 16112 |
| 1149 | GCA_000642195.1 | 1422494 | 1280 | Staphylococcus aureus VET0194R | VET0194R | Firmicutes | KK230007.1 | 3 | KAC00309.1 | 16115 |
| 1150 | GCA_000642215.1 | 1422495 | 1280 | Staphylococcus aureus VET0195R | VET0195R | Firmicutes | KK230044.1 | 3 | KAC04037.1 | 16118 |
| 1151 | GCA_000642235.1 | 1422498 | 1280 | Staphylococcus aureus VET0198R | VET0198R | Firmicutes | KK230081.1 | 3 | KAC08058.1 | 16121 |
| 1152 | GCA_000642255.1 | 1422500 | 1280 | Staphylococcus aureus VET0200R | VET0200R | Firmicutes | KK230124.1 | 3 | KAC10255.1 | 16124 |
| 1153 | GCA_000642275.1 | 1422508 | 1280 | Staphylococcus aureus VET0212R | VET0212R | Firmicutes | KK230171.1 | 3 | KAC11816.1 | 16127 |
| 1154 | GCA_000642295.1 | 1422509 | 1280 | Staphylococcus aureus VET0213R | VET0213R | Firmicutes | KK230206.1 | 3 | KAC14781.1 | 16130 |
| 1155 | GCA_000642315.1 | 1422510 | 1280 | Staphylococcus aureus VET0214R | VET0214R | Firmicutes | KK230245.1 | 3 | KAC17658.1 | 16133 |
| 1156 | GCA_000642335.1 | 1422511 | 1280 | Staphylococcus aureus VET0215R | VET0215R | Firmicutes | KK230294.1 | 3 | KAC20377.1 | 16136 |
| 1157 | GCA_000642355.1 | 1422512 | 1280 | Staphylococcus aureus VET0216R | VET0216R | Firmicutes | KK230357.1 | 3 | KAC21946.1 | 16139 |
| 1158 | GCA_000642375.1 | 1422513 | 1280 | Staphylococcus aureus VET0217R | VET0217R | Firmicutes | KK230406.1 | 3 | KAC25278.1 | 16142 |
| 1159 | GCA_000642395.1 | 1422514 | 1280 | Staphylococcus aureus VET0218R | VET0218R | Firmicutes | KK230455.1 | 3 | KAC29151.1 | 16145 |
| 1160 | GCA_000642415.1 | 1422516 | 1280 | Staphylococcus aureus VET0221R | VET0221R | Firmicutes | KK230491.1 | 3 | KAC33554.1 | 16148 |
| 1161 | GCA_000642435.1 | 1422517 | 1280 | Staphylococcus aureus VET0222R | VET0222R | Firmicutes | KK230550.1 | 3 | KAC34157.1 | 16151 |
| 1162 | GCA_000642455.1 | 1422518 | 1280 | Staphylococcus aureus VET0224R | VET0224R | Firmicutes | KK230611.1 | 3 | KAC33241.1 | 16154 |
| 1163 | GCA_000642475.1 | 1422519 | 1280 | Staphylococcus aureus VET0227R | VET0227R | Firmicutes | KK230635.1 | 3 | KAC37672.1 | 16157 |
| 1164 | GCA_000642495.1 | 1422520 | 1280 | Staphylococcus aureus VET0228R | VET0228R | Firmicutes | KK230680.1 | 3 | KAC40880.1 | 16160 |
| 1165 | GCA_000642515.1 | 1422522 | 1280 | Staphylococcus aureus VET0230R | VET0230R | Firmicutes | KK230709.1 | 3 | KAC45126.1 | 16163 |
| 1166 | GCA_000642535.1 | 1422525 | 1280 | Staphylococcus aureus VET0236R | VET0236R | Firmicutes | KK230757.1 | 3 | KAC44749.1 | 16166 |
| 1167 | GCA_000642555.1 | 1422526 | 1280 | Staphylococcus aureus VET0237R | VET0237R | Firmicutes | KK230781.1 | 3 | KAC51539.1 | 16169 |
| 1168 | GCA_000642575.1 | 1422527 | 1280 | Staphylococcus aureus VET0241R | VET0241R | Firmicutes | KK230828.1 | 3 | KAC50575.1 | 16172 |
| 1169 | GCA_000642595.1 | 1422528 | 1280 | Staphylococcus aureus VET0243R | VET0243R | Firmicutes | KK230863.1 | 3 | KAC52444.1 | 16175 |
| 1170 | GCA_000642615.1 | 1422530 | 1280 | Staphylococcus aureus VET0247R | VET0247R | Firmicutes | KK230896.1 | 3 | KAC57903.1 | 16178 |
| 1171 | GCA_000642635.1 | 1422531 | 1280 | Staphylococcus aureus VET0249R | VET0249R | Firmicutes | KK230930.1 | 3 | KAC59267.1 | 16181 |
| 1172 | GCA_000642655.1 | 1422533 | 1280 | Staphylococcus aureus VET0252R | VET0252R | Firmicutes | KK230956.1 | 3 | KAC64902.1 | 16184 |
| 1173 | GCA_000642675.1 | 1422534 | 1280 | Staphylococcus aureus VET0253R | VET0253R | Firmicutes | KK231012.1 | 3 | KAC65216.1 | 16187 |
| 1174 | GCA_000642695.1 | 1422535 | 1280 | Staphylococcus aureus VET0254R | VET0254R | Firmicutes | KK231053.1 | 3 | KAC66579.1 | 16190 |
| 1175 | GCA_000642715.1 | 1422536 | 1280 | Staphylococcus aureus VET0256R | VET0256R | Firmicutes | KK231074.1 | 3 | KAC76251.1 | 16193 |
| 1176 | GCA_000642735.1 | 1422537 | 1280 | Staphylococcus aureus VET0259R | VET0259R | Firmicutes | KK231155.1 | 3 | KAC70676.1 | 16196 |
| 1177 | GCA_000642755.1 | 1422538 | 1280 | Staphylococcus aureus VET0260R | VET0260R | Firmicutes | KK231188.1 | 3 | KAC73890.1 | 16199 |
| 1178 | GCA_000642775.1 | 1422539 | 1280 | Staphylococcus aureus VET0261R | VET0261R | Firmicutes | KK231221.1 | 3 | KAC78737.1 | 16202 |
| 1179 | GCA_000642795.1 | 1422540 | 1280 | Staphylococcus aureus VET0263R | VET0263R | Firmicutes | KK231265.1 | 3 | KAC82512.1 | 16205 |
| 1180 | GCA_000642815.1 | 1422541 | 1280 | Staphylococcus aureus VET0267R | VET0267R | Firmicutes | KK231317.1 | 3 | KAC80332.1 | 16208 |
| 1181 | GCA_000642835.1 | 1422542 | 1280 | Staphylococcus aureus VET0268R | VET0268R | Firmicutes | KK231348.1 | 3 | KAC86159.1 | 16211 |
| 1182 | GCA_000642855.1 | 1422543 | 1280 | Staphylococcus aureus VET0269R | VET0269R | Firmicutes | KK231386.1 | 3 | KAC89254.1 | 16214 |
| 1183 | GCA_000642875.1 | 1422544 | 1280 | Staphylococcus aureus VET0270R | VET0270R | Firmicutes | KK231435.1 | 3 | KAC89181.1 | 16217 |
| 1184 | GCA_000642895.1 | 1422545 | 1280 | Staphylococcus aureus VET0271R | VET0271R | Firmicutes | KK231470.1 | 3 | KAC93844.1 | 16220 |
| 1185 | GCA_000642915.1 | 1422546 | 1280 | Staphylococcus aureus VET0275R | VET0275R | Firmicutes | KK231503.1 | 3 | KAC96630.1 | 16223 |
| 1186 | GCA_000642935.1 | 1422547 | 1280 | Staphylococcus aureus VET0278R | VET0278R | Firmicutes | KK231552.1 | 3 | KAC97653.1 | 16226 |
| 1187 | GCA_000642955.1 | 1422548 | 1280 | Staphylococcus aureus VET0279R | VET0279R | Firmicutes | KK231605.1 | 3 | KAD00064.1 | 16229 |
| 1188 | GCA_000642975.1 | 1422549 | 1280 | Staphylococcus aureus VET0280R | VET0280R | Firmicutes | KK231633.1 | 3 | KAD04306.1 | 16232 |
| 1189 | GCA_000642995.1 | 1422550 | 1280 | Staphylococcus aureus VET0282R | VET0282R | Firmicutes | KK231663.1 | 3 | KAD08152.1 | 16235 |
| 1190 | GCA_000643015.1 | 1422551 | 1280 | Staphylococcus aureus VET0283R | VET0283R | Firmicutes | KK231710.1 | 3 | KAD07875.1 | 16238 |
| 1191 | GCA_000643035.1 | 1422552 | 1280 | Staphylococcus aureus VET0284R | VET0284R | Firmicutes | KK231759.1 | 3 | KAD11428.1 | 16241 |
| 1192 | GCA_000643055.1 | 1422553 | 1280 | Staphylococcus aureus VET0286R | VET0286R | Firmicutes | KK231797.1 | 3 | KAD14196.1 | 16244 |
| 1193 | GCA_000643075.1 | 1422554 | 1280 | Staphylococcus aureus VET0287R | VET0287R | Firmicutes | KK231839.1 | 3 | KAD16933.1 | 16247 |
| 1194 | GCA_000643095.1 | 1422555 | 1280 | Staphylococcus aureus VET0288R | VET0288R | Firmicutes | KK231877.1 | 3 | KAD20112.1 | 16250 |
| 1195 | GCA_000643115.1 | 1422556 | 1280 | Staphylococcus aureus VET0289R | VET0289R | Firmicutes | KK231905.1 | 3 | KAD22452.1 | 16253 |
| 1196 | GCA_000643135.1 | 1422557 | 1280 | Staphylococcus aureus VET0290R | VET0290R | Firmicutes | KK231934.1 | 3 | KAD23853.1 | 16256 |
| 1197 | GCA_000643155.1 | 1422558 | 1280 | Staphylococcus aureus VET0291R | VET0291R | Firmicutes | KK231957.1 | 3 | KAD27442.1 | 16259 |
| 1198 | GCA_000643175.1 | 1422559 | 1280 | Staphylococcus aureus VET0292R | VET0292R | Firmicutes | KK231982.1 | 3 | KAD29135.1 | 16262 |
| 1199 | GCA_000643195.1 | 1422561 | 1280 | Staphylococcus aureus VET0294R | VET0294R | Firmicutes | KK232006.1 | 3 | KAD33183.1 | 16265 |
| 1200 | GCA_000643215.1 | 1422562 | 1280 | Staphylococcus aureus VET0295R | VET0295R | Firmicutes | KK232044.1 | 3 | KAD35158.1 | 16268 |
| 1201 | GCA_000643235.1 | 1422563 | 1280 | Staphylococcus aureus VET0296R | VET0296R | Firmicutes | KK232071.1 | 3 | KAD41139.1 | 16271 |
| 1202 | GCA_000643255.1 | 1422564 | 1280 | Staphylococcus aureus VET0297R | VET0297R | Firmicutes | KK232123.1 | 3 | KAD37497.1 | 16274 |
| 1203 | GCA_000643275.1 | 1422566 | 1280 | Staphylococcus aureus VET0299R | VET0299R | Firmicutes | KK232151.1 | 3 | KAD41938.1 | 16277 |
| 1204 | GCA_000643295.1 | 1422567 | 1280 | Staphylococcus aureus VET0300R | VET0300R | Firmicutes | KK232180.1 | 3 | KAD44775.1 | 16280 |
| 1205 | GCA_000643315.1 | 1422569 | 1280 | Staphylococcus aureus VET0302R | VET0302R | Firmicutes | KK232221.1 | 3 | KAD49432.1 | 16283 |
| 1206 | GCA_000643335.1 | 1422570 | 1280 | Staphylococcus aureus VET0303R | VET0303R | Firmicutes | KK232282.1 | 3 | KAD48763.1 | 16286 |
| 1207 | GCA_000643355.1 | 1422571 | 1280 | Staphylococcus aureus VET0304R | VET0304R | Firmicutes | KK232321.1 | 3 | KAD53925.1 | 16289 |
| 1208 | GCA_000643375.1 | 1422572 | 1280 | Staphylococcus aureus VET0305R | VET0305R | Firmicutes | KK232371.1 | 3 | KAD57265.1 | 16292 |
| 1209 | GCA_000643395.1 | 1422574 | 1280 | Staphylococcus aureus VET0307R | VET0307R | Firmicutes | KK232424.1 | 3 | KAD59398.1 | 16295 |
| 1210 | GCA_000643415.1 | 1422575 | 1280 | Staphylococcus aureus VET0308R | VET0308R | Firmicutes | KK232479.1 | 3 | KAD59590.1 | 16298 |
| 1211 | GCA_000643435.1 | 1422576 | 1280 | Staphylococcus aureus VET0309R | VET0309R | Firmicutes | KK232506.1 | 3 | KAD64095.1 | 16301 |
| 1212 | GCA_000643455.1 | 1422577 | 1280 | Staphylococcus aureus VET0312R | VET0312R | Firmicutes | KK232547.1 | 3 | KAD64971.1 | 16304 |
| 1213 | GCA_000643475.1 | 1422578 | 1280 | Staphylococcus aureus VET0313R | VET0313R | Firmicutes | KK232579.1 | 3 | KAD71132.1 | 16307 |
| 1214 | GCA_000643495.1 | 1422579 | 1280 | Staphylococcus aureus VET0314R | VET0314R | Firmicutes | KK232626.1 | 3 | KAD76144.1 | 16310 |
| 1215 | GCA_000643515.1 | 1422580 | 1280 | Staphylococcus aureus VET0315R | VET0315R | Firmicutes | KK232671.1 | 3 | KAD70469.1 | 16313 |
| 1216 | GCA_000643535.1 | 1422581 | 1280 | Staphylococcus aureus VET0316R | VET0316R | Firmicutes | KK232698.1 | 3 | KAD78845.1 | 16316 |
| 1217 | GCA_000643555.1 | 1422582 | 1280 | Staphylococcus aureus VET0317R | VET0317R | Firmicutes | KK232759.1 | 3 | KAD77330.1 | 16319 |
| 1218 | GCA_000643575.1 | 1422583 | 1280 | Staphylococcus aureus VET0318R | VET0318R | Firmicutes | KK232802.1 | 3 | KAD80657.1 | 16322 |
| 1219 | GCA_000643595.1 | 1422585 | 1280 | Staphylococcus aureus VET0320R | VET0320R | Firmicutes | KK232846.1 | 3 | KAD85222.1 | 16325 |
| 1220 | GCA_000643615.1 | 1422586 | 1280 | Staphylococcus aureus VET0322R | VET0322R | Firmicutes | KK232899.1 | 3 | KAD85662.1 | 16328 |
| 1221 | GCA_000643635.1 | 1422587 | 1280 | Staphylococcus aureus VET0323R | VET0323R | Firmicutes | KK232949.1 | 3 | KAD90247.1 | 16331 |
| 1222 | GCA_000643655.1 | 1422588 | 1280 | Staphylococcus aureus VET0325R | VET0325R | Firmicutes | KK233004.1 | 3 | KAD93694.1 | 16334 |
| 1223 | GCA_000643675.1 | 1422589 | 1280 | Staphylococcus aureus VET0326R | VET0326R | Firmicutes | KK233060.1 | 3 | KAD94381.1 | 16337 |
| 1224 | GCA_000643695.1 | 1422590 | 1280 | Staphylococcus aureus VET0329R | VET0329R | Firmicutes | KK233107.1 | 3 | KAD99176.1 | 16340 |
| 1225 | GCA_000643715.1 | 1422591 | 1280 | Staphylococcus aureus VET0331R | VET0331R | Firmicutes | KK233161.1 | 3 | KAD98842.1 | 16343 |
| 1226 | GCA_000643735.1 | 1422593 | 1280 | Staphylococcus aureus VET0333R | VET0333R | Firmicutes | KK233217.1 | 3 | KAD99163.1 | 16346 |
| 1227 | GCA_000643755.1 | 1422594 | 1280 | Staphylococcus aureus VET0335R | VET0335R | Firmicutes | KK233273.1 | 3 | KAE03357.1 | 16349 |
| 1228 | GCA_000643775.1 | 1422595 | 1280 | Staphylococcus aureus VET0336R | VET0336R | Firmicutes | KK233293.1 | 3 | KAE06091.1 | 16352 |
| 1229 | GCA_000643795.1 | 1422596 | 1280 | Staphylococcus aureus VET0337R | VET0337R | Firmicutes | KK233320.1 | 3 | KAE10343.1 | 16355 |
| 1230 | GCA_000643815.1 | 1422597 | 1280 | Staphylococcus aureus VET0338R | VET0338R | Firmicutes | KK233365.1 | 3 | KAE11832.1 | 16358 |
| 1231 | GCA_000643835.1 | 1422598 | 1280 | Staphylococcus aureus VET0339R | VET0339R | Firmicutes | KK233392.1 | 3 | KAE16058.1 | 16361 |
| 1232 | GCA_000643855.1 | 1422599 | 1280 | Staphylococcus aureus VET0340R | VET0340R | Firmicutes | KK233439.1 | 3 | KAE17680.1 | 16364 |
| 1233 | GCA_000643875.1 | 1422600 | 1280 | Staphylococcus aureus VET0341R | VET0341R | Firmicutes | KK233484.1 | 3 | KAE21314.1 | 16367 |
| 1234 | GCA_000643895.1 | 1422603 | 1280 | Staphylococcus aureus VET0352R | VET0352R | Firmicutes | KK233526.1 | 3 | KAE22706.1 | 16370 |
| 1235 | GCA_000643915.1 | 1422605 | 1280 | Staphylococcus aureus VET0354R | VET0354R | Firmicutes | KK233565.1 | 3 | KAE26218.1 | 16373 |
| 1236 | GCA_000643935.1 | 1422606 | 1280 | Staphylococcus aureus VET0357R | VET0357R | Firmicutes | KK233602.1 | 3 | KAE28381.1 | 16376 |
| 1237 | GCA_000643955.1 | 1422608 | 1280 | Staphylococcus aureus VET0359R | VET0359R | Firmicutes | KK233637.1 | 3 | KAE30967.1 | 16379 |
| 1238 | GCA_000643975.1 | 1422609 | 1280 | Staphylococcus aureus VET0360R | VET0360R | Firmicutes | KK233668.1 | 3 | KAE34716.1 | 16382 |
| 1239 | GCA_000643995.1 | 1422611 | 1280 | Staphylococcus aureus VET0363R | VET0363R | Firmicutes | KK233714.1 | 3 | KAE36917.1 | 16385 |
| 1240 | GCA_000644015.1 | 1422613 | 1280 | Staphylococcus aureus VET0366R | VET0366R | Firmicutes | KK233762.1 | 3 | KAE38769.1 | 16388 |
| 1241 | GCA_000644035.1 | 1422614 | 1280 | Staphylococcus aureus VET0367R | VET0367R | Firmicutes | KK233806.1 | 3 | KAE42476.1 | 16391 |
| 1242 | GCA_000644055.1 | 1422616 | 1280 | Staphylococcus aureus VET0369R | VET0369R | Firmicutes | KK233856.1 | 3 | KAE45135.1 | 16394 |
| 1243 | GCA_000644075.1 | 1422617 | 1280 | Staphylococcus aureus VET0373R | VET0373R | Firmicutes | KK233916.1 | 3 | KAE45866.1 | 16397 |
| 1244 | GCA_000644095.1 | 1422618 | 1280 | Staphylococcus aureus VET0376R | VET0376R | Firmicutes | KK233953.1 | 3 | KAE50291.1 | 16400 |
| 1245 | GCA_000644115.1 | 1422619 | 1280 | Staphylococcus aureus VET0382R | VET0382R | Firmicutes | KK233998.1 | 3 | KAE51871.1 | 16403 |
| 1246 | GCA_000644135.1 | 1422620 | 1280 | Staphylococcus aureus VET0383R | VET0383R | Firmicutes | KK234034.1 | 3 | KAE56033.1 | 16406 |
| 1247 | GCA_000644155.1 | 1422621 | 1280 | Staphylococcus aureus VET0384R | VET0384R | Firmicutes | KK234091.1 | 3 | KAE58619.1 | 16409 |
| 1248 | GCA_000644175.1 | 1422622 | 1280 | Staphylococcus aureus VET0387R | VET0387R | Firmicutes | KK234154.1 | 3 | KAE60715.1 | 16412 |
| 1249 | GCA_000644195.1 | 1422623 | 1280 | Staphylococcus aureus VET0388R | VET0388R | Firmicutes | KK234207.1 | 3 | KAE63797.1 | 16415 |
| 1250 | GCA_000644215.1 | 1422624 | 1280 | Staphylococcus aureus VET0389R | VET0389R | Firmicutes | KK234244.1 | 3 | KAE63594.1 | 16418 |
| 1251 | GCA_000644235.1 | 1422625 | 1280 | Staphylococcus aureus VET0390R | VET0390R | Firmicutes | KK234279.1 | 3 | KAE68676.1 | 16421 |
| 1252 | GCA_000644255.1 | 1422626 | 1280 | Staphylococcus aureus VET0393R | VET0393R | Firmicutes | KK234337.1 | 3 | KAE69670.1 | 16424 |
| 1253 | GCA_000644275.1 | 1422627 | 1280 | Staphylococcus aureus VET0394R | VET0394R | Firmicutes | KK234392.1 | 3 | KAE72491.1 | 16427 |
| 1254 | GCA_000644295.1 | 1422628 | 1280 | Staphylococcus aureus VET0395R | VET0395R | Firmicutes | KK234444.1 | 3 | KAE78484.1 | 16430 |
| 1255 | GCA_000644315.1 | 1422629 | 1280 | Staphylococcus aureus VET0396R | VET0396R | Firmicutes | KK234517.1 | 3 | KAE76736.1 | 16433 |
| 1256 | GCA_000644335.1 | 1422630 | 1280 | Staphylococcus aureus VET0399R | VET0399R | Firmicutes | KK234558.1 | 3 | KAE81551.1 | 16436 |
| 1257 | GCA_000644355.1 | 1422632 | 1280 | Staphylococcus aureus VET0401R | VET0401R | Firmicutes | KK234614.1 | 3 | KAE84897.1 | 16439 |
| 1258 | GCA_000644375.1 | 1422633 | 1280 | Staphylococcus aureus VET0402R | VET0402R | Firmicutes | KK234667.1 | 3 | KAE84991.1 | 16442 |
| 1259 | GCA_000644395.1 | 1422634 | 1280 | Staphylococcus aureus VET0403R | VET0403R | Firmicutes | KK234707.1 | 3 | KAE89404.1 | 16445 |
| 1260 | GCA_000644415.1 | 1422635 | 1280 | Staphylococcus aureus VET0406R | VET0406R | Firmicutes | KK234760.1 | 3 | KAE90296.1 | 16448 |
| 1261 | GCA_000644435.1 | 1422636 | 1280 | Staphylococcus aureus VET0407R | VET0407R | Firmicutes | KK234801.1 | 3 | KAE93402.1 | 16451 |
| 1262 | GCA_000644455.1 | 1422637 | 1280 | Staphylococcus aureus VET0410R | VET0410R | Firmicutes | KK234843.1 | 3 | KAE97233.1 | 16454 |
| 1263 | GCA_000644475.1 | 1422638 | 1280 | Staphylococcus aureus VET0411R | VET0411R | Firmicutes | KK234874.1 | 3 | KAE99814.1 | 16457 |
| 1264 | GCA_000644495.1 | 1422639 | 1280 | Staphylococcus aureus VET0412R | VET0412R | Firmicutes | KK234915.1 | 3 | KAE99887.1 | 16460 |
| 1265 | GCA_000644515.1 | 1422640 | 1280 | Staphylococcus aureus VET0413R | VET0413R | Firmicutes | KK234944.1 | 3 | KAF04816.1 | 16463 |
| 1266 | GCA_000644535.1 | 1422642 | 1280 | Staphylococcus aureus VET0415R | VET0415R | Firmicutes | KK234978.1 | 3 | KAF09789.1 | 16466 |
| 1267 | GCA_000644555.1 | 1422643 | 1280 | Staphylococcus aureus VET0417R | VET0417R | Firmicutes | KK235031.1 | 3 | KAF06948.1 | 16469 |
| 1268 | GCA_000644575.1 | 1422644 | 1280 | Staphylococcus aureus VET0418R | VET0418R | Firmicutes | KK235067.1 | 3 | KAF12149.1 | 16472 |
| 1269 | GCA_000644595.1 | 1422645 | 1280 | Staphylococcus aureus VET0421R | VET0421R | Firmicutes | KK235112.1 | 3 | KAF14362.1 | 16475 |
| 1270 | GCA_000644615.1 | 1422647 | 1280 | Staphylococcus aureus VET0423R | VET0423R | Firmicutes | KK235151.1 | 3 | KAF17950.1 | 16478 |
| 1271 | GCA_000644635.1 | 1422649 | 1280 | Staphylococcus aureus VET0425R | VET0425R | Firmicutes | KK235201.1 | 3 | KAF21049.1 | 16481 |
| 1272 | GCA_000644655.1 | 1422651 | 1280 | Staphylococcus aureus VET0427R | VET0427R | Firmicutes | KK235253.1 | 3 | KAF20976.1 | 16484 |
| 1273 | GCA_000644675.1 | 1422652 | 1280 | Staphylococcus aureus VET0428R | VET0428R | Firmicutes | KK235284.1 | 3 | KAF25643.1 | 16487 |
| 1274 | GCA_000644695.1 | 1422653 | 1280 | Staphylococcus aureus VET0431R | VET0431R | Firmicutes | KK235319.1 | 3 | KAF31108.1 | 16490 |
| 1275 | GCA_000644715.1 | 1422654 | 1280 | Staphylococcus aureus VET0432R | VET0432R | Firmicutes | KK235373.1 | 3 | KAF28014.1 | 16493 |
| 1276 | GCA_000644735.1 | 1422655 | 1280 | Staphylococcus aureus VET0433R | VET0433R | Firmicutes | KK235408.1 | 3 | KAF33774.1 | 16496 |
| 1277 | GCA_000644755.1 | 1422656 | 1280 | Staphylococcus aureus VET0434R | VET0434R | Firmicutes | KK235447.1 | 3 | KAF35730.1 | 16499 |
| 1278 | GCA_000644775.1 | 1422657 | 1280 | Staphylococcus aureus VET0435R | VET0435R | Firmicutes | KK235486.1 | 3 | KAF38655.1 | 16502 |
| 1279 | GCA_000644795.1 | 1422660 | 1280 | Staphylococcus aureus VET0438R | VET0438R | Firmicutes | KK235526.1 | 3 | KAF42882.1 | 16505 |
| 1280 | GCA_000644815.1 | 1422661 | 1280 | Staphylococcus aureus VET0439R | VET0439R | Firmicutes | KK235571.1 | 3 | KAF42846.1 | 16508 |
| 1281 | GCA_000644835.1 | 1422662 | 1280 | Staphylococcus aureus VET0440R | VET0440R | Firmicutes | KK235606.1 | 3 | KAF46909.1 | 16511 |
| 1282 | GCA_000644855.1 | 1422663 | 1280 | Staphylococcus aureus VET0442R | VET0442R | Firmicutes | KK235649.1 | 3 | KAF47443.1 | 16514 |
| 1283 | GCA_000644875.1 | 1422664 | 1280 | Staphylococcus aureus VET0443R | VET0443R | Firmicutes | KK235707.1 | 3 | KAF48000.1 | 16517 |
| 1284 | GCA_000644895.1 | 1422665 | 1280 | Staphylococcus aureus VET0444R | VET0444R | Firmicutes | KK235727.1 | 3 | KAF54049.1 | 16520 |
| 1285 | GCA_000644915.1 | 1422666 | 1280 | Staphylococcus aureus VET0446R | VET0446R | Firmicutes | KK235765.1 | 3 | KAF54414.1 | 16523 |
| 1286 | GCA_000644935.1 | 1422667 | 1280 | Staphylococcus aureus VET0451R | VET0451R | Firmicutes | KK235791.1 | 3 | KAF60186.1 | 16526 |
| 1287 | GCA_000644955.1 | 1422668 | 1280 | Staphylococcus aureus VET0452R | VET0452R | Firmicutes | KK235845.1 | 3 | KAF62547.1 | 16529 |
| 1288 | GCA_000644975.1 | 1422669 | 1280 | Staphylococcus aureus VET0454R | VET0454R | Firmicutes | KK235896.1 | 3 | KAF64112.1 | 16532 |
| 1289 | GCA_000644995.1 | 1422670 | 1280 | Staphylococcus aureus VET0455R | VET0455R | Firmicutes | KK235952.1 | 3 | KAF67904.1 | 16535 |
| 1290 | GCA_000645015.1 | 1422671 | 1280 | Staphylococcus aureus VET0456R | VET0456R | Firmicutes | KK235994.1 | 3 | KAF70713.1 | 16538 |
| 1291 | GCA_000645035.1 | 1422672 | 1280 | Staphylococcus aureus VET0459R | VET0459R | Firmicutes | KK236040.1 | 3 | KAF71815.1 | 16541 |
| 1292 | GCA_000645055.1 | 1422673 | 1280 | Staphylococcus aureus VET0460R | VET0460R | Firmicutes | KK236088.1 | 3 | KAF75590.1 | 16544 |
| 1293 | GCA_000645075.1 | 1422674 | 1280 | Staphylococcus aureus VET0462R | VET0462R | Firmicutes | KK236132.1 | 3 | KAF76891.1 | 16547 |
| 1294 | GCA_000645095.1 | 1422675 | 1280 | Staphylococcus aureus VET0463R | VET0463R | Firmicutes | KK236171.1 | 3 | KAF80459.1 | 16550 |
| 1295 | GCA_000645115.1 | 1422676 | 1280 | Staphylococcus aureus VET0464R | VET0464R | Firmicutes | KK236208.1 | 3 | KAF84648.1 | 16553 |
| 1296 | GCA_000645155.1 | 1422679 | 1280 | Staphylococcus aureus VET0468R | VET0468R | Firmicutes | KK236266.1 | 3 | KAF88486.1 | 16556 |
| 1297 | GCA_000645175.1 | 1422681 | 1280 | Staphylococcus aureus VET0470R | VET0470R | Firmicutes | KK236311.1 | 3 | KAF92874.1 | 16559 |
| 1298 | GCA_000645195.1 | 1422685 | 1280 | Staphylococcus aureus VET0478R | VET0478R | Firmicutes | KK236370.1 | 3 | KAF91778.1 | 16562 |
| 1299 | GCA_000645215.1 | 1422686 | 1280 | Staphylococcus aureus VET0481R | VET0481R | Firmicutes | KK236396.1 | 3 | KAG01061.1 | 16565 |
| 1300 | GCA_000645235.1 | 1422687 | 1280 | Staphylococcus aureus VET0485R | VET0485R | Firmicutes | KK236455.1 | 3 | KAF98702.1 | 16568 |
| 1301 | GCA_000645255.1 | 1422688 | 1280 | Staphylococcus aureus VET0486R | VET0486R | Firmicutes | KK236493.1 | 3 | KAF97456.1 | 16571 |
| 1302 | GCA_000645275.1 | 1422689 | 1280 | Staphylococcus aureus VET0488R | VET0488R | Firmicutes | KK236523.1 | 3 | KAG04155.1 | 16574 |
| 1303 | GCA_000645295.1 | 1422752 | 1280 | Staphylococcus aureus VET0519S | VET0519S | Firmicutes | KK236567.1 | 3 | KAG04820.1 | 16577 |
| 1304 | GCA_000645315.1 | 1422691 | 1280 | Staphylococcus aureus VET0596R | VET0596R | Firmicutes | KK236596.1 | 3 | KAG08556.1 | 16580 |
| 1305 | GCA_000645355.1 | 1422755 | 1280 | Staphylococcus aureus VET0645S | VET0645S | Firmicutes | KK236705.1 | 3 | KAG10681.1 | 16583 |
| 1306 | GCA_000645375.1 | 1422756 | 1280 | Staphylococcus aureus VET0657S | VET0657S | Firmicutes | KK236725.1 | 3 | KAG16001.1 | 16586 |
| 1307 | GCA_000645435.1 | 1422760 | 1280 | Staphylococcus aureus VET0779S | VET0779S | Firmicutes | KK236834.1 | 3 | KAG21726.1 | 16589 |
| 1308 | GCA_000645475.1 | 1422763 | 1280 | Staphylococcus aureus VET0809S | VET0809S | Firmicutes | KK236898.1 | 3 | KAG29030.1 | 16592 |
| 1309 | GCA_000645495.1 | 1422764 | 1280 | Staphylococcus aureus VET0810S | VET0810S | Firmicutes | KK236944.1 | 3 | KAG32270.1 | 16595 |
| 1310 | GCA_000645535.1 | 1422766 | 1280 | Staphylococcus aureus VET0919S | VET0919S | Firmicutes | KK237057.1 | 3 | KAG34711.1 | 16598 |
| 1311 | GCA_000645555.1 | 1422767 | 1280 | Staphylococcus aureus VET0920S | VET0920S | Firmicutes | KK237082.1 | 3 | KAG37987.1 | 16601 |
| 1312 | GCA_000645655.1 | 1422772 | 1280 | Staphylococcus aureus VET1035S | VET1035S | Firmicutes | KK237308.1 | 3 | KAG51662.1 | 16604 |
| 1313 | GCA_000645675.1 | 1422773 | 1280 | Staphylococcus aureus VET1048S | VET1048S | Firmicutes | KK237351.1 | 3 | KAG55493.1 | 16607 |
| 1314 | GCA_000645695.1 | 1422774 | 1280 | Staphylococcus aureus VET1052S | VET1052S | Firmicutes | KK237399.1 | 3 | KAG59146.1 | 16610 |
| 1315 | GCA_000645715.1 | 1422775 | 1280 | Staphylococcus aureus VET1054S | VET1054S | Firmicutes | KK237441.1 | 3 | KAG59708.1 | 16613 |
| 1316 | GCA_000645735.1 | 1422777 | 1280 | Staphylococcus aureus VET1068S | VET1068S | Firmicutes | KK237467.1 | 3 | KAG65359.1 | 16616 |
| 1317 | GCA_000645755.1 | 1422778 | 1280 | Staphylococcus aureus VET1088S | VET1088S | Firmicutes | KK237500.1 | 3 | KAG67528.1 | 16619 |
| 1318 | GCA_000645775.1 | 1422780 | 1280 | Staphylococcus aureus VET1104S | VET1104S | Firmicutes | KK237537.1 | 3 | KAG68215.1 | 16622 |
| 1319 | GCA_000645795.1 | 1422781 | 1280 | Staphylococcus aureus VET1168S | VET1168S | Firmicutes | KK237569.1 | 3 | KAG69693.1 | 16625 |
| 1320 | GCA_000645815.1 | 1422782 | 1280 | Staphylococcus aureus VET1181S | VET1181S | Firmicutes | KK237594.1 | 3 | KAG74736.1 | 16628 |
| 1321 | GCA_000645835.1 | 1422783 | 1280 | Staphylococcus aureus VET1245S | VET1245S | Firmicutes | KK237651.1 | 3 | KAG76839.1 | 16631 |
| 1322 | GCA_000645855.1 | 1422786 | 1280 | Staphylococcus aureus VET1411S | VET1411S | Firmicutes | KK237699.1 | 3 | KAG76108.1 | 16634 |
| 1323 | GCA_000645875.1 | 1422789 | 1280 | Staphylococcus aureus VET1434S | VET1434S | Firmicutes | KK237730.1 | 3 | KAG81176.1 | 16637 |
| 1324 | GCA_000645895.1 | 1422790 | 1280 | Staphylococcus aureus VET1468S | VET1468S | Firmicutes | KK237767.1 | 3 | KAG82430.1 | 16640 |
| 1325 | GCA_000645915.1 | 1422791 | 1280 | Staphylococcus aureus VET1495S | VET1495S | Firmicutes | KK237796.1 | 3 | KAG84392.1 | 16643 |
| 1326 | GCA_000645935.1 | 1422792 | 1280 | Staphylococcus aureus VET1499S | VET1499S | Firmicutes | KK237828.1 | 3 | KAG88853.1 | 16646 |
| 1327 | GCA_000645975.1 | 1422795 | 1280 | Staphylococcus aureus VET1519S | VET1519S | Firmicutes | KK237920.1 | 3 | KAG92816.1 | 16649 |
| 1328 | GCA_000645995.1 | 1422796 | 1280 | Staphylococcus aureus VET1526S | VET1526S | Firmicutes | KK237967.1 | 3 | KAG95315.1 | 16652 |
| 1329 | GCA_000646055.1 | 1422799 | 1280 | Staphylococcus aureus VET1727S | VET1727S | Firmicutes | KK238084.1 | 3 | KAH01283.1 | 16655 |
| 1330 | GCA_000646075.1 | 1422800 | 1280 | Staphylococcus aureus VET1738S | VET1738S | Firmicutes | KK238117.1 | 3 | KAH06869.1 | 16658 |
| 1331 | GCA_000646115.1 | 1422802 | 1280 | Staphylococcus aureus VET1816S | VET1816S | Firmicutes | KK238213.1 | 3 | KAH07514.1 | 16661 |
| 1332 | GCA_000646135.1 | 1422803 | 1280 | Staphylococcus aureus VET1817S | VET1817S | Firmicutes | KK238232.1 | 3 | KAH16053.1 | 16664 |
| 1333 | GCA_000646155.1 | 1422804 | 1280 | Staphylococcus aureus VET1822S | VET1822S | Firmicutes | KK238270.1 | 3 | KAH15238.1 | 16667 |
| 1334 | GCA_000646195.1 | 1422693 | 1280 | Staphylococcus aureus VET1832R | VET1832R | Firmicutes | KK238379.1 | 3 | KAH19617.1 | 16670 |
| 1335 | GCA_000646215.1 | 1422695 | 1280 | Staphylococcus aureus VET1834R | VET1834R | Firmicutes | KK238417.1 | 3 | KAH24557.1 | 16673 |
| 1336 | GCA_000646235.1 | 1422696 | 1280 | Staphylococcus aureus VET1835R | VET1835R | Firmicutes | KK238465.1 | 3 | KAH28158.1 | 16676 |
| 1337 | GCA_000646255.1 | 1422697 | 1280 | Staphylococcus aureus VET1838R | VET1838R | Firmicutes | KK238513.1 | 3 | KAH29215.1 | 16679 |
| 1338 | GCA_000646275.1 | 1422698 | 1280 | Staphylococcus aureus VET1839R | VET1839R | Firmicutes | KK238556.1 | 3 | KAH33224.1 | 16682 |
| 1339 | GCA_000646295.1 | 1422700 | 1280 | Staphylococcus aureus VET1843R | VET1843R | Firmicutes | KK238600.1 | 3 | KAH35673.1 | 16685 |
| 1340 | GCA_000646315.1 | 1422701 | 1280 | Staphylococcus aureus VET1844R | VET1844R | Firmicutes | KK238654.1 | 3 | KAH37682.1 | 16688 |
| 1341 | GCA_000646335.1 | 1422702 | 1280 | Staphylococcus aureus VET1845R | VET1845R | Firmicutes | KK238712.1 | 3 | KAH40130.1 | 16691 |
| 1342 | GCA_000646355.1 | 1422703 | 1280 | Staphylococcus aureus VET1846R | VET1846R | Firmicutes | KK238762.1 | 3 | KAH41312.1 | 16694 |
| 1343 | GCA_000646375.1 | 1422704 | 1280 | Staphylococcus aureus VET1848R | VET1848R | Firmicutes | KK238790.1 | 3 | KAH45888.1 | 16697 |
| 1344 | GCA_000646395.1 | 1422705 | 1280 | Staphylococcus aureus VET1849R | VET1849R | Firmicutes | KK238827.1 | 3 | KAH47354.1 | 16700 |
| 1345 | GCA_000646415.1 | 1422706 | 1280 | Staphylococcus aureus VET1850R | VET1850R | Firmicutes | KK238862.1 | 3 | KAH50036.1 | 16703 |
| 1346 | GCA_000646435.1 | 1422707 | 1280 | Staphylococcus aureus VET1851R | VET1851R | Firmicutes | KK238898.1 | 3 | KAH53958.1 | 16706 |
| 1347 | GCA_000646455.1 | 1422708 | 1280 | Staphylococcus aureus VET1852R | VET1852R | Firmicutes | KK238957.1 | 3 | KAH55298.1 | 16709 |
| 1348 | GCA_000646475.1 | 1422709 | 1280 | Staphylococcus aureus VET1853R | VET1853R | Firmicutes | KK239008.1 | 3 | KAH59147.1 | 16712 |
| 1349 | GCA_000646495.1 | 1422710 | 1280 | Staphylococcus aureus VET1854R | VET1854R | Firmicutes | KK239060.1 | 3 | KAH62179.1 | 16715 |
| 1350 | GCA_000646515.1 | 1422711 | 1280 | Staphylococcus aureus VET1855R | VET1855R | Firmicutes | KK239111.1 | 3 | KAH64795.1 | 16718 |
| 1351 | GCA_000646535.1 | 1422712 | 1280 | Staphylococcus aureus VET1856R | VET1856R | Firmicutes | KK239165.1 | 3 | KAH67715.1 | 16721 |
| 1352 | GCA_000646555.1 | 1422714 | 1280 | Staphylococcus aureus VET1859R | VET1859R | Firmicutes | KK239222.1 | 3 | KAH70236.1 | 16724 |
| 1353 | GCA_000646575.1 | 1422715 | 1280 | Staphylococcus aureus VET1860R | VET1860R | Firmicutes | KK239279.1 | 3 | KAH70953.1 | 16727 |
| 1354 | GCA_000646595.1 | 1422716 | 1280 | Staphylococcus aureus VET1861R | VET1861R | Firmicutes | KK239317.1 | 3 | KAH74942.1 | 16730 |
| 1355 | GCA_000646615.1 | 1422717 | 1280 | Staphylococcus aureus VET1865R | VET1865R | Firmicutes | KK239359.1 | 3 | KAH77221.1 | 16733 |
| 1356 | GCA_000646635.1 | 1422718 | 1280 | Staphylococcus aureus VET1866R | VET1866R | Firmicutes | KK239396.1 | 3 | KAH77148.1 | 16736 |
| 1357 | GCA_000646655.1 | 1422719 | 1280 | Staphylococcus aureus VET1867R | VET1867R | Firmicutes | KK239416.1 | 3 | KAH82036.1 | 16739 |
| 1358 | GCA_000646675.1 | 1422720 | 1280 | Staphylococcus aureus VET1868R | VET1868R | Firmicutes | KK239446.1 | 3 | KAH85417.1 | 16742 |
| 1359 | GCA_000646695.1 | 1422722 | 1280 | Staphylococcus aureus VET1871R | VET1871R | Firmicutes | KK239489.1 | 3 | KAH87605.1 | 16745 |
| 1360 | GCA_000646715.1 | 1422723 | 1280 | Staphylococcus aureus VET1872R | VET1872R | Firmicutes | KK239544.1 | 3 | KAH91094.1 | 16748 |
| 1361 | GCA_000646735.1 | 1422724 | 1280 | Staphylococcus aureus VET1873R | VET1873R | Firmicutes | KK239596.1 | 3 | KAH91685.1 | 16751 |
| 1362 | GCA_000646755.1 | 1422725 | 1280 | Staphylococcus aureus VET1875R | VET1875R | Firmicutes | KK239632.1 | 3 | KAH96192.1 | 16754 |
| 1363 | GCA_000646775.1 | 1422727 | 1280 | Staphylococcus aureus VET1877R | VET1877R | Firmicutes | KK239680.1 | 3 | KAH96017.1 | 16757 |
| 1364 | GCA_000646795.1 | 1422728 | 1280 | Staphylococcus aureus VET1880R | VET1880R | Firmicutes | KK239707.1 | 3 | KAI00778.1 | 16760 |
| 1365 | GCA_000646815.1 | 1422729 | 1280 | Staphylococcus aureus VET1884R | VET1884R | Firmicutes | KK239758.1 | 3 | KAI04126.1 | 16763 |
| 1366 | GCA_000646835.1 | 1422730 | 1280 | Staphylococcus aureus VET1886R | VET1886R | Firmicutes | KK239796.1 | 3 | KAI02997.1 | 16766 |
| 1367 | GCA_000646855.1 | 1422731 | 1280 | Staphylococcus aureus VET1890R | VET1890R | Firmicutes | KK239825.1 | 3 | KAI08748.1 | 16769 |
| 1368 | GCA_000646875.1 | 1422732 | 1280 | Staphylococcus aureus VET1892R | VET1892R | Firmicutes | KK239862.1 | 3 | KAI10610.1 | 16772 |
| 1369 | GCA_000646895.1 | 1422733 | 1280 | Staphylococcus aureus VET1893R | VET1893R | Firmicutes | KK239901.1 | 3 | KAI13050.1 | 16775 |
| 1370 | GCA_000646915.1 | 1422734 | 1280 | Staphylococcus aureus VET1895R | VET1895R | Firmicutes | KK239942.1 | 3 | KAI15462.1 | 16778 |
| 1371 | GCA_000646935.1 | 1422736 | 1280 | Staphylococcus aureus VET1897R | VET1897R | Firmicutes | KK239986.1 | 3 | KAI16289.1 | 16781 |
| 1372 | GCA_000646955.1 | 1422738 | 1280 | Staphylococcus aureus VET1899R | VET1899R | Firmicutes | KK240031.1 | 3 | KAI19041.1 | 16784 |
| 1373 | GCA_000646975.1 | 1422739 | 1280 | Staphylococcus aureus VET1901R | VET1901R | Firmicutes | KK240053.1 | 3 | KAI22534.1 | 16787 |
| 1374 | GCA_000646995.1 | 1422740 | 1280 | Staphylococcus aureus VET1904R | VET1904R | Firmicutes | KK240086.1 | 3 | KAI26859.1 | 16790 |
| 1375 | GCA_000647015.1 | 1422741 | 1280 | Staphylococcus aureus VET1905R | VET1905R | Firmicutes | KK240125.1 | 3 | KAI29886.1 | 16793 |
| 1376 | GCA_000647035.1 | 1422742 | 1280 | Staphylococcus aureus VET1906R | VET1906R | Firmicutes | KK240163.1 | 3 | KAI31280.1 | 16796 |
| 1377 | GCA_000647055.1 | 1422744 | 1280 | Staphylococcus aureus VET1908R | VET1908R | Firmicutes | KK240210.1 | 3 | KAI34386.1 | 16799 |
| 1378 | GCA_000647075.1 | 1422745 | 1280 | Staphylococcus aureus VET1909R | VET1909R | Firmicutes | KK240248.1 | 3 | KAI37686.1 | 16802 |
| 1379 | GCA_000647095.1 | 1422747 | 1280 | Staphylococcus aureus VET1911R | VET1911R | Firmicutes | KK240284.1 | 3 | KAI38933.1 | 16805 |
| 1380 | GCA_000647115.1 | 1422748 | 1280 | Staphylococcus aureus VET1912R | VET1912R | Firmicutes | KK240323.1 | 3 | KAI42594.1 | 16808 |
| 1381 | GCA_000647135.1 | 1422749 | 1280 | Staphylococcus aureus VET1913R | VET1913R | Firmicutes | KK240355.1 | 3 | KAI44808.1 | 16811 |
| 1382 | GCA_000647155.1 | 1422750 | 1280 | Staphylococcus aureus VET1914R | VET1914R | Firmicutes | KK240383.1 | 3 | KAI46182.1 | 16814 |
| 1383 | GCA_000647175.1 | 1422805 | 1280 | Staphylococcus aureus VET1917S | VET1917S | Firmicutes | KK240411.1 | 3 | KAI50314.1 | 16817 |
| 1384 | GCA_000647195.1 | 1422807 | 1280 | Staphylococcus aureus VET1923S | VET1923S | Firmicutes | KK240446.1 | 3 | KAI52601.1 | 16820 |
| 1385 | GCA_000647215.1 | 1422809 | 1280 | Staphylococcus aureus VET1949S | VET1949S | Firmicutes | KK240494.1 | 3 | KAI51895.1 | 16823 |
| 1386 | GCA_000647235.1 | 1422810 | 1280 | Staphylococcus aureus VET1950S | VET1950S | Firmicutes | KK240520.1 | 3 | KAI58512.1 | 16826 |
| 1387 | GCA_000647255.1 | 1422812 | 1280 | Staphylococcus aureus VET1956S | VET1956S | Firmicutes | KK240554.1 | 3 | KAI59070.1 | 16829 |
| 1388 | GCA_000647275.1 | 1422813 | 1280 | Staphylococcus aureus VET1959S | VET1959S | Firmicutes | KK240580.1 | 3 | KAI62095.1 | 16832 |
| 1389 | GCA_000647295.1 | 1413576 | 1280 | Staphylococcus aureus ZTA09/ | ZTA09/ | Firmicutes | KK240619.1 | 3 | KAI65038.1 | 16835 |
| | | | | 03576-8HST | 03576-8HST | | | | | |
| 1390 | GCA_000647315.1 | 1413582 | 1280 | Staphylococcus aureus ZTA09/ | ZTA09/ | Firmicutes | KK240655.1 | 3 | KAI67117.1 | 16838 |
| | | | | 03734-9HSA | 03734-9HSA | | | | | |
| 1391 | GCA_000647335.1 | 1413584 | 1280 | Staphylococcus aureus ZTA09/ | ZTA09/ | Firmicutes | KK240683.1 | 3 | KAI71118.1 | 16841 |
| | | | | 03745-9HSA | 03745-9HSA | | | | | |
| 1392 | GCA_000647355.1 | 1413570 | 1280 | Staphylococcus aureus ZTA10/ | ZTA10/ | Firmicutes | KK240724.1 | 3 | KAI72298.1 | 16844 |
| | | | | 00045-9HST | 00045-9HST | | | | | |
| 1393 | GCA_000647375.1 | 1413574 | 1280 | Staphylococcus aureus ZTA10/ | ZTA10/ | Firmicutes | KK240757.1 | 3 | KAI76028.1 | 16847 |
| | | | | 00047-8HST | 00047-8HST | | | | | |
| 1394 | GCA_000647395.1 | 1413572 | 1280 | Staphylococcus aureus ZTA10/ | ZTA10/ | Firmicutes | KK240801.1 | 3 | KAI77491.1 | 16850 |
| | | | | 00058-8HST | 00058-8HST | | | | | |
| 1395 | GCA_000647415.1 | 1413581 | 1280 | Staphylococcus aureus ZTA10/ | ZTA10/ | Firmicutes | KK240836.1 | 3 | KAI79407.1 | 16853 |
| | | | | 02412-8HSA | 02412-8HSA | | | | | |
| 1396 | GCA_000647435.1 | 1413585 | 1280 | Staphylococcus aureus ZTA11/ | ZTA11/ | Firmicutes | KK240874.1 | 3 | KAI83421.1 | 16856 |
| | | | | 00189-8HSA | 00189-8HSA | | | | | |
| 1397 | GCA_000645135.1 | 1422677 | 1280 | Staphylococcus aureus VET0465R | VET0465R | Firmicutes | KK328149.1 | 3 | KAF82852.1 | 16859 |
| 1398 | GCA_000725445.1 | 1502784 | 1502784 | Pseudomonas sp. AAC | AAC | Proteobacteria | KL647094.1 | 3 | KES25284.1 | 16862 |
| 1399 | GCA_000969845.1 | 1078087 | 1078087 | Parabacteroides sp. HGS0025 | HGS0025 | Bacteroidetes | KQ033902.1 | 3 | KKB51170.1 | 16865 |
| 1400 | GCA_000969845.1 | 1078087 | 1078087 | Parabacteroides sp. HGS0025 | HGS0025 | Bacteroidetes | KQ033903.1 | 3 | KKB46310.1 | 16868 |
| 1401 | GCA_001032775.1 | 573 | 573 | Klebsiella pneumoniae | CHS201 | Proteobacteria | KQ088951.1 | 2 | KME80490.1 | 16871 |
| 1402 | GCA_001034405.1 | 615 | 615 | Serratia marcescens | UCI88 | Proteobacteria | KQ089789.1 | 2 | KMJ04347.1 | 16873 |
| 1403 | GCA_001457055.1 | 1414648 | 1414648 | Bacillus sp. SGD-V-76 | SGD-V-76 | Firmicutes | KQ758727.1 | 2 | KSU86125.1 | 16875 |
| 1404 | GCA_001519055.1 | 1739114 | 1739114 | Novosphingobium sp. Fuku2-ISO-50 | Fuku2-ISO-50 | Proteobacteria | KQ954285.1 | 4 | KUR80453.1 | 16877 |
| 1405 | GCA_001578705.1 | 1303 | 1303 | Streptococcus oralis | DD05 | Firmicutes | KQ969038.1 | 2 | KXT60079.1 | 16881 |
| 1406 | GCA_000956765.1 | 61645 | 61645 | Enterobacter asburiae | 33838 | Proteobacteria | LAAP01000054.1 | 3 | KJP12011.1 | 16883 |
| 1407 | GCA_000987705.1 | 1639 | 1639 | Listeria monocytogenes | DPC6895 | Firmicutes | LABG01000005.1 | 2 | KK042008.1 | 16886 |
| 1408 | GCA_001044655.1 | 1396 | 1396 | Bacillus cereus | INRA A3 | Firmicutes | LABH01000008.1 | 2 | KMQ31911.1 | 16888 |
| 1409 | GCA_001044655.1 | 1396 | 1396 | Bacillus cereus | INRA A3 | Firmicutes | LABH01000014.1 | 2 | KMQ31454.1 | 16890 |
| 1410 | GCA_001044655.1 | 1396 | 1396 | Bacillus cereus | INRA A3 | Firmicutes | LABH01000016.1 | 2 | KMQ31339.1 | 16892 |
| 1411 | GCA_001044855.1 | 1396 | 1396 | Bacillus cereus | RIVM BC 934 | Firmicutes | LABP01000126.1 | 2 | KMQ07576.1 | 16894 |
| 1412 | GCA_000963235.1 | 29290 | 29290 | Candidatus Magnetobacterium bavaricum | | Nitrospirae | LACI01000945.1 | 2 | KJU85605.1 | 16896 |
| 1413 | GCA_000961765.1 | 1629719 | 1629719 | Clostridiaceae bacterium BRH_c20a | | Firmicutes | LADT01000090.1 | 3 | KJS18752.1 | 16898 |
| 1414 | GCA_001010195.1 | 562 | 562 | Escherichia coli | M17-1 | Proteobacteria | LBDD01000010.1 | 2 | KLD44466.1 | 16901 |
| 1415 | GCA_001007525.1 | 670 | 670 | Vibrio parahaemolyticus | MAVP-E | Proteobacteria | LBHP01000003.1 | 3 | KKZ08483.1 | 16903 |
| 1416 | GCA_001005805.1 | 1590 | 1590 | Lactobacillus plantarum | PS128 | Firmicutes | LBHS01000003.1 | 2 | KKX43503.1 | 16906 |
| 1417 | GCA_000981945.1 | 1409947 | 1352 | Enterococcus faecium MRSN 3418 | MRSN 3418 | Firmicutes | LBIM01000096.1 | 3 | KKJ66889.1 | 16908 |
| 1418 | GCA_000996715.1 | 1618997 | 1618997 | Candidatus Uhrbacteria bacterium | | Candidatus | LCAU01000021.1 | 3 | KKR96940.1 | 16911 |
| | | | | GW2011_GWF2_41_16 | | Uhrbacteria | | | | |
| 1419 | GCA_001007555.1 | 615 | 615 | Serratia marcescens | 90-166 | Proteobacteria | LCWI01000023.1 | 2 | KKZ15776.1 | 16914 |
| 1420 | GCA_001008595.1 | 1396 | 1396 | Bacillus cereus | B4080 | Firmicutes | LCYK01000007.1 | 2 | KLA35044.1 | 16916 |
| 1421 | GCA_001008665.1 | 1396 | 1396 | Bacillus cereus | B4158 | Firmicutes | LCYP01000035.1 | 2 | KLA36292.1 | 16918 |
| 1422 | GCA_001011775.1 | 550 | 550 | Enterobacter cloacae | GN02032 | Proteobacteria | LDCC01000090.1 | 2 | KLF79538.1 | 16920 |
| 1423 | GCA_001011075.1 | 1656220 | 1656220 | Serratia sp. TEL | TEL | Proteobacteria | LDEG01000009.1 | 2 | KLE38479.1 | 16922 |
| 1424 | GCA_001043655.1 | 1396 | 1396 | Bacillus cereus | LK9 | Firmicutes | LDUP01000008.1 | 2 | KMN72583.1 | 16924 |
| 1425 | GCA_001043705.1 | 1628212 | 1628212 | Chromobacterium sp. LK11 | LK11 | Proteobacteria | LDUR01000028.1 | 4 | KMN78963.1 | 16926 |
| 1426 | GCA_001276465.1 | 61645 | 61645 | Enterobacter asburiae | C7 | Proteobacteria | LDVX01000157.1 | 3 | KOQ86134.1 | 16930 |
| 1427 | GCA_001276515.1 | 1661745 | 1661745 | Haemophilus sp. C1 | C1 | Proteobacteria | LDVZ01000018.1 | 3 | KOQ96629.1 | 16933 |
| 1428 | GCA_001580555.1 | 1609637 | 1609637 | Stenotrophomonas sp. DDT-1 | DDT-1 | Proteobacteria | LEKR01000030.1 | 3 | KXU94746.1 | 16936 |
| 1429 | GCA_001051865.1 | 211759 | 615 | Serratia marcescens subsp. marcescens | AH0650_Sm1 | Proteobacteria | LFJS01000014.1 | 2 | KMU49983.1 | 16939 |
| 1430 | GCA_001184405.1 | 1090471 | 1090471 | Candidatus Burkholderia humilis | UZHbot5 | Proteobacteria | LFMX01000038.1 | 3 | KMZ12177.1 | 16941 |
| 1431 | GCA_001183595.1 | 648 | 648 | Aeromonas caviae | A23 | Proteobacteria | LFX001000113.1 | 4 | KMY27377.1 | 16944 |
| 1432 | GCA_001270215.1 | 670 | 670 | Vibrio parahaemolyticus | S487-4 | Proteobacteria | LFZE01000076.1 | 3 | KOF39297.1 | 16948 |
| 1433 | GCA_001298135.1 | 405946 | 405946 | Oceanobacillus caeni | HM6 | Firmicutes | LGTK01000035.1 | 3 | KPH74233.1 | 16951 |
| 1434 | GCA_001297125.1 | 1690247 | 1690247 | Pseudomonas sp. RIT-PI-q | RIT-PI-q | Proteobacteria | LHPC01000026.1 | 3 | KPG99048.1 | 16954 |
| 1435 | GCA_001483145.1 | 172045 | 172045 | Elizabethkingia miricola | EM_CHUV | Bacteroidetes | LIQC01000017.1 | 4 | KUG12361.1 | 16957 |
| 1436 | GCA_001317205.1 | 211759 | 615 | Serratia marcescens subsp. marcescens | 945154301 | Proteobacteria | LJEV01000097.1 | 4 | KPS74519.1 | 16961 |
| 1437 | GCA_001317425.1 | 211759 | 615 | Serratia marcescens subsp. marcescens | 945174350 | Proteobacteria | LJEX01000059.1 | 4 | KPS95936.1 | 16965 |
| 1438 | GCA_001295775.1 | 1523428 | 1523428 | beta proteobacterium AAP99 | AAP99 | Proteobacteria | LJIA01000001.1 | 2 | KPF70566.1 | 16969 |
| 1439 | GCA_001411765.1 | 1255 | 1255 | Pediococcus pentosaceus | wikim20 | Firmicutes | LJIU01000002.1 | 2 | KQB82200.1 | 16971 |
| 1440 | GCA_001420605.1 | 1712029 | 1712029 | Bacillus sp. FJAT-25509 | FJAT-25509 | Firmicutes | LJIZ01000033.1 | 2 | KQL33557.1 | 16973 |
| 1441 | GCA_001401315.1 | 129140 | 251699 | Pseudomonas syringae pv. tagetis | ICMP4091 | Proteobacteria | LJRM01000029.1 | 4 | KPY89108.1 | 16975 |
| 1442 | GCA_001243675.1 | 1507977 | 1507977 | Vibrio sp. J2-4 | J2-4 | Proteobacteria | LK933622.1 | 3 | CDT62308.1 | 16979 |
| 1443 | GCA_001262155.1 | 1507978 | 1507978 | Vibrio sp. J2-26 | J2-26 | Proteobacteria | LK934170.1 | 3 | CDT49142.1 | 16982 |
| 1444 | GCA_001467105.1 | 1208100 | 317 | Pseudomonas syringae ICMP 19498 | ICMP 19498 | Proteobacteria | LKCH01000127.1 | 2 | KTC51736.1 | 16985 |
| 1445 | GCA_001466905.1 | 716914 | 716914 | Pseudomonas sp. ICMP 3272 | ICMP 3272 | Proteobacteria | LKEK01000086.1 | 2 | KTB70323.1 | 16987 |
| 1446 | GCA_001466845.1 | 1198306 | 317 | Pseudomonas syringae ICMP 11293 | ICMP 11293 | Proteobacteria | LKEP01000045.1 | 2 | KTB90078.1 | 16989 |
| 1447 | GCA_001467365.1 | 1198307 | 317 | Pseudomonas syringae ICMP 11292 | ICMP 11292 | Proteobacteria | LKGU01000007.1 | 2 | KTC03050.1 | 16991 |
| 1448 | GCA_001429565.1 | 180957 | 554 | Pectobacterium carotovorum subsp. | PcbHPI01 | Proteobacteria | LKKQ01000034.1 | 2 | KRF62306.1 | 16993 |
| | | | | brasiliense | | | | | | |
| 1449 | GCA_001449735.1 | 287 | 287 | Pseudomonas aeruginosa | WH-SGI-V-07184 | Proteobacteria | LLM001000014.1 | 2 | KSF14311.1 | 16995 |
| 1450 | GCA_001450755.1 | 287 | 287 | Pseudomonas aeruginosa | WH-SGI-V-07239 | Proteobacteria | LLNK01000023.1 | 5 | KSG00435.1 | 16997 |
| 1451 | GCA_001452525.1 | 287 | 287 | Pseudomonas aeruginosa | WH-SGI-V-07690 | Proteobacteria | LLSK01000113.1 | 5 | KSO26594.1 | 17002 |
| 1452 | GCA_001453015.1 | 287 | 287 | Pseudomonas aeruginosa | WH-SGI-V-07263 | Proteobacteria | LLTV01000002.1 | 5 | KSQ24404.1 | 17007 |
| 1453 | GCA_001453015.1 | 287 | 287 | Pseudomonas aeruginosa | WH-SGI-V-07263 | Proteobacteria | LLTV01000014.1 | 3 | KSQ18859.1 | 17012 |
| 1454 | GCA_001425705.1 | 1736430 | 1736430 | Pelomonas sp. Root1217 | Root1217 | Proteobacteria | LMDC01000012.1 | 2 | KQV52821.1 | 17015 |
| 1455 | GCA_001425835.1 | 1736436 | 1736436 | Afipia sp. Root123D2 | Rootl23D2 | Proteobacteria | LMDP01000003.1 | 2 | KQW19009.1 | 17017 |
| 1456 | GCA_001421745.1 | 1735694 | 1735694 | Sphingomonas sp. Leaf230 | Leaf230 | Proteobacteria | LMKW01000009.1 | 2 | KQN02369.1 | 17019 |
| 1457 | GCA_001424085.1 | 1736359 | 1736359 | Rhizobium sp. Leaf386 | Leaf386 | Proteobacteria | LMQF01000024.1 | 3 | KQS95552.1 | 17021 |
| 1458 | GCA_001428335.1 | 1736401 | 1736401 | Arthrobacter sp. Soil762 | Soil762 | Actinobacteria | LMSG01000001.1 | 2 | KRE80987.1 | 17024 |
| 1459 | GCA_000953375.1 | 40480 | 2095 | Mycoplasma capricolum subsp. capripneumoniae | F38 | Tenericutes | LN515398.1 | 2 | CEA11436.1 | 17026 |
| 1460 | GCA_000953235.1 | 40480 | 2095 | Mycoplasma capricolum subsp. capripneumoniae | ILRI181 | Tenericutes | LN515399.1 | 2 | CEA10432.1 | 17028 |
| 1461 | GCA_001460855.1 | 754345 | 715 | Actinobacillus pleuropneumoniae serovar 8 | | Proteobacteria | LN908249.1 | 3 | CUU52508.1 | 17030 |
| 1462 | GCA_001463205.1 | 562 | 562 | Escherichia coli | 50639799 | Proteobacteria | LNHQ01000124.1 | 2 | KSX76371.1 | 17033 |
| 1463 | GCA_001547355.1 | 1352 | 1352 | Enterococcus faecium | U-1313438 | Firmicutes | LNLE01000074.1 | 3 | KWY00933.1 | 17035 |
| 1464 | GCA_001545595.1 | 1352 | 1352 | Enterococcus faecium | VRE-1300937 | Firmicutes | LNLK01000231.1 | 3 | KWY16707.1 | 17038 |
| 1465 | GCA_001545605.1 | 1352 | 1352 | Enterococcus faecium | VRE-1400408 | Firmicutes | LNLP01000005.1 | 3 | KWY36996.1 | 17041 |
| 1466 | GCA_001547195.1 | 1352 | 1352 | Enterococcus faecium | VRE-1401878 | Firmicutes | LNLW01000317.1 | 2 | KWY51064.1 | 17044 |
| 1467 | GCA_001545785.1 | 1352 | 1352 | Enterococcus faecium | VRE-1402215 | Firmicutes | LNLZ01000131.1 | 2 | KWY60248.1 | 17046 |
| 1468 | GCA_001545675.1 | 1352 | 1352 | Enterococcus faecium | VRE-1402258 | Firmicutes | LNMC01000072.1 | 2 | KWY71636.1 | 17048 |
| 1469 | GCA_001547115.1 | 1352 | 1352 | Enterococcus faecium | VRE-1402435 | Firmicutes | LNME01000036.1 | 3 | KWY79778.1 | 17050 |
| 1470 | GCA_001547015.1 | 1352 | 1352 | Enterococcus faecium | VRE-1402673 | Firmicutes | LNMI01000065.1 | 2 | KWY89823.1 | 17053 |
| 1471 | GCA_001547025.1 | 1352 | 1352 | Enterococcus faecium | VRE-1402991 | Firmicutes | LNMJ01000050.1 | 3 | KWY92722.1 | 17055 |
| 1472 | GCA_001547045.1 | 1352 | 1352 | Enterococcus faecium | VRE-1403299 | Firmicutes | LNMK01000076.1 | 3 | KWY92992.1 | 17058 |
| 1473 | GCA_001547425.1 | 1352 | 1352 | Enterococcus faecium | VRE-1403540 | Firmicutes | LNMM01000174.1 | 3 | KWY96007.1 | 17061 |
| 1474 | GCA_001547445.1 | 1352 | 1352 | Enterococcus faecium | VRE-1404192 | Firmicutes | LNM001000097.1 | 3 | KWZ06304.1 | 17064 |
| 1475 | GCA_001455955.1 | 1280 | 1280 | Staphylococcus aureus | SA7112 | Firmicutes | LNTF01000010.1 | 3 | KST54505.1 | 17067 |
| 1476 | GCA_001467955.1 | 45072 | 45072 | Legionella quateirensis | ATCC 49507 | Proteobacteria | LNYR01000034.1 | 2 | KTD46365.1 | 17070 |
| 1477 | GCA_001515985.1 | 1734408 | 1734408 | Sphingomonadales bacterium BRH_c3 | | Proteobacteria | LOET01000087.1 | 2 | KUO54659.1 | 17072 |
| 1478 | GCA_001583705.1 | 1396 | 1396 | Bacillus cereus | FSL W8-0003 | Firmicutes | LOMQ01000001.1 | 2 | KXY14129.1 | 17074 |
| 1479 | GCA_001575545.1 | 562 | 562 | Escherichia coli | G213 | Proteobacteria | LOOH01000120.1 | 2 | KXQ35635.1 | 17076 |
| 1480 | GCA_001562375.1 | 562 | 562 | Escherichia coli | 108191 | Proteobacteria | LORE01000010.1 | 2 | KXG66578.1 | 17078 |
| 1481 | GCA_001527325.1 | 101571 | 101571 | Burkholderia ubonensis | MSMB2054 | Proteobacteria | LOZC01000019.1 | 4 | KVM18168.1 | 17080 |
| 1482 | GCA_001527345.1 | 101571 | 101571 | Burkholderia ubonensis | MSMB2055 | Proteobacteria | LOZD01000004.1 | 4 | KVM22194.1 | 17084 |
| 1483 | GCA_001527425.1 | 101571 | 101571 | Burkholderia ubonensis | MSMB2061 | Proteobacteria | LOZH01000020.1 | 4 | KVM54441.1 | 17088 |
| 1484 | GCA_001527955.1 | 101571 | 101571 | Burkholderia ubonensis | MSMB1599WGS | Proteobacteria | LPAJ01000129.1 | 2 | KVO16515.1 | 17092 |
| 1485 | GCA_001529565.1 | 101571 | 101571 | Burkholderia ubonensis | MSMB2022WGS | Proteobacteria | LPCI01000083.1 | 2 | KVR44248.1 | 17094 |
| 1486 | GCA_001528545.1 | 60552 | 60552 | Burkholderia vietnamiensis | AU25340 | Proteobacteria | LPCP01000011.1 | 3 | KVR99614.1 | 17096 |
| 1487 | GCA_001529645.1 | 60552 | 60552 | Burkholderia vietnamiensis | HI3392 | Proteobacteria | LPCS01000140.1 | 2 | KVS07629.1 | 17099 |
| 1488 | GCA_001529225.1 | 101571 | 101571 | Burkholderia ubonensis | MSMB1221WGS | Proteobacteria | LPEK01000051.1 | 3 | KVU94135.1 | 17101 |
| 1489 | GCA_001531435.1 | 101571 | 101571 | Burkholderia ubonensis | MSMB1508WGS | Proteobacteria | LPFT01000048.1 | 2 | KVX54694.1 | 17104 |
| 1490 | GCA_001531105.1 | 101571 | 101571 | Burkholderia ubonensis | MSMB2092WGS | Proteobacteria | LPHE01000088.1 | 3 | KWA77747.1 | 17106 |
| 1491 | GCA_001531535.1 | 101571 | 101571 | Burkholderia ubonensis | MSMB2093WGS | Proteobacteria | LPHF01000028.1 | 3 | KWB32211.1 | 17109 |
| 1492 | GCA_001532205.1 | 101571 | 101571 | Burkholderia ubonensis | MSMB2110WGS | Proteobacteria | LPHP01000047.1 | 2 | KWB80882.1 | 17112 |
| 1493 | GCA_001472685.1 | 301102 | 158836 | Enterobacter hormaechei subsp. oharae | SMART_723 | Proteobacteria | LPPG01000028.1 | 3 | KTI37619.1 | 17114 |
| 1494 | GCA_001472055.1 | 301102 | 158836 | Enterobacter hormaechei subsp. oharae | SMART_286 | Proteobacteria | LPQM01000012.1 | 2 | KTJ90670.1 | 17117 |
| 1495 | GCA_001572345.1 | 562 | 562 | Escherichia coli | CFSAN025116 | Proteobacteria | LPYQ01000233.1 | 2 | KXM51394.1 | 17119 |
| 1496 | GCA_001572325.1 | 562 | 562 | Escherichia coli | CFSAN025117 | Proteobacteria | LPYR01000272.1 | 2 | KXM54363.1 | 17121 |
| 1497 | GCA_001572445.1 | 562 | 562 | Escherichia coli | CFSAN025127 | Proteobacteria | LPYZ01000244.1 | 2 | KXM99995.1 | 17123 |
| 1498 | GCA_001563205.1 | 1352 | 1352 | Enterococcus faecium | 805447/07 | Firmicutes | LQRS01000049.1 | 3 | KXH57776.1 | 17125 |
| 1499 | GCA_001519675.1 | 562 | 562 | Escherichia coli | GN02137 | Proteobacteria | LQSE01000001.1 | 2 | KUS35848.1 | 17128 |
| 1500 | GCA_001521215.1 | 562 | 562 | Escherichia coli | GN02289 | Proteobacteria | LQSV01000130.1 | 2 | KUT10059.1 | 17130 |
| 1501 | GCA_001519835.1 | 562 | 562 | Escherichia coli | GN02290 | Proteobacteria | LQSW01000102.1 | 2 | KUT23043.1 | 17132 |
| 1502 | GCA_001521195.1 | 562 | 562 | Escherichia coli | GN02314 | Proteobacteria | LQSY01000192.1 | 2 | KUT23265.1 | 17134 |
| 1503 | GCA_001519855.1 | 562 | 562 | Escherichia coli | GN02317 | Proteobacteria | LQSZ01000228.1 | 2 | KUT30718.1 | 17136 |
| 1504 | GCA_001520275.1 | 562 | 562 | Escherichia coli | GN02359 | Proteobacteria | LQTG01000182.1 | 2 | KUT68247.1 | 17138 |
| 1505 | GCA_001520235.1 | 562 | 562 | Escherichia coli | GN02514 | Proteobacteria | LQUF01000113.1 | 2 | KUU91589.1 | 17140 |
| 1506 | GCA_001521115.1 | 562 | 562 | Escherichia coli | GN03661 | Proteobacteria | LQWC01000068.1 | 2 | KUX27115.1 | 17142 |
| 1507 | GCA_001518225.1 | 550 | 550 | Enterobacter cloacae | GN04225 | Proteobacteria | LRC001000001.1 | 2 | KUQ77231.1 | 17144 |
| 1508 | GCA_001518605.1 | 550 | 550 | Enterobacter cloacae | GN04369 | Proteobacteria | LRCT01000127.1 | 2 | KUQ90476.1 | 17146 |
| 1509 | GCA_001529365.1 | 56812 | 56812 | Shewanella frigidimarina | Ag06-30 | Proteobacteria | LRDC01000022.1 | 2 | KVX01473.1 | 17148 |
| 1510 | GCA_001524915.1 | 550 | 550 | Enterobacter cloacae | SMART_1260 | Proteobacteria | LRJW01000001.1 | 2 | KVK22109.1 | 17150 |
| 1511 | GCA_001604835.1 | 644 | 644 | Aeromonas hydrophila | AL09-79 | Proteobacteria | LRRV01000001.1 | 3 | KYQ15613.1 | 17152 |
| 1512 | GCA_001604855.1 | 644 | 644 | Aeromonas hydrophila | AL10-121 | Proteobacteria | LRRW01000002.1 | 3 | KYQ10111.1 | 17155 |
| 1513 | GCA_001604895.1 | 644 | 644 | Aeromonas hydrophila | ML09-121 | Proteobacteria | LRRX01000002.1 | 3 | KYQ13516.1 | 17158 |
| 1514 | GCA_001604905.1 | 644 | 644 | Aeromonas hydrophila | ML09-122 | Proteobacteria | LRRY01000003.1 | 3 | KYQ20474.1 | 17161 |
| 1515 | GCA_001548475.1 | 398518 | 103855 | Bordetella hinzii LMG 13501 | LMG 13501 | Proteobacteria | LRUJ01000004.1 | 2 | KXA74272.1 | 17164 |
| 1516 | GCA_000018545.1 | 394 | 380 | Sinorhizobium fredii NGR234 | NGR234 | Proteobacteria | U00090.2 | 2 | AAB91631.1 | 17166 |
| 1517 | GCA_000014225.1 | 342610 | 288 | Pseudoalteromonas atlantica T6c | T6c | Proteobacteria | CP000388.1 | 2 | ABG41254.1 | 17168 |
| 1518 | GCA_000022305.1 | 535289 | 721785 | Acidovorax ebreus TPSY | TPSY | Proteobacteria | CP001392.1 | 2 | ACM32747.1 | 17170 |
| 1519 | GCA_000146185.1 | 515620 | 39485 | [Eubacterium] eligens ATCC 27750 | ATCC 27750 | Firmicutes | CP001104.1 | 2 | ACR72776.1 | 17172 |
| 1520 | GCA_000020605.1 | 515619 | 39491 | [Eubacterium rectale] ATCC 33656 | ATCC 33656 | Firmicutes | CP001107.1 | 2 | ACR74433.1 | 17174 |
| 1521 | GCA_000190515.1 | 930170 | 1428 | Bacillus thuringiensis serovar | YBT-020 | Firmicutes | CP002509.1 | 2 | ADY24842.1 | 17176 |
| | | | | finitimus YBT-020 | | | | | | |
| 1522 | GCA_000262385.1 | 1126211 | 1390 | Bacillus amyloliquefaciens Y2 | Y2 | Firmicutes | CP003332.1 | 2 | AFJ62119.1 | 17178 |
| 1523 | GCA_000510285.1 | 1435044 | 76759 | Pseudomona monteiliis SB3078 | SB3078 | Proteobacteria | CP006978.1 | 2 | AHC83882.1 | 17180 |
| 1524 | GCA_000510325.1 | 1435058 | 76759 | Pseudomonas monteilii SB3101 | SB3101 | Proteobacteria | CP006979.1 | 2 | AHC89253.1 | 17182 |
| 1525 | GCA_000568815.1 | 1150621 | 66821 | Sulfurospirillum multivorans DSM 12446 | DSM 12446 | Proteobacteria | CP007201.1 | 2 | AHJ13792.1 | 17184 |
| 1526 | GCA_000746525.1 | 237609 | 237609 | Pseudomonas alkylphenolia | KL28 | Proteobacteria | CP009048.1 | 2 | AIL63104.1 | 17186 |
| 1527 | GCA_000784875.3 | 1484158 | 1484158 | Pantoea sp. PSNIH1 | PSNIH1 | Proteobacteria | CP009883.1 | 2 | AIX52585.1 | 17188 |
| 1528 | GCA_000784965.1 | 1484157 | 1484157 | Pantoea sp. PSNIH2 | PSNIH2 | Proteobacteria | CP009869.1 | 2 | AIX76375.1 | 17190 |
| 1529 | GCA_000827045.1 | 1570330 | 1570330 | Bacillus sp. BH072 | BH072 | Firmicutes | CP009938.1 | 2 | AJE80313.1 | 17192 |
| 1530 | GCA_001022195.1 | 571 | 571 | Klebsiella oxytoca | CAV1374 | Proteobacteria | CP011635.1 | 2 | AKL33255.1 | 17194 |
| 1531 | GCA_000009705.1 | 103690 | 103690 | Nostoc sp. PCC 7120 | | Cyanobacteria | BA000019.2 | 2 | BAB73898.1 | 17196 |
| 1532 | GCA_000009125.1 | 267608 | 305 | Ralstonia solanacearum GMI1000 | GMI1000 | Proteobacteria | AL646052.1 | 2 | CAD16319.1 | 17198 |
| 1533 | GCA_000196815.1 | 330214 | 330214 | Nitrospira defluvii | | Nitrospirae | FP929003.1 | 2 | CBK39910.1 | 17200 |
| 1534 | GCA_000284395.1 | 1155777 | 492670 | Bacillus methylotrophicus YAU B9601-Y2 | YAU B9601-Y2 | Firmicutes | HE774679.1 | 2 | CCG49955.1 | 17202 |
| 1535 | GCA_000438055.1 | 1262843 | 1262843 | Clostridium sp. CAG:813 | | Firmicutes | FR902242.1 | 2 | CDE97488.1 | 17204 |
| 1536 | GCA_000736655.1 | 1397851 | 40576 | Xenorhabdus bovienii str. feltiae France | feltiae France | Proteobacteria | HG426714.1 | 2 | CDG89550.1 | 17206 |
| 1537 | GCA_000736675.1 | 1397852 | 40576 | Xenorhabdus bovienii str. feltiae Florida | feltiae Florida | Proteobacteria | HG426895.1 | 2 | CDG92165.1 | 17208 |
| 1538 | GCA_000756695.1 | 1034943 | 1034943 | Legionella massiliensis | | Proteobacteria | CCSB01000001.1 | 2 | CDZ76665.1 | 17210 |
| 1539 | GCA_000756815.1 | 1034943 | 1034943 | Legionella massiliensis | LegA | Proteobacteria | CCVW01000001.1 | 2 | CEE12403.1 | 17212 |
| 1540 | GCA_001299055.1 | 1806504 | 1806504 | Achromobacter sp. 2789STDY5608606 | 2789STDY5608606 | Proteobacteria | CYTI01000029.1 | 2 | CUJ73685.1 | 17214 |
| 1541 | GCA_001538585.1 | 615 | 615 | Serratia marcescens | 2880STDY5682979 | Proteobacteria | FCLD01000012.1 | 2 | CVH06624.1 | 17216 |
| 1542 | GCA_001539465.1 | 615 | 615 | Serratia marcescens | 2880STDY5683000 | Proteobacteria | FCMT01000016.1 | 2 | CVH45990.1 | 17218 |
| 1543 | GCA_900064365.1 | 446 | 446 | Legionella pneumophila | 2532STDY5467650 | Proteobacteria | FJMH01000005.1 | 2 | CZP78225.1 | 17220 |
| 1544 | GCA_900064365.1 | 446 | 446 | Legionella pneumophila | 2532STDY5467650 | Proteobacteria | FJMH01000026.1 | 2 | CZQ07176.1 | 17222 |
| 1545 | GCA_000152545.1 | 350703 | 287 | Pseudomonas aeruginosa 2192 | 2192 | Proteobacteria | CH482384.1 | 2 | EAZ59087.1 | 17224 |
| 1546 | GCA_000173435.1 | 547043 | 28026 | Bifidobacterium pseudocatenulatum DSM 20438 = | DSM 20438 | Actinobacteria | ABXX02000002.1 | 2 | EEG71310.1 | 17226 |
| | | | | JCM 1200 = LMG 10505 | | | | | | |
| 1547 | GCA_000156535.1 | 536231 | 166486 | Roseburia intestinalis L1-82 | L1-82 | Firmicutes | GG692752.1 | 2 | EEU99049.1 | 17228 |
| 1548 | GCA_000162755.2 | 658187 | 168933 | Legionella drancourtii LLAP12 | LLAP12 | Proteobacteria | JH413795.1 | 2 | EHL32738.1 | 17230 |
| 1549 | GCA_000247895.1 | 883121 | 54291 | Raoultella ornithinolytica 10-5246 | 10-5246 | Proteobacteria | JH603146.1 | 2 | EHT09458.1 | 17232 |
| 1550 | GCA_000286415.1 | 1156919 | 72556 | Achromobacter piechaudii HLE | HLE | Proteobacteria | AUE01000146.1 | 2 | EJO27433.1 | 17234 |
| 1551 | GCA_000310225.1 | 1234382 | 164400 | Thauera phenylacetica B4P | B4P | Proteobacteria | AMXF01000005.1 | 2 | ENO98788.1 | 17236 |
| 1552 | GCA_000411195.1 | 883101 | 80866 | Delftia acidovorans CCUG 274B | CCUG 274B | Proteobacteria | KE150279.1 | 2 | EPD37371.1 | 17238 |
| 1553 | GCA_000466385.1 | 649747 | 1391 | Aneurinibacillus aneurinilyticus ATCC 12856 | ATCC 12856 | Firmicutes | KE952776.1 | 2 | ERI11820.1 | 17240 |
| 1554 | GCA_000481145.1 | 1402528 | 287 | Pseudomonas aeruginosa BWHPSA028 | BWHPSA028 | Proteobacteria | KI518959.1 | 2 | ERV92401.1 | 17242 |
| 1555 | GCA_000486525.1 | 930772 | 28901 | Salmonella enterica subsp. enterica | ATCC 43845 | Proteobacteria | AOXX01000056.1 | 2 | ESF54845.1 | 17244 |
| | | | | serovar Senftenberg str. ATCC 43845 | | | | | | |
| 1556 | GCA_000492715.1 | 1329844 | 550 | Enterobacter cloacae BWH 29 | BWH 29 | Proteobacteria | KI535567.1 | 2 | ESM46331.1 | 17246 |
| 1557 | GCA_000534175.1 | 1400151 | 550 | Enterobacter cloacae UCI 36 | UCI 36 | Proteobacteria | KI973125.1 | 2 | EUL65865.1 | 17248 |
| 1558 | GCA_000534195.1 | 1400150 | 550 | Enterobacter cloacae UCI 35 | UCI 35 | Proteobacteria | KI973132.1 | 2 | EUL69873.1 | 17250 |
| 1559 | GCA_000307775.2 | 1218352 | 316 | Pseudomonas stutzeri KOS6 | KOS6 | Proteobacteria | KK020676.1 | 2 | EWC39936.1 | 17252 |
| 1560 | GCA_000588875.1 | 1461752 | 1461752 | Sphingobium sp. Ant17 | Ant17 | Proteobacteria | JEMV01000093.1 | 2 | EXS68251.1 | 17254 |
| 1561 | GCA_000715205.1 | 1178540 | 1178540 | Bacillus sp. DW5-4 | DW5-4 | Firmicutes | JOTP01000043.1 | 2 | KEP24867.1 | 17256 |
| 1562 | GCA_000735105.1 | 421072 | 421072 | Epilithonimonas lactis | LMG 24401 | Bacteroidetes | JPLY01000003.1 | 2 | KFC21766.1 | 17258 |
| 1563 | GCA_000740715.1 | 1423 | 1423 | Bacillus subtilis | NKYL29 | Firmicutes | JPYY01000008.1 | 2 | KFI14244.1 | 17260 |
| 1564 | GCA_000741685.1 | 547043 | 28026 | Bifidobacterium pseudocatenulatum DSM | LMG 10505 | Actinobacteria | JGZF01000003.1 | 2 | KFI74923.1 | 17262 |
| | | | | 20438 = JCM 1200 = LMG 10505 | | | | | | |
| 1565 | GCA_000798515.1 | 562 | 562 | Escherichia coli | CVM N33561PS | Proteobacteria | JUDN01000122.1 | 2 | KHJ15951.1 | 17264 |
| 1566 | GCA_000935285.1 | 54291 | 54291 | Raoultella ornithinolytica | BAL286 | Proteobacteria | JXXF01000284.1 | 2 | KIZ39818.1 | 17266 |
| 1567 | GCA_000937505.2 | 546 | 546 | Citrobacter freundii | MRSN 12115 | Proteobacteria | JYFZ02000010.1 | 2 | KJB99792.1 | 17268 |
| 1568 | GCA_000957025.1 | 1619245 | 1619245 | Enterobacter sp. 35666 | 35666 | Proteobacteria | JZZC01000021.1 | 2 | KJN38560.1 | 17270 |
| 1569 | GCA_000964095.1 | 756892 | 756892 | Acinetobacter indicus | KM7 | Proteobacteria | JZRF01000069.1 | 2 | KJV39508.1 | 17272 |
| 1570 | GCA_001038915.1 | 293386 | 293386 | Bacillus stratosphericus | LK23 | Firmicutes | LDWL01000010.1 | 2 | KML18487.1 | 17274 |
| 1571 | GCA_001038775.1 | 293386 | 293386 | Bacillus stratosphericus | LK33 | Firmicutes | LDWU01000014.1 | 2 | KML62012.1 | 17276 |
| 1572 | GCA_001043535.1 | 293386 | 293386 | Bacillus stratosphericus | LK5 | Firmicutes | LDUH01000019.1 | 2 | KMN31317.1 | 17278 |
| 1573 | GCA_001043795.1 | 1628211 | 1628211 | Bacillus sp. LK10 | LK10 | Firmicutes | LDUQ01000030.1 | 2 | KMN70269.1 | 17280 |
| 1574 | GCA_001267695.1 | 1390 | 1390 | Bacillus amyloliquefaciens | KCTC 13012 | Firmicutes | LHCC01000003.1 | 2 | KOC82292.1 | 17282 |
| 1575 | GCA_001280655.1 | 670 | 670 | Vibrio parahaemolyticus | S372-5 | Proteobacteria | LIRQ01000039.1 | 2 | KOY23385.1 | 17284 |
| 1576 | GCA_001423425.1 | 1736330 | 1736330 | Rhizobium sp. Leaf306 | Leaf306 | Proteobacteria | LMNX01000001.1 | 2 | KQQ38326.1 | 17286 |
| 1577 | GCA_001431585.1 | 40324 | 40324 | Stenotrophomonas maltophilia | JCM9942 | Proteobacteria | LLXS01000084.1 | 2 | KRG37251.1 | 17288 |
| 1578 | GCA_001431425.1 | 83617 | 83617 | Stenotrophomonas nitritireducens | DSM 12575 | Proteobacteria | LDJG01000008.1 | 2 | KRG58645.1 | 17290 |
| 1579 | GCA_001449175.1 | 287 | 287 | Pseudomonas aeruginosa | WH-SGI-V-07074 | Proteobacteria | LLLA01000001.1 | 2 | KSC65530.1 | 17292 |
| 1580 | GCA_001452965.1 | 287 | 287 | Pseudomonas aeruginosa | WH-SGI-V-07260 | Proteobacteria | LLTT01000003.1 | 2 | KSQ38235.1 | 17294 |
| 1581 | GCA_001461845.1 | 1740805 | 1740805 | Bacillus sp. NRRL B-4257 | NRRL B-4257 | Firmicutes | LLZB01000026.1 | 2 | KSV97269.1 | 17296 |
| 1582 | GCA_001461825.1 | 1740803 | 1740803 | Bacillus sp. NRRL B-41580 | NRRL B-41580 | Firmicutes | LLZC01000021.1 | 2 | KSV97837.1 | 17298 |
| 1583 | GCA_001469685.1 | 1390 | 1390 | Bacillus amyloliquefaciens | Jxnuwx-1 | Firmicutes | LMAT01000001.1 | 2 | KTF62015.1 | 17300 |
| 1584 | GCA_001507425.1 | 1742859 | 1742859 | Flavobacteriaceae bacterium CRH | CRH | Bacteroidetes | LMAJ01000029.1 | 2 | KUJ59693.1 | 17302 |
| 1585 | GCA_001519075.1 | 1117702 | 1117702 | Novosphingobium fuchskuhlense | FNE08-7 | Proteobacteria | KQ954244.1 | 2 | KUR72680.1 | 17304 |
| 1586 | GCA_001526365.1 | 1637876 | 1637876 | Burkholderia sp. MSMB1835 | MSMB1835 | Proteobacteria | LOYP01000005.1 | 2 | KVL39772.1 | 17306 |
| 1587 | GCA_001593025.1 | 1671366 | 1671366 | Ruminococcus sp. DSM 100440 | DSM 100440 | Firmicutes | LFIL01000002.1 | 2 | KYG88423.1 | 17308 |
| 1588 | GCA_000013305.1 | 362663 | 562 | Escherichia coli 536 | 536 | Proteobacteria | CP000247.1 | 2 | ABG69918.1 | 17310 |
| 1589 | GCA_000333215.1 | 316435 | 562 | Escherichia coli Nissle 1917 | Nissle 1917 | Proteobacteria | CAPM01000056.1 | 2 | CCQ05514.1 | 17312 |
| 1590 | GCA_000627095.1 | 1444274 | 562 | Escherichia coli 1-182-04_S4_C3 | 1-182-04_S4_C3 | Proteobacteria | JJLH01000028.1 | 2 | EZJ21710.1 | 17314 |
| 1591 | GCA_000627215.1 | 1444245 | 562 | Escherichia coli 1-182-04_S4_C2 | 1-182-04_S4_C2 | Proteobacteria | JJLM01000058.1 | 2 | EZJ42018.1 | 17316 |
| 1592 | GCA_000627175.1 | 1444217 | 562 | Escherichia coli 1-182-04_S4_C1 | 1-182-04_S4_C1 | Proteobacteria | JJLP01000024.1 | 2 | EZJ61189.1 | 17318 |
| 1593 | GCA_000711455.1 | 1444214 | 562 | Escherichia coli 8-415-05_S4_C1 | 8-415-05_S4_C1 | Proteobacteria | JOMT01000106.1 | 2 | KEJ12238.1 | 17320 |
| 1594 | GCA_000711365.1 | 1444242 | 562 | Escherichia coli 8-415-05_S4_C2 | 8-415-05_S4_C2 | Proteobacteria | JOMU01000094.1 | 2 | KEJ13626.1 | 17322 |
| 1595 | GCA_000711435.1 | 1444271 | 562 | Escherichia coli 8-415-05_S4_C3 | 8-415-05_S4_C3 | Proteobacteria | JOMV01000018.1 | 2 | KEJ33279.1 | 17324 |
| 1596 | GCA_000713455.1 | 1444189 | 562 | Escherichia coli 8-415-05_S3_C3 | 8-415-05_S3_C3 | Proteobacteria | JOSA01000022.1 | 2 | KEN34070.1 | 17326 |
| 1597 | GCA_000713495.1 | 1444131 | 562 | Escherichia coli 8-415-05_S3_C1 | 8-415-05_S3_C1 | Proteobacteria | JOSB01000027.1 | 2 | KEN41712.1 | 17328 |
| 1598 | GCA_000713585.1 | 1444159 | 562 | Escherichia coli 8-415-05_S3_C2 | 8-415-05_S3_C2 | Proteobacteria | JOSI01000106.1 | 2 | KEN74069.1 | 17330 |
| 1599 | GCA_000194475.2 | 869685 | 562 | Escherichia coli 9.1649 | 9.1649 | Proteobacteria | AEZY02000025.1 | 2 | KKA60260.1 | 17332 |
| 1600 | GCA_000015425.1 | 400667 | 470 | Acinetobacter baumannii ATCC 17978 | ATCC 17978 | Proteobacteria | CP000521.1 | 2 | AB013066.2 | 17334 |
| 1601 | GCA_000410575.1 | 1331671 | 303 | Pseudomonas putida H8234 | H8234 | Proteobacteria | CP005976.1 | 2 | AGN81863.1 | 17336 |
| 1602 | GCA_000972745.1 | 339 | 339 | Xanthomonas campestris | 17 | Proteobacteria | CP011256.1 | 2 | AKC78200.1 | 17338 |
| 1603 | GCA_001587155.1 | 305 | 305 | Ralstonia solanacearum | IBSBF1503 | Proteobacteria | CP012943.1 | 2 | AMP74179.1 | 17340 |
| 1604 | GCA_000369305.1 | 1217628 | 470 | Acinetobacter baumannii NIPH 70 | NIPH 70 | Proteobacteria | KB849921.1 | 2 | ENW63934.1 | 17342 |
| 1605 | GCA_000967945.1 | 294 | 294 | Pseudomonas fluorescens | C1 | Proteobacteria | LACE01000014.1 | 2 | KJZ35756.1 | 17344 |
| 1606 | GCA_001452415.1 | 287 | 287 | Pseudomonas aeruginosa | WH-SGI-V-07681 | Proteobacteria | LLSB01000045.1 | 2 | KSM97145.1 | 17346 |
| 1607 | GCA_001593425.1 | 470 | 470 | Acinetobacter baumannii | ATCC 17978 | Proteobacteria | LOIA01000001.1 | 2 | KWX65128.1 | 17348 |
| 1608 | GCA_000965905.1 | 550 | 550 | Enterobacter cloacae | CIDEIMsCOL14 | Proteobacteria | JZKY01000004.1 | 2 | KJX33869.1 | 17350 |
| 1609 | GCA_000250075.2 | 868184 | 562 | Escherichia coli DEC10E | DEC10E | Proteobacteria | AIGT01000041.1 | 2 | EHW83928.1 | 17352 |
| 1610 | GCA_000250475.2 | 868204 | 562 | Escherichia coli DEC14D | DEC14D | Proteobacteria | AIHN01000055.1 | 2 | EHX90142.1 | 17354 |
| 1611 | GCA_000408605.1 | 1182702 | 562 | Escherichia coli KTE103 | KTE103 | Proteobacteria | KE137186.1 | 2 | EOW20700.1 | 17356 |
| 1612 | GCA_000458935.1 | 1281121 | 562 | Escherichia coli HVH 194 | HVH 194 | Proteobacteria | KE700788.1 | 2 | EQT99520.1 | 17358 |
| | | | | (4-2356805) | (4-2356805) | | | | | |
| 1613 | GCA_000488795.1 | 1269010 | 562 | Escherichia coli 910096-2 | 910096-2 | Proteobacteria | KI534966.1 | 2 | ESE28058.1 | 17360 |
| 1614 | GCA_000687105.1 | 1444147 | 562 | Escherichia coli 2-005-03_S3_C2 | 2-005-03_S3_C2 | Proteobacteria | JMGT01000049.1 | 2 | KDA72414.1 | 17362 |
| 1615 | GCA_000711415.1 | 1444071 | 562 | Escherichia coli 2-316-03_S1_C2 | 2-316-03_S1_C2 | Proteobacteria | JOMX01000122.1 | 2 | KEJ24822.1 | 17364 |
| 1616 | GCA_000711475.1 | 1444042 | 562 | Escherichia coli 2-316-03_S1_C1 | 2-316-03_S1_C1 | Proteobacteria | JOMW01000161.1 | 2 | KEJ23493.1 | 17366 |
| 1617 | GCA_000714105.1 | 1444239 | 562 | Escherichia coli 5-172-05_S4_C2 | 5-172-05_S4_C2 | Proteobacteria | JOQN01000018.1 | 2 | KEL24738.1 | 17368 |
| 1618 | GCA_000714145.1 | 1444211 | 562 | Escherichia coli 5-172-05_S4_C1 | 5-172-05_S4_C1 | Proteobacteria | JOQP01000002.1 | 2 | KEL41024.1 | 17370 |
| 1619 | GCA_000714225.1 | 1444269 | 562 | Escherichia coli 5-172-05_S4_C3 | 5-172-05_S4_C3 | Proteobacteria | JOQT01000008.1 | 2 | KEL61646.1 | 17372 |
| 1620 | GCA_000818965.1 | 1010817 | 562 | Escherichia coli C691-71 (14b) | C691-71 (14b) | Proteobacteria | JXBV01000029.1 | 2 | KIG27435.1 | 17374 |
| 1621 | GCA_001283365.1 | 562 | 562 | Escherichia coli | 503130_aEPEC | Proteobacteria | CYCS01000027.1 | 2 | CTV70059.1 | 17376 |
| 1622 | GCA_000492535.1 | 1328393 | 573 | Klebsiella pneumoniae UCICRE 7 | UCICRE 7 | Proteobacteria | KI535498.1 | 2 | ESL95857.1 | 17378 |
| 1623 | GCA_000688175.1 | 1438809 | 573 | Klebsiella pneumoniae UCI 64 | UCI 64 | Proteobacteria | JJNI01000059.1 | 2 | EZR09256.1 | 17380 |
| 1624 | GCA_001034055.1 | 573 | 573 | Klebsiella pneumoniae | BIDMC89 | Proteobacteria | KQ089634.1 | 2 | KMI15680.1 | 17382 |
| 1625 | GCA_000828775.1 | 1334564 | 615 | Serratia marcescens SM39 | SM39 | Proteobacteria | AP013063.1 | 2 | BAO34671.1 | 17384 |
| 1626 | GCA_001086525.1 | 630 | 630 | Yersinia enterocolitica | ERL08708 | Proteobacteria | CPZT01000005.1 | 2 | CNG20833.1 | 17386 |
| 1627 | GCA_001125285.1 | 630 | 630 | Yersinia enterocolitica | H1527/93 | Proteobacteria | CQCE01000004.1 | 2 | CNJ07176.1 | 17388 |
| 1628 | GCA_001515115.1 | 666 | 666 | Vibrio cholerae | M988 | Proteobacteria | LQBX01000042.1 | 2 | KUO23349.1 | 17390 |
| 1629 | GCA_000965785.1 | 817 | 817 | Bacteroides fragilis | BOB25 | Bacteroidetes | CP011073.1 | 2 | AKA50670.1 | 17392 |
| 1630 | GCA_000307435.1 | 999417 | 823 | Parabacteroides distasonis CL09T03C24 | CL09T03C24 | Bacteroidetes | JH976487.1 | 2 | EKN28634.1 | 17394 |
| 1631 | GCA_000156375.1 | 411464 | 901 | Desulfovibrio piger ATCC 29098 | ATCC 29098 | Proteobacteria | DS996355.1 | 2 | EEB34165.1 | 17396 |
| 1632 | GCA_000013885.1 | 323097 | 912 | Nitrobacter hamburgensis X14 | X14 | Proteobacteria | CP000319.1 | 2 | ABE61672.1 | 17398 |
| 1633 | GCA_000336555.1 | 883079 | 1034 | Afipia clevelandensis ATCC 49720 | ATCC 49720 | Proteobacteria | KB375281.1 | 2 | EKS39930.1 | 17400 |
| 1634 | GCA_000756355.1 | 1429888 | 1245 | Leuconostoc mesenteroides P45 | P45 | Firmicutes | JRGZ01000002.1 | 2 | KGB50927.1 | 17402 |
| 1635 | GCA_000146325.1 | 862514 | 1254 | Pediococcus acidilactici DSM 20284 | DSM 20284 | Firmicutes | GL397067.1 | 2 | EFL96228.1 | 17404 |
| 1636 | GCA_000195025.1 | 888813 | 1305 | Streptococcus sanguinis SK330 | SK330 | Firmicutes | GL878548.1 | 2 | EGF16080.1 | 17406 |
| 1637 | GCA_900059415.1 | 1307 | 1307 | Streptococcus suis | LSS12 | Firmicutes | FIFP01000007.1 | 2 | CYU22313.1 | 17408 |
| 1638 | GCA_900061375.1 | 1307 | 1307 | Streptococcus suis | SS985 | Firmicutes | FILR01000007.1 | 2 | CYX44081.1 | 17410 |
| 1639 | GCA_000339495.1 | 857115 | 1309 | Streptococcus mutans NLML8 | NLML8 | Firmicutes | AHSV01000017.1 | 2 | EMB57079.1 | 17412 |
| 1640 | GCA_000339955.1 | 857125 | 1309 | Streptococcus mutans N3209 | N3209 | Firmicutes | AHSL01000008.1 | 2 | EMC13032.1 | 17414 |
| 1641 | GCA_001558215.1 | 1309 | 1309 | Streptococcus mutans | NG8 | Firmicutes | CP013237.1 | 2 | AMF85252.1 | 17416 |
| 1642 | GCA_000186445.1 | 888745 | 1311 | Streptococcus agalactiae ATCC 13813 | ATCC 13813 | Firmicutes | GL636070.1 | 2 | EFV96552.1 | 17418 |
| 1643 | GCA_000221325.2 | 876138 | 1311 | Streptococcus agalactiae FSL S3-026 | FSLS3-026 | Firmicutes | AEXT01000002.1 | 2 | EGS28536.1 | 17420 |
| 1644 | GCA_000289795.1 | 1154788 | 1311 | Streptococcus agalactiae FSL S3-501 | FSLS3-501 | Firmicutes | ALQE01000108.1 | 2 | EPT39845.1 | 17422 |
| 1645 | GCA_000310365.1 | 1154776 | 1311 | Streptococcus agalactiae FSL S3-586 | FSLS3-586 | Firmicutes | ANCM01000071.1 | 2 | EPV87467.1 | 17424 |
| 1646 | GCA_000310425.1 | 1154786 | 1311 | Streptococcus agalactiae FSL S3-251 | FSLS3-251 | Firmicutes | ANC001000045.1 | 2 | EPV95019.1 | 17426 |
| 1647 | GCA_001017995.1 | 1311 | 1311 | Streptococcus agalactiae | DK-B-USS-155 | Firmicutes | LBKI01000029.1 | 2 | KLL29854.1 | 17428 |
| 1648 | GCA_001018015.1 | 1311 | 1311 | Streptococcus agalactiae | DK-B-USS-204 | Firmicutes | LBKK01000069.1 | 2 | KLL34442.1 | 17430 |
| 1649 | GCA_001018055.1 | 1311 | 1311 | Streptococcus agalactiae | DK-B-USS-215 | Firmicutes | LBKL01000103.1 | 2 | KLL34969.1 | 17432 |
| 1650 | GCA_000975495.1 | 1450185 | 1349 | Streptococcus uberis C8329 | C8329 | Firmicutes | JATG01000003.1 | 2 | KKF49829.1 | 17434 |
| 1651 | GCA_000205205.1 | 749517 | 1351 | Enterococcus faecalis TX1467 | TX1467 | Firmicutes | GL884006.1 | 2 | EGG58909.1 | 17436 |
| 1652 | GCA_000393495.1 | 1169246 | 1351 | Enterococcus faecalis EnGen0327 | A-3-1 | Firmicutes | KB944973.1 | 2 | EOL13670.1 | 17438 |
| 1653 | GCA_000393535.1 | 1169248 | 1351 | Enterococcus faecalis EnGen0329 | Merz192 | Firmicutes | KB945004.1 | 2 | EOK19568.1 | 17440 |
| 1654 | GCA_000395285.1 | 1158677 | 1351 | Enterococcus faecalis EnGen0289 | DS16 | Firmicutes | KB947440.1 | 2 | EOJ40184.1 | 17442 |
| 1655 | GCA_000395305.1 | 1158678 | 1351 | Enterococcus faecalis EnGen0285 | RC73 | Firmicutes | KB947448.1 | 2 | EOJ44767.1 | 17444 |
| 1656 | GCA_000415225.1 | 1258582 | 1351 | Enterococcus faecalis 20.SD.W.06 | 20.SD.W.06 | Firmicutes | KE351746.1 | 2 | EPI04163.1 | 17446 |
| 1657 | GCA_000519485.1 | 1391473 | 1351 | Enterococcus faecalis EnGen0403 | EnGen0403 | Firmicutes | KI912960.1 | 2 | ETT98569.1 | 17448 |
| 1658 | GCA_000519505.1 | 1391474 | 1351 | Enterococcus faecalis EnGen0404 | EnGen0404 | Firmicutes | KI912968.1 | 2 | ETU01533.1 | 17450 |
| 1659 | GCA_000519525.1 | 1391475 | 1351 | Enterococcus faecalis EnGen0405 | EnGen0405 | Firmicutes | KI912974.1 | 2 | ETU06238.1 | 17452 |
| 1660 | GCA_000519545.1 | 1391476 | 1351 | Enterococcus faecalis EnGen0406 | EnGen0406 | Firmicutes | KI912979.1 | 2 | ETU10204.1 | 17454 |
| 1661 | GCA_000519585.1 | 1391478 | 1351 | Enterococcus faecalis EnGen0408 | EnGen0408 | Firmicutes | KI912990.1 | 2 | ETU16615.1 | 17456 |
| 1662 | GCA_000519625.1 | 1391480 | 1351 | Enterococcus faecalis EnGen0410 | EnGen0410 | Firmicutes | KI913001.1 | 2 | ETU21340.1 | 17458 |
| 1663 | GCA_000519665.1 | 1391482 | 1351 | Enterococcus faecalis EnGen0412 | EnGen0412 | Firmicutes | KI913012.1 | 2 | ETU24458.1 | 17460 |
| 1664 | GCA_000519725.1 | 1391485 | 1351 | Enterococcus faecalis EnGen0415 | EnGen0415 | Firmicutes | KI913026.1 | 2 | ETU31995.1 | 17462 |
| 1665 | GCA_000519785.1 | 1391488 | 1351 | Enterococcus faecalis EnGen0418 | EnGen0418 | Firmicutes | KI913052.1 | 2 | ETU40537.1 | 17464 |
| 1666 | GCA_000519845.1 | 1391491 | 1351 | Enterococcus faecalis EnGen0421 | EnGen0421 | Firmicutes | KI913064.1 | 2 | ETU48375.1 | 17466 |
| 1667 | GCA_000442845.1 | 1137134 | 1358 | Lactococcus lactis subsp. lactis A12 | A12 | Firmicutes | CBLU010000009.1 | 2 | CDG04462.1 | 17468 |
| 1668 | GCA_001047375.1 | 1121307 | 1495 | Clostridium cylindrosporum DSM 605 | DSM 605 | Firmicutes | LFVU01000026.1 | 2 | KMT21891.1 | 17470 |
| 1669 | GCA_001579785.1 | 1502 | 1502 | Clostridium perfringens | JP838 | Firmicutes | CP010994.1 | 2 | AMN36763.1 | 17472 |
| 1670 | GCA_001372515.1 | 1505 | 1505 | [Clostridium] sordellii | W2922 | Firmicutes | CELK01000014.1 | 2 | CEQ11379.1 | 17474 |
| 1671 | GCA_000493655.1 | 1349417 | 1515 | Ruminiclostridium thermocellum BC1 | | Firmicutes | CBQ0010000050.1 | 2 | CDG36276.1 | 17476 |
| 1672 | GCA_000234155.1 | 742735 | 1531 | [Clostridium] clostridioforme 2_1_49FAA | 2_1_49FAA | Firmicutes | JH376870.1 | 2 | EHG33946.1 | 17478 |
| 1673 | GCA_000724405.2 | 1443118 | 1542 | Clostridium novyi A str. GD211209 | GD211209 | Firmicutes | JENN01000006.1 | 2 | KEH95234.1 | 17480 |
| 1674 | GCA_000469365.1 | 649758 | 1580 | Lactobacillus brevis ATCC 14869 = DSM 20054 | ATCC 14869 | Firmicutes | KI271248.1 | 2 | ERK44588.1 | 17482 |
| 1675 | GCA_001433855.1 | 649758 | 1580 | Lactobacillus brevis ATCC 14869 = DSM 20054 | DSM 20054 | Firmicutes | AZCP01000001.1 | 2 | KRK21385.1 | 17484 |
| 1676 | GCA_000175315.3 | 562973 | 1656 | Actinomyces viscosus C505 | C505 | Actinobacteria | KI391970.1 | 2 | EGE38623.2 | 17486 |
| 1677 | GCA_001602115.1 | 1748 | 1748 | Propionibacterium acidipropionici | ATCC 55737 | Actinobacteria | CP014352.1 | 2 | AMS06949.1 | 17488 |
| 1678 | GCA_000632085.1 | 13689 | 13689 | Sphingomonas paucimobilis | EPA505 | Proteobacteria | JFYY01000026.1 | 2 | EZP69577.1 | 17490 |
| 1679 | GCA_000955645.1 | 1347790 | 28131 | Prevotella intermedia ZT | ZT | Bacteroidetes | ATMK01000029.1 | 2 | KJJ86348.1 | 17492 |
| 1680 | GCA_000011545.1 | 272560 | 28450 | Burkholderia pseudomallei K96243 | K96243 | Proteobacteria | BX571965.1 | 2 | CAH34734.1 | 17494 |
| 1681 | GCA_000015925.1 | 357348 | 28450 | Burkholderia pseudomallei 1106a | 1106a | Proteobacteria | CP000572.1 | 2 | ABN90934.1 | 17496 |
| 1682 | GCA_000152345.1 | 331978 | 28450 | Burkholderia pseudomallei Pasteur 52237 | Pasteur 52237 | Proteobacteria | CH899746.1 | 2 | ED090949.1 | 17498 |
| 1683 | GCA_000193455.1 | 320371 | 28450 | Burkholderia pseudomallei 1710a | 1710a | Proteobacteria | CM000832.1 | 2 | EET07297.1 | 17500 |
| 1684 | GCA_000193475.1 | 357347 | 28450 | Burkholderia pseudomallei 1106b | 1106b | Proteobacteria | CM000774.1 | 2 | EES25793.1 | 17502 |
| 1685 | GCA_000259755.1 | 1086032 | 28450 | Burkholderia pseudomallei 1258a | 1258a | Proteobacteria | AHJB01000130.1 | 2 | EIF62858.1 | 17504 |
| 1686 | GCA_000259775.1 | 1086033 | 28450 | Burkholderia pseudomallei 1258b | 1258b | Proteobacteria | AHJC01000129.1 | 2 | EIF64459.1 | 17506 |
| 1687 | GCA_000259795.1 | 1086036 | 28450 | Burkholderia pseudomallei 354e | 354e | Proteobacteria | AHJD01000107.1 | 2 | EIF75597.1 | 17508 |
| 1688 | GCA_000259815.1 | 1086034 | 28450 | Burkholderia pseudomallei 354a | 354a | Proteobacteria | AGVS01000297.1 | 2 | EIF80279.1 | 17510 |
| 1689 | GCA_000294635.1 | 1229785 | 28450 | Burkholderia pseudomallei BPC006 | BPC006 | Proteobacteria | CP003781.1 | 2 | AFR14682.1 | 17512 |
| 1690 | GCA_000756125.1 | 28450 | 28450 | Burkholderia pseudomallei | Mahidol-1106a | Proteobacteria | CP008781.1 | 2 | AIO13383.1 | 17514 |
| 1691 | GCA_000756145.1 | 28450 | 28450 | Burkholderia pseudomallei | 1106a | Proteobacteria | CP008758.1 | 2 | AI091702.1 | 17516 |
| 1692 | GCA_000757035.2 | 331978 | 28450 | Burkholderia pseudomallei Pasteur 52237 | Pasteur 52237 | Proteobacteria | CP009899.1 | 2 | AJX61451.1 | 17518 |
| 1693 | GCA_000757185.1 | 28450 | 28450 | Burkholderia pseudomallei | BGS | Proteobacteria | KN150946.1 | 2 | KGC78979.1 | 17520 |
| 1694 | GCA_000757255.1 | 28450 | 28450 | Burkholderia pseudomallei | BGJ | Proteobacteria | KN150955.1 | 2 | KGD17915.1 | 17522 |
| 1695 | GCA_000763555.1 | 28450 | 28450 | Burkholderia pseudomallei | BGK | Proteobacteria | CP008916.1 | 2 | AIS47055.1 | 17524 |
| 1696 | GCA_000770455.1 | 1439854 | 28450 | Burkholderia pseudomallei B03 | B03 | Proteobacteria | CP009151.1 | 2 | AIV91806.1 | 17526 |
| 1697 | GCA_000770535.1 | 1439855 | 28450 | Burkholderia pseudomallei A79A | A79A | Proteobacteria | CP009165.1 | 2 | AIV95750.1 | 17528 |
| 1698 | GCA_000775085.1 | 1439860 | 28450 | Burkholderia pseudomallei TSV28 | TSV28 | Proteobacteria | JQHU01000150.1 | 2 | KGX68805.1 | 17530 |
| 1699 | GCA_000775675.1 | 1439856 | 28450 | Burkholderia pseudomallei A79C | A79C | Proteobacteria | JQHQ01000114.1 | 2 | KGY01694.1 | 17532 |
| 1700 | GCA_000775685.1 | 1439857 | 28450 | Burkholderia pseudomallei A79D | A79D | Proteobacteria | JQHR01000047.1 | 2 | KGY04116.1 | 17534 |
| 1701 | GCA_000932075.1 | 28450 | 28450 | Burkholderia pseudomallei | QCMRI_BP07 | Proteobacteria | JYBG01000039.1 | 2 | KIX42366.1 | 17536 |
| 1702 | GCA_000932145.1 | 28450 | 28450 | Burkholderia pseudomallei | QCMRI_BP32 | Proteobacteria | JYBK01000004.1 | 2 | KIX63305.1 | 17538 |
| 1703 | GCA_000953095.1 | 28450 | 28450 | Burkholderia pseudomallei | 3921 | Proteobacteria | LK936442.1 | 2 | CDU27413.1 | 17540 |
| 1704 | GCA_000954175.1 | 28450 | 28450 | Burkholderia pseudomallei | vgh07 | Proteobacteria | CP010973.1 | 2 | AJW52247.1 | 17542 |
| 1705 | GCA_000959285.1 | 272560 | 28450 | Burkholderia pseudomallei K96243 | K96243 | Proteobacteria | CP009538.1 | 2 | AJX28157.1 | 17544 |
| 1706 | GCA_001182265.1 | 28450 | 28450 | Burkholderia pseudomallei | EY6 | Proteobacteria | CWJD01000032.1 | 2 | CRY48213.1 | 17546 |
| 1707 | GCA_001191815.1 | 28450 | 28450 | Burkholderia pseudomallei | C32 | Proteobacteria | CSQC01000014.1 | 2 | CPN90195.1 | 17548 |
| 1708 | GCA_001192415.1 | 28450 | 28450 | Burkholderia pseudomallei | C36 | Proteobacteria | CSQF01000015.1 | 2 | CP007168.1 | 17550 |
| 1709 | GCA_001192815.1 | 28450 | 28450 | Burkholderia pseudomallei | C58 | Proteobacteria | CSOW01000015.1 | 2 | CPM40570.1 | 17552 |
| 1710 | GCA_001193035.1 | 28450 | 28450 | Burkholderia pseudomallei | C30 | Proteobacteria | CSSB01000014.1 | 2 | CPQ62517.1 | 17554 |
| 1711 | GCA_001193615.1 | 28450 | 28450 | Burkholderia pseudomallei | C11 | Proteobacteria | CSRL01000034.1 | 2 | CPQ18530.1 | 17556 |
| 1712 | GCA_001193655.1 | 28450 | 28450 | Burkholderia pseudomallei | C54 | Proteobacteria | CSLU01000014.1 | 2 | CPI70802.1 | 17558 |
| 1713 | GCA_001194765.1 | 28450 | 28450 | Burkholderia pseudomallei | C52 | Proteobacteria | CSN001000016.1 | 2 | CPK88012.1 | 17560 |
| 1714 | GCA_001196125.1 | 28450 | 28450 | Burkholderia pseudomallei | C31 | Proteobacteria | CSM001000014.1 | 2 | CPJ40971.1 | 17562 |
| 1715 | GCA_001196775.1 | 28450 | 28450 | Burkholderia pseudomallei | C50 | Proteobacteria | CSMS01000016.1 | 2 | CPJ76825.1 | 17564 |
| 1716 | GCA_001197015.1 | 28450 | 28450 | Burkholderia pseudomallei | C17 | Proteobacteria | CSMH01000029.1 | 2 | CPJ85555.1 | 17566 |
| 1717 | GCA_001197235.1 | 28450 | 28450 | Burkholderia pseudomallei | 6./96 | Proteobacteria | CSLAO1000038.1 | 2 | CPH77136.1 | 17568 |
| 1718 | GCA_001197775.1 | 28450 | 28450 | Burkholderia pseudomallei | C3 | Proteobacteria | CSME01000015.1 | 2 | CPJ25324.1 | 17570 |
| 1719 | GCA_001197795.1 | 28450 | 28450 | Burkholderia pseudomallei | C44 | Proteobacteria | CSSV01000015.1 | 2 | CPR02281.1 | 17572 |
| 1720 | GCA_001199195.1 | 28450 | 28450 | Burkholderia pseudomallei | C51 | Proteobacteria | CSMB01000033.1 | 2 | CPJ69674.1 | 17574 |
| 1721 | GCA_001199695.1 | 28450 | 28450 | Burkholderia pseudomallei | C68 | Proteobacteria | CSNM01000014.1 | 2 | CPK70853.1 | 17576 |
| 1722 | GCA_001199815.1 | 28450 | 28450 | Burkholderia pseudomallei | C28 | Proteobacteria | CSRV01000015.1 | 2 | CPQ22985.1 | 17578 |
| 1723 | GCA_001200615.1 | 28450 | 28450 | Burkholderia pseudomallei | C1 | Proteobacteria | CSPL01000013.1 | 2 | CPN03544.1 | 17580 |
| 1724 | GCA_001200935.1 | 28450 | 28450 | Burkholderia pseudomallei | 504/96 | Proteobacteria | CSLC01000034.1 | 2 | CPH78827.1 | 17582 |
| 1725 | GCA_001202415.1 | 28450 | 28450 | Burkholderia pseudomallei | C48 | Proteobacteria | CSLS01000014.1 | 2 | CPI57651.1 | 17584 |
| 1726 | GCA_001204515.1 | 28450 | 28450 | Burkholderia pseudomallei | C69 | Proteobacteria | CSPX01000005.1 | 2 | CPN26697.1 | 17586 |
| 1727 | GCA_001205935.1 | 28450 | 28450 | Burkholderia pseudomallei | C22 | Proteobacteria | CSNB01000034.1 | 2 | CPK20311.1 | 17588 |
| 1728 | GCA_001206495.1 | 28450 | 28450 | Burkholderia pseudomallei | C70 | Proteobacteria | CSOV01000015.1 | 2 | CPM33011.1 | 17590 |
| 1729 | GCA_001207675.1 | 28450 | 28450 | Burkholderia pseudomallei | C66 | Proteobacteria | CSQA01000015.1 | 2 | CPN87629.1 | 17592 |
| 1730 | GCA_001208545.1 | 28450 | 28450 | Burkholderia pseudomallei | C13 | Proteobacteria | CSSE01000014.1 | 2 | CPQ68104.1 | 17594 |
| 1731 | GCA_001209405.1 | 28450 | 28450 | Burkholderia pseudomallei | C15 | Proteobacteria | CSPA01000014.1 | 2 | CPM53772.1 | 17596 |
| 1732 | GCA_001209505.1 | 28450 | 28450 | Burkholderia pseudomallei | C21 | Proteobacteria | CSOU01000014.1 | 2 | CPM10513.1 | 17598 |
| 1733 | GCA_001210705.1 | 28450 | 28450 | Burkholderia pseudomallei | C16 | Proteobacteria | CSQP01000036.1 | 2 | CPP09133.1 | 17600 |
| 1734 | GCA_001210965.1 | 28450 | 28450 | Burkholderia pseudomallei | C42 | Proteobacteria | CSNW01000016.1 | 2 | CPL40888.1 | 17602 |
| 1735 | GCA_001211345.1 | 28450 | 28450 | Burkholderia pseudomallei | C62 | Proteobacteria | CSPM01000015.1 | 2 | CPN14436.1 | 17604 |
| 1736 | GCA_001211405.1 | 28450 | 28450 | Burkholderia pseudomallei | C26 | Proteobacteria | CSNQ01000016.1 | 2 | CPK90390.1 | 17606 |
| 1737 | GCA_001211505.1 | 28450 | 28450 | Burkholderia pseudomallei | C53 | Proteobacteria | CSRJ01000015.1 | 2 | CPP68451.1 | 17608 |
| 1738 | GCA_001211565.1 | 28450 | 28450 | Burkholderia pseudomallei | C10 | Proteobacteria | CSRH01000038.1 | 2 | CPP97990.1 | 17610 |
| 1739 | GCA_001211865.1 | 28450 | 28450 | Burkholderia pseudomallei | C29 | Proteobacteria | CSQB01000014.1 | 2 | CPN87378.1 | 17612 |
| 1740 | GCA_001212025.1 | 28450 | 28450 | Burkholderia pseudomallei | C2 | Proteobacteria | CSSW01000015.1 | 2 | CPR00121.1 | 17614 |
| 1741 | GCA_001212065.1 | 28450 | 28450 | Burkholderia pseudomallei | P6 | Proteobacteria | CSLI01000012.1 | 2 | CPH39453.1 | 17616 |
| 1742 | GCA_001212185.1 | 28450 | 28450 | Burkholderia pseudomallei | 21/96 | Proteobacteria | CSKV01000012.1 | 2 | CPG82753.1 | 17618 |
| 1743 | GCA_001212325.1 | 28450 | 28450 | Burkholderia pseudomallei | C25 | Proteobacteria | CSOX01000015.1 | 2 | CPM46611.1 | 17620 |
| 1744 | GCA_001212405.1 | 28450 | 28450 | Burkholderia pseudomallei | EY1 | Proteobacteria | CSKM01000009.1 | 2 | CPG38360.1 | 17622 |
| 1745 | GCA_001212465.1 | 28450 | 28450 | Burkholderia pseudomallei | 2/96 | Proteobacteria | CSKX01000014.1 | 2 | CPH00885.1 | 17624 |
| 1746 | GCA_001212705.1 | 28450 | 28450 | Burkholderia pseudomallei | EY3 | Proteobacteria | CSKP01000034.1 | 2 | CPH42028.1 | 17626 |
| 1747 | GCA_001277875.1 | 28450 | 28450 | Burkholderia pseudomallei | vgh16R | Proteobacteria | CP012515.1 | 2 | ALB92817.1 | 17628 |
| 1748 | GCA_001277895.1 | 28450 | 28450 | Burkholderia pseudomallei | vgh16W | Proteobacteria | CP012517.1 | 2 | ALB98879.1 | 17630 |
| 1749 | GCA_001277975.1 | 28450 | 28450 | Burkholderia pseudomallei | 982 | Proteobacteria | CP012576.1 | 2 | ALC58207.1 | 17632 |
| 1750 | GCA_001320215.1 | 28450 | 28450 | Burkholderia pseudomallei | 6 | Proteobacteria | CGEV01000013.1 | 2 | CFT55154.1 | 17634 |
| 1751 | GCA_001320825.1 | 28450 | 28450 | Burkholderia pseudomallei | C37 | Proteobacteria | CIHR01000013.1 | 2 | CPQ86668.1 | 17636 |
| 1752 | GCA_001320865.1 | 28450 | 28450 | Burkholderia pseudomallei | C61 | Proteobacteria | CFZT01000014.1 | 2 | CFP14331.1 | 17638 |
| 1753 | GCA_001320905.1 | 28450 | 28450 | Burkholderia pseudomallei | C6 | Proteobacteria | CGFU01000014.1 | 2 | CFU67050.1 | 17640 |
| 1754 | GCA_001320945.1 | 28450 | 28450 | Burkholderia pseudomallei | C4 | Proteobacteria | CFXK01000014.1 | 2 | CFM98899.1 | 17642 |
| 1755 | GCA_001320985.1 | 28450 | 28450 | Burkholderia pseudomallei | C9 | Proteobacteria | CFXG01000012.1 | 2 | CFM81858.1 | 17644 |
| 1756 | GCA_001321015.1 | 28450 | 28450 | Burkholderia pseudomallei | C7 | Proteobacteria | CIJT01000014.1 | 2 | CPM85720.1 | 17646 |
| 1757 | GCA_001321045.1 | 28450 | 28450 | Burkholderia pseudomallei | C8 | Proteobacteria | CIGV01000033.1 | 2 | CPL97294.1 | 17648 |
| 1758 | GCA_001321065.1 | 28450 | 28450 | Burkholderia pseudomallei | C12 | Proteobacteria | CFZL01000037.1 | 2 | CFO92224.1 | 17650 |
| 1759 | GCA_001321085.1 | 28450 | 28450 | Burkholderia pseudomallei | C46 | Proteobacteria | CFXP01000015.1 | 2 | CFN19260.1 | 17652 |
| 1760 | GCA_001321105.1 | 28450 | 28450 | Burkholderia pseudomallei | C45 | Proteobacteria | CIGX01000033.1 | 2 | CPL11643.1 | 17654 |
| 1761 | GCA_001321125.1 | 28450 | 28450 | Burkholderia pseudomallei | C43 | Proteobacteria | CIBE01000017.1 | 2 | CPN25051.1 | 17656 |
| 1762 | GCA_001321145.1 | 28450 | 28450 | Burkholderia pseudomallei | C47 | Proteobacteria | CIKM01000030.1 | 2 | CPO46736.1 | 17658 |
| 1763 | GCA_001321165.1 | 28450 | 28450 | Burkholderia pseudomallei | C27 | Proteobacteria | CFWL01000014.1 | 2 | CFL99481.1 | 17660 |
| 1764 | GCA_001321185.1 | 28450 | 28450 | Burkholderia pseudomallei | C24 | Proteobacteria | CIJQ01000014.1 | 2 | CP089903.1 | 17662 |
| 1765 | GCA_001321205.1 | 28450 | 28450 | Burkholderia pseudomallei | C23 | Proteobacteria | CGHT01000014.1 | 2 | CFW49159.1 | 17664 |
| 1766 | GCA_001321225.1 | 28450 | 28450 | Burkholderia pseudomallei | C64 | Proteobacteria | CFWQ01000015.1 | 2 | CFM22755.1 | 17666 |
| 1767 | GCA_001321245.1 | 28450 | 28450 | Burkholderia pseudomallei | C63 | Proteobacteria | CIBB01000014.1 | 2 | CPK84415.1 | 17668 |
| 1768 | GCA_001321265.1 | 28450 | 28450 | Burkholderia pseudomallei | C65 | Proteobacteria | CFZI01000014.1 | 2 | CFO79487.1 | 17670 |
| 1769 | GCA_001321285.1 | 28450 | 28450 | Burkholderia pseudomallei | C67 | Proteobacteria | CGFW01000014.1 | 2 | CFU75863.1 | 17672 |
| 1770 | GCA_001321305.1 | 28450 | 28450 | Burkholderia pseudomallei | C14 | Proteobacteria | CGFJ01000015.1 | 2 | CFU18823.1 | 17674 |
| 1771 | GCA_001321325.1 | 28450 | 28450 | Burkholderia pseudomallei | C18 | Proteobacteria | CFXB01000030.1 | 2 | CFM67594.1 | 17676 |
| 1772 | GCA_001321345.1 | 28450 | 28450 | Burkholderia pseudomallei | C20 | Proteobacteria | CGIB01000015.1 | 2 | CFW79173.1 | 17678 |
| 1773 | GCA_001321365.1 | 28450 | 28450 | Burkholderia pseudomallei | C19 | Proteobacteria | CFZB01000015.1 | 2 | CFO54185.1 | 17680 |
| 1774 | GCA_001321385.1 | 28450 | 28450 | Burkholderia pseudomallei | C49 | Proteobacteria | CFXU01000016.1 | 2 | CFN47247.1 | 17682 |
| 1775 | GCA_001321405.1 | 28450 | 28450 | Burkholderia pseudomallei | C57 | Proteobacteria | CGFL01000014.1 | 2 | CFU32908.1 | 17684 |
| 1776 | GCA_001321425.1 | 28450 | 28450 | Burkholderia pseudomallei | C59 | Proteobacteria | CFZV01000014.1 | 2 | CFP26209.1 | 17686 |
| 1777 | GCA_001321445.1 | 28450 | 28450 | Burkholderia pseudomallei | C60 | Proteobacteria | CIBL01000035.1 | 2 | CPP85431.1 | 17688 |
| 1778 | GCA_001321465.1 | 28450 | 28450 | Burkholderia pseudomallei | C41 | Proteobacteria | CFWT01000016.1 | 2 | CFM37245.1 | 17690 |
| 1779 | GCA_001321485.1 | 28450 | 28450 | Burkholderia pseudomallei | C56 | Proteobacteria | CIBF01000030.1 | 2 | CPQ63811.1 | 17692 |
| 1780 | GCA_001321505.1 | 28450 | 28450 | Burkholderia pseudomallei | C39 | Proteobacteria | CFYP01000014.1 | 2 | CF010819.1 | 17694 |
| 1781 | GCA_001321525.1 | 28450 | 28450 | Burkholderia pseudomallei | C40 | Proteobacteria | CIGS01000014.1 | 2 | CPL75788.1 | 17696 |
| 1782 | GCA_001321545.1 | 28450 | 28450 | Burkholderia pseudomallei | C38 | Proteobacteria | CFXD01000034.1 | 2 | CFM72557.1 | 17698 |
| 1783 | GCA_001321565.1 | 28450 | 28450 | Burkholderia pseudomallei | C35 | Proteobacteria | CIJK01000015.1 | 2 | CPK97832.1 | 17700 |
| 1784 | GCA_001321585.1 | 28450 | 28450 | Burkholderia pseudomallei | C33 | Proteobacteria | CHKY01000034.1 | 2 | CPN81614.1 | 17702 |
| 1785 | GCA_001321605.1 | 28450 | 28450 | Burkholderia pseudomallei | C34 | Proteobacteria | CGHK01000004.1 | 2 | CFW09147.1 | 17704 |
| 1786 | GCA_001321625.1 | 28450 | 28450 | Burkholderia pseudomallei | C55 | Proteobacteria | CGFR01000015.1 | 2 | CFU54707.1 | 17706 |
| 1787 | GCA_001326895.1 | 28450 | 28450 | Burkholderia pseudomallei | 2746b | Proteobacteria | CFVL01000010.1 | 2 | CFK50101.1 | 17708 |
| 1788 | GCA_001326935.1 | 28450 | 28450 | Burkholderia pseudomallei | EY4 | Proteobacteria | CHFD01000017.1 | 2 | CPG83473.1 | 17710 |
| 1789 | GCA_001327035.1 | 28450 | 28450 | Burkholderia pseudomallei | DB30729/00 | Proteobacteria | CGEZ01000012.1 | 2 | CFT72113.1 | 17712 |
| 1790 | GCA_001327075.1 | 28450 | 28450 | Burkholderia pseudomallei | 497/96 | Proteobacteria | CFVV01000013.1 | 2 | CFL13092.1 | 17714 |
| 1791 | GCA_001327155.1 | 28450 | 28450 | Burkholderia pseudomallei | 35/96 | Proteobacteria | CFWJ01000011.1 | 2 | CFL88486.1 | 17716 |
| 1792 | GCA_001327395.1 | 28450 | 28450 | Burkholderia pseudomallei | 708a | Proteobacteria | CIAY01000003.1 | 2 | CPE71818.1 | 17718 |
| 1793 | GCA_001327415.1 | 28450 | 28450 | Burkholderia pseudomallei | BRI | Proteobacteria | CGFB01000038.1 | 2 | CFT96170.1 | 17720 |
| 1794 | GCA_001327435.1 | 28450 | 28450 | Burkholderia pseudomallei | E8 | Proteobacteria | CGFC01000007.1 | 2 | CFT85447.1 | 17722 |
| 1795 | GCA_001327495.1 | 28450 | 28450 | Burkholderia pseudomallei | TRF661 | Proteobacteria | CFWE01000007.1 | 2 | CFL56334.1 | 17724 |
| 1796 | GCA_001327555.1 | 28450 | 28450 | Burkholderia pseudomallei | E0387 | Proteobacteria | CHFI01000014.1 | 2 | CPI51234.1 | 17726 |
| 1797 | GCA_000486815.1 | 997333 | 28901 | Salmonella enterica subsp. | 0250 | Proteobacteria | AOYM01000072.1 | 2 | ESG20657.1 | 17728 |
| | | | | enterica serovar Oranienburg | | | | | | |
| | | | | str. 0250 | | | | | | |
| 1798 | GCA_000940895.1 | 1454592 | 28901 | Salmonella enterica subsp. | CDC 06-0532 | Proteobacteria | CP007211.1 | 2 | AJQ64506.1 | 17730 |
| | | | | enterica serovar Anatum str. | | | | | | |
| | | | | CDC 06-0532 | | | | | | |
| 1799 | GCA_000963535.1 | 1454590 | 28901 | Salmonella enterica subsp. | USDA-ARS- | Proteobacteria | CP007483.1 | 2 | AJZ80320.1 | 17732 |
| | | | | enterica serovar Anatum str. | USMARC-1175 | | | | | |
| | | | | USDA-ARS-USMARC-1175 | | | | | | |
| 1800 | GCA_001217125.1 | 36809 | 36809 | Mycobacterium abscessus | PAP090 | Actinobacteria | CSWS01000008.1 | 2 | CPW02861.1 | 17734 |
| 1801 | GCA_000332975.1 | 1220583 | 36820 | Gordonia aichiensis NBRC 108223 | NBRC 108223 | Actinobacteria | BANR01000007.1 | 2 | GAC48719.1 | 17736 |
| 1802 | GCA_000014925.1 | 290340 | 43663 | Paenarthrobacter aurescens TC1 | TC1; ATCC | Actinobacteria | CP000474.1 | 2 | ABM09581.1 | 17738 |
| | | | | | BAA-1386 | | | | | |
| 1803 | GCA_000473915.1 | 1219013 | 43767 | Rhodococcus equi NBRC 101255 = C 7 | C 7 | Actinobacteria | APJC01000016.1 | 2 | ERN46351.1 | 17740 |
| 1804 | GCA_001467645.1 | 45065 | 45065 | Legionella geestiana | ATCC 49504 | Proteobacteria | LNYC01000024.1 | 2 | KTD01946.1 | 17742 |
| 1805 | GCA_000967915.1 | 61635 | 61635 | Acholeplasma brassicae | O502 | Tenericutes | FO681348.1 | 2 | CCV65562.1 | 17744 |
| 1806 | GCA_001038235.1 | 61647 | 61647 | Pluralibacter gergoviae | DS82E24 | Proteobacteria | LDZG01000031.1 | 2 | KMK02865.1 | 17746 |
| 1807 | GCA_000568815.1 | 1150621 | 66821 | Sulfurospirillum multivorans DSM 12446 | DSM 12446 | Proteobacteria | CP007201.1 | 2 | AHJ12534.1 | 17748 |
| 1808 | GCA_001509475.1 | 68262 | 68262 | Streptomyces regalis | NRRL 3151 | Actinobacteria | LLZG01000047.1 | 2 | KUL42778.1 | 17750 |
| 1809 | GCA_000257785.1 | 1095730 | 76860 | Streptococcus constellatus subsp. | SK53 | Firmicutes | AICQ01000008.1 | 2 | EID21980.1 | 17752 |
| | | | | constellatus SK53 | | | | | | |
| 1810 | GCA_000474075.1 | 1095730 | 76860 | Streptococcus constellatus subsp. | SK53 | Firmicutes | BASU01000001.1 | 2 | GAD37767.1 | 17754 |
| | | | | constellatus SK53 | | | | | | |
| 1811 | GCA_001434855.1 | 1423788 | 83526 | Lactobacillus paralimentarius DSM 19674 | DSM 19674 | Firmicutes | AZDY01000037.1 | 2 | KRK83038.1 | 17756 |
| 1812 | GCA_000186185.1 | 562971 | 85698 | Achromobacter xylosoxidans C54 | C54 | Proteobacteria | GL636034.1 | 2 | EFV85442.1 | 17758 |
| 1813 | GCA_000364225.1 | 1235802 | 97253 | Eubacterium plexicaudatum ASF492 | ASF492 | Firmicutes | KB822499.1 | 2 | EMZ26178.1 | 17760 |
| 1814 | GCA_000317595.1 | 698759 | 103232 | Streptomyces ipomoeae 91-03 | 91-03 | Actinobacteria | AEJC01000486.1 | 2 | EKX62822.1 | 17762 |
| 1815 | GCA_000017145.1 | 366394 | 110321 | Sinorhizobium medicae WSM419 | WSM419 | Proteobacteria | CP000740.1 | 2 | ABR64200.1 | 17764 |
| 1816 | GCA_001188555.1 | 121719 | 121719 | Pannonibacter phragmitetus | CGMCC9175 | Proteobacteria | LGSQ01000007.1 | 2 | KND18807.1 | 17766 |
| 1817 | GCA_000092505.1 | 762051 | 136609 | Leuconostoc kimchii IMSNU 11154 | IMSNU 11154 | Firmicutes | CP001758.1 | 2 | ADG41466.1 | 17768 |
| 1818 | GCA_000156215.1 | 445975 | 147206 | Collinsella stercoris DSM 13279 | DSM 13279 | Actinobacteria | DS995474.1 | 2 | EEA91362.1 | 17770 |
| 1819 | GCA_000235505.1 | 742737 | 154046 | Hungatella hathewayi WAL-18680 | WAL-18680 | Firmicutes | JH379027.1 | 2 | EHI61152.1 | 17772 |
| 1820 | GCA_000178255.1 | 702450 | 154288 | Turicibacter sanguinis PC909 | PC909 | Firmicutes | ADMN01000123.1 | 2 | EFF62517.1 | 17774 |
| 1821 | GCA_001465255.1 | 162209 | 162209 | Paenibacillus naphthalenovorans | 32O-Y | Firmicutes | CP013652.1 | 2 | ALS25374.1 | 17776 |
| 1822 | GCA_000767835.1 | 176090 | 176090 | Streptococcus sinensis | HKU4 | Firmicutes | JPEN01000062.1 | 2 | KGM37271.1 | 17778 |
| 1823 | GCA_000568075.1 | 314330 | 314330 | Enterobacter sp. DC1 | DC1 | Proteobacteria | AZUA01000002.1 | 2 | EWG70341.1 | 17780 |
| 1824 | GCA_001050135.1 | 320787 | 320787 | Cyclobacterium amurskyense | KCTC 12363 | Bacteroidetes | CP012040.1 | 2 | AKP49793.1 | 17782 |
| 1825 | GCA_000964065.1 | 332411 | 332411 | Aquitalea magnusonii | SM6 | Proteobacteria | JZRC01000020.1 | 2 | KJV29339.1 | 17784 |
| 1826 | GCA_000264295.1 | 1163407 | 347483 | Rhodanobacter spathiphylli B39 | B39 | Proteobacteria | AJXT01000055.1 | 2 | EIL89963.1 | 17786 |
| 1827 | GCA_000737685.1 | 362418 | 362418 | Flavobacterium reichenbachii | LMG 25512 | Bacteroidetes | JPRL01000001.1 | 2 | KFF05553.1 | 17788 |
| 1828 | GCA_001405815.1 | 388408 | 388408 | Labrenzia alexandrii | CECT 5112 | Proteobacteria | CXWD01000013.1 | 2 | CTQ72905.1 | 17790 |
| 1829 | GCA_001444505.1 | 554343 | 554343 | Psychrobacter piscatorii | LQ58 | Proteobacteria | LNDJ01000085.1 | 2 | KRU21991.1 | 17792 |
| 1830 | GCA_000956505.1 | 582680 | 582680 | Microbacterium azadirachtae | ARN176 | Actinobacteria | JYIX01000037.1 | 2 | KJL32259.1 | 17794 |
| 1831 | GCA_000245715.1 | 1050222 | 1050222 | Paenibacillus sp. Aloe-11 | Aloe-11 | Firmicutes | JH601082.1 | 2 | EHS54840.1 | 17796 |
| 1832 | GCA_000282055.1 | 1144313 | 1144313 | Flavobacterium sp. CF136 | CF136 | Bacteroidetes | AKJZ01000027.1 | 2 | EJL63880.1 | 17798 |
| 1833 | GCA_000282675.1 | 1144320 | 1144320 | Pantoea sp. GM01 | GM01 | Proteobacteria | AKIU01000064.1 | 2 | EJL84705.1 | 17800 |
| 1834 | GCA_000260835.1 | 946077 | 1165090 | Imtechella halotolerans K1 | K1 | Bacteroidetes | AJJU01000017.1 | 2 | EID73851.1 | 17802 |
| 1835 | GCA_001532035.1 | 1207504 | 1207504 | Burkholderia pseudomultivorans | MSMB368WGS | Proteobacteria | LPJR01000094.1 | 2 | KWF17574.1 | 17804 |
| 1836 | GCA_000466565.1 | 1226324 | 1226324 | Blautia sp. KLE 1732 | KLE 1732 | Firmicutes | KE993386.1 | 2 | ERI96811.1 | 17806 |
| 1837 | GCA_000403295.2 | 1235792 | 1235792 | Lachnospiraceae bacterium M18-1 | M18-1 | Firmicutes | KE159609.1 | 2 | EOS38323.1 | 17808 |
| 1838 | GCA_000403335.2 | 1235793 | 1235793 | Lachnospiraceae bacterium COE1 | COE1 | Firmicutes | KE159632.1 | 2 | EOS41468.1 | 17810 |
| 1839 | GCA_000438215.1 | 1263066 | 1263066 | Clostridium clostridioforme CAG:511 | | Firmicutes | FR903693.1 | 2 | CDF26098.1 | 17812 |
| 1840 | GCA_000768755.1 | 1537504 | 1537504 | Porphyromonas sp. COT-108 OH1349 | COT-108 | Bacteroidetes | JRAH01000034.1 | 2 | KGN67552.1 | 17814 |
| | | | | | OH1349 | | | | | |
| 1841 | GCA_001508375.1 | 1635262 | 1635262 | Desulfotomaculum sp. 46_296 | | Firmicutes | LGFZ01000024.1 | 2 | KUK53685.1 | 17816 |
| 1842 | GCA_000988325.1 | 1643451 | 1643451 | Sphingobacterium sp. Ag1 | Ag1 | Bacteroidetes | LBGU01000044.1 | 2 | KKO89442.1 | 17818 |
| 1843 | GCA_001187905.1 | 1681195 | 1681195 | Pantoea sp. RIT-PI-b | RIT-PI-b | Proteobacteria | LGIS01000026.1 | 2 | KNC08320.1 | 17820 |
| 1844 | GCA_001422575.1 | 1736224 | 1736224 | Serratia sp. Leaf51 | Leaf51 | Proteobacteria | LMU01000057.1 | 2 | KQN48064.1 | 17822 |
| 1845 | GCA_000979175.1 | 2209 | 2209 | Methanosarcina mazei | 1.H.A.1A.3 | Euryarchaeota | JJQH01000125.1 | 2 | KKH38512.1 | 17824 |
| 1846 | GCA_000979195.1 | 2209 | 2209 | Methanosarcina mazei | 1.H.A.2.3 | Euryarchaeota | JJQM01000126.1 | 2 | KKH53104.1 | 17826 |
| 1847 | GCA_000979205.1 | 2209 | 2209 | Methanosarcina mazei | 1.H.A.2.7 | Euryarchaeota | JJQ001000047.1 | 2 | KKH68857.1 | 17828 |
| 1848 | GCA_000979255.1 | 2209 | 2209 | Methanosarcina mazei | 1.H.M.1A.2 | Euryarchaeota | JJQS01000129.1 | 2 | KKH71868.1 | 17830 |
| 1849 | GCA_000979275.1 | 2209 | 2209 | Methanosarcina mazei | 1.H.M.2.2 | Euryarchaeota | JJQV01000133.1 | 2 | KKH80640.1 | 17832 |
| 1850 | GCA_000979335.1 | 2209 | 2209 | Methanosarcina mazei | 2.F.A.2.3 | Euryarchaeota | JJOR01000174.1 | 2 | KKF98496.1 | 17834 |
| 1851 | GCA_000979925.1 | 2209 | 2209 | Methanosarcina mazei | 1.H.A.1A.6 | Euryarchaeota | JJQJ01000061.1 | 2 | KKH51286.1 | 17836 |
| 1852 | GCA_000980005.1 | 2209 | 2209 | Methanosarcina mazei | 1.H.A.2.8 | Euryarchaeota | JJQP01000201.1 | 2 | KKH64073.1 | 17838 |
| 1853 | GCA_000980055.1 | 2209 | 2209 | Methanosarcina mazei | 1.H.M.1A.1 | Euryarchaeota | JJQR01000061.1 | 2 | KKH76320.1 | 17840 |
| 1854 | GCA_000980075.1 | 2209 | 2209 | Methanosarcina mazei | 1.H.M.2.3 | Euryarchaeota | JJQW01000059.1 | 2 | KKH88481.1 | 17842 |
| 1855 | GCA_000980085.1 | 2209 | 2209 | Methanosarcina mazei | 1.H.M.1A.3 | Euryarchaeota | JJQT01000187.1 | 2 | KKH75119.1 | 17844 |
| 1856 | GCA_000980105.1 | 2209 | 2209 | Methanosarcina mazei | 1.H.M.2.4 | Euryarchaeota | JJQX01000190.1 | 2 | KKH91069.1 | 17846 |
| 1857 | GCA_000980135.1 | 2209 | 2209 | Methanosarcina mazei | 1.H.T.2.1 | Euryarchaeota | JJQZ01000005.1 | 2 | KKI00020.1 | 17848 |
| 1858 | GCA_000980155.1 | 2209 | 2209 | Methanosarcina mazei | 1.H.T.2.3 | Euryarchaeota | JJRA01000002.1 | 2 | KKI06936.1 | 17850 |
| 1859 | GCA_000980175.1 | 2209 | 2209 | Methanosarcina mazei | 1.H.T.2.5 | Euryarchaeota | JJRB01000041.1 | 2 | KKI04817.1 | 17852 |
| 1860 | GCA_000465655.1 | 1390372 | 1390 | Bacillus amyloliquefaciens EGD-AQ14 | EGD-AQ14 | Firmicutes | AVQH01000001.1 | 2 | ERH59124.1 | 17854 |
| 1861 | GCA_000092605.1 | 75379 | 926 | Thiomonas intermedia K12 | K12 | Proteobacteria | CP002021.1 | 3 | ADG31357.1 | 17856 |
| 1862 | GCA_001263815.1 | 837 | 837 | Porphyromonas gingivalis | A7436 | Bacteroidetes | CP011995.1 | 3 | AKV63928.1 | 17859 |
| 1863 | GCA_000436435.1 | 1263050 | 1263050 | Bacteroides ovatus CAG:22 | | Bacteroidetes | FR885648.1 | 3 | CDB59852.1 | 17862 |
| 1864 | GCA_000154245.1 | 411489 | 411489 | Clostridium sp. L2-50 | L2-50 | Firmicutes | DS480312.1 | 3 | ED056710.1 | 17865 |
| 1865 | GCA_000768935.1 | 1515615 | 1515615 | Porphyromonas sp. COT-290 OH860 | COT-290 | Bacteroidetes | JRAR01000072.1 | 3 | KGN82593.1 | 17868 |
| | | | | | OH860 | | | | | |
| 1866 | GCA_001183745.1 | 438 | 438 | Acetobacter pasteurianus | Ab 3 | Proteobacteria | CP012111.1 | 3 | AKR49340.1 | 17871 |
| 1867 | GCA_000496775.1 | 1399146 | 550 | Enterobacter cloacae S611 | S611 | Proteobacteria | AXOM01000048.1 | 3 | ESS57310.1 | 17874 |
| 1868 | GCA_000007445.1 | 199310 | 562 | Escherichia coli CFT073 | CFT073 | Proteobacteria | AE014075.1 | 3 | AAN80859.1 | 17877 |
| 1869 | GCA_000164295.1 | 749528 | 562 | Escherichia coli MS 45-1 | MS 45-1 | Proteobacteria | GG772205.1 | 3 | EFJ93881.1 | 17880 |
| 1870 | GCA_000164415.1 | 749536 | 562 | Escherichia coli MS 110-3 | MS 110-3 | Proteobacteria | GG773033.1 | 3 | EFU46133.1 | 17883 |
| 1871 | GCA_000164435.1 | 749541 | 562 | Escherichia coli MS 153-1 | MS 153-1 | Proteobacteria | GG773212.1 | 3 | EFU49595.1 | 17886 |
| 1872 | GCA_000164535.1 | 749550 | 562 | Escherichia coli MS 200-1 | MS 200-1 | Proteobacteria | GG773863.1 | 3 | EFJ59502.1 | 17889 |
| 1873 | GCA_000164595.1 | 749530 | 562 | Escherichia coli MS 60-1 | MS 60-1 | Proteobacteria | GG774357.1 | 3 | EGB82665.1 | 17892 |
| 1874 | GCA_000179795.1 | 753642 | 562 | Escherichia coli NC101 | NC101 | Proteobacteria | AEFA01000016.1 | 3 | EFM52806.1 | 17895 |
| 1875 | GCA_000190915.1 | 656390 | 562 | Escherichia coli H263 | H263 | Proteobacteria | GL871979.1 | 3 | EGB52118.1 | 17898 |
| 1876 | GCA_000233875.1 | 885276 | 562 | Escherichia coli str. ‘clone D i2’ | clone D i2 | Proteobacteria | CP002211.1 | 3 | AER84780.1 | 17901 |
| 1877 | GCA_000233895.1 | 885275 | 562 | Escherichia coli str. ‘clone D i14’ | clone D i14 | Proteobacteria | CP002212.1 | 3 | AER89699.1 | 17904 |
| 1878 | GCA_000241975.1 | 656398 | 562 | Escherichia coli H397 | H397 | Proteobacteria | JH590471.1 | 3 | EH002519.1 | 17907 |
| 1879 | GCA_000295775.2 | 1206108 | 562 | Escherichia coli J96 | J96 | Proteobacteria | ALIN02000009.1 | 3 | ELL42848.1 | 17910 |
| 1880 | GCA_000326165.1 | 1169374 | 562 | Escherichia coli KTE106 | KTE106 | Proteobacteria | ANXN01000036.1 | 3 | ELI13536.1 | 17913 |
| 1881 | GCA_000326225.1 | 1169381 | 562 | Escherichia coli KTE124 | KTE124 | Proteobacteria | ANXU01000045.1 | 3 | ELI43906.1 | 17916 |
| 1882 | GCA_000326285.1 | 1169385 | 562 | Escherichia coli KTE131 | KTE131 | Proteobacteria | ANXY01000031.1 | 3 | ELI67626.1 | 17919 |
| 1883 | GCA_000326305.1 | 1169386 | 562 | Escherichia coli KTE133 | KTE133 | Proteobacteria | ANXZ01000016.1 | 3 | ELI72589.1 | 17922 |
| 1884 | GCA_000326325.1 | 1169387 | 562 | Escherichia coli KTE137 | KTE137 | Proteobacteria | ANYA01000031.1 | 3 | ELI75960.1 | 17925 |
| 1885 | GCA_000326385.1 | 1169393 | 562 | Escherichia coli KTE153 | KTE153 | Proteobacteria | ANYG01000025.1 | 3 | EU03561.1 | 17928 |
| 1886 | GCA_000326405.1 | 1169395 | 562 | Escherichia coli KTE160 | KTE160 | Proteobacteria | ANYI01000026.1 | 3 | EU14334.1 | 17931 |
| 1887 | GCA_000326605.1 | 1169400 | 562 | Escherichia coli KTE174 | KTE174 | Proteobacteria | ANYN01000054.1 | 3 | EU38405.1 | 17934 |
| 1888 | GCA_000326625.1 | 1169366 | 562 | Escherichia coli KTE88 | KTE88 | Proteobacteria | ANYV01000037.1 | 3 | EU71313.1 | 17937 |
| 1889 | GCA_000326705.1 | 1169390 | 562 | Escherichia coli KTE145 | KTE145 | Proteobacteria | ANYD01000026.1 | 3 | ELI89432.1 | 17940 |
| 1890 | GCA_000326905.1 | 1169398 | 562 | Escherichia coli KTE167 | KTE167 | Proteobacteria | KB731668.1 | 3 | EU28710.1 | 17943 |
| 1891 | GCA_000350745.1 | 1169334 | 562 | Escherichia coli KTE15 | KTE15 | Proteobacteria | KB732276.1 | 3 | ELC30031.1 | 17946 |
| 1892 | GCA_000350985.1 | 1181735 | 562 | Escherichia coli KTE189 | KTE189 | Proteobacteria | KB732437.1 | 3 | ELC84584.1 | 17949 |
| 1893 | GCA_000351005.1 | 1181737 | 562 | Escherichia coli KTE191 | KTE191 | Proteobacteria | KB732446.1 | 3 | ELC89744.1 | 17952 |
| 1894 | GCA_000351045.1 | 1181747 | 562 | Escherichia coli KTE201 | KTE201 | Proteobacteria | KB732482.1 | 3 | ELC99568.1 | 17955 |
| 1895 | GCA_000351105.1 | 1181752 | 562 | Escherichia coli KTE206 | KTE206 | Proteobacteria | KB732494.1 | 3 | ELD14727.1 | 17958 |
| 1896 | GCA_000351245.1 | 1181766 | 562 | Escherichia coli KTE220 | KTE220 | Proteobacteria | KB733367.1 | 3 | ELD50500.1 | 17961 |
| 1897 | GCA_000351485.1 | 1182660 | 562 | Escherichia coli KTE53 | KTE53 | Proteobacteria | KB732687.1 | 3 | ELE05785.1 | 17964 |
| 1898 | GCA_000351545.1 | 1182664 | 562 | Escherichia coli KTE57 | KTE57 | Proteobacteria | KB732714.1 | 3 | ELE19657.1 | 17967 |
| 1899 | GCA_000351565.1 | 1182665 | 562 | Escherichia coli KTE58 | KTE58 | Proteobacteria | KB732739.1 | 3 | ELE23560.1 | 17970 |
| 1900 | GCA_000351665.1 | 1182679 | 562 | Escherichia coli KTE72 | KTE72 | Proteobacteria | KB733397.1 | 3 | ELE50401.1 | 17973 |
| 1901 | GCA_000351805.1 | 1182691 | 562 | Escherichia coli KTE86 | KTE86 | Proteobacteria | KB732872.1 | 3 | ELE80392.1 | 17976 |
| 1902 | GCA_000351825.1 | 1182692 | 562 | Escherichia coli KTE87 | KTE87 | Proteobacteria | KB732881.1 | 3 | ELE90662.1 | 17979 |
| 1903 | GCA_000351845.1 | 1182696 | 562 | Escherichia coli KTE93 | KTE93 | Proteobacteria | KB732897.1 | 3 | ELE91478.1 | 17982 |
| 1904 | GCA_000352085.1 | 1169328 | 562 | Escherichia coli KTE8 | KTE8 | Proteobacteria | KB732984.1 | 3 | ELF50405.1 | 17985 |
| 1905 | GCA_000352265.1 | 1169341 | 562 | Escherichia coli KTE22 | KTE22 | Proteobacteria | KB733023.1 | 3 | ELF92090.1 | 17988 |
| 1906 | GCA_000352365.1 | 1182666 | 562 | Escherichia coli KTE59 | KTE59 | Proteobacteria | KB733042.1 | 3 | ELG14338.1 | 17991 |
| 1907 | GCA_000352385.1 | 1182670 | 562 | Escherichia coli KTE63 | KTE63 | Proteobacteria | KB733049.1 | 3 | ELG17003.1 | 17994 |
| 1908 | GCA_000352405.1 | 1182672 | 562 | Escherichia coli KTE65 | KTE65 | Proteobacteria | KB733066.1 | 3 | ELG24591.1 | 17997 |
| 1909 | GCA_000352545.1 | 1182709 | 562 | Escherichia coli KTE118 | KTE118 | Proteobacteria | KB733111.1 | 3 | ELG54538.1 | 18000 |
| 1910 | GCA_000352565.1 | 1182712 | 562 | Escherichia coli KTE123 | KTE123 | Proteobacteria | KB733071.1 | 3 | ELG58278.1 | 18003 |
| 1911 | GCA_000352905.1 | 1181729 | 562 | Escherichia coli KTE183 | KTE183 | Proteobacteria | KB733173.1 | 3 | ELH44356.1 | 18006 |
| 1912 | GCA_000353005.1 | 1181753 | 562 | Escherichia coli KTE207 | KTE207 | Proteobacteria | KB733196.1 | 3 | ELH62529.1 | 18009 |
| 1913 | GCA_000353025.1 | 1181755 | 562 | Escherichia coli KTE209 | KTE209 | Proteobacteria | KB733361.1 | 3 | ELH59268.1 | 18012 |
| 1914 | GCA_000353065.1 | 1181761 | 562 | Escherichia coli KTE215 | KTE215 | Proteobacteria | KB733208.1 | 3 | ELH80077.1 | 18015 |
| 1915 | GCA_000353105.1 | 1181764 | 562 | Escherichia coli KTE218 | KTE218 | Proteobacteria | KB733215.1 | 3 | ELH85630.1 | 18018 |
| 1916 | GCA_000353125.1 | 1181769 | 562 | Escherichia coli KTE223 | KTE223 | Proteobacteria | KB733352.1 | 3 | ELH88471.1 | 18021 |
| 1917 | GCA_000353185.1 | 1169372 | 562 | Escherichia coli KTE104 | KTE104 | Proteobacteria | KB733272.1 | 3 | ELI08747.1 | 18024 |
| 1918 | GCA_000401755.1 | 1322345 | 562 | Escherichia coli ATCC 25922 | ATCC 25922 | Proteobacteria | ASHD01000045.1 | 3 | EOR52540.1 | 18027 |
| 1919 | GCA_000408125.1 | 1181741 | 562 | Escherichia coli KTE195 | KTE195 | Proteobacteria | KE136905.1 | 3 | EOV07668.1 | 18030 |
| 1920 | GCA_000408285.1 | 1181772 | 562 | Escherichia coli KTE226 | KTE226 | Proteobacteria | KE136996.1 | 3 | EOX10652.1 | 18033 |
| 1921 | GCA_000408505.1 | 1182693 | 562 | Escherichia coli KTE89 | KTE89 | Proteobacteria | KE137142.1 | 3 | EOV94186.1 | 18036 |
| 1922 | GCA_000456005.1 | 1280956 | 562 | Escherichia coli HVH 1 (4-6876161) | HVH 1 (4-6876161) | Proteobacteria | KE698776.1 | 3 | EQN11053.1 | 18039 |
| 1923 | GCA_000456065.1 | 1280959 | 562 | Escherichia coli HVH 4 (4-7276109) | HVH 4 (4-7276109) | Proteobacteria | KE698831.1 | 3 | EQN19685.1 | 18042 |
| 1924 | GCA_000456125.1 | 1280962 | 562 | Escherichia coli HVH 7 (4-7315031) | HVH 7 (4-7315031) | Proteobacteria | KE698877.1 | 3 | EQN35019.1 | 18045 |
| 1925 | GCA_000456205.1 | 1280967 | 562 | Escherichia coli HVH 16 (4-7649002) | HVH 16 (4-7649002) | Proteobacteria | KE698922.1 | 3 | EQN48989.1 | 18048 |
| 1926 | GCA_000456285.1 | 1280971 | 562 | Escherichia coli HVH 20 (4-5865042) | HVH 20 (4-5865042) | Proteobacteria | KE699006.1 | 3 | EQN62516.1 | 18051 |
| 1927 | GCA_000456305.1 | 1280972 | 562 | Escherichia coli HVH 21 (4-4517873) | HVH 21 (4-4517873) | Proteobacteria | KE699022.1 | 3 | EQN79331.1 | 18054 |
| 1928 | GCA_000456385.1 | 1280977 | 562 | Escherichia coli HVH 26 (4-5703913) | HVH 26 (4-5703913) | Proteobacteria | KE699069.1 | 3 | EQN86135.1 | 18057 |
| 1929 | GCA_000456405.1 | 1280978 | 562 | Escherichia coli HVH 27 (4-7449267) | HVH 27 (4-7449267) | Proteobacteria | KE699090.1 | 3 | EQN96595.1 | 18060 |
| 1930 | GCA_000456425.1 | 1280979 | 562 | Escherichia coli HVH 28 (4-0907367) | HVH 28 (4-0907367) | Proteobacteria | KE699097.1 | 3 | EQO12273.1 | 18063 |
| 1931 | GCA_000456465.1 | 1280981 | 562 | Escherichia coli HVH 30 (4-2661829) | HVH 30 (4-2661829) | Proteobacteria | KE699120.1 | 3 | EQO16638.1 | 18066 |
| 1932 | GCA_000456485.1 | 1280982 | 562 | Escherichia coli HVH 31 (4-2602156) | HVH 31 (4-2602156) | Proteobacteria | KE699127.1 | 3 | EQO18515.1 | 18069 |
| 1933 | GCA_000456545.1 | 1280985 | 562 | Escherichia coli HVH 35 (4-2962667) | HVH 35 (4-2962667) | Proteobacteria | KE699157.1 | 3 | EQO32111.1 | 18072 |
| 1934 | GCA_000456565.1 | 1280987 | 562 | Escherichia coli HVH 37 (4-2773848) | HVH 37 (4-2773848) | Proteobacteria | KE699170.1 | 3 | EQO40647.1 | 18075 |
| 1935 | GCA_000456625.1 | 1280990 | 562 | Escherichia coli HVH 40 (4-1219782) | HVH 40 (4-1219782) | Proteobacteria | KE699214.1 | 3 | EQO47387.1 | 18078 |
| 1936 | GCA_000456765.1 | 1280997 | 562 | Escherichia coli HVH 48 (4-2658593) | HVH 48 (4-2658593) | Proteobacteria | KE699294.1 | 3 | EQO84680.1 | 18081 |
| 1937 | GCA_000456785.1 | 1280999 | 562 | Escherichia coli HVH 51 (4-2172526) | HVH 51 (4-2172526) | Proteobacteria | KE699304.1 | 3 | EQO93036.1 | 18084 |
| 1938 | GCA_000456825.1 | 1281002 | 562 | Escherichia coli HVH 55 (4-2646161) | HVH 55 (4-2646161) | Proteobacteria | KE699321.1 | 3 | EQP00513.1 | 18087 |
| 1939 | GCA_000456845.1 | 1281003 | 562 | Escherichia coli HVH 56 (4-2153033) | HVH 56 (4-2153033) | Proteobacteria | KE699325.1 | 3 | EQP09250.1 | 18090 |
| 1940 | GCA_000456865.1 | 1281004 | 562 | Escherichia coli HVH 58 (4-2839709) | HVH 58 (4-2839709) | Proteobacteria | KE699335.1 | 3 | EQP11538.1 | 18093 |
| 1941 | GCA_000456905.1 | 1281006 | 562 | Escherichia coli HVH 61 (4-2736020) | HVH 61 (4-2736020) | Proteobacteria | KE699360.1 | 3 | EQP21163.1 | 18096 |
| 1942 | GCA_000456965.1 | 1281009 | 562 | Escherichia coli HVH 68 (4-0888028) | HVH 68 (4-0888028) | Proteobacteria | KE699393.1 | 3 | EQP38130.1 | 18099 |
| 1943 | GCA_000457005.1 | 1281011 | 562 | Escherichia coli HVH 70 (4-2963531) | HVH 70 (4-2963531) | Proteobacteria | KE699425.1 | 3 | EQP55415.1 | 18102 |
| 1944 | GCA_000457045.1 | 1281013 | 562 | Escherichia coli HVH 74 (4-1034782) | HVH 74 (4-1034782) | Proteobacteria | KE699452.1 | 3 | EQP53333.1 | 18105 |
| 1945 | GCA_000457065.1 | 1281014 | 562 | Escherichia coli HVH 76 (4-2538717) | HVH 76 (4-2538717) | Proteobacteria | KE699459.1 | 3 | EQP61514.1 | 18108 |
| 1946 | GCA_000457085.1 | 1281015 | 562 | Escherichia coli HVH 77 (4-2605759) | HVH 77 (4-2605759) | Proteobacteria | KE699520.1 | 3 | EQP73530.1 | 18111 |
| 1947 | GCA_000457105.1 | 1281016 | 562 | Escherichia coli HVH 78 (4-2735946) | HVH 78 (4-2735946) | Proteobacteria | KE699531.1 | 3 | EQP70429.1 | 18114 |
| 1948 | GCA_000457265.1 | 1281026 | 562 | Escherichia coli HVH 89 (4-5885604) | HVH 89 (4-5885604) | Proteobacteria | KE699634.1 | 3 | EQQ06480.1 | 18117 |
| 1949 | GCA_000457325.1 | 1281029 | 562 | Escherichia coli HVH 92 (4-5930790) | HVH 92 (4-5930790) | Proteobacteria | KE705250.1 | 3 | EQQ25252.1 | 18120 |
| 1950 | GCA_000457345.1 | 1281031 | 562 | Escherichia coli HVH 95 (4-6074464) | HVH 95 (4-6074464) | Proteobacteria | KE699681.1 | 3 | EQQ27933.1 | 18123 |
| 1951 | GCA_000457385.1 | 1281032 | 562 | Escherichia coli HVH 96 (4-5934869) | HVH 96 (4-5934869) | Proteobacteria | KE699694.1 | 3 | EQQ41432.1 | 18126 |
| 1952 | GCA_000457405.1 | 1281036 | 562 | Escherichia coli HVH 100 (4-2850729) | HVH 100 (4-2850729) | Proteobacteria | KE699702.1 | 3 | EQQ33647.1 | 18129 |
| 1953 | GCA_000457435.1 | 1281039 | 562 | Escherichia coli HVH 103 (4-5904188) | HVH 103 (4-5904188) | Proteobacteria | KE699715.1 | 3 | EQQ53134.1 | 18132 |
| 1954 | GCA_000457515.1 | 1281045 | 562 | Escherichia coli HVH 109 (4-6977162) | HVH 109 (4-6977162) | Proteobacteria | KE699785.1 | 3 | EQQ74422.1 | 18135 |
| 1955 | GCA_000457555.1 | 1281047 | 562 | Escherichia coli HVH 111 (4-7039018) | HVH 111 (4-7039018) | Proteobacteria | KE699806.1 | 3 | EQQ75981.1 | 18138 |
| 1956 | GCA_000457575.1 | 1281048 | 562 | Escherichia coli HVH 112 (4-5987253) | HVH 112 (4-5987253) | Proteobacteria | KE699821.1 | 3 | EQQ88668.1 | 18141 |
| 1957 | GCA_000457615.1 | 1281050 | 562 | Escherichia coli HVH 114 (4-7037740) | HVH 114 (4-7037740) | Proteobacteria | KE699847.1 | 3 | EQQ90545.1 | 18144 |
| 1958 | GCA_000457675.1 | 1281053 | 562 | Escherichia coli HVH 116 (4-6879942) | HVH 116 (4-6879942) | Proteobacteria | KE699890.1 | 3 | EQR07410.1 | 18147 |
| 1959 | GCA_000457695.1 | 1281054 | 562 | Escherichia coli HVH 117 (4-6857191) | HVH 117(4-6857191) | Proteobacteria | KE699912.1 | 3 | EQR15138.1 | 18150 |
| 1960 | GCA_000457715.1 | 1281055 | 562 | Escherichia coli HVH 118 (4-7345399) | HVH 118 (4-7345399) | Proteobacteria | KE699926.1 | 3 | EQR19371.1 | 18153 |
| 1961 | GCA_000457755.1 | 1281057 | 562 | Escherichia coli HVH 120 (4-6978681) | HVH 120 (4-6978681) | Proteobacteria | KE699947.1 | 3 | EQR28930.1 | 18156 |
| 1962 | GCA_000457915.1 | 1281065 | 562 | Escherichia coli HVH 132 (4-6876862) | HVH 132 (4-6876862) | Proteobacteria | KE700080.1 | 3 | EQR67054.1 | 18159 |
| 1963 | GCA_000457995.1 | 1281070 | 562 | Escherichia coli HVH 137 (4-2124971) | HVH 137(4-2124971) | Proteobacteria | KE700110.1 | 3 | EQR88164.1 | 18162 |
| 1964 | GCA_000458015.1 | 1281071 | 562 | Escherichia coli HVH 138 (4-6066704) | HVH 138 (4-6066704) | Proteobacteria | KE700120.1 | 3 | EQR94358.1 | 18165 |
| 1965 | GCA_000458095.1 | 1281075 | 562 | Escherichia coli HVH 142 (4-5627451) | HVH 142 (4-5627451) | Proteobacteria | KE700203.1 | 3 | EQS19450.1 | 18168 |
| 1966 | GCA_000458115.1 | 1281076 | 562 | Escherichia coli HVH 143 (4-5674999) | HVH 143 (4-5674999) | Proteobacteria | KE700210.1 | 3 | EQS13124.1 | 18171 |
| 1967 | GCA_000458135.1 | 1281077 | 562 | Escherichia coli HVH 144 (4-4451937) | HVH 144 (4-4451937) | Proteobacteria | KE700223.1 | 3 | EQS20959.1 | 18174 |
| 1968 | GCA_000458215.1 | 1281082 | 562 | Escherichia coli HVH 149 (4-4451880) | HVH 149 (4-4451880) | Proteobacteria | KE700251.1 | 3 | EQS40214.1 | 18177 |
| 1969 | GCA_000458355.1 | 1281090 | 562 | Escherichia coli HVH 157 (4-3406229) | HVH 157 (4-3406229) | Proteobacteria | KE700382.1 | 3 | ERA75001.1 | 18180 |
| 1970 | GCA_000458375.1 | 1281091 | 562 | Escherichia coli HVH 158 (4-3224287) | HVH 158 (4-3224287) | Proteobacteria | KE700388.1 | 3 | EQS62808.1 | 18183 |
| 1971 | GCA_000458395.1 | 1281092 | 562 | Escherichia coli HVH 159 (4-5818141) | HVH 159 (4-5818141) | Proteobacteria | KE700400.1 | 3 | ERA80457.1 | 18186 |
| 1972 | GCA_000458415.1 | 1281093 | 562 | Escherichia coli HVH 160 (4-5695937) | HVH 160 (4-5695937) | Proteobacteria | KE700412.1 | 3 | ERA86693.1 | 18189 |
| 1973 | GCA_000458435.1 | 1281094 | 562 | Escherichia coli HVH 161 (4-3119890) | HVH 161 (4-3119890) | Proteobacteria | KE700429.1 | 3 | EQS67056.1 | 18192 |
| 1974 | GCA_000458535.1 | 1281099 | 562 | Escherichia coli HVH 169 (4-1075578) | HVH 169 (4-1075578) | Proteobacteria | KE700489.1 | 3 | EQS96897.1 | 18195 |
| 1975 | GCA_000458575.1 | 1281101 | 562 | Escherichia coli HVH 171 (4-3191958) | HVH 171 (4-3191958) | Proteobacteria | KE700518.1 | 3 | EQT00426.1 | 18198 |
| 1976 | GCA_000458605.1 | 1281102 | 562 | Escherichia coli HVH 172 (4-3248542) | HVH 172 (4-3248542) | Proteobacteria | KE700534.1 | 3 | EQT14974.1 | 18201 |
| 1977 | GCA_000458645.1 | 1281104 | 562 | Escherichia coli HVH 175 (4-3405184) | HVH 175 (4-3405184) | Proteobacteria | KE700564.1 | 3 | EQT25531.1 | 18204 |
| 1978 | GCA_000458745.1 | 1281111 | 562 | Escherichia coli HVH 184 (4-3343286) | HVH 184 (4-3343286) | Proteobacteria | KE700641.1 | 3 | EQT45492.1 | 18207 |
| 1979 | GCA_000458765.1 | 1281112 | 562 | Escherichia coli HVH 185 (4-2876639) | HVH 185 (4-2876639) | Proteobacteria | KE700651.1 | 3 | EQT50681.1 | 18210 |
| 1980 | GCA_000458895.1 | 1281119 | 562 | Escherichia coli HVH 192 (4-3054470) | HVH 192 (4-3054470) | Proteobacteria | KE700778.1 | 3 | EQT83221.1 | 18213 |
| 1981 | GCA_000458935.1 | 1281121 | 562 | Escherichia coli HVH 194 (4-2356805) | HVH 194 (4-2356805) | Proteobacteria | KE700789.1 | 3 | EQT95718.1 | 18216 |
| 1982 | GCA_000458995.1 | 1281124 | 562 | Escherichia coli HVH 197 (4-4466217) | HVH 197 (4-4466217) | Proteobacteria | KE700810.1 | 3 | EQU21869.1 | 18219 |
| 1983 | GCA_000459035.1 | 1281126 | 562 | Escherichia coli HVH 199 (4-5670322) | HVH 199 (4-5670322) | Proteobacteria | KE700830.1 | 3 | EQU12098.1 | 18222 |
| 1984 | GCA_000459255.1 | 1281137 | 562 | Escherichia coli HVH 210 (4-3042480) | HVH 210 (4-3042480) | Proteobacteria | KE700929.1 | 3 | ERA90778.1 | 18225 |
| 1985 | GCA_000459275.1 | 1281138 | 562 | Escherichia coli HVH 211 (4-3041891) | HVH 211 (4-3041891) | Proteobacteria | KE700944.1 | 3 | EQU70206.1 | 18228 |
| 1986 | GCA_000459295.1 | 1281139 | 562 | Escherichia coli HVH 212 (3-9305343) | HVH 212 (3-9305343) | Proteobacteria | KE700966.1 | 3 | EQU77946.1 | 18231 |
| 1987 | GCA_000459355.1 | 1281143 | 562 | Escherichia coli HVH 216 (4-3042952) | HVH 216 (4-3042952) | Proteobacteria | KE701004.1 | 3 | EQU95026.1 | 18234 |
| 1988 | GCA_000459395.1 | 1281145 | 562 | Escherichia coli HVH 218 (4-4500903) | HVH 218 (4-4500903) | Proteobacteria | KE701041.1 | 3 | EQV01575.1 | 18237 |
| 1989 | GCA_000459415.1 | 1281146 | 562 | Escherichia coli HVH 220 (4-5876842) | HVH 220 (4-5876842) | Proteobacteria | KE701064.1 | 3 | EQV09456.1 | 18240 |
| 1990 | GCA_000459515.1 | 1281151 | 562 | Escherichia coli HVH 227 (4-2277670) | HVH 227 (4-2277670) | Proteobacteria | KE701157.1 | 3 | EQV27904.1 | 18243 |
| 1991 | GCA_000459535.1 | 1281152 | 562 | Escherichia coli HVH 228 (4-7787030) | HVH 228 (4-7787030) | Proteobacteria | KE701167.1 | 3 | ERA94628.1 | 18246 |
| 1992 | GCA_000459595.1 | 1281155 | 562 | Escherichia coli KOEGE 10 (25a) | KOEGE 10 (25a) | Proteobacteria | KE701219.1 | 3 | ERB07224.1 | 18249 |
| 1993 | GCA_000459615.1 | 1281156 | 562 | Escherichia coli KOEGE 30 (63a) | KOEGE 30 (63a) | Proteobacteria | KE701229.1 | 3 | EQV33722.1 | 18252 |
| 1994 | GCA_000459755.1 | 1281163 | 562 | Escherichia coli KOEGE 58 (171a) | KOEGE 58 (171a) | Proteobacteria | KE701333.1 | 3 | EQV70972.1 | 18255 |
| 1995 | GCA_000459835.1 | 1281167 | 562 | Escherichia coli KOEGE 70 (185a) | KOEGE 70 (185a) | Proteobacteria | KE701373.1 | 3 | EQV84934.1 | 18258 |
| 1996 | GCA_000460055.1 | 1281178 | 562 | Escherichia coli UMEA 3053-1 | UMEA 3053-1 | Proteobacteria | KE701486.1 | 3 | EQW43215.1 | 18261 |
| 1997 | GCA_000460175.1 | 1281184 | 562 | Escherichia coli UMEA 3113-1 | UMEA 3113-1 | Proteobacteria | KE701574.1 | 3 | EQW70393.1 | 18264 |
| 1998 | GCA_000460215.1 | 1281186 | 562 | Escherichia coli UMEA 3121-1 | UMEA 3121-1 | Proteobacteria | KE701594.1 | 3 | EQW80283.1 | 18267 |
| 1999 | GCA_000460235.1 | 1281187 | 562 | Escherichia coli UMEA 3122-1 | UMEA 3122-1 | Proteobacteria | KE701612.1 | 3 | EQW87486.1 | 18270 |
| 2000 | GCA_000460415.1 | 1281197 | 562 | Escherichia coli UMEA 3159-1 | UMEA 3159-1 | Proteobacteria | KE701731.1 | 3 | EQX12316.1 | 18273 |
| 2001 | GCA_000460515.1 | 1281202 | 562 | Escherichia coli UMEA 3172-1 | UMEA 3172-1 | Proteobacteria | KE701794.1 | 3 | EQX35785.1 | 18276 |
| 2002 | GCA_000460575.1 | 1281205 | 562 | Escherichia coli UMEA 3175-1 | UMEA 3175-1 | Proteobacteria | KE701853.1 | 3 | EQX43608.1 | 18279 |
| 2003 | GCA_000460655.1 | 1281209 | 562 | Escherichia coli UMEA 3185-1 | UMEA 3185-1 | Proteobacteria | KE701908.1 | 3 | EQX66169.1 | 18282 |
| 2004 | GCA_000460695.1 | 1281211 | 562 | Escherichia coli UMEA 3193-1 | UMEA 3193-1 | Proteobacteria | KE701963.1 | 3 | EQX76187.1 | 18285 |
| 2005 | GCA_000460875.1 | 1281220 | 562 | Escherichia coli UMEA 3216-1 | UMEA 3216-1 | Proteobacteria | KE702085.1 | 3 | EQY22299.1 | 18288 |
| 2006 | GCA_000460915.1 | 1281222 | 562 | Escherichia coli UMEA 3220-1 | UMEA 3220-1 | Proteobacteria | KE702109.1 | 3 | EQY33196.1 | 18291 |
| 2007 | GCA_000460955.1 | 1281224 | 562 | Escherichia coli UMEA 3222-1 | UMEA 3222-1 | Proteobacteria | KE702144.1 | 3 | EQY45032.1 | 18294 |
| 2008 | GCA_000461035.1 | 1281228 | 562 | Escherichia coli UMEA 3244-1 | UMEA 3244-1 | Proteobacteria | KE702194.1 | 3 | EQY55714.1 | 18297 |
| 2009 | GCA_000461055.1 | 1281230 | 562 | Escherichia coli UMEA 3257-1 | UMEA 3257-1 | Proteobacteria | KE702215.1 | 3 | EQY72171.1 | 18300 |
| 2010 | GCA_000461335.1 | 1281248 | 562 | Escherichia coli UMEA 3391-1 | UMEA 3391-1 | Proteobacteria | KE702394.1 | 3 | EQZ19658.1 | 18303 |
| 2011 | GCA_000461375.1 | 1281252 | 562 | Escherichia coli UMEA 3585-1 | UMEA 3585-1 | Proteobacteria | KE702412.1 | 3 | EQZ26675.1 | 18306 |
| 2012 | GCA_000461435.1 | 1281255 | 562 | Escherichia coli UMEA 3617-1 | UMEA 3617-1 | Proteobacteria | KE702447.1 | 3 | EQZ41390.1 | 18309 |
| 2013 | GCA_000461655.1 | 1281268 | 562 | Escherichia coli UMEA 3707-1 | UMEA 3707-1 | Proteobacteria | KE702569.1 | 3 | EQZ91637.1 | 18312 |
| 2014 | GCA_000461815.1 | 1281276 | 562 | Escherichia coli UMEA 3955-1 | UMEA 3955-1 | Proteobacteria | KE702703.1 | 3 | ERA32823.1 | 18315 |
| 2015 | GCA_000461835.1 | 1281277 | 562 | Escherichia coli UMEA 4075-1 | UMEA 4075-1 | Proteobacteria | KE702710.1 | 3 | ERA36348.1 | 18318 |
| 2016 | GCA_000463605.1 | 1281257 | 562 | Escherichia coli UMEA 3652-1 | UMEA 3652-1 | Proteobacteria | KE705271.1 | 3 | ERF54134.1 | 18321 |
| 2017 | GCA_000488075.1 | 1281249 | 562 | Escherichia coli UMEA 3426-1 | UMEA 3426-1 | Proteobacteria | KI530636.1 | 3 | ESK18132.1 | 18324 |
| 2018 | GCA_000488095.1 | 1281234 | 562 | Escherichia coli UMEA 3290-1 | UMEA 3290-1 | Proteobacteria | KI530644.1 | 3 | ESK18554.1 | 18327 |
| 2019 | GCA_000488115.1 | 1281263 | 562 | Escherichia coli UMEA 3693-1 | UMEA 3693-1 | Proteobacteria | KI530660.1 | 3 | ESK29586.1 | 18330 |
| 2020 | GCA_000488315.1 | 1268980 | 562 | Escherichia coli 907391 | 907391 | Proteobacteria | KI530980.1 | 3 | ESC95631.1 | 18333 |
| 2021 | GCA_000488475.1 | 1268990 | 562 | Escherichia coli 907892 | 907892 | Proteobacteria | KI532243.1 | 3 | ESD43645.1 | 18336 |
| 2022 | GCA_000488795.1 | 1269010 | 562 | Escherichia coli 910096-2 | 910096-2 | Proteobacteria | KI534866.1 | 3 | ESE27410.1 | 18339 |
| 2023 | GCA_000488815.1 | 1269008 | 562 | Escherichia coli A25922R | A25922R | Proteobacteria | KI535058.1 | 3 | ESE32327.1 | 18342 |
| 2024 | GCA_000488835.1 | 1269009 | 562 | Escherichia coli A35218R | A35218R | Proteobacteria | KI535180.1 | 3 | ESE38128.1 | 18345 |
| 2025 | GCA_000494975.1 | 1281023 | 562 | Escherichia coli HVH 86 (4-7026218) | HVH 86 (4-7026218) | Proteobacteria | KI538693.1 | 3 | ESP10882.1 | 18348 |
| 2026 | GCA_000494975.1 | 1281023 | 562 | Escherichia coli HVH 86 (4-7026218) | HVH 86 (4-7026218) | Proteobacteria | KI538695.1 | 3 | ESP23171.1 | 18351 |
| 2027 | GCA_000506445.2 | 1389417 | 562 | Escherichia coli LAU-EC6 | LAU-EC6 | Proteobacteria | AYNF01000074.1 | 3 | ETE11169.1 | 18354 |
| 2028 | GCA_000507685.1 | 1281250 | 562 | Escherichia coli UMEA 3489-1 | UMEA 3489-1 | Proteobacteria | KI669372.1 | 3 | ETF35984.1 | 18357 |
| 2029 | GCA_000633655.1 | 1445863 | 562 | Escherichia coli BIDMC 83 | BIDMC 83 | Proteobacteria | KK214043.1 | 3 | EZQ63564.1 | 18360 |
| 2030 | GCA_000692475.1 | 1438673 | 562 | Escherichia coli BIDMC 65 | BIDMC 65 | Proteobacteria | KK736329.1 | 3 | KDG03094.1 | 18363 |
| 2031 | GCA_000696545.1 | 562 | 562 | Escherichia coli | 2009-46 | Proteobacteria | JJNT01000018.1 | 3 | KD090448.1 | 18366 |
| 2032 | GCA_000714595.1 | 316435 | 562 | Escherichia coli Nissle 1917 | Nissle 1917 | Proteobacteria | CP007799.1 | 3 | AID79061.1 | 18369 |
| 2033 | GCA_000743255.1 | 1322345 | 562 | Escherichia coli ATCC 25922 | ATCC 25922 | Proteobacteria | CP009072.1 | 3 | AIL16531.1 | 18372 |
| 2034 | GCA_001030285.1 | 562 | 562 | Escherichia coli | BWH59 | Proteobacteria | KQ087625.1 | 3 | KLX17105.1 | 18375 |
| 2035 | GCA_001030435.1 | 562 | 562 | Escherichia coli | MGH122 | Proteobacteria | KQ087876.1 | 3 | KLX44352.1 | 18378 |
| 2036 | GCA_001030445.1 | 562 | 562 | Escherichia coli | BIDMC97 | Proteobacteria | KQ087859.1 | 3 | KLX45653.1 | 18381 |
| 2037 | GCA_001280385.1 | 562 | 562 | Escherichia coli | SF-166 | Proteobacteria | CP012633.1 | 3 | ALD34922.1 | 18384 |
| 2038 | GCA_001463115.1 | 562 | 562 | Escherichia coli | 50664179 | Proteobacteria | LNHU01000095.1 | 3 | KSY02659.1 | 18387 |
| 2039 | GCA_001518355.1 | 562 | 562 | Escherichia coli | GN02748 | Proteobacteria | LQZV01000057.1 | 3 | KUR38256.1 | 18390 |
| 2040 | GCA_001519115.1 | 562 | 562 | Escherichia coli | GN02007 | Proteobacteria | LQRW01000143.1 | 3 | KUR81832.1 | 18393 |
| 2041 | GCA_001519125.1 | 562 | 562 | Escherichia coli | GN02009 | Proteobacteria | LQRX01000141.1 | 3 | KUR94071.1 | 18396 |
| 2042 | GCA_001519215.1 | 562 | 562 | Escherichia coli | GN02045 | Proteobacteria | LQRY01000066.1 | 3 | KUR99612.1 | 18399 |
| 2043 | GCA_001519315.1 | 562 | 562 | Escherichia coli | GN02183 | Proteobacteria | LQSM01000041.1 | 3 | KUS68705.1 | 18402 |
| 2044 | GCA_001519365.1 | 562 | 562 | Escherichia coli | GN02175 | Proteobacteria | LQSL01000095.1 | 3 | KUS65754.1 | 18405 |
| 2045 | GCA_001519435.1 | 562 | 562 | Escherichia coli | GN02050 | Proteobacteria | LQRZ01000151.1 | 3 | KUS06588.1 | 18408 |
| 2046 | GCA_001519485.1 | 562 | 562 | Escherichia coli | GN03398 | Proteobacteria | LQVU01000143.1 | 3 | KUW86271.1 | 18411 |
| 2047 | GCA_001519595.1 | 562 | 562 | Escherichia coli | GN02323 | Proteobacteria | LQTA01000215.1 | 3 | KUT33561.1 | 18414 |
| 2048 | GCA_001519645.1 | 562 | 562 | Escherichia coli | GN02639 | Proteobacteria | LQUW01000126.1 | 3 | KUV71918.1 | 18417 |
| 2049 | GCA_001519895.1 | 562 | 562 | Escherichia coli | GN02345 | Proteobacteria | LQTD01000025.1 | 3 | KUT65775.1 | 18420 |
| 2050 | GCA_001520055.1 | 562 | 562 | Escherichia coli | GN02392 | Proteobacteria | LQTM01000161.1 | 3 | KUT92654.1 | 18423 |
| 2051 | GCA_001520195.1 | 562 | 562 | Escherichia coli | GN02627 | Proteobacteria | LQUU01000218.1 | 3 | KUV55766.1 | 18426 |
| 2052 | GCA_001520215.1 | 562 | 562 | Escherichia coli | GN02529 | Proteobacteria | LQUG01000209.1 | 3 | KUU92987.1 | 18429 |
| 2053 | GCA_001520555.1 | 562 | 562 | Escherichia coli | GN02590 | Proteobacteria | LQUP01000306.1 | 3 | KUV32574.1 | 18432 |
| 2054 | GCA_001520715.1 | 562 | 562 | Escherichia coli | GN03545 | Proteobacteria | LQVY01000168.1 | 3 | KUX05523.1 | 18435 |
| 2055 | GCA_001520735.1 | 562 | 562 | Escherichia coli | GN03496 | Proteobacteria | LQVX01000201.1 | 3 | KUX02162.1 | 18438 |
| 2056 | GCA_001520815.1 | 562 | 562 | Escherichia coli | GN02766 | Proteobacteria | LQVG01000173.1 | 3 | KUW18188.1 | 18441 |
| 2057 | GCA_001520895.1 | 562 | 562 | Escherichia coli | GN02411 | Proteobacteria | LQTP01000196.1 | 3 | KUU04902.1 | 18444 |
| 2058 | GCA_001521015.1 | 562 | 562 | Escherichia coli | GN02867 | Proteobacteria | LQVL01000165.1 | 3 | KUW44250.1 | 18447 |
| 2059 | GCA_001521155.1 | 562 | 562 | Escherichia coli | GN02787 | Proteobacteria | LQVJ01000229.1 | 3 | KUW29415.1 | 18450 |
| 2060 | GCA_001521225.1 | 562 | 562 | Escherichia coli | GN02350 | Proteobacteria | LQTE01000122.1 | 3 | KUT58679.1 | 18453 |
| 2061 | GCA_001521315.1 | 562 | 562 | Escherichia coli | GN03786 | Proteobacteria | LQWD01000068.1 | 3 | KUX37210.1 | 18456 |
| 2062 | GCA_001521355.1 | 562 | 562 | Escherichia coli | GN02547 | Proteobacteria | LQUL01000230.1 | 3 | KUV14410.1 | 18459 |
| 2063 | GCA_001521455.1 | 562 | 562 | Escherichia coli | GN04262 | Proteobacteria | LQWM01000080.1 | 3 | KUX73639.1 | 18462 |
| 2064 | GCA_001521575.1 | 562 | 562 | Escherichia coli | GN03324 | Proteobacteria | LQVT01000030.1 | 3 | KUW86783.1 | 18465 |
| 2065 | GCA_001521635.1 | 562 | 562 | Escherichia coli | GN04153 | Proteobacteria | LQWI01000317.1 | 3 | KUX51102.1 | 18468 |
| 2066 | GCA_001524885.1 | 562 | 562 | Escherichia coli | GN02609 | Proteobacteria | LRA001000013.1 | 3 | KVI42424.1 | 18471 |
| 2067 | GCA_001524905.1 | 562 | 562 | Escherichia coli | GN02487 | Proteobacteria | LRAN01000026.1 | 3 | KVI22808.1 | 18474 |
| 2068 | GCA_001562835.1 | 562 | 562 | Escherichia coli | JPH264 | Proteobacteria | KQ961179.1 | 3 | KXG92284.1 | 18477 |
| 2069 | GCA_001571575.1 | 562 | 562 | Escherichia coli | UM131 | Proteobacteria | LRX001000021.1 | 3 | KXL04869.1 | 18480 |
| 2070 | GCA_001571585.1 | 562 | 562 | Escherichia coli | UM149 | Proteobacteria | LRXN01000040.1 | 3 | KXL27378.1 | 18483 |
| 2071 | GCA_001571645.1 | 562 | 562 | Escherichia coli | CD44 | Proteobacteria | LRXP01000062.1 | 3 | KXL05683.1 | 18486 |
| 2072 | GCA_001571725.1 | 562 | 562 | Escherichia coli | UM128 | Proteobacteria | LRXU01000008.1 | 3 | KXL13115.1 | 18489 |
| 2073 | GCA_001471755.1 | 564 | 564 | Escherichia fergusonii | FDAARGOS_170 | Proteobacteria | LORS01000001.1 | 3 | KTK75705.1 | 18492 |
| 2074 | GCA_000415405.1 | 1244143 | 1351 | Enterococcus faecalis VC1B-1 | VC1B-1 | Firmicutes | KE352639.1 | 3 | EPI32466.1 | 18495 |
| 2075 | GCA_000519685.1 | 1391483 | 1351 | Enterococcus faecalis EnGen0413 | EnGen0413 | Firmicutes | KI913017.1 | 3 | ETU24520.1 | 18498 |
| 2076 | GCA_000322325.1 | 1138929 | 1352 | Enterococcus faecium EnGen0048 | E4215 | Firmicutes | KB030000.1 | 3 | ELB67022.1 | 18501 |
| 2077 | GCA_000371505.1 | 999408 | 1531 | [Clostridium] clostridioforme 90A8 | 90A8 | Firmicutes | KB850978.1 | 3 | ENZ13057.1 | 18504 |
| 2078 | GCA_000487575.2 | 984211 | 28901 | Salmonella enterica subsp. | ATCC BAA-1592 | Proteobacteria | CP007531.1 | 3 | AHW13890.1 | 18507 |
| | | | | enterica serovar Anatum str. | | | | | | |
| | | | | ATCC BAA-1592 | | | | | | |
| 2079 | GCA_000495295.1 | 1321366 | 28901 | Salmonella enterica subsp. | S-70 | Proteobacteria | AQQN01000068.1 | 3 | ESP72121.1 | 18510 |
| | | | | enterica serovar Saintpaul | | | | | | |
| | | | | str. S-70 | | | | | | |
| 2080 | GCA_000495315.1 | 1323580 | 28901 | Salmonella enterica subsp. | S-76 | Proteobacteria | AROZ01000126.1 | 3 | ESP76604.1 | 18513 |
| | | | | enterica serovar Oranienburg | | | | | | |
| | | | | str. S-76 | | | | | | |
| 2081 | GCA_000748865.1 | 1173435 | 28901 | Salmonella enterica subsp. | CFSAN000207 | Proteobacteria | JRDQ01000027.1 | 3 | KFT73591.1 | 18516 |
| | | | | enterica serovar Bareilly | | | | | | |
| | | | | str. CFSAN000207 | | | | | | |
| 2082 | GCA_000806625.1 | 59201 | 28901 | Salmonella enterica subsp. | CFSAN024764 | Proteobacteria | JWQO01000015.1 | 3 | KHP33099.1 | 18519 |
| | | | | enterica | | | | | | |
| 2083 | GCA_000806925.1 | 59201 | 28901 | Salmonella enterica subsp. | CFSAN024763 | Proteobacteria | JWQP01000009.1 | 3 | KHP34815.1 | 18522 |
| | | | | enterica | | | | | | |
| 2084 | GCA_000988525.1 | 1454585 | 28901 | Salmonella enterica subsp. | USDA-ARS- | Proteobacteria | CP007584.1 | 3 | AKF88465.1 | 18525 |
| | | | | enterica serovar Anatum | USMARC-1735 | | | | | |
| | | | | str. USDA-ARS-USMARC-1735 | | | | | | |
| 2085 | GCA_001241205.1 | 58712 | 28901 | Salmonella enterica subsp. | CVM N44698 | Proteobacteria | LHFG01000018.1 | 3 | KNK74744.1 | 18528 |
| | | | | enterica serovar Anatum | | | | | | |
| 2086 | GCA_001247355.1 | 58712 | 28901 | Salmonella enterica subsp. | CVM N51307 | Proteobacteria | LHON01000003.1 | 3 | KNW86449.1 | 18531 |
| | | | | enterica serovar Anatum | | | | | | |
| 2087 | GCA_001447095.1 | 58712 | 28901 | Salmonella enterica subsp. | GT-38 | Proteobacteria | CP013226.1 | 3 | ALO88020.1 | 18534 |
| | | | | enterica serovar Anatum | | | | | | |
| 2088 | GCA_001475375.1 | 28901 | 28901 | Salmonella enterica | CVM 43842 | Proteobacteria | JYTH01000003.1 | 3 | KTQ21993.1 | 18537 |
| 2089 | GCA_001478355.1 | 58712 | 28901 | Salmonella enterica subsp. | CVM N38876 | Proteobacteria | JYXM01000005.1 | 3 | KUB19293.1 | 18540 |
| | | | | enterica serovar Anatum | | | | | | |
| 2090 | GCA_001479145.1 | 58712 | 28901 | Salmonella enterica subsp. | CVM N31410 | Proteobacteria | JYVK01000019.1 | 3 | KTY61367.1 | 18543 |
| | | | | enterica serovar Anatum | | | | | | |
| 2091 | GCA_001479905.1 | 192955 | 28901 | Salmonella enterica subsp. | CVM N38870 | Proteobacteria | JYXJ01000004.1 | 3 | KUB06249.1 | 18546 |
| | | | | enterica serovar Kentucky | | | | | | |
| 2092 | GCA_001481105.1 | 58712 | 28901 | Salmonella enterica subsp. | CVM N42473 | Proteobacteria | JYZV01000014.1 | 3 | KUD94944.1 | 18549 |
| | | | | enterica serovar Anatum | | | | | | |
| 2093 | GCA_001569785.1 | 28901 | 28901 | Salmonella enterica | NGUA13 | Proteobacteria | BCOL01000077.1 | 3 | GAR53165.1 | 18552 |
| 2094 | GCA_000154805.1 | 428126 | 29348 | [Clostridium] spiroforme | DSM 1552 | Firmicutes | DS562851.1 | 3 | EDS74761.1 | 18555 |
| | | | | DSM 1552 | | | | | | |
| 2095 | GCA_001483145.1 | 172045 | 172045 | Elizabethkingia miricola | EM_CHUV | Bacteroidetes | LIQC01000001.1 | 3 | KUG13796.1 | 18558 |
| 2096 | GCA_000273015.1 | 997874 | 246787 | Bacteroides cellulosilyticus | CL02T12C19 | Bacteroidetes | JH724089.1 | 3 | EIY23905.1 | 18561 |
| | | | | CL02T12C19 | | | | | | |
| 2097 | GCA_000403255.2 | 397288 | 397288 | Lachnospiraceae bacterium 3-1 | 3-1 | Firmicutes | KE159581.1 | 3 | EOS20511.1 | 18564 |
| 2098 | GCA_000157115.2 | 469598 | 469598 | Escherichia sp. 3_2_53FAA | 3_2_53FAA | Proteobacteria | KQ235746.1 | 3 | EEH86957.1 | 18567 |
| 2099 | GCA_000437535.1 | 1263103 | 1263103 | Prevotella stercorea CAG:629 | | Bacteroidetes | FR899171.1 | 3 | CDE34946.1 | 18570 |
| 2100 | GCA_000486445.2 | 938141 | 28901 | Salmonella enterica subsp. | ATCC 15791 | Proteobacteria | CP012349.1 | 4 | AKW15253.1 | 18573 |
| | | | | enterica serovar Sloterdijk | | | | | | |
| | | | | str. ATCC 15791 | | | | | | |

(Part B)

| | | L | | | | P | | | | T | | | | X |
|---|---|---|---|---|---|---|---|---|---|---|---|---|---|---|
| | | ThsA | | | | ThsB (i) | | | | ThsB (ii) | | | | ThsB (iii) |
| | K | protein | M | N | O | protein | Q | R | S | protein | U | V | W | protein |
| | DNA SEQ | length | ThsB (i) | PRT SEQ | DNA SEQ | length | ThsB (ii) | PRT SEQ | DNA SEQ | length | ThsB (iii) | PRT SEQ | DNA SEQ | length |
| 1 | ID NO: | (aa) | protein_accession | ID NO: | ID NO: | (aa) | protein_accession | ID NO: | ID NO: | (aa) | protein_accession | ID NO: | ID NO: | (aa) |
| 2 | 18577 | 478 | EAN10000.1 | 13221 | 18578 | 161 | EAN09998.1 | 13222 | 18579 | 283 | | | | |
| 3 | 18580 | 477 | EAZ85482.1 | 13224 | 18581 | 226 | | | | | | | | |
| 4 | 18582 | 478 | EFF33949.1 | 13226 | 18583 | 161 | EFF33951.1 | 13227 | 18584 | 283 | | | | |
| 5 | 18585 | 478 | EFF30625.1 | 13229 | 18586 | 161 | EFF30623.1 | 13230 | 18587 | 283 | | | | |
| 6 | 18588 | 461 | EFA90643.1 | 13232 | 18589 | 165 | | | | | | | | |
| 7 | 18590 | 474 | EFM65151.1 | 13234 | 18591 | 165 | | | | | | | | |
| 8 | 18592 | 471 | EFF51767.1 | 13236 | 18593 | 182 | EFF51769.1 | 13237 | 18594 | 203 | | | | |
| 9 | 18595 | 500 | AAP11367.1 | 13239 | 18596 | 206 | | | | | | | | |
| 10 | 18597 | 473 | EFM08815.1 | 13241 | 18598 | 166 | EFM08816.1 | 13242 | 18599 | 203 | | | | |
| 11 | 18600 | 466 | KND82315.1 | 13244 | 18601 | 160 | KND82316.1 | 13245 | 18602 | 214 | | | | |
| 12 | 18603 | 466 | KOE55211.1 | 13247 | 18604 | 160 | KOE55212.1 | 13248 | 18605 | 214 | | | | |
| 13 | 18606 | 478 | EHM35988.1 | 13250 | 18607 | 161 | EHM35990.1 | 13251 | 18608 | 283 | | | | |
| 14 | 18609 | 473 | EPE98430.1 | 13253 | 18610 | 162 | | | | | | | | |
| 15 | 18611 | 217 | EGV07223.1 | 13255 | 18612 | 208 | EGV07230.1 | 13256 | 18613 | 164 | | | | |
| 16 | 18614 | 469 | EHD29826.1 | 13258 | 18615 | 206 | EHD29828.1 | 13259 | 18616 | 310 | | | | |
| 17 | 18617 | 375 | EHM75406.1 | 13261 | 18618 | 202 | EHM75402.1 | 13262 | 18619 | 308 | | | | |
| 18 | 18620 | 466 | EHK91560.1 | 13264 | 18621 | 69 | EHK91561.1 | 13265 | 18622 | 214 | | | | |
| 19 | 18623 | 489 | EOR48147.1 | 13267 | 18624 | 202 | EOR48148.1 | 13268 | 18625 | 344 | | | | |
| 20 | 18626 | 470 | EID19241.1 | 13270 | 18627 | 206 | EID19242.1 | 13271 | 18628 | 388 | | | | |
| 21 | 18629 | 381 | EIA14314.1 | 13273 | 18630 | 202 | EIA14315.1 | 13274 | 18631 | 344 | | | | |
| 22 | 18632 | 159 | EIC95415.1 | 13276 | 18633 | 122 | | | | | | | | |
| 23 | 18634 | 476 | EKS70340.1 | 13278 | 18635 | 162 | | | | | | | | |
| 24 | 18636 | 466 | KOE52659.1 | 13280 | 18637 | 214 | KOE52660.1 | 13281 | 18638 | 160 | | | | |
| 25 | 18639 | 466 | KOE56125.1 | 13283 | 18640 | 214 | KOE56126.1 | 13284 | 18641 | 160 | | | | |
| 26 | 18642 | 465 | EIJ69684.1 | 13286 | 18643 | 164 | EIJ69602.1 | 13287 | 18644 | 208 | | | | |
| 27 | 18645 | 208 | EIL59627.1 | 13289 | 18646 | 155 | | | | | | | | |
| 28 | 18647 | 477 | EJH65284.1 | 13291 | 18648 | 97 | | | | | | | | |
| 29 | 18649 | 473 | EPV35488.1 | 13293 | 18650 | 165 | | | | | | | | |
| 30 | 18651 | 499 | CAN93963.1 | 13295 | 18652 | 956 | | | | | | | | |
| 31 | 18653 | 483 | CAQ50580.1 | 13297 | 18654 | 202 | CAQ50581.1 | 13298 | 18655 | 308 | | | | |
| 32 | 18656 | 482 | EKF39861.1 | 13300 | 18657 | 162 | EKF39859.1 | 13301 | 18658 | 184 | | | | |
| 33 | 18659 | 477 | ETE93553.1 | 13303 | 18660 | 226 | | | | | | | | |
| 34 | 18661 | 477 | ETE97367.1 | 13305 | 18662 | 226 | | | | | | | | |
| 35 | 18663 | 479 | EPC81227.1 | 13307 | 18664 | 210 | | | | | | | | |
| 36 | 18665 | 478 | ELI26318.1 | 13309 | 18666 | 203 | | | | | | | | |
| 37 | 18667 | 478 | ELJ29819.1 | 13311 | 18668 | 203 | | | | | | | | |
| 38 | 18669 | 472 | EME14865.1 | 13313 | 18670 | 160 | EME14867.1 | 13314 | 18671 | 194 | | | | |
| 39 | 18672 | 484 | EMF02810.1 | 13316 | 18673 | 163 | | | | | | | | |
| 40 | 18674 | 484 | BAO35115.1 | 13318 | 18675 | 163 | | | | | | | | |
| 41 | 18676 | 560 | BAO91364.1 | 13320 | 18677 | 485 | | | | | | | | |
| 42 | 18678 | 482 | BAQ74701.1 | 13322 | 18679 | 158 | BAQ74699.1 | 13323 | 18680 | 134 | BAQ74700.1 | 13324 | 18681 | 177 |
| 43 | 18683 | 480 | ENZ83251.1 | 13327 | 18684 | 163 | ENZ83249.1 | 13328 | 18685 | 194 | | | | |
| 44 | 18686 | 480 | EQB07553.1 | 13330 | 18687 | 155 | | | | | | | | |
| 45 | 18688 | 476 | EPJ82188.1 | 13332 | 18689 | 160 | | | | | | | | |
| 46 | 18690 | 480 | EPR14529.1 | 13334 | 18691 | 155 | | | | | | | | |
| 47 | 18692 | 483 | EQM91606.1 | 13336 | 18693 | 202 | EQM91605.1 | 13337 | 18694 | 344 | | | | |
| 48 | 18695 | 483 | EPZ04958.1 | 13339 | 18696 | 202 | EPZ04959.1 | 13340 | 18697 | 344 | | | | |
| 49 | 18698 | 483 | EPZ06673.1 | 13342 | 18699 | 202 | EPZ06672.1 | 13343 | 18700 | 344 | | | | |
| 50 | 18701 | 375 | EPZ03689.1 | 13345 | 18702 | 202 | EPZ03688.1 | 13346 | 18703 | 344 | | | | |
| 51 | 18704 | 375 | EPZ11498.1 | 13348 | 18705 | 202 | EPZ11497.1 | 13349 | 18706 | 308 | | | | |
| 52 | 18707 | 231 | EQC60102.1 | 13351 | 18708 | 165 | | | | | | | | |
| 53 | 18709 | 473 | EQG20076.1 | 13353 | 18710 | 141 | | | | | | | | |
| 54 | 18711 | 473 | EQK23002.1 | 13355 | 18712 | 165 | | | | | | | | |
| 55 | 18713 | 482 | ETR95050.1 | 13357 | 18714 | 164 | ETR94961.1 | 13358 | 18715 | 385 | ETR95013.1 | 13359 | 18716 | 111 |
| 56 | 18719 | 481 | EQL89246.1 | 13363 | 18720 | 104 | EQL89247.1 | 13364 | 18721 | 191 | | | | |
| 57 | 18722 | 484 | ERH73217.1 | 13366 | 18723 | 163 | | | | | | | | |
| 58 | 18724 | 473 | ERT62591.1 | 13368 | 18725 | 165 | | | | | | | | |
| 59 | 18726 | 487 | ERT61533.1 | 13370 | 18727 | 163 | ERT61545.1 | 13371 | 18728 | 376 | | | | |
| 60 | 18729 | 473 | ERT58461.1 | 13373 | 18730 | 165 | | | | | | | | |
| 61 | 18731 | 482 | ERT19167.1 | 13375 | 18732 | 158 | ERT19165.1 | 13376 | 18733 | 179 | ERT19166.1 | 13377 | 18734 | 183 |
| 62 | 18736 | 487 | ESR69981.1 | 13380 | 18737 | 167 | ESR69983.1 | 13381 | 18738 | 183 | | | | |
| 63 | 18739 | 480 | KAJ84752.1 | 13383 | 18740 | 141 | KAJ84753.1 | 13384 | 18741 | 206 | | | | |
| 64 | 18742 | 479 | KAJ82224.1 | 13386 | 18743 | 206 | | | | | | | | |
| 65 | 18744 | 474 | ETD82033.1 | 13388 | 18745 | 165 | | | | | | | | |
| 66 | 18746 | 489 | ESZ88709.1 | 13390 | 18747 | 168 | ESZ88707.1 | 13391 | 18748 | 184 | | | | |
| 67 | 18749 | 478 | ETJ99317.1 | 13393 | 18750 | 203 | | | | | | | | |
| 68 | 18751 | 221 | KYK73941.1 | 13395 | 18752 | 160 | KYK73942.1 | 13396 | 18753 | 214 | | | | |
| 69 | 18754 | 468 | ETO98875.1 | 13398 | 18755 | 166 | | | | | | | | |
| 70 | 18756 | 456 | GAE27471.1 | 13400 | 18757 | 161 | | | | | | | | |
| 71 | 18758 | 451 | GAM02794.1 | 13402 | 18759 | 143 | GAM02793.1 | 13403 | 18760 | 186 | | | | |
| 72 | 18761 | 477 | CAE30981.1 | 13405 | 18762 | 193 | CAE30983.1 | 13406 | 18763 | 165 | | | | |
| 73 | 18764 | 477 | CCP18524.1 | 13408 | 18765 | 146 | CCP18522.1 | 13409 | 18766 | 307 | | | | |
| 74 | 18767 | 480 | CDZ53066.1 | 13411 | 18768 | 159 | | | | | | | | |
| 75 | 18769 | 468 | CEF52296.1 | 13413 | 18770 | 153 | | | | | | | | |
| 76 | 18771 | 237 | CJD59502.1 | 13415 | 18772 | 248 | | | | | | | | |
| 77 | 18773 | 500 | EEL09526.1 | 13417 | 18774 | 206 | | | | | | | | |
| 78 | 18775 | 476 | EEL84781.1 | 13419 | 18776 | 192 | EEL84783.1 | 13420 | 18777 | 139 | | | | |
| 79 | 18778 | 476 | EEL90115.1 | 13422 | 18779 | 192 | EEL90113.1 | 13423 | 18780 | 139 | | | | |
| 80 | 18781 | 473 | EFH92718.1 | 13425 | 18782 | 165 | | | | | | | | |
| 81 | 18783 | 486 | EFR92172.1 | 13427 | 18784 | 202 | | | | | | | | |
| 82 | 18785 | 487 | EIK62341.1 | 13429 | 18786 | 167 | EIK59131.1 | 13430 | 18787 | 192 | | | | |
| 83 | 18788 | 481 | ABB40970.1 | 13432 | 18789 | 146 | ABB40968.1 | 13433 | 18790 | 180 | ABB40962.1 | 13434 | 18791 | 262 |
| 84 | 18792 | 480 | ABD68806.1 | 13436 | 18793 | 157 | | | | | | | | |
| 85 | 18794 | 479 | ABR91779.1 | 13438 | 18795 | 163 | ABR91881.1 | 13439 | 18796 | 197 | | | | |
| 86 | 18797 | 477 | ABI42032.1 | 13441 | 18798 | 164 | ABI42037.1 | 13442 | 18799 | 160 | | | | |
| 87 | 18800 | 466 | ABN74272.1 | 13444 | 18801 | 165 | ABN74273.1 | 13445 | 18802 | 214 | | | | |
| 88 | 18803 | 549 | ABO35463.1 | 13447 | 18804 | 171 | | | | | | | | |
| 89 | 18805 | 484 | ABP73210.1 | 13449 | 18806 | 165 | ABP73208.1 | 13450 | 18807 | 183 | | | | |
| 90 | 18808 | 478 | ABR34953.1 | 13452 | 18809 | 229 | ABR34957.1 | 13453 | 18810 | 202 | ABR34959.1 | 13454 | 18811 | 166 |
| 91 | 18813 | 1197 | ABR65054.1 | 13457 | 18814 | 641 | | | | | | | | |
| 92 | 18815 | 482 | ACA73844.1 | 13459 | 18816 | 158 | ACA73842.1 | 13460 | 18817 | 179 | ACA73843.1 | 13461 | 18818 | 183 |
| 93 | 18820 | 476 | ACB66893.1 | 13464 | 18821 | 135 | ACB66892.1 | 13465 | 18822 | 197 | | | | |
| 94 | 18823 | 342 | ACX81592.1 | 13467 | 18824 | 214 | ACX81593.1 | 13468 | 18825 | 160 | | | | |
| 95 | 18826 | 479 | ACZ11006.1 | 13470 | 18827 | 202 | | | | | | | | |
| 96 | 18828 | 325 | ADB76072.1 | 13472 | 18829 | 421 | ADB76078.1 | 13473 | 18830 | 793 | | | | |
| 97 | 18831 | 481 | ADY67728.1 | 13475 | 18832 | 162 | ADY67726.1 | 13476 | 18833 | 130 | ADY67729.1 | 13477 | 18834 | 465 |
| 98 | 18835 | 293 | ADP84994.1 | 13479 | 18836 | 535 | | | | | | | | |
| 99 | 18837 | 345 | AEB29796.1 | 13481 | 18838 | 182 | AEB29798.1 | 13482 | 18839 | 194 | | | | |
| 100 | 18840 | 482 | AEA61150.1 | 13484 | 18841 | 161 | AEA61151.1 | 13485 | 18842 | 193 | AEA61157.1 | 13486 | 18843 | 155 |
| 101 | 18846 | 381 | AFH70384.1 | 13490 | 18847 | 202 | AFH70385.1 | 13491 | 18848 | 344 | | | | |
| 102 | 18849 | 466 | AEW76522.1 | 13493 | 18850 | 214 | AEW76523.1 | 13494 | 18851 | 160 | | | | |
| 103 | 18852 | 500 | AEW57569.1 | 13496 | 18853 | 206 | | | | | | | | |
| 104 | 18854 | 504 | AFK54068.1 | 13498 | 18855 | 151 | AFK54069.1 | 13499 | 18856 | 206 | AFK54066.1 | 13500 | 18857 | 285 |
| 105 | 18858 | 484 | AIM23121.1 | 13502 | 18859 | 163 | | | | | | | | |
| 106 | 18860 | 476 | AGG89636.1 | 13504 | 18861 | 158 | | | | | | | | |
| 107 | 18862 | 478 | AFK58217.1 | 13506 | 18863 | 161 | AFK58215.1 | 13507 | 18864 | 283 | | | | |
| 108 | 18865 | 443 | AFO49033.1 | 13509 | 18866 | 133 | AFO49034.1 | 13510 | 18867 | 177 | AFO49032.1 | 13511 | 18868 | 282 |
| 109 | 18869 | 483 | AFR74118.1 | 13513 | 18870 | 202 | AFR74119.1 | 13514 | 18871 | 344 | | | | |
| 110 | 18872 | 551 | AHK33007.1 | 13516 | 18873 | 377 | | | | | | | | |
| 111 | 18874 | 484 | AGE19434.1 | 13518 | 18875 | 163 | | | | | | | | |
| 112 | 18876 | 307 | AHZ68663.1 | 13520 | 18877 | 146 | AHZ68658.1 | 13521 | 18878 | 165 | AHZ68664.1 | 13522 | 18879 | 275 |
| 113 | 18880 | 103 | AGM44766.1 | 13524 | 18881 | 155 | | | | | | | | |
| 114 | 18882 | 479 | AGS26694.1 | 13526 | 18883 | 209 | | | | | | | | |
| 115 | 18884 | 484 | AGO56415.1 | 13528 | 18885 | 163 | | | | | | | | |
| 116 | 18886 | 464 | AGP48696.1 | 13530 | 18887 | 158 | AGP48695.1 | 13531 | 18888 | 259 | | | | |
| 117 | 18889 | 478 | AIU00716.1 | 13533 | 18890 | 229 | AIU02169.1 | 13534 | 18891 | 202 | AIU02168.1 | 13535 | 18892 | 166 |
| 118 | 18894 | 480 | AHB77237.1 | 13538 | 18895 | 163 | AHB77238.1 | 13539 | 18896 | 253 | | | | |
| 119 | 18897 | 240 | AJK51072.1 | 13541 | 18898 | 156 | | | | | | | | |
| 120 | 18899 | 474 | AHC80714.1 | 13543 | 18900 | 163 | AHC80713.1 | 13544 | 18901 | 136 | | | | |
| 121 | 18902 | 474 | AHC86146.1 | 13546 | 18903 | 163 | AHC86145.1 | 13547 | 18904 | 136 | | | | |
| 122 | 18905 | 420 | AHN71070.1 | 13549 | 18906 | 214 | AHN71071.1 | 13550 | 18907 | 160 | | | | |
| 123 | 18908 | 466 | AKU28343.1 | 13552 | 18909 | 214 | AKU28344.1 | 13553 | 18910 | 160 | | | | |
| 124 | 18911 | 478 | AJI88525.1 | 13555 | 18912 | 160 | AJI88219.1 | 13556 | 18913 | 360 | | | | |
| 125 | 18914 | 472 | AIQ75143.1 | 13558 | 18915 | 214 | AIQ75145.1 | 13559 | 18916 | 234 | | | | |
| 126 | 18917 | 480 | AIY12609.1 | 13561 | 18918 | 203 | | | | | | | | |
| 127 | 18919 | 478 | AJJ37269.1 | 13563 | 18920 | 160 | AJJ35782.1 | 13564 | 18921 | 360 | | | | |
| 128 | 18922 | 443 | AJG12528.1 | 13566 | 18923 | 158 | AJG12529.1 | 13567 | 18924 | 183 | | | | |
| 129 | 18925 | 480 | AJY68817.1 | 13569 | 18926 | 163 | AJY68816.1 | 13570 | 18927 | 196 | | | | |
| 130 | 18928 | 591 | AJP52228.1 | 13572 | 18929 | 322 | | | | | | | | |
| 131 | 18930 | 481 | AJP42563.1 | 13574 | 18931 | 166 | | | | | | | | |
| 132 | 18932 | 487 | AKK01415.1 | 13576 | 18933 | 167 | AKK01413.1 | 13577 | 18934 | 183 | | | | |
| 133 | 18935 | 487 | AKC95052.1 | 13579 | 18936 | 163 | AKC96108.1 | 13580 | 18937 | 175 | AKC95053.1 | 13581 | 18938 | 376 |
| 134 | 18939 | 288 | AKO52331.1 | 13583 | 18940 | 478 | | | | | | | | |
| 135 | 18941 | 472 | AKV95757.1 | 13585 | 18942 | 195 | | | | | | | | |
| 136 | 18943 | 484 | ALE97362.1 | 13587 | 18944 | 163 | | | | | | | | |
| 137 | 18945 | 485 | ALJ08796.1 | 13589 | 18946 | 148 | ALJ08793.1 | 13590 | 18947 | 175 | ALJ08794.1 | 13591 | 18948 | 184 |
| 138 | 18949 | 466 | AMQ92900.1 | 13593 | 18950 | 161 | AMQ92901.1 | 13594 | 18951 | 214 | | | | |
| 139 | 18952 | 482 | ALL13163.1 | 13596 | 18953 | 148 | ALL13165.1 | 13597 | 18954 | 183 | | | | |
| 140 | 18955 | 103 | ALQ62809.1 | 13599 | 18956 | 155 | ALQ62808.1 | 13600 | 18957 | 192 | | | | |
| 141 | 18958 | 499 | ALS70448.1 | 13602 | 18959 | 202 | ALS70449.1 | 13603 | 18960 | 344 | | | | |
| 142 | 18961 | 489 | ALS73059.1 | 13605 | 18962 | 202 | ALS73060.1 | 13606 | 18963 | 344 | | | | |
| 143 | 18964 | 489 | ALS86456.1 | 13608 | 18965 | 202 | ALS86457.1 | 13609 | 18966 | 344 | | | | |
| 144 | 18967 | 482 | ALZ77340.1 | 13611 | 18968 | 155 | | | | | | | | |
| 145 | 18969 | 103 | ALZ79509.1 | 13613 | 18970 | 155 | ALZ79508.1 | 13614 | 18971 | 192 | | | | |
| 146 | 18972 | 478 | ALZ52746.1 | 13616 | 18973 | 161 | ALZ52748.1 | 13617 | 18974 | 283 | | | | |
| 147 | 18975 | 475 | AMJ40924.1 | 13619 | 18976 | 165 | AMJ40925.1 | 13620 | 18977 | 164 | AMJ40928.1 | 13621 | 18978 | 190 |
| 148 | 18979 | 470 | AMH88750.1 | 13623 | 18980 | 206 | AMH88748.1 | 13624 | 18981 | 388 | | | | |
| 149 | 18982 | 477 | AMK33279.1 | 13626 | 18983 | 101 | | | | | | | | |
| 150 | 18984 | 1269 | CNF27378.1 | 13628 | 18985 | 197 | | | | | | | | |
| 151 | 18986 | 477 | CNF62559.1 | 13630 | 18987 | 146 | CNF62502.1 | 13631 | 18988 | 161 | | | | |
| 152 | 18989 | 477 | CNI81985.1 | 13633 | 18990 | 146 | CNI82037.1 | 13634 | 18991 | 161 | | | | |
| 153 | 18992 | 477 | CNI72014.1 | 13636 | 18993 | 146 | CNI72072.1 | 13637 | 18994 | 161 | | | | |
| 154 | 18995 | 475 | CQR45869.1 | 13639 | 18996 | 160 | | | | | | | | |
| 155 | 18997 | 475 | CQJ38327.1 | 13641 | 18998 | 163 | CQJ38351.1 | 13642 | 18999 | 200 | CQJ38363.1 | 13643 | 19000 | 205 |
| 156 | 19002 | 488 | CRD50733.1 | 13646 | 19003 | 160 | CRD50737.1 | 13647 | 19004 | 224 | CRD50724.1 | 13648 | 19005 | 168 |
| 157 | 19006 | 472 | CRL40089.1 | 13650 | 19007 | 260 | | | | | | | | |
| 158 | 19008 | 473 | CRR05841.1 | 13652 | 19009 | 165 | | | | | | | | |
| 159 | 19010 | 473 | CRR37100.1 | 13654 | 19011 | 165 | | | | | | | | |
| 160 | 19012 | 473 | CRR43597.1 | 13656 | 19013 | 165 | | | | | | | | |
| 161 | 19014 | 473 | CRR34906.1 | 13658 | 19015 | 165 | | | | | | | | |
| 162 | 19016 | 473 | CRR50125.1 | 13660 | 19017 | 165 | | | | | | | | |
| 163 | 19018 | 473 | CRR37378.1 | 13662 | 19019 | 165 | | | | | | | | |
| 164 | 19020 | 473 | CRR01720.1 | 13664 | 19021 | 165 | | | | | | | | |
| 165 | 19022 | 473 | CRR52924.1 | 13666 | 19023 | 165 | | | | | | | | |
| 166 | 19024 | 473 | CRR41677.1 | 13668 | 19025 | 165 | | | | | | | | |
| 167 | 19026 | 473 | CRS57172.1 | 13670 | 19027 | 165 | | | | | | | | |
| 168 | 19028 | 473 | CRS58230.1 | 13672 | 19029 | 165 | | | | | | | | |
| 169 | 19030 | 473 | CRS57785.1 | 13674 | 19031 | 165 | | | | | | | | |
| 170 | 19032 | 473 | CRS58148.1 | 13676 | 19033 | 165 | | | | | | | | |
| 171 | 19034 | 473 | CRS55115.1 | 13678 | 19035 | 165 | | | | | | | | |
| 172 | 19036 | 473 | CRS48573.1 | 13680 | 19037 | 165 | | | | | | | | |
| 173 | 19038 | 473 | CRS51329.1 | 13682 | 19039 | 165 | | | | | | | | |
| 174 | 19040 | 473 | CRS48383.1 | 13684 | 19041 | 165 | | | | | | | | |
| 175 | 19042 | 473 | CRS50250.1 | 13686 | 19043 | 165 | | | | | | | | |
| 176 | 19044 | 473 | CRS50706.1 | 13688 | 19045 | 165 | | | | | | | | |
| 177 | 19046 | 473 | CRS54432.1 | 13690 | 19047 | 165 | | | | | | | | |
| 178 | 19048 | 473 | CRS57073.1 | 13692 | 19049 | 165 | | | | | | | | |
| 179 | 19050 | 473 | CRS58971.1 | 13694 | 19051 | 165 | | | | | | | | |
| 180 | 19052 | 473 | CRS51119.1 | 13696 | 19053 | 165 | | | | | | | | |
| 181 | 19054 | 473 | CRS51969.1 | 13698 | 19055 | 165 | | | | | | | | |
| 182 | 19056 | 473 | CRS77748.1 | 13700 | 19057 | 165 | | | | | | | | |
| 183 | 19058 | 473 | CRS83922.1 | 13702 | 19059 | 165 | | | | | | | | |
| 184 | 19060 | 473 | CRS76799.1 | 13704 | 19061 | 165 | | | | | | | | |
| 185 | 19062 | 473 | CRS78508.1 | 13706 | 19063 | 165 | | | | | | | | |
| 186 | 19064 | 473 | CRS90915.1 | 13708 | 19065 | 165 | | | | | | | | |
| 187 | 19066 | 473 | CRS79984.1 | 13710 | 19067 | 165 | | | | | | | | |
| 188 | 19068 | 473 | CRS84447.1 | 13712 | 19069 | 165 | | | | | | | | |
| 189 | 19070 | 473 | CRS81782.1 | 13714 | 19071 | 165 | | | | | | | | |
| 190 | 19072 | 473 | CRS82426.1 | 13716 | 19073 | 165 | | | | | | | | |
| 191 | 19074 | 473 | CRS93242.1 | 13718 | 19075 | 165 | | | | | | | | |
| 192 | 19076 | 473 | CRT34724.1 | 13720 | 19077 | 165 | | | | | | | | |
| 193 | 19078 | 473 | CRT26954.1 | 13722 | 19079 | 165 | | | | | | | | |
| 194 | 19080 | 473 | CRT43911.1 | 13724 | 19081 | 165 | | | | | | | | |
| 195 | 19082 | 473 | CRT34257.1 | 13726 | 19083 | 165 | | | | | | | | |
| 196 | 19084 | 473 | CRT48110.1 | 13728 | 19085 | 165 | | | | | | | | |
| 197 | 19086 | 473 | CRT41995.1 | 13730 | 19087 | 165 | | | | | | | | |
| 198 | 19088 | 473 | CRT45579.1 | 13732 | 19089 | 165 | | | | | | | | |
| 199 | 19090 | 473 | CRT37671.1 | 13734 | 19091 | 165 | | | | | | | | |
| 200 | 19092 | 473 | CRT44902.1 | 13736 | 19093 | 165 | | | | | | | | |
| 201 | 19094 | 473 | CRT51336.1 | 13738 | 19095 | 165 | | | | | | | | |
| 202 | 19096 | 473 | CRT46016.1 | 13740 | 19097 | 165 | | | | | | | | |
| 203 | 19098 | 473 | CRT46041.1 | 13742 | 19099 | 165 | | | | | | | | |
| 204 | 19100 | 473 | CRT64543.1 | 13744 | 19101 | 165 | | | | | | | | |
| 205 | 19102 | 473 | CRT20963.1 | 13746 | 19103 | 165 | | | | | | | | |
| 206 | 19104 | 473 | CRT55725.1 | 13748 | 19105 | 165 | | | | | | | | |
| 207 | 19106 | 473 | CRT61707.1 | 13750 | 19107 | 165 | | | | | | | | |
| 208 | 19108 | 473 | CRT39213.1 | 13752 | 19109 | 165 | | | | | | | | |
| 209 | 19110 | 473 | CRT66724.1 | 13754 | 19111 | 165 | | | | | | | | |
| 210 | 19112 | 473 | CRT72269.1 | 13756 | 19113 | 165 | | | | | | | | |
| 211 | 19114 | 473 | CRT58958.1 | 13758 | 19115 | 165 | | | | | | | | |
| 212 | 19116 | 473 | CRT49588.1 | 13760 | 19117 | 165 | | | | | | | | |
| 213 | 19118 | 473 | CRT72944.1 | 13762 | 19119 | 165 | | | | | | | | |
| 214 | 19120 | 473 | CRT74928.1 | 13764 | 19121 | 165 | | | | | | | | |
| 215 | 19122 | 473 | CRT61455.1 | 13766 | 19123 | 165 | | | | | | | | |
| 216 | 19124 | 473 | CRT76662.1 | 13768 | 19125 | 165 | | | | | | | | |
| 217 | 19126 | 473 | CRT71352.1 | 13770 | 19127 | 165 | | | | | | | | |
| 218 | 19128 | 473 | CRT68276.1 | 13772 | 19129 | 165 | | | | | | | | |
| 219 | 19130 | 473 | CRT74835.1 | 13774 | 19131 | 165 | | | | | | | | |
| 220 | 19132 | 473 | CRT73989.1 | 13776 | 19133 | 165 | | | | | | | | |
| 221 | 19134 | 473 | CRT75035.1 | 13778 | 19135 | 165 | | | | | | | | |
| 222 | 19136 | 473 | CRT66762.1 | 13780 | 19137 | 165 | | | | | | | | |
| 223 | 19138 | 473 | CRT70566.1 | 13782 | 19139 | 165 | | | | | | | | |
| 224 | 19140 | 473 | CRT64116.1 | 13784 | 19141 | 165 | | | | | | | | |
| 225 | 19142 | 473 | CRT57991.1 | 13786 | 19143 | 165 | | | | | | | | |
| 226 | 19144 | 473 | CRT66324.1 | 13788 | 19145 | 165 | | | | | | | | |
| 227 | 19146 | 473 | CRT75784.1 | 13790 | 19147 | 165 | | | | | | | | |
| 228 | 19148 | 473 | CRT69390.1 | 13792 | 19149 | 165 | | | | | | | | |
| 229 | 19150 | 473 | CRT79545.1 | 13794 | 19151 | 165 | | | | | | | | |
| 230 | 19152 | 473 | CRT65368.1 | 13796 | 19153 | 165 | | | | | | | | |
| 231 | 19154 | 473 | CRT80471.1 | 13798 | 19155 | 165 | | | | | | | | |
| 232 | 19156 | 473 | CRT86536.1 | 13800 | 19157 | 165 | | | | | | | | |
| 233 | 19158 | 473 | CRT83015.1 | 13802 | 19159 | 165 | | | | | | | | |
| 234 | 19160 | 473 | CRT86807.1 | 13804 | 19161 | 165 | | | | | | | | |
| 235 | 19162 | 473 | CRT85049.1 | 13806 | 19163 | 165 | | | | | | | | |
| 236 | 19164 | 473 | CRT84210.1 | 13808 | 19165 | 165 | | | | | | | | |
| 237 | 19166 | 473 | CRT81912.1 | 13810 | 19167 | 165 | | | | | | | | |
| 238 | 19168 | 473 | CRT86929.1 | 13812 | 19169 | 165 | | | | | | | | |
| 239 | 19170 | 473 | CRT82839.1 | 13814 | 19171 | 165 | | | | | | | | |
| 240 | 19172 | 473 | CRT86340.1 | 13816 | 19173 | 165 | | | | | | | | |
| 241 | 19174 | 473 | CRT89320.1 | 13818 | 19175 | 165 | | | | | | | | |
| 242 | 19176 | 473 | CRT87538.1 | 13820 | 19177 | 165 | | | | | | | | |
| 243 | 19178 | 473 | CRT90535.1 | 13822 | 19179 | 165 | | | | | | | | |
| 244 | 19180 | 473 | CRT91762.1 | 13824 | 19181 | 165 | | | | | | | | |
| 245 | 19182 | 473 | CRU00010.1 | 13826 | 19183 | 165 | | | | | | | | |
| 246 | 19184 | 473 | CRT98481.1 | 13828 | 19185 | 165 | | | | | | | | |
| 247 | 19186 | 473 | CRT99304.1 | 13830 | 19187 | 165 | | | | | | | | |
| 248 | 19188 | 473 | CRT99602.1 | 13832 | 19189 | 165 | | | | | | | | |
| 249 | 19190 | 473 | CRU04442.1 | 13834 | 19191 | 165 | | | | | | | | |
| 250 | 19192 | 473 | CRU03264.1 | 13836 | 19193 | 165 | | | | | | | | |
| 251 | 19194 | 473 | CRU09870.1 | 13838 | 19195 | 165 | | | | | | | | |
| 252 | 19196 | 473 | CRU07131.1 | 13840 | 19197 | 165 | | | | | | | | |
| 253 | 19198 | 473 | CRU20227.1 | 13842 | 19199 | 165 | | | | | | | | |
| 254 | 19200 | 473 | CRU18225.1 | 13844 | 19201 | 165 | | | | | | | | |
| 255 | 19202 | 473 | CRU22361.1 | 13846 | 19203 | 165 | | | | | | | | |
| 256 | 19204 | 473 | CRU18030.1 | 13848 | 19205 | 165 | | | | | | | | |
| 257 | 19206 | 473 | CRU21809.1 | 13850 | 19207 | 165 | | | | | | | | |
| 258 | 19208 | 473 | CRU20299.1 | 13852 | 19209 | 165 | | | | | | | | |
| 259 | 19210 | 473 | CRU20889.1 | 13854 | 19211 | 165 | | | | | | | | |
| 260 | 19212 | 473 | CRU31581.1 | 13856 | 19213 | 165 | | | | | | | | |
| 261 | 19214 | 473 | CRU58956.1 | 13858 | 19215 | 165 | | | | | | | | |
| 262 | 19216 | 473 | CRU85953.1 | 13860 | 19217 | 165 | | | | | | | | |
| 263 | 19218 | 473 | CRU70039.1 | 13862 | 19219 | 165 | | | | | | | | |
| 264 | 19220 | 473 | CRU80230.1 | 13864 | 19221 | 165 | | | | | | | | |
| 265 | 19222 | 473 | CRU71479.1 | 13866 | 19223 | 165 | | | | | | | | |
| 266 | 19224 | 473 | CRU70694.1 | 13868 | 19225 | 165 | | | | | | | | |
| 267 | 19226 | 473 | CRU61514.1 | 13870 | 19227 | 165 | | | | | | | | |
| 268 | 19228 | 473 | CRU48049.1 | 13872 | 19229 | 165 | | | | | | | | |
| 269 | 19230 | 473 | CRU68137.1 | 13874 | 19231 | 165 | | | | | | | | |
| 270 | 19232 | 473 | CRU71318.1 | 13876 | 19233 | 165 | | | | | | | | |
| 271 | 19234 | 473 | CRU93815.1 | 13878 | 19235 | 165 | | | | | | | | |
| 272 | 19236 | 473 | CRU91179.1 | 13880 | 19237 | 165 | | | | | | | | |
| 273 | 19238 | 473 | CRU91126.1 | 13882 | 19239 | 165 | | | | | | | | |
| 274 | 19240 | 473 | CRU94296.1 | 13884 | 19241 | 165 | | | | | | | | |
| 275 | 19242 | 473 | CRU82319.1 | 13886 | 19243 | 165 | | | | | | | | |
| 276 | 19244 | 473 | CRU80792.1 | 13888 | 19245 | 165 | | | | | | | | |
| 277 | 19246 | 473 | CRU91423.1 | 13890 | 19247 | 165 | | | | | | | | |
| 278 | 19248 | 473 | CRU86616.1 | 13892 | 19249 | 165 | | | | | | | | |
| 279 | 19250 | 473 | CRU82587.1 | 13894 | 19251 | 165 | | | | | | | | |
| 280 | 19252 | 473 | CRU96749.1 | 13896 | 19253 | 165 | | | | | | | | |
| 281 | 19254 | 473 | CRU83071.1 | 13898 | 19255 | 165 | | | | | | | | |
| 282 | 19256 | 473 | CRU81012.1 | 13900 | 19257 | 165 | | | | | | | | |
| 283 | 19258 | 473 | CRU78269.1 | 13902 | 19259 | 165 | | | | | | | | |
| 284 | 19260 | 473 | CRV00482.1 | 13904 | 19261 | 165 | | | | | | | | |
| 285 | 19262 | 473 | CRV01086.1 | 13906 | 19263 | 165 | | | | | | | | |
| 286 | 19264 | 473 | CRU80178.1 | 13908 | 19265 | 165 | | | | | | | | |
| 287 | 19266 | 473 | CRU93089.1 | 13910 | 19267 | 165 | | | | | | | | |
| 288 | 19268 | 473 | CRU95681.1 | 13912 | 19269 | 165 | | | | | | | | |
| 289 | 19270 | 473 | CRU99739.1 | 13914 | 19271 | 165 | | | | | | | | |
| 290 | 19272 | 473 | CRV05003.1 | 13916 | 19273 | 165 | | | | | | | | |
| 291 | 19274 | 473 | CRU97011.1 | 13918 | 19275 | 165 | | | | | | | | |
| 292 | 19276 | 473 | CRV01718.1 | 13920 | 19277 | 165 | | | | | | | | |
| 293 | 19278 | 473 | CRV11884.1 | 13922 | 19279 | 165 | | | | | | | | |
| 294 | 19280 | 473 | CRV20258.1 | 13924 | 19281 | 165 | | | | | | | | |
| 295 | 19282 | 473 | CRV16508.1 | 13926 | 19283 | 165 | | | | | | | | |
| 296 | 19284 | 473 | CRV16547.1 | 13928 | 19285 | 165 | | | | | | | | |
| 297 | 19286 | 473 | CRV08852.1 | 13930 | 19287 | 165 | | | | | | | | |
| 298 | 19288 | 473 | CRV21821.1 | 13932 | 19289 | 165 | | | | | | | | |
| 299 | 19290 | 473 | CRV22393.1 | 13934 | 19291 | 165 | | | | | | | | |
| 300 | 19292 | 473 | CRV15620.1 | 13936 | 19293 | 165 | | | | | | | | |
| 301 | 19294 | 473 | CRV21794.1 | 13938 | 19295 | 165 | | | | | | | | |
| 302 | 19296 | 473 | CRV18929.1 | 13940 | 19297 | 165 | | | | | | | | |
| 303 | 19298 | 473 | CRV22815.1 | 13942 | 19299 | 165 | | | | | | | | |
| 304 | 19300 | 473 | CRV26122.1 | 13944 | 19301 | 165 | | | | | | | | |
| 305 | 19302 | 473 | CRV22957.1 | 13946 | 19303 | 165 | | | | | | | | |
| 306 | 19304 | 473 | CRV22952.1 | 13948 | 19305 | 165 | | | | | | | | |
| 307 | 19306 | 473 | CRV23373.1 | 13950 | 19307 | 165 | | | | | | | | |
| 308 | 19308 | 473 | CRV25540.1 | 13952 | 19309 | 165 | | | | | | | | |
| 309 | 19310 | 473 | CRV23993.1 | 13954 | 19311 | 165 | | | | | | | | |
| 310 | 19312 | 473 | CRV35423.1 | 13956 | 19313 | 165 | | | | | | | | |
| 311 | 19314 | 473 | CRV28499.1 | 13958 | 19315 | 165 | | | | | | | | |
| 312 | 19316 | 473 | CRV30748.1 | 13960 | 19317 | 165 | | | | | | | | |
| 313 | 19318 | 473 | CRV37966.1 | 13962 | 19319 | 165 | | | | | | | | |
| 314 | 19320 | 473 | CRV37006.1 | 13964 | 19321 | 165 | | | | | | | | |
| 315 | 19322 | 473 | CRV38821.1 | 13966 | 19323 | 165 | | | | | | | | |
| 316 | 19324 | 473 | CRV39783.1 | 13968 | 19325 | 165 | | | | | | | | |
| 317 | 19326 | 473 | CRV45918.1 | 13970 | 19327 | 165 | | | | | | | | |
| 318 | 19328 | 473 | CRV48895.1 | 13972 | 19329 | 165 | | | | | | | | |
| 319 | 19330 | 473 | CRV53129.1 | 13974 | 19331 | 165 | | | | | | | | |
| 320 | 19332 | 473 | CRV61825.1 | 13976 | 19333 | 165 | | | | | | | | |
| 321 | 19334 | 473 | CRV60050.1 | 13978 | 19335 | 165 | | | | | | | | |
| 322 | 19336 | 473 | CRV55444.1 | 13980 | 19337 | 165 | | | | | | | | |
| 323 | 19338 | 473 | CRV60789.1 | 13982 | 19339 | 165 | | | | | | | | |
| 324 | 19340 | 473 | CRW03939.1 | 13984 | 19341 | 165 | | | | | | | | |
| 325 | 19342 | 473 | CRV54218.1 | 13986 | 19343 | 165 | | | | | | | | |
| 326 | 19344 | 473 | CRV83250.1 | 13988 | 19345 | 165 | | | | | | | | |
| 327 | 19346 | 473 | CRV91433.1 | 13990 | 19347 | 165 | | | | | | | | |
| 328 | 19348 | 473 | CRV92210.1 | 13992 | 19349 | 165 | | | | | | | | |
| 329 | 19350 | 473 | CRV87155.1 | 13994 | 19351 | 165 | | | | | | | | |
| 330 | 19352 | 473 | CRV84642.1 | 13996 | 19353 | 165 | | | | | | | | |
| 331 | 19354 | 473 | CRW02978.1 | 13998 | 19355 | 165 | | | | | | | | |
| 332 | 19356 | 473 | CRV97172.1 | 14000 | 19357 | 165 | | | | | | | | |
| 333 | 19358 | 473 | CRW00512.1 | 14002 | 19359 | 165 | | | | | | | | |
| 334 | 19360 | 473 | CRW01306.1 | 14004 | 19361 | 165 | | | | | | | | |
| 335 | 19362 | 473 | CRV92070.1 | 14006 | 19363 | 165 | | | | | | | | |
| 336 | 19364 | 473 | CRV95683.1 | 14008 | 19365 | 165 | | | | | | | | |
| 337 | 19366 | 473 | CRV97960.1 | 14010 | 19367 | 165 | | | | | | | | |
| 338 | 19368 | 473 | CRV78510.1 | 14012 | 19369 | 165 | | | | | | | | |
| 339 | 19370 | 473 | CRW03677.1 | 14014 | 19371 | 165 | | | | | | | | |
| 340 | 19372 | 473 | CRV92174.1 | 14016 | 19373 | 165 | | | | | | | | |
| 341 | 19374 | 473 | CRV95859.1 | 14018 | 19375 | 165 | | | | | | | | |
| 342 | 19376 | 473 | CRV90213.1 | 14020 | 19377 | 165 | | | | | | | | |
| 343 | 19378 | 473 | CRW02419.1 | 14022 | 19379 | 165 | | | | | | | | |
| 344 | 19380 | 473 | CRW06354.1 | 14024 | 19381 | 165 | | | | | | | | |
| 345 | 19382 | 473 | CRW10299.1 | 14026 | 19383 | 165 | | | | | | | | |
| 346 | 19384 | 473 | CRV93338.1 | 14028 | 19385 | 165 | | | | | | | | |
| 347 | 19386 | 473 | CRW10494.1 | 14030 | 19387 | 165 | | | | | | | | |
| 348 | 19388 | 473 | CRW11905.1 | 14032 | 19389 | 165 | | | | | | | | |
| 349 | 19390 | 473 | CRW12150.1 | 14034 | 19391 | 165 | | | | | | | | |
| 350 | 19392 | 473 | CRW18044.1 | 14036 | 19393 | 165 | | | | | | | | |
| 351 | 19394 | 473 | CRW22911.1 | 14038 | 19395 | 165 | | | | | | | | |
| 352 | 19396 | 473 | CRW16832.1 | 14040 | 19397 | 165 | | | | | | | | |
| 353 | 19398 | 473 | CRW17385.1 | 14042 | 19399 | 165 | | | | | | | | |
| 354 | 19400 | 473 | CRW41624.1 | 14044 | 19401 | 165 | | | | | | | | |
| 355 | 19402 | 473 | CRW33363.1 | 14046 | 19403 | 165 | | | | | | | | |
| 356 | 19404 | 473 | CRW28608.1 | 14048 | 19405 | 165 | | | | | | | | |
| 357 | 19406 | 473 | CRW38422.1 | 14050 | 19407 | 165 | | | | | | | | |
| 358 | 19408 | 473 | CRW56682.1 | 14052 | 19409 | 165 | | | | | | | | |
| 359 | 19410 | 473 | CRW57506.1 | 14054 | 19411 | 165 | | | | | | | | |
| 360 | 19412 | 473 | CRW51171.1 | 14056 | 19413 | 165 | | | | | | | | |
| 361 | 19414 | 473 | CRW56053.1 | 14058 | 19415 | 165 | | | | | | | | |
| 362 | 19416 | 473 | CRW51028.1 | 14060 | 19417 | 165 | | | | | | | | |
| 363 | 19418 | 473 | CRW62438.1 | 14062 | 19419 | 165 | | | | | | | | |
| 364 | 19420 | 473 | CRW52653.1 | 14064 | 19421 | 165 | | | | | | | | |
| 365 | 19422 | 473 | CRW57935.1 | 14066 | 19423 | 165 | | | | | | | | |
| 366 | 19424 | 473 | CRW58504.1 | 14068 | 19425 | 165 | | | | | | | | |
| 367 | 19426 | 473 | CRW59077.1 | 14070 | 19427 | 165 | | | | | | | | |
| 368 | 19428 | 473 | CRW78808.1 | 14072 | 19429 | 165 | | | | | | | | |
| 369 | 19430 | 473 | CRW72028.1 | 14074 | 19431 | 165 | | | | | | | | |
| 370 | 19432 | 473 | CRW79987.1 | 14076 | 19433 | 165 | | | | | | | | |
| 371 | 19434 | 473 | CRW76327.1 | 14078 | 19435 | 165 | | | | | | | | |
| 372 | 19436 | 473 | CRW80128.1 | 14080 | 19437 | 165 | | | | | | | | |
| 373 | 19438 | 473 | CRW66999.1 | 14082 | 19439 | 165 | | | | | | | | |
| 374 | 19440 | 473 | CRW70540.1 | 14084 | 19441 | 165 | | | | | | | | |
| 375 | 19442 | 473 | CRW76747.1 | 14086 | 19443 | 165 | | | | | | | | |
| 376 | 19444 | 473 | CRW76878.1 | 14088 | 19445 | 165 | | | | | | | | |
| 377 | 19446 | 473 | CRW80962.1 | 14090 | 19447 | 165 | | | | | | | | |
| 378 | 19448 | 473 | CRW81686.1 | 14092 | 19449 | 165 | | | | | | | | |
| 379 | 19450 | 473 | CRW77668.1 | 14094 | 19451 | 165 | | | | | | | | |
| 380 | 19452 | 473 | CRW79793.1 | 14096 | 19453 | 165 | | | | | | | | |
| 381 | 19454 | 473 | CRW80957.1 | 14098 | 19455 | 165 | | | | | | | | |
| 382 | 19456 | 481 | CTT29891.1 | 14100 | 19457 | 155 | | | | | | | | |
| 383 | 19458 | 481 | CTZ05317.1 | 14102 | 19459 | 155 | | | | | | | | |
| 384 | 19460 | 491 | CUB16901.1 | 14104 | 19461 | 165 | | | | | | | | |
| 385 | 19462 | 482 | CUI41016.1 | 14106 | 19463 | 161 | CUI41048.1 | 14107 | 19464 | 193 | CUI41311.1 | 14108 | 19465 | 155 |
| 386 | 19467 | 473 | CUK22711.1 | 14111 | 19468 | 146 | CUK22702.1 | 14112 | 19469 | 113 | | | | |
| 387 | 19470 | 486 | CUK50737.1 | 14114 | 19471 | 202 | | | | | | | | |
| 388 | 19472 | 486 | CUK61278.1 | 14116 | 19473 | 202 | | | | | | | | |
| 389 | 19474 | 486 | CUK91822.1 | 14118 | 19475 | 202 | | | | | | | | |
| 390 | 19476 | 461 | EDM51054.1 | 14120 | 19477 | 203 | EDM51056.1 | 14121 | 19478 | 188 | EDM51058.1 | 14122 | 19479 | 282 |
| 391 | 19480 | 484 | CUY08443.1 | 14124 | 19481 | 163 | | | | | | | | |
| 392 | 19482 | 484 | CUZ68596.1 | 14126 | 19483 | 163 | | | | | | | | |
| 393 | 19484 | 484 | CUZ82333.1 | 14128 | 19485 | 163 | | | | | | | | |
| 394 | 19486 | 484 | CUZ53179.1 | 14130 | 19487 | 163 | | | | | | | | |
| 395 | 19488 | 484 | CVA27418.1 | 14132 | 19489 | 163 | | | | | | | | |
| 396 | 19490 | 484 | CUZ41313.1 | 14134 | 19491 | 163 | | | | | | | | |
| 397 | 19492 | 484 | CVA08079.1 | 14136 | 19493 | 163 | | | | | | | | |
| 398 | 19494 | 484 | CUZ42337.1 | 14138 | 19495 | 163 | | | | | | | | |
| 399 | 19496 | 484 | CVA28833.1 | 14140 | 19497 | 163 | | | | | | | | |
| 400 | 19498 | 484 | CUZ16090.1 | 14142 | 19499 | 163 | | | | | | | | |
| 401 | 19500 | 484 | CUZ61026.1 | 14144 | 19501 | 163 | | | | | | | | |
| 402 | 19502 | 484 | CUZ90983.1 | 14146 | 19503 | 163 | | | | | | | | |
| 403 | 19504 | 484 | CUZ73356.1 | 14148 | 19505 | 163 | | | | | | | | |
| 404 | 19506 | 484 | CVA13520.1 | 14150 | 19507 | 163 | | | | | | | | |
| 405 | 19508 | 484 | CVA22984.1 | 14152 | 19509 | 163 | | | | | | | | |
| 406 | 19510 | 484 | CUY16507.1 | 14154 | 19511 | 163 | | | | | | | | |
| 407 | 19512 | 484 | CUZ58687.1 | 14156 | 19513 | 163 | | | | | | | | |
| 408 | 19514 | 484 | CUZ73597.1 | 14158 | 19515 | 163 | | | | | | | | |
| 409 | 19516 | 484 | CUZ84806.1 | 14160 | 19517 | 163 | | | | | | | | |
| 410 | 19518 | 484 | CUZ51268.1 | 14162 | 19519 | 163 | | | | | | | | |
| 411 | 19520 | 484 | CVA06067.1 | 14164 | 19521 | 163 | | | | | | | | |
| 412 | 19522 | 484 | CUZ66217.1 | 14166 | 19523 | 163 | | | | | | | | |
| 413 | 19524 | 484 | CUZ96361.1 | 14168 | 19525 | 163 | | | | | | | | |
| 414 | 19526 | 484 | CUZ56063.1 | 14170 | 19527 | 163 | | | | | | | | |
| 415 | 19528 | 484 | CUZ47666.1 | 14172 | 19529 | 163 | | | | | | | | |
| 416 | 19530 | 306 | CUZ65482.1 | 14174 | 19531 | 163 | | | | | | | | |
| 417 | 19532 | 484 | CUZ64434.1 | 14176 | 19533 | 163 | | | | | | | | |
| 418 | 19534 | 484 | CUZ76056.1 | 14178 | 19535 | 163 | | | | | | | | |
| 419 | 19536 | 484 | CVA13481.1 | 14180 | 19537 | 163 | | | | | | | | |
| 420 | 19538 | 484 | CVA27120.1 | 14182 | 19539 | 163 | | | | | | | | |
| 421 | 19540 | 484 | CVA15846.1 | 14184 | 19541 | 163 | | | | | | | | |
| 422 | 19542 | 484 | CUZ46999.1 | 14186 | 19543 | 163 | | | | | | | | |
| 423 | 19544 | 484 | CUZ30986.1 | 14188 | 19545 | 163 | | | | | | | | |
| 424 | 19546 | 484 | CUZ02657.1 | 14190 | 19547 | 163 | | | | | | | | |
| 425 | 19548 | 484 | CUZ51348.1 | 14192 | 19549 | 163 | | | | | | | | |
| 426 | 19550 | 484 | CUZ55112.1 | 14194 | 19551 | 163 | | | | | | | | |
| 427 | 19552 | 484 | CVA20234.1 | 14196 | 19553 | 163 | | | | | | | | |
| 428 | 19554 | 484 | CUZ69722.1 | 14198 | 19555 | 163 | | | | | | | | |
| 429 | 19556 | 306 | CUZ82685.1 | 14200 | 19557 | 163 | | | | | | | | |
| 430 | 19558 | 484 | CUZ92253.1 | 14202 | 19559 | 163 | | | | | | | | |
| 431 | 19560 | 484 | CUZ80137.1 | 14204 | 19561 | 163 | | | | | | | | |
| 432 | 19562 | 306 | CUZ43160.1 | 14206 | 19563 | 163 | | | | | | | | |
| 433 | 19564 | 484 | CVA39205.1 | 14208 | 19565 | 163 | | | | | | | | |
| 434 | 19566 | 484 | CVA66680.1 | 14210 | 19567 | 163 | | | | | | | | |
| 435 | 19568 | 484 | CUZ78128.1 | 14212 | 19569 | 163 | | | | | | | | |
| 436 | 19570 | 484 | CUZ53811.1 | 14214 | 19571 | 163 | | | | | | | | |
| 437 | 19572 | 484 | CVA07157.1 | 14216 | 19573 | 163 | | | | | | | | |
| 438 | 19574 | 484 | CUZ96160.1 | 14218 | 19575 | 163 | | | | | | | | |
| 439 | 19576 | 484 | CVA63355.1 | 14220 | 19577 | 163 | | | | | | | | |
| 440 | 19578 | 484 | CVB19765.1 | 14222 | 19579 | 163 | | | | | | | | |
| 441 | 19580 | 484 | CVB15307.1 | 14224 | 19581 | 163 | | | | | | | | |
| 442 | 19582 | 484 | CVB18610.1 | 14226 | 19583 | 163 | | | | | | | | |
| 443 | 19584 | 484 | CVC33373.1 | 14228 | 19585 | 163 | | | | | | | | |
| 444 | 19586 | 484 | CVC43459.1 | 14230 | 19587 | 163 | | | | | | | | |
| 445 | 19588 | 484 | CVB44154.1 | 14232 | 19589 | 163 | | | | | | | | |
| 446 | 19590 | 484 | CVC13577.1 | 14234 | 19591 | 163 | | | | | | | | |
| 447 | 19592 | 306 | CVB24202.1 | 14236 | 19593 | 163 | | | | | | | | |
| 448 | 19594 | 484 | CVB63328.1 | 14238 | 19595 | 163 | | | | | | | | |
| 449 | 19596 | 484 | CVB58992.1 | 14240 | 19597 | 163 | | | | | | | | |
| 450 | 19598 | 306 | CVB73390.1 | 14242 | 19599 | 163 | | | | | | | | |
| 451 | 19600 | 306 | CVA22542.1 | 14244 | 19601 | 163 | | | | | | | | |
| 452 | 19602 | 484 | CVC54883.1 | 14246 | 19603 | 163 | | | | | | | | |
| 453 | 19604 | 484 | CVC47662.1 | 14248 | 19605 | 163 | | | | | | | | |
| 454 | 19606 | 484 | CVC16868.1 | 14250 | 19607 | 163 | | | | | | | | |
| 455 | 19608 | 484 | CVA94551.1 | 14252 | 19609 | 163 | | | | | | | | |
| 456 | 19610 | 484 | CVB98061.1 | 14254 | 19611 | 163 | | | | | | | | |
| 457 | 19612 | 484 | CVB27563.1 | 14256 | 19613 | 163 | | | | | | | | |
| 458 | 19614 | 484 | CVC12710.1 | 14258 | 19615 | 163 | | | | | | | | |
| 459 | 19616 | 484 | CVB94236.1 | 14260 | 19617 | 163 | | | | | | | | |
| 460 | 19618 | 484 | CVC34514.1 | 14262 | 19619 | 163 | | | | | | | | |
| 461 | 19620 | 484 | CVC37237.1 | 14264 | 19621 | 163 | | | | | | | | |
| 462 | 19622 | 484 | CVC09959.1 | 14266 | 19623 | 163 | | | | | | | | |
| 463 | 19624 | 484 | CVB51982.1 | 14268 | 19625 | 163 | | | | | | | | |
| 464 | 19626 | 484 | CVB83683.1 | 14270 | 19627 | 163 | | | | | | | | |
| 465 | 19628 | 484 | CVB86104.1 | 14272 | 19629 | 163 | | | | | | | | |
| 466 | 19630 | 484 | CVC63999.1 | 14274 | 19631 | 163 | | | | | | | | |
| 467 | 19632 | 306 | CVB86034.1 | 14276 | 19633 | 163 | | | | | | | | |
| 468 | 19634 | 484 | CVC85541.1 | 14278 | 19635 | 163 | | | | | | | | |
| 469 | 19636 | 484 | CVC33606.1 | 14280 | 19637 | 163 | | | | | | | | |
| 470 | 19638 | 484 | CVC91020.1 | 14282 | 19639 | 163 | | | | | | | | |
| 471 | 19640 | 484 | CVC23340.1 | 14284 | 19641 | 163 | | | | | | | | |
| 472 | 19642 | 484 | CVC01465.1 | 14286 | 19643 | 163 | | | | | | | | |
| 473 | 19644 | 484 | CVC17896.1 | 14288 | 19645 | 163 | | | | | | | | |
| 474 | 19646 | 484 | CVC49253.1 | 14290 | 19647 | 163 | | | | | | | | |
| 475 | 19648 | 306 | CVD13477.1 | 14292 | 19649 | 163 | | | | | | | | |
| 476 | 19650 | 484 | CVC16333.1 | 14294 | 19651 | 163 | | | | | | | | |
| 477 | 19652 | 484 | CVC38388.1 | 14296 | 19653 | 163 | | | | | | | | |
| 478 | 19654 | 484 | CVC81405.1 | 14298 | 19655 | 163 | | | | | | | | |
| 479 | 19656 | 484 | CVC81576.1 | 14300 | 19657 | 163 | | | | | | | | |
| 480 | 19658 | 484 | CVC86607.1 | 14302 | 19659 | 163 | | | | | | | | |
| 481 | 19660 | 484 | CVC98763.1 | 14304 | 19661 | 163 | | | | | | | | |
| 482 | 19662 | 484 | CVC91159.1 | 14306 | 19663 | 163 | | | | | | | | |
| 483 | 19664 | 484 | CVC94687.1 | 14308 | 19665 | 163 | | | | | | | | |
| 484 | 19666 | 484 | CVC52230.1 | 14310 | 19667 | 163 | | | | | | | | |
| 485 | 19668 | 484 | CVC98236.1 | 14312 | 19669 | 163 | | | | | | | | |
| 486 | 19670 | 484 | CVB21750.1 | 14314 | 19671 | 163 | | | | | | | | |
| 487 | 19672 | 484 | CVC48200.1 | 14316 | 19673 | 163 | | | | | | | | |
| 488 | 19674 | 484 | CVC71583.1 | 14318 | 19675 | 163 | | | | | | | | |
| 489 | 19676 | 484 | CVC84184.1 | 14320 | 19677 | 163 | | | | | | | | |
| 490 | 19678 | 306 | CVC59774.1 | 14322 | 19679 | 163 | | | | | | | | |
| 491 | 19680 | 484 | CVE09079.1 | 14324 | 19681 | 163 | | | | | | | | |
| 492 | 19682 | 484 | CVD69880.1 | 14326 | 19683 | 163 | | | | | | | | |
| 493 | 19684 | 484 | CVD52024.1 | 14328 | 19685 | 163 | | | | | | | | |
| 494 | 19686 | 484 | CVD94582.1 | 14330 | 19687 | 163 | | | | | | | | |
| 495 | 19688 | 484 | CVD41050.1 | 14332 | 19689 | 163 | | | | | | | | |
| 496 | 19690 | 306 | CVD28932.1 | 14334 | 19691 | 163 | | | | | | | | |
| 497 | 19692 | 484 | CVC37080.1 | 14336 | 19693 | 163 | | | | | | | | |
| 498 | 19694 | 484 | CVE33508.1 | 14338 | 19695 | 163 | | | | | | | | |
| 499 | 19696 | 306 | CVC40354.1 | 14340 | 19697 | 163 | | | | | | | | |
| 500 | 19698 | 306 | CVE27819.1 | 14342 | 19699 | 163 | | | | | | | | |
| 501 | 19700 | 484 | CVE60700.1 | 14344 | 19701 | 163 | | | | | | | | |
| 502 | 19702 | 306 | CVE69177.1 | 14346 | 19703 | 163 | | | | | | | | |
| 503 | 19704 | 484 | CVE06156.1 | 14348 | 19705 | 163 | | | | | | | | |
| 504 | 19706 | 484 | CVE70674.1 | 14350 | 19707 | 163 | | | | | | | | |
| 505 | 19708 | 484 | CVD68135.1 | 14352 | 19709 | 163 | | | | | | | | |
| 506 | 19710 | 484 | CVE19607.1 | 14354 | 19711 | 163 | | | | | | | | |
| 507 | 19712 | 484 | CVE94911.1 | 14356 | 19713 | 163 | | | | | | | | |
| 508 | 19714 | 484 | CVE74015.1 | 14358 | 19715 | 163 | | | | | | | | |
| 509 | 19716 | 484 | CVE69277.1 | 14360 | 19717 | 163 | | | | | | | | |
| 510 | 19718 | 484 | CVD84064.1 | 14362 | 19719 | 163 | | | | | | | | |
| 511 | 19720 | 484 | CVE29091.1 | 14364 | 19721 | 163 | | | | | | | | |
| 512 | 19722 | 484 | CVD89467.1 | 14366 | 19723 | 163 | | | | | | | | |
| 513 | 19724 | 306 | CVE62900.1 | 14368 | 19725 | 163 | | | | | | | | |
| 514 | 19726 | 484 | CVE95691.1 | 14370 | 19727 | 163 | | | | | | | | |
| 515 | 19728 | 484 | CVF11375.1 | 14372 | 19729 | 163 | | | | | | | | |
| 516 | 19730 | 484 | CVF28649.1 | 14374 | 19731 | 163 | | | | | | | | |
| 517 | 19732 | 484 | CVC97390.1 | 14376 | 19733 | 163 | | | | | | | | |
| 518 | 19734 | 484 | CVD52643.1 | 14378 | 19735 | 163 | | | | | | | | |
| 519 | 19736 | 484 | CVE22758.1 | 14380 | 19737 | 163 | | | | | | | | |
| 520 | 19738 | 484 | CVE97454.1 | 14382 | 19739 | 163 | | | | | | | | |
| 521 | 19740 | 484 | CVF28158.1 | 14384 | 19741 | 163 | | | | | | | | |
| 522 | 19742 | 484 | CVE60533.1 | 14386 | 19743 | 163 | | | | | | | | |
| 523 | 19744 | 484 | CVE66058.1 | 14388 | 19745 | 163 | | | | | | | | |
| 524 | 19746 | 484 | CVF01477.1 | 14390 | 19747 | 163 | | | | | | | | |
| 525 | 19748 | 484 | CVE93253.1 | 14392 | 19749 | 163 | | | | | | | | |
| 526 | 19750 | 484 | CVF50134.1 | 14394 | 19751 | 163 | | | | | | | | |
| 527 | 19752 | 306 | CVF09910.1 | 14396 | 19753 | 163 | | | | | | | | |
| 528 | 19754 | 484 | CVE63411.1 | 14398 | 19755 | 163 | | | | | | | | |
| 529 | 19756 | 484 | CVE05444.1 | 14400 | 19757 | 163 | | | | | | | | |
| 530 | 19758 | 484 | CVE67662.1 | 14402 | 19759 | 163 | | | | | | | | |
| 531 | 19760 | 484 | CVE73566.1 | 14404 | 19761 | 163 | | | | | | | | |
| 532 | 19762 | 484 | CVF13064.1 | 14406 | 19763 | 163 | | | | | | | | |
| 533 | 19764 | 484 | CVE92994.1 | 14408 | 19765 | 163 | | | | | | | | |
| 534 | 19766 | 484 | CVF15667.1 | 14410 | 19767 | 163 | | | | | | | | |
| 535 | 19768 | 484 | CVE70361.1 | 14412 | 19769 | 163 | | | | | | | | |
| 536 | 19770 | 484 | CVF77810.1 | 14414 | 19771 | 163 | | | | | | | | |
| 537 | 19772 | 484 | CVF08046.1 | 14416 | 19773 | 163 | | | | | | | | |
| 538 | 19774 | 484 | CVF84133.1 | 14418 | 19775 | 163 | | | | | | | | |
| 539 | 19776 | 484 | CVF82137.1 | 14420 | 19777 | 163 | | | | | | | | |
| 540 | 19778 | 484 | CVG26701.1 | 14422 | 19779 | 163 | | | | | | | | |
| 541 | 19780 | 484 | CVG63887.1 | 14424 | 19781 | 163 | | | | | | | | |
| 542 | 19782 | 484 | CVG49433.1 | 14426 | 19783 | 163 | | | | | | | | |
| 543 | 19784 | 484 | CVF96091.1 | 14428 | 19785 | 163 | | | | | | | | |
| 544 | 19786 | 484 | CVG60811.1 | 14430 | 19787 | 163 | | | | | | | | |
| 545 | 19788 | 484 | CVG18576.1 | 14432 | 19789 | 163 | | | | | | | | |
| 546 | 19790 | 484 | CVG60263.1 | 14434 | 19791 | 163 | | | | | | | | |
| 547 | 19792 | 484 | CVG00271.1 | 14436 | 19793 | 163 | | | | | | | | |
| 548 | 19794 | 484 | CVG18115.1 | 14438 | 19795 | 163 | | | | | | | | |
| 549 | 19796 | 484 | CVG66394.1 | 14440 | 19797 | 163 | | | | | | | | |
| 550 | 19798 | 306 | CVF82722.1 | 14442 | 19799 | 163 | | | | | | | | |
| 551 | 19800 | 484 | CVG27190.1 | 14444 | 19801 | 163 | | | | | | | | |
| 552 | 19802 | 484 | CVH08322.1 | 14446 | 19803 | 163 | | | | | | | | |
| 553 | 19804 | 306 | CVG82345.1 | 14448 | 19805 | 163 | | | | | | | | |
| 554 | 19806 | 484 | CVG89971.1 | 14450 | 19807 | 163 | | | | | | | | |
| 555 | 19808 | 484 | CVG75193.1 | 14452 | 19809 | 163 | | | | | | | | |
| 556 | 19810 | 484 | CVG91902.1 | 14454 | 19811 | 163 | | | | | | | | |
| 557 | 19812 | 484 | CVG61740.1 | 14456 | 19813 | 163 | | | | | | | | |
| 558 | 19814 | 484 | CVG55691.1 | 14458 | 19815 | 163 | | | | | | | | |
| 559 | 19816 | 484 | CVG99595.1 | 14460 | 19817 | 163 | | | | | | | | |
| 560 | 19818 | 484 | CVG85863.1 | 14462 | 19819 | 163 | | | | | | | | |
| 561 | 19820 | 484 | CVH13264.1 | 14464 | 19821 | 163 | | | | | | | | |
| 562 | 19822 | 484 | CVH22072.1 | 14466 | 19823 | 163 | | | | | | | | |
| 563 | 19824 | 484 | CVG79637.1 | 14468 | 19825 | 163 | | | | | | | | |
| 564 | 19826 | 484 | CVH31713.1 | 14470 | 19827 | 163 | | | | | | | | |
| 565 | 19828 | 484 | CVG61487.1 | 14472 | 19829 | 163 | | | | | | | | |
| 566 | 19830 | 484 | CVF47762.1 | 14474 | 19831 | 163 | | | | | | | | |
| 567 | 19832 | 484 | CVH23246.1 | 14476 | 19833 | 163 | | | | | | | | |
| 568 | 19834 | 484 | CVG86968.1 | 14478 | 19835 | 163 | | | | | | | | |
| 569 | 19836 | 484 | CVG92546.1 | 14480 | 19837 | 163 | | | | | | | | |
| 570 | 19838 | 484 | CVH34063.1 | 14482 | 19839 | 163 | | | | | | | | |
| 571 | 19840 | 465 | CVG73755.1 | 14484 | 19841 | 163 | | | | | | | | |
| 572 | 19842 | 484 | CVH31045.1 | 14486 | 19843 | 163 | | | | | | | | |
| 573 | 19844 | 484 | CVH30700.1 | 14488 | 19845 | 163 | | | | | | | | |
| 574 | 19846 | 484 | CVG97923.1 | 14490 | 19847 | 163 | | | | | | | | |
| 575 | 19848 | 484 | CVH42939.1 | 14492 | 19849 | 163 | | | | | | | | |
| 576 | 19850 | 484 | CVH11711.1 | 14494 | 19851 | 163 | | | | | | | | |
| 577 | 19852 | 484 | CVH39720.1 | 14496 | 19853 | 163 | | | | | | | | |
| 578 | 19854 | 484 | CVH33846.1 | 14498 | 19855 | 163 | | | | | | | | |
| 579 | 19856 | 484 | CVG91297.1 | 14500 | 19857 | 163 | | | | | | | | |
| 580 | 19858 | 484 | CVH37749.1 | 14502 | 19859 | 163 | | | | | | | | |
| 581 | 19860 | 484 | CVH21011.1 | 14504 | 19861 | 163 | | | | | | | | |
| 582 | 19862 | 484 | CVG01680.1 | 14506 | 19863 | 163 | | | | | | | | |
| 583 | 19864 | 484 | CVH35255.1 | 14508 | 19865 | 163 | | | | | | | | |
| 584 | 19866 | 484 | CVH07271.1 | 14510 | 19867 | 163 | | | | | | | | |
| 585 | 19868 | 484 | CVH30938.1 | 14512 | 19869 | 163 | | | | | | | | |
| 586 | 19870 | 484 | CVH50697.1 | 14514 | 19871 | 163 | | | | | | | | |
| 587 | 19872 | 484 | CVH40526.1 | 14516 | 19873 | 163 | | | | | | | | |
| 588 | 19874 | 484 | CVH64630.1 | 14518 | 19875 | 163 | | | | | | | | |
| 589 | 19876 | 484 | CVH70543.1 | 14520 | 19877 | 163 | | | | | | | | |
| 590 | 19878 | 484 | CVH72213.1 | 14522 | 19879 | 163 | | | | | | | | |
| 591 | 19880 | 484 | CVH65593.1 | 14524 | 19881 | 163 | | | | | | | | |
| 592 | 19882 | 593 | CVJ13862.1 | 14526 | 19883 | 505 | | | | | | | | |
| 593 | 19884 | 479 | CVJ11186.1 | 14528 | 19885 | 166 | CVJ11217.1 | 14529 | 19886 | 257 | | | | |
| 594 | 19887 | 335 | CVJ34976.1 | 14531 | 19888 | 293 | | | | | | | | |
| 595 | 19889 | 486 | CWV39708.1 | 14533 | 19890 | 202 | | | | | | | | |
| 596 | 19891 | 486 | CWW37521.1 | 14535 | 19892 | 202 | | | | | | | | |
| 597 | 19893 | 469 | CYO51346.1 | 14537 | 19894 | 206 | CYO51297.1 | 14538 | 19895 | 388 | | | | |
| 598 | 19896 | 468 | CYT98226.1 | 14540 | 19897 | 156 | | | | | | | | |
| 599 | 19898 | 469 | CZB11023.1 | 14542 | 19899 | 206 | CZB10962.1 | 14543 | 19900 | 382 | | | | |
| 600 | 19901 | 469 | CZB35760.1 | 14545 | 19902 | 206 | CZB35774.1 | 14546 | 19903 | 382 | | | | |
| 601 | 19904 | 125 | CZD24096.1 | 14548 | 19905 | 184 | | | | | | | | |
| 602 | 19906 | 125 | CZC77665.1 | 14550 | 19907 | 184 | | | | | | | | |
| 603 | 19908 | 125 | CZD72514.1 | 14552 | 19909 | 184 | | | | | | | | |
| 604 | 19910 | 125 | CZE23710.1 | 14554 | 19911 | 184 | | | | | | | | |
| 605 | 19912 | 473 | CAW93166.1 | 14556 | 19913 | 165 | | | | | | | | |
| 606 | 19914 | 345 | CBK94113.1 | 14558 | 19915 | 260 | | | | | | | | |
| 607 | 19916 | 483 | CCE59806.1 | 14560 | 19917 | 202 | CCE59807.1 | 14561 | 19918 | 362 | | | | |
| 608 | 19919 | 472 | CDD80087.1 | 14563 | 19920 | 166 | CDD80084.1 | 14564 | 19921 | 196 | | | | |
| 609 | 19922 | 472 | EEG72545.1 | 14566 | 19923 | 203 | | | | | | | | |
| 610 | 19924 | 424 | EEP27314.1 | 14568 | 19925 | 163 | EEP27315.1 | 14569 | 19926 | 189 | EEP27316.1 | 14570 | 19927 | 376 |
| 611 | 19928 | 475 | EEI83076.1 | 14572 | 19929 | 205 | | | | | | | | |
| 612 | 19930 | 478 | EEV44994.1 | 14574 | 19931 | 161 | EEV44996.1 | 14575 | 19932 | 283 | | | | |
| 613 | 19933 | 485 | EES71590.1 | 14577 | 19934 | 227 | | | | | | | | |
| 614 | 19935 | 471 | EEY94493.1 | 14579 | 19936 | 231 | EEY94495.1 | 14580 | 19937 | 194 | | | | |
| 615 | 19938 | 478 | EFS10289.1 | 14582 | 19939 | 161 | EFS10291.1 | 14583 | 19940 | 283 | | | | |
| 616 | 19941 | 478 | EGF19708.1 | 14585 | 19942 | 206 | EGF19710.1 | 14586 | 19943 | 388 | | | | |
| 617 | 19944 | 476 | EGK00062.1 | 14588 | 19945 | 203 | EGK00061.1 | 14589 | 19946 | 191 | | | | |
| 618 | 19947 | 1379 | CCH29380.1 | 14591 | 19948 | 404 | | | | | | | | |
| 619 | 19949 | 473 | CCN04568.1 | 14593 | 19950 | 146 | | | | | | | | |
| 620 | 19951 | 484 | CDG13495.1 | 14595 | 19952 | 144 | | | | | | | | |
| 621 | 19953 | 485 | CDH26047.1 | 14597 | 19954 | 196 | | | | | | | | |
| 622 | 19955 | 478 | EZP94705.1 | 14599 | 19956 | 161 | EZP94707.1 | 14600 | 19957 | 283 | | | | |
| 623 | 19958 | 478 | EZP99084.1 | 14602 | 19959 | 161 | EZP99086.1 | 14603 | 19960 | 283 | | | | |
| 624 | 19961 | 478 | EZP92277.1 | 14605 | 19962 | 161 | EZP92279.1 | 14606 | 19963 | 283 | | | | |
| 625 | 19964 | 479 | ETZ11574.1 | 14608 | 19965 | 163 | | | | | | | | |
| 626 | 19966 | 480 | KER34864.1 | 14610 | 19967 | 155 | | | | | | | | |
| 627 | 19968 | 245 | EWC94440.1 | 14612 | 19969 | 376 | | | | | | | | |
| 628 | 19970 | 503 | KYF75626.1 | 14614 | 19971 | 956 | | | | | | | | |
| 629 | 19972 | 1686 | KYF75481.1 | 14616 | 19973 | 953 | | | | | | | | |
| 630 | 19974 | 482 | EXE88612.1 | 14618 | 19975 | 199 | EXE88616.1 | 14619 | 19976 | 165 | EXE88611.1 | 14620 | 19977 | 166 |
| 631 | 19980 | 434 | KDN27531.1 | 14624 | 19981 | 271 | | | | | | | | |
| 632 | 19982 | 482 | KEC78310.1 | 14626 | 19983 | 158 | KEC78315.1 | 14627 | 19984 | 161 | | | | |
| 633 | 19985 | 473 | KDC94657.1 | 14629 | 19986 | 146 | | | | | | | | |
| 634 | 19987 | 476 | EGY80389.1 | 14631 | 19988 | 99 | | | | | | | | |
| 635 | 19989 | 508 | EHI41039.1 | 14633 | 19990 | 377 | | | | | | | | |
| 636 | 19991 | 487 | EHI61290.1 | 14635 | 19992 | 239 | | | | | | | | |
| 637 | 19993 | 481 | EHP50821.1 | 14637 | 19994 | 163 | EHP50818.1 | 14638 | 19995 | 181 | | | | |
| 638 | 19996 | 410 | EHR31701.1 | 14640 | 19997 | 165 | | | | | | | | |
| 639 | 19998 | 471 | EIY18767.1 | 14642 | 19999 | 203 | EIY18769.1 | 14643 | 20000 | 182 | EIY18765.1 | 14644 | 20001 | 398 |
| 640 | 20002 | 471 | EIY40459.1 | 14646 | 20003 | 203 | EIY40461.1 | 14647 | 20004 | 182 | EIY40505.1 | 14648 | 20005 | 398 |
| 641 | 20006 | 477 | EIY98047.1 | 14650 | 20007 | 163 | | | | | | | | |
| 642 | 20008 | 477 | EIY91471.1 | 14652 | 20009 | 163 | | | | | | | | |
| 643 | 20010 | 477 | EIY90207.1 | 14654 | 20011 | 163 | | | | | | | | |
| 644 | 20012 | 477 | EIY98755.1 | 14656 | 20013 | 163 | | | | | | | | |
| 645 | 20014 | 477 | EIY95126.1 | 14658 | 20015 | 163 | | | | | | | | |
| 646 | 20016 | 477 | EIY94596.1 | 14660 | 20017 | 163 | | | | | | | | |
| 647 | 20018 | 477 | EIY90858.1 | 14662 | 20019 | 163 | | | | | | | | |
| 648 | 20020 | 489 | EJS10771.1 | 14664 | 20021 | 164 | | | | | | | | |
| 649 | 20022 | 494 | EJS00270.1 | 14666 | 20023 | 202 | | | | | | | | |
| 650 | 20024 | 474 | EJR09241.1 | 14668 | 20025 | 192 | EJR09239.1 | 14669 | 20026 | 193 | | | | |
| 651 | 20027 | 480 | EJV74396.1 | 14671 | 20028 | 201 | | | | | | | | |
| 652 | 20029 | 476 | EJU93679.1 | 14673 | 20030 | 207 | EJU93678.1 | 14674 | 20031 | 308 | | | | |
| 653 | 20032 | 478 | EJX46904.1 | 14676 | 20033 | 161 | EJX46906.1 | 14677 | 20034 | 283 | | | | |
| 654 | 20035 | 478 | EJX62526.1 | 14679 | 20036 | 161 | EJX62524.1 | 14680 | 20037 | 283 | | | | |
| 655 | 20038 | 478 | EJX62293.1 | 14682 | 20039 | 161 | EJX62295.1 | 14683 | 20040 | 283 | | | | |
| 656 | 20041 | 478 | EJX50427.1 | 14685 | 20042 | 161 | EJX50429.1 | 14686 | 20043 | 283 | | | | |
| 657 | 20044 | 478 | EJX67855.1 | 14688 | 20045 | 161 | EJX67853.1 | 14689 | 20046 | 283 | | | | |
| 658 | 20047 | 478 | EJX96646.1 | 14691 | 20048 | 161 | EJX96648.1 | 14692 | 20049 | 283 | | | | |
| 659 | 20050 | 478 | EJX94482.1 | 14694 | 20051 | 161 | EJX94480.1 | 14695 | 20052 | 283 | | | | |
| 660 | 20053 | 478 | EJX98619.1 | 14697 | 20054 | 161 | EJX98617.1 | 14698 | 20055 | 283 | | | | |
| 661 | 20056 | 478 | EJY06339.1 | 14700 | 20057 | 161 | EJY06337.1 | 14701 | 20058 | 283 | | | | |
| 662 | 20059 | 478 | EJY12739.1 | 14703 | 20060 | 161 | EJY12737.1 | 14704 | 20061 | 283 | | | | |
| 663 | 20062 | 478 | EJY15299.1 | 14706 | 20063 | 161 | EJY15301.1 | 14707 | 20064 | 283 | | | | |
| 664 | 20065 | 214 | EKB22092.1 | 14709 | 20066 | 164 | EKB22094.1 | 14710 | 20067 | 181 | | | | |
| 665 | 20068 | 494 | EKG43672.1 | 14712 | 20069 | 325 | | | | | | | | |
| 666 | 20070 | 481 | EYD87720.1 | 14714 | 20071 | 155 | | | | | | | | |
| 667 | 20072 | 491 | EZR33641.1 | 14716 | 20073 | 202 | EZR33642.1 | 14717 | 20074 | 308 | | | | |
| 668 | 20075 | 483 | EZR32905.1 | 14719 | 20076 | 202 | EZR32906.1 | 14720 | 20077 | 72 | | | | |
| 669 | 20078 | 483 | EZR32077.1 | 14722 | 20079 | 202 | EZR32078.1 | 14723 | 20080 | 308 | | | | |
| 670 | 20081 | 483 | EZR40122.1 | 14725 | 20082 | 202 | EZR40123.1 | 14726 | 20083 | 308 | | | | |
| 671 | 20084 | 483 | EZR39625.1 | 14728 | 20085 | 202 | EZR39626.1 | 14729 | 20086 | 308 | | | | |
| 672 | 20087 | 483 | EZR44609.1 | 14731 | 20088 | 202 | EZR44610.1 | 14732 | 20089 | 308 | | | | |
| 673 | 20090 | 483 | EZR45905.1 | 14734 | 20091 | 202 | EZR45906.1 | 14735 | 20092 | 308 | | | | |
| 674 | 20093 | 483 | EZR45666.1 | 14737 | 20094 | 202 | EZR45667.1 | 14738 | 20095 | 308 | | | | |
| 675 | 20096 | 483 | EZR50023.1 | 14740 | 20097 | 202 | EZR50024.1 | 14741 | 20098 | 308 | | | | |
| 676 | 20099 | 483 | EZR55033.1 | 14743 | 20100 | 202 | EZR55034.1 | 14744 | 20101 | 308 | | | | |
| 677 | 20102 | 131 | EZR57943.1 | 14746 | 20103 | 202 | EZR57944.1 | 14747 | 20104 | 308 | | | | |
| 678 | 20105 | 483 | EZR61547.1 | 14749 | 20106 | 202 | EZR61548.1 | 14750 | 20107 | 308 | | | | |
| 679 | 20108 | 483 | EZR61334.1 | 14752 | 20109 | 202 | EZR61335.1 | 14753 | 20110 | 308 | | | | |
| 680 | 20111 | 483 | EZR64329.1 | 14755 | 20112 | 202 | EZR64330.1 | 14756 | 20113 | 308 | | | | |
| 681 | 20114 | 483 | EZR68239.1 | 14758 | 20115 | 202 | EZR68240.1 | 14759 | 20116 | 308 | | | | |
| 682 | 20117 | 483 | EZR69012.1 | 14761 | 20118 | 202 | EZR69013.1 | 14762 | 20119 | 308 | | | | |
| 683 | 20120 | 483 | EZR71839.1 | 14764 | 20121 | 202 | EZR71840.1 | 14765 | 20122 | 308 | | | | |
| 684 | 20123 | 483 | EZR76989.1 | 14767 | 20124 | 202 | EZR76990.1 | 14768 | 20125 | 308 | | | | |
| 685 | 20126 | 483 | EZR83386.1 | 14770 | 20127 | 202 | EZR83387.1 | 14771 | 20128 | 308 | | | | |
| 686 | 20129 | 483 | EZR85550.1 | 14773 | 20130 | 202 | EZR85551.1 | 14774 | 20131 | 308 | | | | |
| 687 | 20132 | 483 | EZR86480.1 | 14776 | 20133 | 202 | EZR86481.1 | 14777 | 20134 | 308 | | | | |
| 688 | 20135 | 483 | EZR91405.1 | 14779 | 20136 | 202 | EZR91406.1 | 14780 | 20137 | 308 | | | | |
| 689 | 20138 | 375 | EZR97098.1 | 14782 | 20139 | 202 | EZR97099.1 | 14783 | 20140 | 308 | | | | |
| 690 | 20141 | 483 | EZR91806.1 | 14785 | 20142 | 202 | EZR91807.1 | 14786 | 20143 | 308 | | | | |
| 691 | 20144 | 483 | EZS01236.1 | 14788 | 20145 | 202 | EZS01237.1 | 14789 | 20146 | 308 | | | | |
| 692 | 20147 | 483 | EZR98551.1 | 14791 | 20148 | 202 | EZR98552.1 | 14792 | 20149 | 308 | | | | |
| 693 | 20150 | 483 | EZS03611.1 | 14794 | 20151 | 202 | EZS03612.1 | 14795 | 20152 | 308 | | | | |
| 694 | 20153 | 483 | EZS03315.1 | 14797 | 20154 | 202 | EZS03316.1 | 14798 | 20155 | 308 | | | | |
| 695 | 20156 | 483 | EZS19478.1 | 14800 | 20157 | 202 | EZS19479.1 | 14801 | 20158 | 308 | | | | |
| 696 | 20159 | 483 | EZS08902.1 | 14803 | 20160 | 202 | EZS08903.1 | 14804 | 20161 | 308 | | | | |
| 697 | 20162 | 483 | EZS11742.1 | 14806 | 20163 | 202 | EZS11743.1 | 14807 | 20164 | 308 | | | | |
| 698 | 20165 | 483 | EZS15733.1 | 14809 | 20166 | 202 | EZS15734.1 | 14810 | 20167 | 308 | | | | |
| 699 | 20168 | 483 | EZS17714.1 | 14812 | 20169 | 202 | EZS17715.1 | 14813 | 20170 | 308 | | | | |
| 700 | 20171 | 483 | EZS22503.1 | 14815 | 20172 | 202 | EZS22504.1 | 14816 | 20173 | 308 | | | | |
| 701 | 20174 | 483 | EZS28194.1 | 14818 | 20175 | 202 | EZS28195.1 | 14819 | 20176 | 308 | | | | |
| 702 | 20177 | 483 | EZS23870.1 | 14821 | 20178 | 202 | EZS23871.1 | 14822 | 20179 | 308 | | | | |
| 703 | 20180 | 483 | EZS29420.1 | 14824 | 20181 | 202 | EZS29421.1 | 14825 | 20182 | 308 | | | | |
| 704 | 20183 | 483 | EZS31412.1 | 14827 | 20184 | 202 | EZS31413.1 | 14828 | 20185 | 308 | | | | |
| 705 | 20186 | 483 | EZS33211.1 | 14830 | 20187 | 202 | EZS33212.1 | 14831 | 20188 | 308 | | | | |
| 706 | 20189 | 483 | EZS35183.1 | 14833 | 20190 | 202 | EZS35184.1 | 14834 | 20191 | 308 | | | | |
| 707 | 20192 | 483 | EZS39160.1 | 14836 | 20193 | 202 | EZS39161.1 | 14837 | 20194 | 308 | | | | |
| 708 | 20195 | 483 | EZS43275.1 | 14839 | 20196 | 202 | EZS43276.1 | 14840 | 20197 | 308 | | | | |
| 709 | 20198 | 483 | EZS45536.1 | 14842 | 20199 | 202 | EZS45537.1 | 14843 | 20200 | 308 | | | | |
| 710 | 20201 | 483 | EZS50845.1 | 14845 | 20202 | 202 | EZS50846.1 | 14846 | 20203 | 308 | | | | |
| 711 | 20204 | 483 | EZS49645.1 | 14848 | 20205 | 202 | EZS49646.1 | 14849 | 20206 | 308 | | | | |
| 712 | 20207 | 483 | EZS53446.1 | 14851 | 20208 | 202 | EZS53447.1 | 14852 | 20209 | 308 | | | | |
| 713 | 20210 | 483 | EZS57830.1 | 14854 | 20211 | 202 | EZS57831.1 | 14855 | 20212 | 308 | | | | |
| 714 | 20213 | 483 | EZS59103.1 | 14857 | 20214 | 202 | EZS59104.1 | 14858 | 20215 | 308 | | | | |
| 715 | 20216 | 483 | EZS59926.1 | 14860 | 20217 | 202 | EZS59927.1 | 14861 | 20218 | 308 | | | | |
| 716 | 20219 | 483 | EZS62656.1 | 14863 | 20220 | 202 | EZS62657.1 | 14864 | 20221 | 308 | | | | |
| 717 | 20222 | 483 | EZS64790.1 | 14866 | 20223 | 202 | EZS64791.1 | 14867 | 20224 | 308 | | | | |
| 718 | 20225 | 483 | EZS69841.1 | 14869 | 20226 | 202 | EZS69842.1 | 14870 | 20227 | 308 | | | | |
| 719 | 20228 | 483 | EZS69136.1 | 14872 | 20229 | 202 | EZS69137.1 | 14873 | 20230 | 308 | | | | |
| 720 | 20231 | 483 | EZS72360.1 | 14875 | 20232 | 202 | EZS72361.1 | 14876 | 20233 | 308 | | | | |
| 721 | 20234 | 483 | EZS75505.1 | 14878 | 20235 | 202 | EZS75506.1 | 14879 | 20236 | 308 | | | | |
| 722 | 20237 | 483 | EZS76926.1 | 14881 | 20238 | 202 | EZS76927.1 | 14882 | 20239 | 308 | | | | |
| 723 | 20240 | 483 | EZS80905.1 | 14884 | 20241 | 202 | EZS80906.1 | 14885 | 20242 | 308 | | | | |
| 724 | 20243 | 483 | EZS87843.1 | 14887 | 20244 | 202 | EZS87844.1 | 14888 | 20245 | 308 | | | | |
| 725 | 20246 | 483 | EZS84436.1 | 14890 | 20247 | 202 | EZS84437.1 | 14891 | 20248 | 308 | | | | |
| 726 | 20249 | 483 | EZS87767.1 | 14893 | 20250 | 202 | EZS87768.1 | 14894 | 20251 | 308 | | | | |
| 727 | 20252 | 483 | EZS90161.1 | 14896 | 20253 | 202 | EZS90162.1 | 14897 | 20254 | 308 | | | | |
| 728 | 20255 | 483 | EZS94700.1 | 14899 | 20256 | 202 | EZS94701.1 | 14900 | 20257 | 308 | | | | |
| 729 | 20258 | 483 | EZS98279.1 | 14902 | 20259 | 202 | EZS98280.1 | 14903 | 20260 | 308 | | | | |
| 730 | 20261 | 483 | EZT00069.1 | 14905 | 20262 | 202 | EZT00070.1 | 14906 | 20263 | 308 | | | | |
| 731 | 20264 | 483 | EZT04299.1 | 14908 | 20265 | 202 | EZT04300.1 | 14909 | 20266 | 308 | | | | |
| 732 | 20267 | 483 | EZT04245.1 | 14911 | 20268 | 202 | EZT04246.1 | 14912 | 20269 | 308 | | | | |
| 733 | 20270 | 483 | EZT06688.1 | 14914 | 20271 | 202 | EZT06689.1 | 14915 | 20272 | 308 | | | | |
| 734 | 20273 | 483 | EZT09550.1 | 14917 | 20274 | 202 | EZT09551.1 | 14918 | 20275 | 308 | | | | |
| 735 | 20276 | 483 | EZT09959.1 | 14920 | 20277 | 202 | EZT09960.1 | 14921 | 20278 | 308 | | | | |
| 736 | 20279 | 483 | EZT16278.1 | 14923 | 20280 | 202 | EZT16279.1 | 14924 | 20281 | 308 | | | | |
| 737 | 20282 | 483 | EZT18986.1 | 14926 | 20283 | 202 | EZT18987.1 | 14927 | 20284 | 308 | | | | |
| 738 | 20285 | 483 | EZT18345.1 | 14929 | 20286 | 202 | EZT18346.1 | 14930 | 20287 | 308 | | | | |
| 739 | 20288 | 483 | EZT23521.1 | 14932 | 20289 | 202 | EZT23522.1 | 14933 | 20290 | 308 | | | | |
| 740 | 20291 | 483 | EZT25330.1 | 14935 | 20292 | 202 | EZT25331.1 | 14936 | 20293 | 308 | | | | |
| 741 | 20294 | 375 | EZT27372.1 | 14938 | 20295 | 202 | EZT27373.1 | 14939 | 20296 | 308 | | | | |
| 742 | 20297 | 483 | EZT32066.1 | 14941 | 20298 | 202 | EZT32067.1 | 14942 | 20299 | 308 | | | | |
| 743 | 20300 | 483 | EZT32805.1 | 14944 | 20301 | 202 | EZT32806.1 | 14945 | 20302 | 308 | | | | |
| 744 | 20303 | 483 | EZT35385.1 | 14947 | 20304 | 202 | EZT35386.1 | 14948 | 20305 | 308 | | | | |
| 745 | 20306 | 483 | EZT42044.1 | 14950 | 20307 | 202 | EZT42045.1 | 14951 | 20308 | 308 | | | | |
| 746 | 20309 | 483 | EZT39170.1 | 14953 | 20310 | 202 | EZT39171.1 | 14954 | 20311 | 308 | | | | |
| 747 | 20312 | 483 | EZT44506.1 | 14956 | 20313 | 202 | EZT44507.1 | 14957 | 20314 | 308 | | | | |
| 748 | 20315 | 375 | EZT47448.1 | 14959 | 20316 | 202 | EZT47449.1 | 14960 | 20317 | 308 | | | | |
| 749 | 20318 | 375 | EZT50533.1 | 14962 | 20319 | 202 | EZT50534.1 | 14963 | 20320 | 308 | | | | |
| 750 | 20321 | 483 | EZT52623.1 | 14965 | 20322 | 202 | EZT52624.1 | 14966 | 20323 | 308 | | | | |
| 751 | 20324 | 483 | EZT54278.1 | 14968 | 20325 | 202 | EZT54279.1 | 14969 | 20326 | 308 | | | | |
| 752 | 20327 | 483 | EZT57809.1 | 14971 | 20328 | 202 | EZT57810.1 | 14972 | 20329 | 308 | | | | |
| 753 | 20330 | 483 | EZT60955.1 | 14974 | 20331 | 202 | EZT60956.1 | 14975 | 20332 | 308 | | | | |
| 754 | 20333 | 483 | EZT61424.1 | 14977 | 20334 | 202 | EZT61425.1 | 14978 | 20335 | 308 | | | | |
| 755 | 20336 | 483 | EZT65755.1 | 14980 | 20337 | 202 | EZT65756.1 | 14981 | 20338 | 308 | | | | |
| 756 | 20339 | 483 | EZT68343.1 | 14983 | 20340 | 202 | EZT68344.1 | 14984 | 20341 | 308 | | | | |
| 757 | 20342 | 483 | EZT68416.1 | 14986 | 20343 | 202 | EZT68417.1 | 14987 | 20344 | 308 | | | | |
| 758 | 20345 | 483 | EZT73753.1 | 14989 | 20346 | 202 | EZT73754.1 | 14990 | 20347 | 308 | | | | |
| 759 | 20348 | 483 | EZT75320.1 | 14992 | 20349 | 202 | EZT75321.1 | 14993 | 20350 | 308 | | | | |
| 760 | 20351 | 483 | EZT77628.1 | 14995 | 20352 | 202 | EZT77629.1 | 14996 | 20353 | 308 | | | | |
| 761 | 20354 | 483 | EZT80085.1 | 14998 | 20355 | 202 | EZT80086.1 | 14999 | 20356 | 308 | | | | |
| 762 | 20357 | 483 | EZT82071.1 | 15001 | 20358 | 202 | EZT82072.1 | 15002 | 20359 | 308 | | | | |
| 763 | 20360 | 483 | EZT89288.1 | 15004 | 20361 | 202 | EZT89289.1 | 15005 | 20362 | 308 | | | | |
| 764 | 20363 | 483 | EZT93144.1 | 15007 | 20364 | 202 | EZT93145.1 | 15008 | 20365 | 308 | | | | |
| 765 | 20366 | 483 | EZT96079.1 | 15010 | 20367 | 202 | EZT96080.1 | 15011 | 20368 | 308 | | | | |
| 766 | 20369 | 483 | EZT99580.1 | 15013 | 20370 | 202 | EZT99581.1 | 15014 | 20371 | 308 | | | | |
| 767 | 20372 | 483 | EZU00839.1 | 15016 | 20373 | 202 | EZU00840.1 | 15017 | 20374 | 308 | | | | |
| 768 | 20375 | 483 | EZU03292.1 | 15019 | 20376 | 202 | EZU03293.1 | 15020 | 20377 | 308 | | | | |
| 769 | 20378 | 483 | EZU07138.1 | 15022 | 20379 | 202 | EZU07139.1 | 15023 | 20380 | 308 | | | | |
| 770 | 20381 | 483 | EZU08870.1 | 15025 | 20382 | 202 | EZU08871.1 | 15026 | 20383 | 308 | | | | |
| 771 | 20384 | 481 | EZK05851.1 | 15028 | 20385 | 155 | | | | | | | | |
| 772 | 20386 | 481 | EZK20523.1 | 15030 | 20387 | 155 | | | | | | | | |
| 773 | 20388 | 483 | KEA54803.1 | 15032 | 20389 | 165 | KEA54805.1 | 15033 | 20390 | 184 | | | | |
| 774 | 20391 | 132 | KGK10825.1 | 15035 | 20392 | 166 | | | | | | | | |
| 775 | 20393 | 479 | KDN56467.1 | 15037 | 20394 | 203 | KDN56465.1 | 15038 | 20395 | 182 | | | | |
| 776 | 20396 | 471 | KDS43696.1 | 15040 | 20397 | 203 | KDS43698.1 | 15041 | 20398 | 182 | | | | |
| 777 | 20399 | 481 | KDU61956.1 | 15043 | 20400 | 155 | | | | | | | | |
| 778 | 20401 | 529 | KDX77548.1 | 15045 | 20402 | 323 | | | | | | | | |
| 779 | 20403 | 529 | KDX82580.1 | 15047 | 20404 | 323 | | | | | | | | |
| 780 | 20405 | 481 | KDY27429.1 | 15049 | 20406 | 155 | | | | | | | | |
| 781 | 20407 | 481 | KED12525.1 | 15051 | 20408 | 191 | | | | | | | | |
| 782 | 20409 | 481 | KED15840.1 | 15053 | 20410 | 191 | | | | | | | | |
| 783 | 20411 | 481 | KED29322.1 | 15055 | 20412 | 200 | KED29321.1 | 15056 | 20413 | 191 | | | | |
| 784 | 20414 | 481 | KED25552.1 | 15058 | 20415 | 200 | KED25551.1 | 15059 | 20416 | 191 | | | | |
| 785 | 20417 | 481 | KED36895.1 | 15061 | 20418 | 200 | KED36894.1 | 15062 | 20419 | 191 | | | | |
| 786 | 20420 | 481 | KED34399.1 | 15064 | 20421 | 200 | | | | | | | | |
| 787 | 20422 | 475 | KED69848.1 | 15066 | 20423 | 228 | | | | | | | | |
| 788 | 20424 | 474 | KGK23634.1 | 15068 | 20425 | 163 | KGK23633.1 | 15069 | 20426 | 171 | | | | |
| 789 | 20427 | 481 | KEK91461.1 | 15071 | 20428 | 155 | | | | | | | | |
| 790 | 20429 | 481 | KEK94905.1 | 15073 | 20430 | 155 | | | | | | | | |
| 791 | 20431 | 299 | KEK94965.1 | 15075 | 20432 | 155 | | | | | | | | |
| 792 | 20433 | 311 | KEK89445.1 | 15077 | 20434 | 155 | | | | | | | | |
| 793 | 20435 | 294 | KEQ37437.1 | 15079 | 20436 | 206 | KEQ37440.1 | 15080 | 20437 | 180 | | | | |
| 794 | 20438 | 469 | KEQ45049.1 | 15082 | 20439 | 206 | KEQ45047.1 | 15083 | 20440 | 310 | | | | |
| 795 | 20441 | 484 | KFB55437.1 | 15085 | 20442 | 163 | | | | | | | | |
| 796 | 20443 | 484 | KFF79467.1 | 15087 | 20444 | 163 | | | | | | | | |
| 797 | 20445 | 475 | KFF62083.1 | 15089 | 20446 | 205 | KFF62085.1 | 15090 | 20447 | 200 | KFF62086.1 | 15091 | 20448 | 395 |
| 798 | 20450 | 486 | KTA63995.1 | 15094 | 20451 | 202 | | | | | | | | |
| 799 | 20452 | 466 | KNE78571.1 | 15096 | 20453 | 214 | | | | | | | | |
| 800 | 20454 | 477 | KFK51886.1 | 15098 | 20455 | 165 | KFK51888.1 | 15099 | 20456 | 225 | | | | |
| 801 | 20457 | 482 | KGA25875.1 | 15101 | 20458 | 200 | | | | | | | | |
| 802 | 20459 | 602 | KGN93840.1 | 15103 | 20460 | 391 | | | | | | | | |
| 803 | 20461 | 478 | KGK75436.1 | 15105 | 20462 | 161 | KGK75438.1 | 15106 | 20463 | 283 | | | | |
| 804 | 20464 | 471 | KGF38952.1 | 15108 | 20465 | 203 | KGF38954.1 | 15109 | 20466 | 182 | | | | |
| 805 | 20467 | 473 | KHD43838.1 | 15111 | 20468 | 166 | | | | | | | | |
| 806 | 20469 | 478 | KGQ80277.1 | 15113 | 20470 | 161 | KGQ80279.1 | 15114 | 20471 | 283 | | | | |
| 807 | 20472 | 211 | KIE90700.1 | 15116 | 20473 | 165 | KIE90687.1 | 15117 | 20474 | 214 | | | | |
| 808 | 20475 | 307 | KIE90615.1 | 15119 | 20476 | 165 | KIE90604.1 | 15120 | 20477 | 214 | | | | |
| 809 | 20478 | 307 | KIE97297.1 | 15122 | 20479 | 165 | KIE97287.1 | 15123 | 20480 | 214 | | | | |
| 810 | 20481 | 307 | KIE97677.1 | 15125 | 20482 | 165 | KIE97674.1 | 15126 | 20483 | 214 | | | | |
| 811 | 20484 | 307 | KIE96205.1 | 15128 | 20485 | 165 | KIE96201.1 | 15129 | 20486 | 214 | | | | |
| 812 | 20487 | 307 | KIE90369.1 | 15131 | 20488 | 165 | KIE90359.1 | 15132 | 20489 | 214 | | | | |
| 813 | 20490 | 487 | KHN56271.1 | 15134 | 20491 | 195 | KHN56274.1 | 15135 | 20492 | 165 | KHN56277.1 | 15136 | 20493 | 167 |
| 814 | 20495 | 483 | KII20610.1 | 15139 | 20496 | 202 | KII20611.1 | 15140 | 20497 | 308 | | | | |
| 815 | 20498 | 478 | KIE70776.1 | 15142 | 20499 | 203 | | | | | | | | |
| 816 | 20500 | 103 | KGY52719.1 | 15144 | 20501 | 192 | | | | | | | | |
| 817 | 20502 | 484 | KGZ13595.1 | 15146 | 20503 | 163 | | | | | | | | |
| 818 | 20504 | 480 | KHM45256.1 | 15148 | 20505 | 166 | | | | | | | | |
| 819 | 20506 | 480 | KID39106.1 | 15150 | 20507 | 166 | | | | | | | | |
| 820 | 20508 | 484 | KHO41400.1 | 15152 | 20509 | 163 | | | | | | | | |
| 821 | 20510 | 493 | KIM13726.1 | 15154 | 20511 | 156 | | | | | | | | |
| 822 | 20512 | 591 | KMM85343.1 | 15156 | 20513 | 322 | | | | | | | | |
| 823 | 20514 | 478 | ELA78318.1 | 15158 | 20515 | 161 | ELA78316.1 | 15159 | 20516 | 283 | | | | |
| 824 | 20517 | 478 | ELB72565.1 | 15161 | 20518 | 161 | ELB72563.1 | 15162 | 20519 | 283 | | | | |
| 825 | 20520 | 478 | ELB70912.1 | 15164 | 20521 | 161 | ELB70910.1 | 15165 | 20522 | 283 | | | | |
| 826 | 20523 | 478 | ELB76088.1 | 15167 | 20524 | 161 | ELB76086.1 | 15168 | 20525 | 283 | | | | |
| 827 | 20526 | 478 | ELB84572.1 | 15170 | 20527 | 161 | ELB84570.1 | 15171 | 20528 | 283 | | | | |
| 828 | 20529 | 478 | ELB85484.1 | 15173 | 20530 | 161 | ELB85482.1 | 15174 | 20531 | 283 | | | | |
| 829 | 20532 | 596 | EKS34036.1 | 15176 | 20533 | 370 | | | | | | | | |
| 830 | 20534 | 478 | ELC28355.1 | 15178 | 20535 | 203 | | | | | | | | |
| 831 | 20536 | 478 | ELD53294.1 | 15180 | 20537 | 203 | | | | | | | | |
| 832 | 20538 | 478 | ELF38885.1 | 15182 | 20539 | 203 | | | | | | | | |
| 833 | 20540 | 126 | ELF73879.1 | 15184 | 20541 | 155 | | | | | | | | |
| 834 | 20542 | 478 | ELH15112.1 | 15186 | 20543 | 203 | | | | | | | | |
| 835 | 20544 | 478 | ELF82584.1 | 15188 | 20545 | 203 | | | | | | | | |
| 836 | 20546 | 329 | ENU62566.1 | 15190 | 20547 | 160 | ENU62743.1 | 15191 | 20548 | 179 | | | | |
| 837 | 20549 | 476 | ENX56756.1 | 15193 | 20550 | 145 | ENX56757.1 | 15194 | 20551 | 269 | | | | |
| 838 | 20552 | 515 | ENX18769.1 | 15196 | 20553 | 778 | | | | | | | | |
| 839 | 20554 | 257 | ENX27878.1 | 15198 | 20555 | 160 | ENX27882.1 | 15199 | 20556 | 179 | | | | |
| 840 | 20557 | 495 | ENZ03438.1 | 15201 | 20558 | 160 | ENZ03439.1 | 15202 | 20559 | 193 | | | | |
| 841 | 20560 | 481 | ENZ02554.1 | 15204 | 20561 | 227 | ENZ02556.1 | 15205 | 20562 | 394 | | | | |
| 842 | 20563 | 478 | EOH58475.1 | 15207 | 20564 | 161 | EOH58477.1 | 15208 | 20565 | 283 | | | | |
| 843 | 20566 | 478 | EOL74787.1 | 15210 | 20567 | 161 | EOL74785.1 | 15211 | 20568 | 283 | | | | |
| 844 | 20569 | 478 | EOI52381.1 | 15213 | 20570 | 161 | EOI52383.1 | 15214 | 20571 | 283 | | | | |
| 845 | 20572 | 478 | EOG00797.1 | 15216 | 20573 | 161 | EOG00795.1 | 15217 | 20574 | 283 | | | | |
| 846 | 20575 | 478 | EOG01000.1 | 15219 | 20576 | 161 | EOG00998.1 | 15220 | 20577 | 283 | | | | |
| 847 | 20578 | 478 | EOG17545.1 | 15222 | 20579 | 161 | EOG17543.1 | 15223 | 20580 | 283 | | | | |
| 848 | 20581 | 478 | EOG17726.1 | 15225 | 20582 | 161 | EOG17728.1 | 15226 | 20583 | 283 | | | | |
| 849 | 20584 | 478 | EOG29142.1 | 15228 | 20585 | 161 | EOG29140.1 | 15229 | 20586 | 283 | | | | |
| 850 | 20587 | 478 | EOM31820.1 | 15231 | 20588 | 161 | EOM31822.1 | 15232 | 20589 | 283 | | | | |
| 851 | 20590 | 491 | EOQ01915.1 | 15234 | 20591 | 202 | | | | | | | | |
| 852 | 20592 | 473 | EOT43558.1 | 15236 | 20593 | 165 | | | | | | | | |
| 853 | 20594 | 473 | EOW87388.1 | 15238 | 20595 | 165 | | | | | | | | |
| 854 | 20596 | 482 | EPD26425.1 | 15240 | 20597 | 217 | EPD26427.1 | 15241 | 20598 | 167 | EPD26426.1 | 15242 | 20599 | 187 |
| 855 | 20600 | 482 | EPI22404.1 | 15244 | 20601 | 217 | | | | | | | | |
| 856 | 20602 | 478 | EQN31626.1 | 15246 | 20603 | 203 | | | | | | | | |
| 857 | 20604 | 478 | EQO47877.1 | 15248 | 20605 | 203 | | | | | | | | |
| 858 | 20606 | 482 | EQO88545.1 | 15250 | 20607 | 166 | | | | | | | | |
| 859 | 20608 | 482 | EQS52096.1 | 15252 | 20609 | 166 | | | | | | | | |
| 860 | 20610 | 482 | EQX21242.1 | 15254 | 20611 | 166 | | | | | | | | |
| 861 | 20612 | 488 | ERK54361.1 | 15256 | 20613 | 167 | | | | | | | | |
| 862 | 20614 | 487 | ERW54757.1 | 15258 | 20615 | 167 | ERW54755.1 | 15259 | 20616 | 304 | | | | |
| 863 | 20617 | 487 | ERW94008.1 | 15261 | 20618 | 167 | ERW94010.1 | 15262 | 20619 | 304 | | | | |
| 864 | 20620 | 469 | ETD07629.1 | 15264 | 20621 | 206 | ETD07627.1 | 15265 | 20622 | 388 | | | | |
| 865 | 20623 | 478 | ETU12931.1 | 15267 | 20624 | 161 | ETU12933.1 | 15268 | 20625 | 283 | | | | |
| 866 | 20626 | 484 | ETX46916.1 | 15270 | 20627 | 163 | | | | | | | | |
| 867 | 20628 | 475 | EXX84013.1 | 15272 | 20629 | 228 | | | | | | | | |
| 868 | 20630 | 484 | EZQ69340.1 | 15274 | 20631 | 163 | | | | | | | | |
| 869 | 20632 | 483 | EZU15806.1 | 15276 | 20633 | 202 | EZU15807.1 | 15277 | 20634 | 308 | | | | |
| 870 | 20635 | 483 | EZU14923.1 | 15279 | 20636 | 202 | EZU14924.1 | 15280 | 20637 | 308 | | | | |
| 871 | 20638 | 483 | EZU22367.1 | 15282 | 20639 | 202 | EZU22368.1 | 15283 | 20640 | 308 | | | | |
| 872 | 20641 | 483 | EZU24875.1 | 15285 | 20642 | 202 | EZU24876.1 | 15286 | 20643 | 308 | | | | |
| 873 | 20644 | 483 | EZU30072.1 | 15288 | 20645 | 202 | EZU30073.1 | 15289 | 20646 | 308 | | | | |
| 874 | 20647 | 483 | EZU33074.1 | 15291 | 20648 | 202 | EZU33075.1 | 15292 | 20649 | 308 | | | | |
| 875 | 20650 | 483 | EZU39421.1 | 15294 | 20651 | 202 | EZU39422.1 | 15295 | 20652 | 308 | | | | |
| 876 | 20653 | 483 | EZU35475.1 | 15297 | 20654 | 202 | EZU35476.1 | 15298 | 20655 | 308 | | | | |
| 877 | 20656 | 483 | EZU41789.1 | 15300 | 20657 | 202 | EZU41790.1 | 15301 | 20658 | 308 | | | | |
| 878 | 20659 | 483 | EZU42122.1 | 15303 | 20660 | 202 | EZU42123.1 | 15304 | 20661 | 308 | | | | |
| 879 | 20662 | 483 | EZU46567.1 | 15306 | 20663 | 202 | EZU46568.1 | 15307 | 20664 | 308 | | | | |
| 880 | 20665 | 483 | EZU46768.1 | 15309 | 20666 | 202 | EZU46769.1 | 15310 | 20667 | 308 | | | | |
| 881 | 20668 | 483 | EZU48613.1 | 15312 | 20669 | 202 | EZU48614.1 | 15313 | 20670 | 308 | | | | |
| 882 | 20671 | 483 | EZU52016.1 | 15315 | 20672 | 202 | EZU52017.1 | 15316 | 20673 | 308 | | | | |
| 883 | 20674 | 483 | EZU55225.1 | 15318 | 20675 | 202 | EZU55226.1 | 15319 | 20676 | 308 | | | | |
| 884 | 20677 | 483 | EZU56166.1 | 15321 | 20678 | 202 | EZU56167.1 | 15322 | 20679 | 308 | | | | |
| 885 | 20680 | 483 | EZU61335.1 | 15324 | 20681 | 202 | EZU61336.1 | 15325 | 20682 | 308 | | | | |
| 886 | 20683 | 483 | EZU65298.1 | 15327 | 20684 | 202 | EZU65299.1 | 15328 | 20685 | 308 | | | | |
| 887 | 20686 | 483 | EZU73660.1 | 15330 | 20687 | 202 | EZU73661.1 | 15331 | 20688 | 308 | | | | |
| 888 | 20689 | 483 | EZU80185.1 | 15333 | 20690 | 202 | EZU80186.1 | 15334 | 20691 | 308 | | | | |
| 889 | 20692 | 483 | EZU80947.1 | 15336 | 20693 | 202 | EZU80948.1 | 15337 | 20694 | 308 | | | | |
| 890 | 20695 | 483 | EZU82979.1 | 15339 | 20696 | 202 | EZU82980.1 | 15340 | 20697 | 308 | | | | |
| 891 | 20698 | 483 | EZU87060.1 | 15342 | 20699 | 202 | EZU87061.1 | 15343 | 20700 | 308 | | | | |
| 892 | 20701 | 483 | EZU88263.1 | 15345 | 20702 | 202 | EZU88264.1 | 15346 | 20703 | 308 | | | | |
| 893 | 20704 | 483 | EZU90292.1 | 15348 | 20705 | 202 | EZU90293.1 | 15349 | 20706 | 308 | | | | |
| 894 | 20707 | 483 | EZU94766.1 | 15351 | 20708 | 202 | EZU94767.1 | 15352 | 20709 | 308 | | | | |
| 895 | 20710 | 483 | EZU96099.1 | 15354 | 20711 | 202 | EZU96100.1 | 15355 | 20712 | 308 | | | | |
| 896 | 20713 | 483 | EZV02406.1 | 15357 | 20714 | 202 | EZV02407.1 | 15358 | 20715 | 308 | | | | |
| 897 | 20716 | 375 | EZV09966.1 | 15360 | 20717 | 202 | EZV09967.1 | 15361 | 20718 | 308 | | | | |
| 898 | 20719 | 483 | EZV11273.1 | 15363 | 20720 | 202 | EZV11274.1 | 15364 | 20721 | 308 | | | | |
| 899 | 20722 | 483 | EZV17196.1 | 15366 | 20723 | 202 | EZV17197.1 | 15367 | 20724 | 308 | | | | |
| 900 | 20725 | 483 | EZV18373.1 | 15369 | 20726 | 202 | EZV18374.1 | 15370 | 20727 | 308 | | | | |
| 901 | 20728 | 483 | EZV22689.1 | 15372 | 20729 | 202 | EZV22690.1 | 15373 | 20730 | 308 | | | | |
| 902 | 20731 | 483 | EZV23633.1 | 15375 | 20732 | 202 | EZV23634.1 | 15376 | 20733 | 308 | | | | |
| 903 | 20734 | 483 | EZV30019.1 | 15378 | 20735 | 202 | EZV30020.1 | 15379 | 20736 | 308 | | | | |
| 904 | 20737 | 483 | EZV34238.1 | 15381 | 20738 | 202 | EZV34239.1 | 15382 | 20739 | 308 | | | | |
| 905 | 20740 | 483 | EZV37877.1 | 15384 | 20741 | 202 | EZV37878.1 | 15385 | 20742 | 308 | | | | |
| 906 | 20743 | 483 | EZV41497.1 | 15387 | 20744 | 202 | EZV41498.1 | 15388 | 20745 | 308 | | | | |
| 907 | 20746 | 483 | EZV40171.1 | 15390 | 20747 | 202 | EZV40172.1 | 15391 | 20748 | 308 | | | | |
| 908 | 20749 | 483 | EZV45689.1 | 15393 | 20750 | 202 | EZV45690.1 | 15394 | 20751 | 308 | | | | |
| 909 | 20752 | 483 | EZV49481.1 | 15396 | 20753 | 202 | EZV49482.1 | 15397 | 20754 | 308 | | | | |
| 910 | 20755 | 483 | EZV51741.1 | 15399 | 20756 | 202 | EZV51742.1 | 15400 | 20757 | 308 | | | | |
| 911 | 20758 | 483 | EZV56159.1 | 15402 | 20759 | 202 | EZV56160.1 | 15403 | 20760 | 308 | | | | |
| 912 | 20761 | 483 | EZV60059.1 | 15405 | 20762 | 202 | EZV60060.1 | 15406 | 20763 | 308 | | | | |
| 913 | 20764 | 483 | EZV56177.1 | 15408 | 20765 | 202 | EZV56178.1 | 15409 | 20766 | 308 | | | | |
| 914 | 20767 | 483 | EZV62993.1 | 15411 | 20768 | 202 | EZV62994.1 | 15412 | 20769 | 308 | | | | |
| 915 | 20770 | 375 | EZV68411.1 | 15414 | 20771 | 202 | EZV68412.1 | 15415 | 20772 | 308 | | | | |
| 916 | 20773 | 483 | EZV73437.1 | 15417 | 20774 | 202 | EZV73438.1 | 15418 | 20775 | 308 | | | | |
| 917 | 20776 | 483 | EZV79300.1 | 15420 | 20777 | 202 | EZV79301.1 | 15421 | 20778 | 308 | | | | |
| 918 | 20779 | 483 | EZV78172.1 | 15423 | 20780 | 202 | EZV78173.1 | 15424 | 20781 | 308 | | | | |
| 919 | 20782 | 483 | EZV80244.1 | 15426 | 20783 | 202 | EZV80245.1 | 15427 | 20784 | 308 | | | | |
| 920 | 20785 | 483 | EZV86031.1 | 15429 | 20786 | 202 | EZV86032.1 | 15430 | 20787 | 308 | | | | |
| 921 | 20788 | 483 | EZV85083.1 | 15432 | 20789 | 202 | EZV85084.1 | 15433 | 20790 | 308 | | | | |
| 922 | 20791 | 483 | EZV88943.1 | 15435 | 20792 | 202 | EZV88944.1 | 15436 | 20793 | 308 | | | | |
| 923 | 20794 | 483 | EZV92665.1 | 15438 | 20795 | 202 | EZV92666.1 | 15439 | 20796 | 308 | | | | |
| 924 | 20797 | 483 | EZV94446.1 | 15441 | 20798 | 202 | EZV94447.1 | 15442 | 20799 | 308 | | | | |
| 925 | 20800 | 483 | EZV97124.1 | 15444 | 20801 | 202 | EZV97125.1 | 15445 | 20802 | 308 | | | | |
| 926 | 20803 | 483 | EZV98955.1 | 15447 | 20804 | 202 | EZV98956.1 | 15448 | 20805 | 308 | | | | |
| 927 | 20806 | 483 | EZW01626.1 | 15450 | 20807 | 202 | EZW01627.1 | 15451 | 20808 | 308 | | | | |
| 928 | 20809 | 483 | EZW04544.1 | 15453 | 20810 | 202 | EZW04545.1 | 15454 | 20811 | 308 | | | | |
| 929 | 20812 | 483 | EZW06683.1 | 15456 | 20813 | 202 | EZW06684.1 | 15457 | 20814 | 308 | | | | |
| 930 | 20815 | 483 | EZW08826.1 | 15459 | 20816 | 202 | EZW08827.1 | 15460 | 20817 | 308 | | | | |
| 931 | 20818 | 483 | EZW10958.1 | 15462 | 20819 | 202 | EZW10959.1 | 15463 | 20820 | 308 | | | | |
| 932 | 20821 | 483 | EZW14697.1 | 15465 | 20822 | 202 | EZW14698.1 | 15466 | 20823 | 308 | | | | |
| 933 | 20824 | 483 | EZW17374.1 | 15468 | 20825 | 202 | EZW17375.1 | 15469 | 20826 | 308 | | | | |
| 934 | 20827 | 483 | EZW21155.1 | 15471 | 20828 | 202 | EZW21156.1 | 15472 | 20829 | 308 | | | | |
| 935 | 20830 | 483 | EZW24845.1 | 15474 | 20831 | 202 | EZW24846.1 | 15475 | 20832 | 308 | | | | |
| 936 | 20833 | 483 | EZW30607.1 | 15477 | 20834 | 202 | EZW30608.1 | 15478 | 20835 | 308 | | | | |
| 937 | 20836 | 483 | EZW29482.1 | 15480 | 20837 | 202 | EZW29483.1 | 15481 | 20838 | 308 | | | | |
| 938 | 20839 | 483 | EZW34091.1 | 15483 | 20840 | 202 | EZW34092.1 | 15484 | 20841 | 308 | | | | |
| 939 | 20842 | 483 | EZW34358.1 | 15486 | 20843 | 202 | EZW34359.1 | 15487 | 20844 | 308 | | | | |
| 940 | 20845 | 483 | EZW38690.1 | 15489 | 20846 | 202 | EZW38691.1 | 15490 | 20847 | 308 | | | | |
| 941 | 20848 | 483 | EZW42267.1 | 15492 | 20849 | 202 | EZW42268.1 | 15493 | 20850 | 308 | | | | |
| 942 | 20851 | 483 | EZW41571.1 | 15495 | 20852 | 202 | EZW41572.1 | 15496 | 20853 | 308 | | | | |
| 943 | 20854 | 483 | EZW45922.1 | 15498 | 20855 | 202 | EZW45923.1 | 15499 | 20856 | 308 | | | | |
| 944 | 20857 | 483 | EZW48564.1 | 15501 | 20858 | 202 | EZW48565.1 | 15502 | 20859 | 308 | | | | |
| 945 | 20860 | 483 | EZW51954.1 | 15504 | 20861 | 202 | EZW51955.1 | 15505 | 20862 | 308 | | | | |
| 946 | 20863 | 483 | EZW52895.1 | 15507 | 20864 | 202 | EZW52896.1 | 15508 | 20865 | 308 | | | | |
| 947 | 20866 | 483 | EZW54602.1 | 15510 | 20867 | 202 | EZW54603.1 | 15511 | 20868 | 308 | | | | |
| 948 | 20869 | 483 | EZW61226.1 | 15513 | 20870 | 202 | EZW61227.1 | 15514 | 20871 | 308 | | | | |
| 949 | 20872 | 483 | EZW59347.1 | 15516 | 20873 | 202 | EZW59348.1 | 15517 | 20874 | 308 | | | | |
| 950 | 20875 | 483 | EZW64573.1 | 15519 | 20876 | 202 | EZW64574.1 | 15520 | 20877 | 308 | | | | |
| 951 | 20878 | 493 | EZW67817.1 | 15522 | 20879 | 202 | EZW67818.1 | 15523 | 20880 | 308 | | | | |
| 952 | 20881 | 483 | EZW72064.1 | 15525 | 20882 | 202 | EZW72065.1 | 15526 | 20883 | 308 | | | | |
| 953 | 20884 | 483 | EZW73743.1 | 15528 | 20885 | 202 | EZW73744.1 | 15529 | 20886 | 308 | | | | |
| 954 | 20887 | 483 | EZW78365.1 | 15531 | 20888 | 202 | EZW78366.1 | 15532 | 20889 | 308 | | | | |
| 955 | 20890 | 483 | EZW78066.1 | 15534 | 20891 | 202 | EZW78067.1 | 15535 | 20892 | 308 | | | | |
| 956 | 20893 | 483 | EZW85423.1 | 15537 | 20894 | 202 | EZW85424.1 | 15538 | 20895 | 308 | | | | |
| 957 | 20896 | 483 | EZW86267.1 | 15540 | 20897 | 202 | EZW86268.1 | 15541 | 20898 | 308 | | | | |
| 958 | 20899 | 483 | EZW90699.1 | 15543 | 20900 | 202 | EZW90700.1 | 15544 | 20901 | 308 | | | | |
| 959 | 20902 | 483 | EZW93346.1 | 15546 | 20903 | 202 | EZW93347.1 | 15547 | 20904 | 308 | | | | |
| 960 | 20905 | 483 | EZW94210.1 | 15549 | 20906 | 202 | EZW94211.1 | 15550 | 20907 | 308 | | | | |
| 961 | 20908 | 483 | EZW97013.1 | 15552 | 20909 | 202 | EZW97014.1 | 15553 | 20910 | 308 | | | | |
| 962 | 20911 | 483 | EZX00537.1 | 15555 | 20912 | 202 | EZX00538.1 | 15556 | 20913 | 308 | | | | |
| 963 | 20914 | 483 | EZX02275.1 | 15558 | 20915 | 202 | EZX02276.1 | 15559 | 20916 | 308 | | | | |
| 964 | 20917 | 483 | EZX04398.1 | 15561 | 20918 | 202 | EZX04399.1 | 15562 | 20919 | 308 | | | | |
| 965 | 20920 | 483 | EZX08870.1 | 15564 | 20921 | 202 | EZX08871.1 | 15565 | 20922 | 308 | | | | |
| 966 | 20923 | 483 | EZX10606.1 | 15567 | 20924 | 202 | EZX10607.1 | 15568 | 20925 | 308 | | | | |
| 967 | 20926 | 483 | EZX16968.1 | 15570 | 20927 | 202 | EZX16969.1 | 15571 | 20928 | 308 | | | | |
| 968 | 20929 | 483 | EZX19508.1 | 15573 | 20930 | 202 | EZX19509.1 | 15574 | 20931 | 308 | | | | |
| 969 | 20932 | 483 | EZX23728.1 | 15576 | 20933 | 202 | EZX23729.1 | 15577 | 20934 | 308 | | | | |
| 970 | 20935 | 483 | EZX26909.1 | 15579 | 20936 | 202 | EZX26910.1 | 15580 | 20937 | 308 | | | | |
| 971 | 20938 | 483 | EZX30318.1 | 15582 | 20939 | 202 | EZX30319.1 | 15583 | 20940 | 308 | | | | |
| 972 | 20941 | 375 | EZX30778.1 | 15585 | 20942 | 202 | EZX30779.1 | 15586 | 20943 | 308 | | | | |
| 973 | 20944 | 375 | EZX33809.1 | 15588 | 20945 | 202 | EZX33810.1 | 15589 | 20946 | 308 | | | | |
| 974 | 20947 | 375 | EZX38405.1 | 15591 | 20948 | 202 | EZX38406.1 | 15592 | 20949 | 308 | | | | |
| 975 | 20950 | 483 | EZX39862.1 | 15594 | 20951 | 202 | EZX39863.1 | 15595 | 20952 | 308 | | | | |
| 976 | 20953 | 493 | EZX38522.1 | 15597 | 20954 | 202 | EZX38523.1 | 15598 | 20955 | 308 | | | | |
| 977 | 20956 | 493 | EZX45513.1 | 15600 | 20957 | 202 | EZX45514.1 | 15601 | 20958 | 308 | | | | |
| 978 | 20959 | 483 | EZX46728.1 | 15603 | 20960 | 202 | EZX46729.1 | 15604 | 20961 | 72 | | | | |
| 979 | 20962 | 483 | EZX48303.1 | 15606 | 20963 | 202 | EZX48304.1 | 15607 | 20964 | 308 | | | | |
| 980 | 20965 | 483 | EZX53233.1 | 15609 | 20966 | 202 | EZX53234.1 | 15610 | 20967 | 308 | | | | |
| 981 | 20968 | 375 | EZX53547.1 | 15612 | 20969 | 202 | EZX53548.1 | 15613 | 20970 | 308 | | | | |
| 982 | 20971 | 483 | EZX56514.1 | 15615 | 20972 | 202 | EZX56515.1 | 15616 | 20973 | 308 | | | | |
| 983 | 20974 | 483 | EZX60546.1 | 15618 | 20975 | 202 | EZX60547.1 | 15619 | 20976 | 308 | | | | |
| 984 | 20977 | 483 | EZX62510.1 | 15621 | 20978 | 202 | EZX62511.1 | 15622 | 20979 | 308 | | | | |
| 985 | 20980 | 375 | EZX64342.1 | 15624 | 20981 | 202 | EZX64343.1 | 15625 | 20982 | 308 | | | | |
| 986 | 20983 | 483 | EZX67970.1 | 15627 | 20984 | 202 | EZX67971.1 | 15628 | 20985 | 308 | | | | |
| 987 | 20986 | 483 | EZX70981.1 | 15630 | 20987 | 202 | EZX70982.1 | 15631 | 20988 | 308 | | | | |
| 988 | 20989 | 483 | EZX70897.1 | 15633 | 20990 | 202 | EZX70898.1 | 15634 | 20991 | 308 | | | | |
| 989 | 20992 | 483 | EZX78543.1 | 15636 | 20993 | 202 | EZX78544.1 | 15637 | 20994 | 308 | | | | |
| 990 | 20995 | 483 | EZX83215.1 | 15639 | 20996 | 202 | EZX83216.1 | 15640 | 20997 | 308 | | | | |
| 991 | 20998 | 483 | EZX78166.1 | 15642 | 20999 | 202 | EZX78167.1 | 15643 | 21000 | 308 | | | | |
| 992 | 21001 | 483 | EZX83510.1 | 15645 | 21002 | 202 | EZX83511.1 | 15646 | 21003 | 308 | | | | |
| 993 | 21004 | 483 | EZX85562.1 | 15648 | 21005 | 202 | EZX85563.1 | 15649 | 21006 | 308 | | | | |
| 994 | 21007 | 483 | EZX88437.1 | 15651 | 21008 | 202 | EZX88438.1 | 15652 | 21009 | 308 | | | | |
| 995 | 21010 | 483 | EZX90792.1 | 15654 | 21011 | 202 | EZX90793.1 | 15655 | 21012 | 308 | | | | |
| 996 | 21013 | 483 | EZX93305.1 | 15657 | 21014 | 202 | EZX93306.1 | 15658 | 21015 | 308 | | | | |
| 997 | 21016 | 483 | EZX97300.1 | 15660 | 21017 | 202 | EZX97301.1 | 15661 | 21018 | 308 | | | | |
| 998 | 21019 | 102 | EZX98399.1 | 15663 | 21020 | 202 | EZX98400.1 | 15664 | 21021 | 308 | | | | |
| 999 | 21022 | 483 | EZY04104.1 | 15666 | 21023 | 202 | EZY04105.1 | 15667 | 21024 | 308 | | | | |
| 1000 | 21025 | 483 | EZY04546.1 | 15669 | 21026 | 202 | EZY04547.1 | 15670 | 21027 | 308 | | | | |
| 1001 | 21028 | 483 | EZY06600.1 | 15672 | 21029 | 202 | EZY06601.1 | 15673 | 21030 | 308 | | | | |
| 1002 | 21031 | 483 | EZY11330.1 | 15675 | 21032 | 202 | EZY11331.1 | 15676 | 21033 | 308 | | | | |
| 1003 | 21034 | 483 | EZY13790.1 | 15678 | 21035 | 202 | EZY13791.1 | 15679 | 21036 | 308 | | | | |
| 1004 | 21037 | 483 | EZY14130.1 | 15681 | 21038 | 202 | EZY14131.1 | 15682 | 21039 | 295 | | | | |
| 1005 | 21040 | 483 | EZY14214.1 | 15684 | 21041 | 202 | EZY14215.1 | 15685 | 21042 | 308 | | | | |
| 1006 | 21043 | 483 | EZY21812.1 | 15687 | 21044 | 202 | EZY21813.1 | 15688 | 21045 | 308 | | | | |
| 1007 | 21046 | 483 | EZY21672.1 | 15690 | 21047 | 202 | EZY21673.1 | 15691 | 21048 | 308 | | | | |
| 1008 | 21049 | 131 | EZY24517.1 | 15693 | 21050 | 202 | EZY24518.1 | 15694 | 21051 | 308 | | | | |
| 1009 | 21052 | 483 | EZY26571.1 | 15696 | 21053 | 202 | EZY26572.1 | 15697 | 21054 | 308 | | | | |
| 1010 | 21055 | 483 | EZY29471.1 | 15699 | 21056 | 202 | EZY29472.1 | 15700 | 21057 | 308 | | | | |
| 1011 | 21058 | 483 | EZY31972.1 | 15702 | 21059 | 202 | EZY31973.1 | 15703 | 21060 | 308 | | | | |
| 1012 | 21061 | 483 | EZY36826.1 | 15705 | 21062 | 202 | EZY36827.1 | 15706 | 21063 | 308 | | | | |
| 1013 | 21064 | 483 | EZY36639.1 | 15708 | 21065 | 202 | EZY36640.1 | 15709 | 21066 | 308 | | | | |
| 1014 | 21067 | 483 | EZY38134.1 | 15711 | 21068 | 202 | EZY38135.1 | 15712 | 21069 | 308 | | | | |
| 1015 | 21070 | 483 | EZY43512.1 | 15714 | 21071 | 202 | EZY43513.1 | 15715 | 21072 | 308 | | | | |
| 1016 | 21073 | 375 | EZY44864.1 | 15717 | 21074 | 202 | EZY44865.1 | 15718 | 21075 | 308 | | | | |
| 1017 | 21076 | 483 | EZY46957.1 | 15720 | 21077 | 202 | EZY46958.1 | 15721 | 21078 | 308 | | | | |
| 1018 | 21079 | 483 | EZY51215.1 | 15723 | 21080 | 202 | EZY51216.1 | 15724 | 21081 | 308 | | | | |
| 1019 | 21082 | 375 | EZY52186.1 | 15726 | 21083 | 202 | EZY52187.1 | 15727 | 21084 | 308 | | | | |
| 1020 | 21085 | 375 | EZY54361.1 | 15729 | 21086 | 202 | EZY54362.1 | 15730 | 21087 | 308 | | | | |
| 1021 | 21088 | 375 | EZY58961.1 | 15732 | 21089 | 202 | EZY58962.1 | 15733 | 21090 | 308 | | | | |
| 1022 | 21091 | 483 | EZY61859.1 | 15735 | 21092 | 202 | EZY61860.1 | 15736 | 21093 | 308 | | | | |
| 1023 | 21094 | 483 | EZY66172.1 | 15738 | 21095 | 202 | EZY66173.1 | 15739 | 21096 | 308 | | | | |
| 1024 | 21097 | 483 | EZY70309.1 | 15741 | 21098 | 202 | EZY70310.1 | 15742 | 21099 | 308 | | | | |
| 1025 | 21100 | 483 | EZY70615.1 | 15744 | 21101 | 202 | EZY70616.1 | 15745 | 21102 | 308 | | | | |
| 1026 | 21103 | 483 | EZY75194.1 | 15747 | 21104 | 202 | EZY75195.1 | 15748 | 21105 | 308 | | | | |
| 1027 | 21106 | 483 | EZY78993.1 | 15750 | 21107 | 202 | EZY78994.1 | 15751 | 21108 | 308 | | | | |
| 1028 | 21109 | 483 | EZY77810.1 | 15753 | 21110 | 202 | EZY77811.1 | 15754 | 21111 | 308 | | | | |
| 1029 | 21112 | 483 | EZY80411.1 | 15756 | 21113 | 202 | EZY80412.1 | 15757 | 21114 | 308 | | | | |
| 1030 | 21115 | 483 | EZY85271.1 | 15759 | 21116 | 202 | EZY85272.1 | 15760 | 21117 | 308 | | | | |
| 1031 | 21118 | 483 | EZY90747.1 | 15762 | 21119 | 202 | EZY90748.1 | 15763 | 21120 | 308 | | | | |
| 1032 | 21121 | 483 | EZY86731.1 | 15765 | 21122 | 202 | EZY86732.1 | 15766 | 21123 | 308 | | | | |
| 1033 | 21124 | 483 | EZY93708.1 | 15768 | 21125 | 202 | EZY93709.1 | 15769 | 21126 | 308 | | | | |
| 1034 | 21127 | 483 | EZY96335.1 | 15771 | 21128 | 202 | EZY96336.1 | 15772 | 21129 | 308 | | | | |
| 1035 | 21130 | 232 | EZY99135.1 | 15774 | 21131 | 202 | EZY99136.1 | 15775 | 21132 | 308 | | | | |
| 1036 | 21133 | 483 | EZZ00575.1 | 15777 | 21134 | 202 | EZZ00576.1 | 15778 | 21135 | 308 | | | | |
| 1037 | 21136 | 232 | EZZ04413.1 | 15780 | 21137 | 202 | EZZ04414.1 | 15781 | 21138 | 308 | | | | |
| 1038 | 21139 | 483 | EZZ04095.1 | 15783 | 21140 | 202 | EZZ04096.1 | 15784 | 21141 | 308 | | | | |
| 1039 | 21142 | 375 | EZZ07025.1 | 15786 | 21143 | 202 | EZZ07026.1 | 15787 | 21144 | 308 | | | | |
| 1040 | 21145 | 483 | EZZ11500.1 | 15789 | 21146 | 202 | EZZ11501.1 | 15790 | 21147 | 308 | | | | |
| 1041 | 21148 | 483 | EZZ12220.1 | 15792 | 21149 | 202 | EZZ12221.1 | 15793 | 21150 | 165 | | | | |
| 1042 | 21151 | 483 | EZZ13374.1 | 15795 | 21152 | 202 | EZZ13375.1 | 15796 | 21153 | 308 | | | | |
| 1043 | 21154 | 483 | EZZ20015.1 | 15798 | 21155 | 202 | EZZ20016.1 | 15799 | 21156 | 261 | | | | |
| 1044 | 21157 | 483 | EZZ20491.1 | 15801 | 21158 | 202 | EZZ20492.1 | 15802 | 21159 | 308 | | | | |
| 1045 | 21160 | 483 | EZZ22877.1 | 15804 | 21161 | 202 | EZZ22878.1 | 15805 | 21162 | 308 | | | | |
| 1046 | 21163 | 483 | EZZ27502.1 | 15807 | 21164 | 202 | EZZ27503.1 | 15808 | 21165 | 308 | | | | |
| 1047 | 21166 | 483 | EZZ27417.1 | 15810 | 21167 | 202 | EZZ27418.1 | 15811 | 21168 | 308 | | | | |
| 1048 | 21169 | 483 | EZZ33551.1 | 15813 | 21170 | 202 | EZZ33552.1 | 15814 | 21171 | 308 | | | | |
| 1049 | 21172 | 483 | EZZ35197.1 | 15816 | 21173 | 202 | EZZ35198.1 | 15817 | 21174 | 308 | | | | |
| 1050 | 21175 | 483 | EZZ38881.1 | 15819 | 21176 | 202 | EZZ38882.1 | 15820 | 21177 | 308 | | | | |
| 1051 | 21178 | 483 | EZZ42312.1 | 15822 | 21179 | 202 | EZZ42313.1 | 15823 | 21180 | 308 | | | | |
| 1052 | 21181 | 483 | EZZ43688.1 | 15825 | 21182 | 202 | EZZ43689.1 | 15826 | 21183 | 308 | | | | |
| 1053 | 21184 | 483 | EZZ46491.1 | 15828 | 21185 | 202 | EZZ46492.1 | 15829 | 21186 | 308 | | | | |
| 1054 | 21187 | 483 | EZZ50761.1 | 15831 | 21188 | 202 | EZZ50762.1 | 15832 | 21189 | 308 | | | | |
| 1055 | 21190 | 483 | EZZ51035.1 | 15834 | 21191 | 202 | EZZ51036.1 | 15835 | 21192 | 308 | | | | |
| 1056 | 21193 | 483 | EZZ53436.1 | 15837 | 21194 | 202 | EZZ53437.1 | 15838 | 21195 | 308 | | | | |
| 1057 | 21196 | 483 | EZZ62214.1 | 15840 | 21197 | 202 | EZZ62215.1 | 15841 | 21198 | 308 | | | | |
| 1058 | 21199 | 483 | EZZ58807.1 | 15843 | 21200 | 202 | EZZ58808.1 | 15844 | 21201 | 308 | | | | |
| 1059 | 21202 | 483 | EZZ63775.1 | 15846 | 21203 | 202 | EZZ63776.1 | 15847 | 21204 | 308 | | | | |
| 1060 | 21205 | 375 | EZZ66973.1 | 15849 | 21206 | 202 | EZZ66974.1 | 15850 | 21207 | 308 | | | | |
| 1061 | 21208 | 483 | EZZ65103.1 | 15852 | 21209 | 202 | EZZ65104.1 | 15853 | 21210 | 308 | | | | |
| 1062 | 21211 | 483 | EZZ70712.1 | 15855 | 21212 | 202 | EZZ70713.1 | 15856 | 21213 | 308 | | | | |
| 1063 | 21214 | 483 | EZZ73601.1 | 15858 | 21215 | 202 | EZZ73602.1 | 15859 | 21216 | 308 | | | | |
| 1064 | 21217 | 483 | EZZ75112.1 | 15861 | 21218 | 202 | EZZ75113.1 | 15862 | 21219 | 308 | | | | |
| 1065 | 21220 | 483 | EZZ75509.1 | 15864 | 21221 | 202 | EZZ75510.1 | 15865 | 21222 | 308 | | | | |
| 1066 | 21223 | 483 | EZZ82798.1 | 15867 | 21224 | 202 | EZZ82799.1 | 15868 | 21225 | 308 | | | | |
| 1067 | 21226 | 483 | EZZ83621.1 | 15870 | 21227 | 202 | EZZ83622.1 | 15871 | 21228 | 308 | | | | |
| 1068 | 21229 | 483 | EZZ82653.1 | 15873 | 21230 | 202 | EZZ82654.1 | 15874 | 21231 | 308 | | | | |
| 1069 | 21232 | 483 | EZZ89013.1 | 15876 | 21233 | 202 | EZZ89014.1 | 15877 | 21234 | 308 | | | | |
| 1070 | 21235 | 483 | EZZ92960.1 | 15879 | 21236 | 202 | EZZ92961.1 | 15880 | 21237 | 308 | | | | |
| 1071 | 21238 | 483 | EZZ92682.1 | 15882 | 21239 | 202 | EZZ92683.1 | 15883 | 21240 | 308 | | | | |
| 1072 | 21241 | 483 | EZZ95682.1 | 15885 | 21242 | 202 | EZZ95683.1 | 15886 | 21243 | 308 | | | | |
| 1073 | 21244 | 483 | KAA05375.1 | 15888 | 21245 | 202 | KAA05376.1 | 15889 | 21246 | 308 | | | | |
| 1074 | 21247 | 483 | KAA05542.1 | 15891 | 21248 | 202 | KAA05543.1 | 15892 | 21249 | 308 | | | | |
| 1075 | 21250 | 483 | KAA05951.1 | 15894 | 21251 | 202 | KAA05952.1 | 15895 | 21252 | 308 | | | | |
| 1076 | 21253 | 483 | KAA12998.1 | 15897 | 21254 | 202 | KAA12999.1 | 15898 | 21255 | 308 | | | | |
| 1077 | 21256 | 483 | KAA12391.1 | 15900 | 21257 | 202 | KAA12392.1 | 15901 | 21258 | 308 | | | | |
| 1078 | 21259 | 483 | KAA13617.1 | 15903 | 21260 | 202 | KAA13618.1 | 15904 | 21261 | 308 | | | | |
| 1079 | 21262 | 483 | KAA22641.1 | 15906 | 21263 | 202 | KAA22642.1 | 15907 | 21264 | 308 | | | | |
| 1080 | 21265 | 483 | KAA21031.1 | 15909 | 21266 | 202 | KAA21032.1 | 15910 | 21267 | 308 | | | | |
| 1081 | 21268 | 483 | KAA21280.1 | 15912 | 21269 | 202 | KAA21281.1 | 15913 | 21270 | 308 | | | | |
| 1082 | 21271 | 483 | KAA28468.1 | 15915 | 21272 | 202 | KAA28469.1 | 15916 | 21273 | 308 | | | | |
| 1083 | 21274 | 483 | KAA29976.1 | 15918 | 21275 | 202 | KAA29977.1 | 15919 | 21276 | 308 | | | | |
| 1084 | 21277 | 483 | KAA28569.1 | 15921 | 21278 | 202 | KAA28570.1 | 15922 | 21279 | 308 | | | | |
| 1085 | 21280 | 483 | KAA35384.1 | 15924 | 21281 | 202 | KAA35385.1 | 15925 | 21282 | 308 | | | | |
| 1086 | 21283 | 483 | KAA38913.1 | 15927 | 21284 | 202 | KAA38914.1 | 15928 | 21285 | 308 | | | | |
| 1087 | 21286 | 483 | KAA39460.1 | 15930 | 21287 | 202 | KAA39461.1 | 15931 | 21288 | 308 | | | | |
| 1088 | 21289 | 483 | KAA42952.1 | 15933 | 21290 | 202 | KAA42953.1 | 15934 | 21291 | 308 | | | | |
| 1089 | 21292 | 483 | KAA45223.1 | 15936 | 21293 | 202 | KAA45224.1 | 15937 | 21294 | 308 | | | | |
| 1090 | 21295 | 483 | KAA46799.1 | 15939 | 21296 | 202 | KAA46800.1 | 15940 | 21297 | 308 | | | | |
| 1091 | 21298 | 483 | KAA49911.1 | 15942 | 21299 | 202 | KAA49912.1 | 15943 | 21300 | 308 | | | | |
| 1092 | 21301 | 483 | KAA51794.1 | 15945 | 21302 | 202 | KAA51795.1 | 15946 | 21303 | 308 | | | | |
| 1093 | 21304 | 483 | KAA59414.1 | 15948 | 21305 | 202 | KAA59415.1 | 15949 | 21306 | 308 | | | | |
| 1094 | 21307 | 483 | KAA58405.1 | 15951 | 21308 | 202 | KAA58406.1 | 15952 | 21309 | 308 | | | | |
| 1095 | 21310 | 483 | KAA61960.1 | 15954 | 21311 | 202 | KAA61961.1 | 15955 | 21312 | 308 | | | | |
| 1096 | 21313 | 483 | KAA63550.1 | 15957 | 21314 | 202 | KAA63551.1 | 15958 | 21315 | 308 | | | | |
| 1097 | 21316 | 483 | KAA66138.1 | 15960 | 21317 | 202 | KAA66139.1 | 15961 | 21318 | 308 | | | | |
| 1098 | 21319 | 483 | KAA68222.1 | 15963 | 21320 | 202 | KAA68223.1 | 15964 | 21321 | 308 | | | | |
| 1099 | 21322 | 483 | KAA73511.1 | 15966 | 21323 | 202 | KAA73512.1 | 15967 | 21324 | 308 | | | | |
| 1100 | 21325 | 483 | KAA74078.1 | 15969 | 21326 | 202 | KAA74079.1 | 15970 | 21327 | 308 | | | | |
| 1101 | 21328 | 483 | KAA76196.1 | 15972 | 21329 | 202 | KAA76197.1 | 15973 | 21330 | 308 | | | | |
| 1102 | 21331 | 483 | KAA79420.1 | 15975 | 21332 | 202 | KAA79421.1 | 15976 | 21333 | 308 | | | | |
| 1103 | 21334 | 483 | KAA82178.1 | 15978 | 21335 | 202 | KAA82179.1 | 15979 | 21336 | 308 | | | | |
| 1104 | 21337 | 483 | KAA82199.1 | 15981 | 21338 | 202 | KAA82200.1 | 15982 | 21339 | 308 | | | | |
| 1105 | 21340 | 483 | KAA86321.1 | 15984 | 21341 | 202 | KAA86322.1 | 15985 | 21342 | 308 | | | | |
| 1106 | 21343 | 483 | KAA89638.1 | 15987 | 21344 | 202 | KAA89639.1 | 15988 | 21345 | 308 | | | | |
| 1107 | 21346 | 483 | KAA93202.1 | 15990 | 21347 | 202 | KAA93203.1 | 15991 | 21348 | 308 | | | | |
| 1108 | 21349 | 483 | KAA93401.1 | 15993 | 21350 | 202 | KAA93402.1 | 15994 | 21351 | 308 | | | | |
| 1109 | 21352 | 483 | KAA96431.1 | 15996 | 21353 | 202 | KAA96432.1 | 15997 | 21354 | 308 | | | | |
| 1110 | 21355 | 483 | KAB00567.1 | 15999 | 21356 | 202 | KAB00568.1 | 16000 | 21357 | 308 | | | | |
| 1111 | 21358 | 483 | KAB03845.1 | 16002 | 21359 | 202 | KAB03846.1 | 16003 | 21360 | 308 | | | | |
| 1112 | 21361 | 483 | KAB06656.1 | 16005 | 21362 | 202 | KAB06657.1 | 16006 | 21363 | 308 | | | | |
| 1113 | 21364 | 483 | KAB08920.1 | 16008 | 21365 | 202 | KAB08921.1 | 16009 | 21366 | 308 | | | | |
| 1114 | 21367 | 483 | KAB10430.1 | 16011 | 21368 | 202 | KAB10431.1 | 16012 | 21369 | 308 | | | | |
| 1115 | 21370 | 483 | KAB11614.1 | 16014 | 21371 | 202 | KAB11615.1 | 16015 | 21372 | 308 | | | | |
| 1116 | 21373 | 483 | KAB16348.1 | 16017 | 21374 | 202 | KAB16349.1 | 16018 | 21375 | 308 | | | | |
| 1117 | 21376 | 483 | KAB18687.1 | 16020 | 21377 | 202 | KAB18688.1 | 16021 | 21378 | 308 | | | | |
| 1118 | 21379 | 483 | KAB19933.1 | 16023 | 21380 | 202 | KAB19934.1 | 16024 | 21381 | 308 | | | | |
| 1119 | 21382 | 483 | KAB24078.1 | 16026 | 21383 | 202 | KAB24079.1 | 16027 | 21384 | 308 | | | | |
| 1120 | 21385 | 483 | KAB29325.1 | 16029 | 21386 | 202 | KAB29326.1 | 16030 | 21387 | 308 | | | | |
| 1121 | 21388 | 483 | KAB29475.1 | 16032 | 21389 | 202 | KAB29476.1 | 16033 | 21390 | 308 | | | | |
| 1122 | 21391 | 483 | KAB32010.1 | 16035 | 21392 | 202 | KAB32011.1 | 16036 | 21393 | 308 | | | | |
| 1123 | 21394 | 483 | KAB33823.1 | 16038 | 21395 | 202 | KAB33824.1 | 16039 | 21396 | 308 | | | | |
| 1124 | 21397 | 483 | KAB37791.1 | 16041 | 21398 | 202 | KAB37792.1 | 16042 | 21399 | 308 | | | | |
| 1125 | 21400 | 483 | KAB38130.1 | 16044 | 21401 | 202 | KAB38131.1 | 16045 | 21402 | 308 | | | | |
| 1126 | 21403 | 483 | KAB42665.1 | 16047 | 21404 | 202 | KAB42666.1 | 16048 | 21405 | 308 | | | | |
| 1127 | 21406 | 483 | KAB46001.1 | 16050 | 21407 | 202 | KAB46002.1 | 16051 | 21408 | 308 | | | | |
| 1128 | 21409 | 483 | KAB45739.1 | 16053 | 21410 | 202 | KAB45740.1 | 16054 | 21411 | 308 | | | | |
| 1129 | 21412 | 483 | KAB51675.1 | 16056 | 21413 | 202 | KAB51676.1 | 16057 | 21414 | 308 | | | | |
| 1130 | 21415 | 483 | KAB53191.1 | 16059 | 21416 | 202 | KAB53192.1 | 16060 | 21417 | 308 | | | | |
| 1131 | 21418 | 483 | KAB55782.1 | 16062 | 21419 | 202 | KAB55783.1 | 16063 | 21420 | 308 | | | | |
| 1132 | 21421 | 483 | KAB58080.1 | 16065 | 21422 | 202 | KAB58081.1 | 16066 | 21423 | 308 | | | | |
| 1133 | 21424 | 483 | KAB59417.1 | 16068 | 21425 | 202 | KAB59418.1 | 16069 | 21426 | 308 | | | | |
| 1134 | 21427 | 131 | KAB62991.1 | 16071 | 21428 | 202 | KAB62992.1 | 16072 | 21429 | 308 | | | | |
| 1135 | 21430 | 483 | KAB66107.1 | 16074 | 21431 | 202 | KAB66108.1 | 16075 | 21432 | 308 | | | | |
| 1136 | 21433 | 131 | KAB66872.1 | 16077 | 21434 | 202 | KAB66873.1 | 16078 | 21435 | 308 | | | | |
| 1137 | 21436 | 483 | KAB70774.1 | 16080 | 21437 | 202 | KAB70775.1 | 16081 | 21438 | 308 | | | | |
| 1138 | 21439 | 483 | KAB73062.1 | 16083 | 21440 | 202 | KAB73063.1 | 16084 | 21441 | 308 | | | | |
| 1139 | 21442 | 483 | KAB75148.1 | 16086 | 21443 | 202 | KAB75149.1 | 16087 | 21444 | 308 | | | | |
| 1140 | 21445 | 483 | KAB78036.1 | 16089 | 21446 | 202 | KAB78037.1 | 16090 | 21447 | 308 | | | | |
| 1141 | 21448 | 483 | KAB81591.1 | 16092 | 21449 | 202 | KAB81592.1 | 16093 | 21450 | 308 | | | | |
| 1142 | 21451 | 483 | KAB84385.1 | 16095 | 21452 | 202 | KAB84386.1 | 16096 | 21453 | 308 | | | | |
| 1143 | 21454 | 483 | KAB84692.1 | 16098 | 21455 | 202 | KAB84693.1 | 16099 | 21456 | 308 | | | | |
| 1144 | 21457 | 483 | KAB91414.1 | 16101 | 21458 | 202 | KAB91415.1 | 16102 | 21459 | 308 | | | | |
| 1145 | 21460 | 483 | KAB92904.1 | 16104 | 21461 | 202 | KAB92905.1 | 16105 | 21462 | 308 | | | | |
| 1146 | 21463 | 483 | KAB93615.1 | 16107 | 21464 | 202 | KAB93616.1 | 16108 | 21465 | 308 | | | | |
| 1147 | 21466 | 483 | KAB98473.1 | 16110 | 21467 | 202 | KAB98474.1 | 16111 | 21468 | 308 | | | | |
| 1148 | 21469 | 483 | KAB98434.1 | 16113 | 21470 | 202 | KAB98435.1 | 16114 | 21471 | 308 | | | | |
| 1149 | 21472 | 483 | KAC00307.1 | 16116 | 21473 | 202 | KAC00308.1 | 16117 | 21474 | 308 | | | | |
| 1150 | 21475 | 483 | KAC04035.1 | 16119 | 21476 | 202 | KAC04036.1 | 16120 | 21477 | 308 | | | | |
| 1151 | 21478 | 483 | KAC08056.1 | 16122 | 21479 | 202 | KAC08057.1 | 16123 | 21480 | 308 | | | | |
| 1152 | 21481 | 483 | KAC10253.1 | 16125 | 21482 | 202 | KAC10254.1 | 16126 | 21483 | 308 | | | | |
| 1153 | 21484 | 483 | KAC11814.1 | 16128 | 21485 | 202 | KAC11815.1 | 16129 | 21486 | 308 | | | | |
| 1154 | 21487 | 483 | KAC14779.1 | 16131 | 21488 | 202 | KAC14780.1 | 16132 | 21489 | 308 | | | | |
| 1155 | 21490 | 483 | KAC17656.1 | 16134 | 21491 | 202 | KAC17657.1 | 16135 | 21492 | 308 | | | | |
| 1156 | 21493 | 131 | KAC20375.1 | 16137 | 21494 | 202 | KAC20376.1 | 16138 | 21495 | 308 | | | | |
| 1157 | 21496 | 483 | KAC21944.1 | 16140 | 21497 | 202 | KAC21945.1 | 16141 | 21498 | 308 | | | | |
| 1158 | 21499 | 483 | KAC25276.1 | 16143 | 21500 | 202 | KAC25277.1 | 16144 | 21501 | 308 | | | | |
| 1159 | 21502 | 483 | KAC29149.1 | 16146 | 21503 | 202 | KAC29150.1 | 16147 | 21504 | 308 | | | | |
| 1160 | 21505 | 483 | KAC33552.1 | 16149 | 21506 | 202 | KAC33553.1 | 16150 | 21507 | 308 | | | | |
| 1161 | 21508 | 483 | KAC34155.1 | 16152 | 21509 | 202 | KAC34156.1 | 16153 | 21510 | 308 | | | | |
| 1162 | 21511 | 131 | KAC33239.1 | 16155 | 21512 | 202 | KAC33240.1 | 16156 | 21513 | 308 | | | | |
| 1163 | 21514 | 483 | KAC37670.1 | 16158 | 21515 | 202 | KAC37671.1 | 16159 | 21516 | 308 | | | | |
| 1164 | 21517 | 131 | KAC40878.1 | 16161 | 21518 | 202 | KAC40879.1 | 16162 | 21519 | 308 | | | | |
| 1165 | 21520 | 483 | KAC45124.1 | 16164 | 21521 | 202 | KAC45125.1 | 16165 | 21522 | 308 | | | | |
| 1166 | 21523 | 483 | KAC44747.1 | 16167 | 21524 | 202 | KAC44748.1 | 16168 | 21525 | 308 | | | | |
| 1167 | 21526 | 483 | KAC51537.1 | 16170 | 21527 | 202 | KAC51538.1 | 16171 | 21528 | 308 | | | | |
| 1168 | 21529 | 483 | KAC50573.1 | 16173 | 21530 | 202 | KAC50574.1 | 16174 | 21531 | 308 | | | | |
| 1169 | 21532 | 483 | KAC52442.1 | 16176 | 21533 | 202 | KAC52443.1 | 16177 | 21534 | 308 | | | | |
| 1170 | 21535 | 483 | KAC57901.1 | 16179 | 21536 | 202 | KAC5 7902.1 | 16180 | 21537 | 308 | | | | |
| 1171 | 21538 | 483 | KAC59265.1 | 16182 | 21539 | 202 | KAC59266.1 | 16183 | 21540 | 308 | | | | |
| 1172 | 21541 | 483 | KAC64900.1 | 16185 | 21542 | 202 | KAC64901.1 | 16186 | 21543 | 308 | | | | |
| 1173 | 21544 | 483 | KAC65214.1 | 16188 | 21545 | 202 | KAC65215.1 | 16189 | 21546 | 308 | | | | |
| 1174 | 21547 | 483 | KAC66577.1 | 16191 | 21548 | 202 | KAC66578.1 | 16192 | 21549 | 308 | | | | |
| 1175 | 21550 | 483 | KAC76249.1 | 16194 | 21551 | 202 | KAC76250.1 | 16195 | 21552 | 308 | | | | |
| 1176 | 21553 | 483 | KAC70674.1 | 16197 | 21554 | 202 | KAC70675.1 | 16198 | 21555 | 308 | | | | |
| 1177 | 21556 | 131 | KAC73888.1 | 16200 | 21557 | 202 | KAC73889.1 | 16201 | 21558 | 308 | | | | |
| 1178 | 21559 | 131 | KAC78735.1 | 16203 | 21560 | 202 | KAC78736.1 | 16204 | 21561 | 308 | | | | |
| 1179 | 21562 | 483 | KAC82510.1 | 16206 | 21563 | 202 | KAC82511.1 | 16207 | 21564 | 308 | | | | |
| 1180 | 21565 | 483 | KAC80330.1 | 16209 | 21566 | 202 | KAC80331.1 | 16210 | 21567 | 308 | | | | |
| 1181 | 21568 | 483 | KAC86157.1 | 16212 | 21569 | 202 | KAC86158.1 | 16213 | 21570 | 308 | | | | |
| 1182 | 21571 | 483 | KAC89252.1 | 16215 | 21572 | 202 | KAC89253.1 | 16216 | 21573 | 308 | | | | |
| 1183 | 21574 | 483 | KAC89179.1 | 16218 | 21575 | 202 | KAC89180.1 | 16219 | 21576 | 308 | | | | |
| 1184 | 21577 | 483 | KAC93842.1 | 16221 | 21578 | 202 | KAC93843.1 | 16222 | 21579 | 308 | | | | |
| 1185 | 21580 | 483 | KAC96628.1 | 16224 | 21581 | 202 | KAC96629.1 | 16225 | 21582 | 308 | | | | |
| 1186 | 21583 | 483 | KAC97651.1 | 16227 | 21584 | 202 | KAC97652.1 | 16228 | 21585 | 308 | | | | |
| 1187 | 21586 | 483 | KAD00062.1 | 16230 | 21587 | 202 | KAD00063.1 | 16231 | 21588 | 308 | | | | |
| 1188 | 21589 | 483 | KAD04304.1 | 16233 | 21590 | 202 | KAD04305.1 | 16234 | 21591 | 308 | | | | |
| 1189 | 21592 | 483 | KAD08150.1 | 16236 | 21593 | 202 | KAD08151.1 | 16237 | 21594 | 308 | | | | |
| 1190 | 21595 | 483 | KAD07873.1 | 16239 | 21596 | 202 | KAD07874.1 | 16240 | 21597 | 308 | | | | |
| 1191 | 21598 | 483 | KAD11426.1 | 16242 | 21599 | 202 | KAD11427.1 | 16243 | 21600 | 308 | | | | |
| 1192 | 21601 | 483 | KAD14194.1 | 16245 | 21602 | 202 | KAD14195.1 | 16246 | 21603 | 308 | | | | |
| 1193 | 21604 | 483 | KAD16931.1 | 16248 | 21605 | 202 | KAD16932.1 | 16249 | 21606 | 308 | | | | |
| 1194 | 21607 | 483 | KAD20110.1 | 16251 | 21608 | 202 | KAD20111.1 | 16252 | 21609 | 308 | | | | |
| 1195 | 21610 | 483 | KAD22450.1 | 16254 | 21611 | 202 | KAD22451.1 | 16255 | 21612 | 308 | | | | |
| 1196 | 21613 | 483 | KAD23851.1 | 16257 | 21614 | 202 | KAD23852.1 | 16258 | 21615 | 308 | | | | |
| 1197 | 21616 | 483 | KAD27440.1 | 16260 | 21617 | 202 | KAD27441.1 | 16261 | 21618 | 308 | | | | |
| 1198 | 21619 | 483 | KAD29133.1 | 16263 | 21620 | 202 | KAD29134.1 | 16264 | 21621 | 308 | | | | |
| 1199 | 21622 | 483 | KAD33181.1 | 16266 | 21623 | 202 | KAD33182.1 | 16267 | 21624 | 308 | | | | |
| 1200 | 21625 | 483 | KAD35156.1 | 16269 | 21626 | 202 | KAD35157.1 | 16270 | 21627 | 308 | | | | |
| 1201 | 21628 | 483 | KAD41137.1 | 16272 | 21629 | 202 | KAD41138.1 | 16273 | 21630 | 308 | | | | |
| 1202 | 21631 | 483 | KAD37495.1 | 16275 | 21632 | 202 | KAD37496.1 | 16276 | 21633 | 308 | | | | |
| 1203 | 21634 | 483 | KAD41936.1 | 16278 | 21635 | 202 | KAD41937.1 | 16279 | 21636 | 308 | | | | |
| 1204 | 21637 | 483 | KAD44773.1 | 16281 | 21638 | 202 | KAD44774.1 | 16282 | 21639 | 308 | | | | |
| 1205 | 21640 | 483 | KAD49430.1 | 16284 | 21641 | 202 | KAD49431.1 | 16285 | 21642 | 308 | | | | |
| 1206 | 21643 | 483 | KAD48761.1 | 16287 | 21644 | 202 | KAD48762.1 | 16288 | 21645 | 308 | | | | |
| 1207 | 21646 | 483 | KAD53923.1 | 16290 | 21647 | 202 | KAD53924.1 | 16291 | 21648 | 308 | | | | |
| 1208 | 21649 | 483 | KAD57263.1 | 16293 | 21650 | 202 | KAD57264.1 | 16294 | 21651 | 308 | | | | |
| 1209 | 21652 | 483 | KAD59396.1 | 16296 | 21653 | 202 | KAD59397.1 | 16297 | 21654 | 308 | | | | |
| 1210 | 21655 | 483 | KAD59588.1 | 16299 | 21656 | 202 | KAD59589.1 | 16300 | 21657 | 308 | | | | |
| 1211 | 21658 | 483 | KAD64093.1 | 16302 | 21659 | 202 | KAD64094.1 | 16303 | 21660 | 308 | | | | |
| 1212 | 21661 | 483 | KAD64969.1 | 16305 | 21662 | 202 | KAD64970.1 | 16306 | 21663 | 308 | | | | |
| 1213 | 21664 | 483 | KAD71130.1 | 16308 | 21665 | 202 | KAD71131.1 | 16309 | 21666 | 308 | | | | |
| 1214 | 21667 | 483 | KAD76142.1 | 16311 | 21668 | 202 | KAD76143.1 | 16312 | 21669 | 308 | | | | |
| 1215 | 21670 | 483 | KAD70467.1 | 16314 | 21671 | 202 | KAD70468.1 | 16315 | 21672 | 308 | | | | |
| 1216 | 21673 | 483 | KAD78843.1 | 16317 | 21674 | 202 | KAD78844.1 | 16318 | 21675 | 308 | | | | |
| 1217 | 21676 | 483 | KAD77328.1 | 16320 | 21677 | 202 | KAD77329.1 | 16321 | 21678 | 308 | | | | |
| 1218 | 21679 | 483 | KAD80655.1 | 16323 | 21680 | 202 | KAD80656.1 | 16324 | 21681 | 308 | | | | |
| 1219 | 21682 | 483 | KAD85220.1 | 16326 | 21683 | 202 | KAD85221.1 | 16327 | 21684 | 308 | | | | |
| 1220 | 21685 | 483 | KAD85660.1 | 16329 | 21686 | 202 | KAD85661.1 | 16330 | 21687 | 308 | | | | |
| 1221 | 21688 | 483 | KAD90245.1 | 16332 | 21689 | 202 | KAD90246.1 | 16333 | 21690 | 308 | | | | |
| 1222 | 21691 | 483 | KAD93692.1 | 16335 | 21692 | 202 | KAD93693.1 | 16336 | 21693 | 308 | | | | |
| 1223 | 21694 | 483 | KAD94379.1 | 16338 | 21695 | 202 | KAD94380.1 | 16339 | 21696 | 308 | | | | |
| 1224 | 21697 | 483 | KAD99174.1 | 16341 | 21698 | 202 | KAD99175.1 | 16342 | 21699 | 308 | | | | |
| 1225 | 21700 | 483 | KAD98840.1 | 16344 | 21701 | 202 | KAD98841.1 | 16345 | 21702 | 308 | | | | |
| 1226 | 21703 | 131 | KAD99161.1 | 16347 | 21704 | 202 | KAD99162.1 | 16348 | 21705 | 308 | | | | |
| 1227 | 21706 | 131 | KAE03355.1 | 16350 | 21707 | 202 | KAE03356.1 | 16351 | 21708 | 308 | | | | |
| 1228 | 21709 | 483 | KAE06089.1 | 16353 | 21710 | 202 | KAE06090.1 | 16354 | 21711 | 308 | | | | |
| 1229 | 21712 | 483 | KAE10341.1 | 16356 | 21713 | 202 | KAE10342.1 | 16357 | 21714 | 308 | | | | |
| 1230 | 21715 | 483 | KAE11830.1 | 16359 | 21716 | 202 | KAE11831.1 | 16360 | 21717 | 308 | | | | |
| 1231 | 21718 | 483 | KAE16056.1 | 16362 | 21719 | 202 | KAE16057.1 | 16363 | 21720 | 308 | | | | |
| 1232 | 21721 | 483 | KAE17678.1 | 16365 | 21722 | 202 | KAE17679.1 | 16366 | 21723 | 308 | | | | |
| 1233 | 21724 | 483 | KAE21312.1 | 16368 | 21725 | 202 | KAE21313.1 | 16369 | 21726 | 308 | | | | |
| 1234 | 21727 | 483 | KAE22704.1 | 16371 | 21728 | 202 | KAE22705.1 | 16372 | 21729 | 308 | | | | |
| 1235 | 21730 | 483 | KAE26216.1 | 16374 | 21731 | 202 | KAE26217.1 | 16375 | 21732 | 308 | | | | |
| 1236 | 21733 | 483 | KAE28379.1 | 16377 | 21734 | 202 | KAE28380.1 | 16378 | 21735 | 308 | | | | |
| 1237 | 21736 | 483 | KAE30965.1 | 16380 | 21737 | 202 | KAE30966.1 | 16381 | 21738 | 308 | | | | |
| 1238 | 21739 | 483 | KAE34714.1 | 16383 | 21740 | 202 | KAE34715.1 | 16384 | 21741 | 308 | | | | |
| 1239 | 21742 | 483 | KAE36915.1 | 16386 | 21743 | 202 | KAE36916.1 | 16387 | 21744 | 308 | | | | |
| 1240 | 21745 | 483 | KAE38767.1 | 16389 | 21746 | 202 | KAE38768.1 | 16390 | 21747 | 308 | | | | |
| 1241 | 21748 | 483 | KAE42474.1 | 16392 | 21749 | 202 | KAE42475.1 | 16393 | 21750 | 308 | | | | |
| 1242 | 21751 | 483 | KAE45133.1 | 16395 | 21752 | 202 | KAE45134.1 | 16396 | 21753 | 308 | | | | |
| 1243 | 21754 | 131 | KAE45864.1 | 16398 | 21755 | 202 | KAE45865.1 | 16399 | 21756 | 308 | | | | |
| 1244 | 21757 | 131 | KAE50289.1 | 16401 | 21758 | 202 | KAE50290.1 | 16402 | 21759 | 308 | | | | |
| 1245 | 21760 | 483 | KAE51869.1 | 16404 | 21761 | 202 | KAE51870.1 | 16405 | 21762 | 308 | | | | |
| 1246 | 21763 | 483 | KAE56031.1 | 16407 | 21764 | 202 | KAE56032.1 | 16408 | 21765 | 308 | | | | |
| 1247 | 21766 | 483 | KAE58617.1 | 16410 | 21767 | 202 | KAE58618.1 | 16411 | 21768 | 308 | | | | |
| 1248 | 21769 | 483 | KAE60713.1 | 16413 | 21770 | 202 | KAE60714.1 | 16414 | 21771 | 308 | | | | |
| 1249 | 21772 | 483 | KAE63795.1 | 16416 | 21773 | 202 | KAE63796.1 | 16417 | 21774 | 308 | | | | |
| 1250 | 21775 | 483 | KAE63592.1 | 16419 | 21776 | 202 | KAE63593.1 | 16420 | 21777 | 308 | | | | |
| 1251 | 21778 | 483 | KAE68674.1 | 16422 | 21779 | 202 | KAE68675.1 | 16423 | 21780 | 308 | | | | |
| 1252 | 21781 | 483 | KAE69668.1 | 16425 | 21782 | 202 | KAE69669.1 | 16426 | 21783 | 308 | | | | |
| 1253 | 21784 | 483 | KAE72489.1 | 16428 | 21785 | 202 | KAE72490.1 | 16429 | 21786 | 308 | | | | |
| 1254 | 21787 | 483 | KAE78482.1 | 16431 | 21788 | 202 | KAE78483.1 | 16432 | 21789 | 308 | | | | |
| 1255 | 21790 | 483 | KAE76734.1 | 16434 | 21791 | 202 | KAE76735.1 | 16435 | 21792 | 308 | | | | |
| 1256 | 21793 | 483 | KAE81549.1 | 16437 | 21794 | 202 | KAE81550.1 | 16438 | 21795 | 308 | | | | |
| 1257 | 21796 | 483 | KAE84895.1 | 16440 | 21797 | 202 | KAE84896.1 | 16441 | 21798 | 308 | | | | |
| 1258 | 21799 | 483 | KAE84989.1 | 16443 | 21800 | 202 | KAE84990.1 | 16444 | 21801 | 308 | | | | |
| 1259 | 21802 | 483 | KAE89402.1 | 16446 | 21803 | 202 | KAE89403.1 | 16447 | 21804 | 308 | | | | |
| 1260 | 21805 | 483 | KAE90294.1 | 16449 | 21806 | 202 | KAE90295.1 | 16450 | 21807 | 308 | | | | |
| 1261 | 21808 | 483 | KAE93400.1 | 16452 | 21809 | 202 | KAE93401.1 | 16453 | 21810 | 308 | | | | |
| 1262 | 21811 | 483 | KAE97231.1 | 16455 | 21812 | 202 | KAE97232.1 | 16456 | 21813 | 308 | | | | |
| 1263 | 21814 | 483 | KAE99812.1 | 16458 | 21815 | 202 | KAE99813.1 | 16459 | 21816 | 308 | | | | |
| 1264 | 21817 | 483 | KAE99885.1 | 16461 | 21818 | 202 | KAE99886.1 | 16462 | 21819 | 308 | | | | |
| 1265 | 21820 | 483 | KAF04814.1 | 16464 | 21821 | 202 | KAF04815.1 | 16465 | 21822 | 308 | | | | |
| 1266 | 21823 | 483 | KAF09787.1 | 16467 | 21824 | 202 | KAF09788.1 | 16468 | 21825 | 308 | | | | |
| 1267 | 21826 | 483 | KAF06946.1 | 16470 | 21827 | 202 | KAF06947.1 | 16471 | 21828 | 308 | | | | |
| 1268 | 21829 | 483 | KAF12147.1 | 16473 | 21830 | 202 | KAF12148.1 | 16474 | 21831 | 308 | | | | |
| 1269 | 21832 | 375 | KAF14359.1 | 16476 | 21833 | 202 | KAF14360.1 | 16477 | 21834 | 308 | | | | |
| 1270 | 21835 | 483 | KAF17948.1 | 16479 | 21836 | 202 | KAF17949.1 | 16480 | 21837 | 308 | | | | |
| 1271 | 21838 | 483 | KAF21047.1 | 16482 | 21839 | 202 | KAF21048.1 | 16483 | 21840 | 308 | | | | |
| 1272 | 21841 | 483 | KAF20974.1 | 16485 | 21842 | 202 | KAF20975.1 | 16486 | 21843 | 308 | | | | |
| 1273 | 21844 | 483 | KAF25641.1 | 16488 | 21845 | 202 | KAF25642.1 | 16489 | 21846 | 308 | | | | |
| 1274 | 21847 | 483 | KAF31106.1 | 16491 | 21848 | 202 | KAF31107.1 | 16492 | 21849 | 308 | | | | |
| 1275 | 21850 | 483 | KAF28012.1 | 16494 | 21851 | 202 | KAF28013.1 | 16495 | 21852 | 308 | | | | |
| 1276 | 21853 | 483 | KAF33772.1 | 16497 | 21854 | 202 | KAF33773.1 | 16498 | 21855 | 308 | | | | |
| 1277 | 21856 | 483 | KAF35728.1 | 16500 | 21857 | 202 | KAF35729.1 | 16501 | 21858 | 308 | | | | |
| 1278 | 21859 | 483 | KAF38653.1 | 16503 | 21860 | 202 | KAF38654.1 | 16504 | 21861 | 308 | | | | |
| 1279 | 21862 | 483 | KAF42880.1 | 16506 | 21863 | 202 | KAF42881.1 | 16507 | 21864 | 308 | | | | |
| 1280 | 21865 | 483 | KAF42844.1 | 16509 | 21866 | 202 | KAF42845.1 | 16510 | 21867 | 308 | | | | |
| 1281 | 21868 | 483 | KAF46907.1 | 16512 | 21869 | 202 | KAF46908.1 | 16513 | 21870 | 308 | | | | |
| 1282 | 21871 | 483 | KAF47441.1 | 16515 | 21872 | 202 | KAF47442.1 | 16516 | 21873 | 308 | | | | |
| 1283 | 21874 | 131 | KAF47998.1 | 16518 | 21875 | 202 | KAF47999.1 | 16519 | 21876 | 308 | | | | |
| 1284 | 21877 | 483 | KAF54047.1 | 16521 | 21878 | 202 | KAF54048.1 | 16522 | 21879 | 308 | | | | |
| 1285 | 21880 | 483 | KAF54412.1 | 16524 | 21881 | 202 | KAF54413.1 | 16525 | 21882 | 308 | | | | |
| 1286 | 21883 | 483 | KAF60184.1 | 16527 | 21884 | 202 | KAF60185.1 | 16528 | 21885 | 308 | | | | |
| 1287 | 21886 | 483 | KAF62545.1 | 16530 | 21887 | 202 | KAF62546.1 | 16531 | 21888 | 308 | | | | |
| 1288 | 21889 | 483 | KAF64110.1 | 16533 | 21890 | 202 | KAF64111.1 | 16534 | 21891 | 308 | | | | |
| 1289 | 21892 | 483 | KAF67902.1 | 16536 | 21893 | 202 | KAF67903.1 | 16537 | 21894 | 308 | | | | |
| 1290 | 21895 | 483 | KAF70711.1 | 16539 | 21896 | 202 | KAF70712.1 | 16540 | 21897 | 308 | | | | |
| 1291 | 21898 | 483 | KAF71813.1 | 16542 | 21899 | 202 | KAF71814.1 | 16543 | 21900 | 308 | | | | |
| 1292 | 21901 | 483 | KAF75588.1 | 16545 | 21902 | 202 | KAF75589.1 | 16546 | 21903 | 308 | | | | |
| 1293 | 21904 | 483 | KAF76889.1 | 16548 | 21905 | 202 | KAF76890.1 | 16549 | 21906 | 308 | | | | |
| 1294 | 21907 | 483 | KAF80457.1 | 16551 | 21908 | 202 | KAF80458.1 | 16552 | 21909 | 308 | | | | |
| 1295 | 21910 | 483 | KAF84646.1 | 16554 | 21911 | 202 | KAF84647.1 | 16555 | 21912 | 308 | | | | |
| 1296 | 21913 | 483 | KAF88484.1 | 16557 | 21914 | 202 | KAF88485.1 | 16558 | 21915 | 308 | | | | |
| 1297 | 21916 | 483 | KAF92872.1 | 16560 | 21917 | 202 | KAF92873.1 | 16561 | 21918 | 308 | | | | |
| 1298 | 21919 | 483 | KAF91776.1 | 16563 | 21920 | 202 | KAF91777.1 | 16564 | 21921 | 308 | | | | |
| 1299 | 21922 | 483 | KAG01059.1 | 16566 | 21923 | 202 | KAG01060.1 | 16567 | 21924 | 308 | | | | |
| 1300 | 21925 | 131 | KAF98700.1 | 16569 | 21926 | 202 | KAF98701.1 | 16570 | 21927 | 308 | | | | |
| 1301 | 21928 | 131 | KAF97454.1 | 16572 | 21929 | 202 | KAF97455.1 | 16573 | 21930 | 308 | | | | |
| 1302 | 21931 | 483 | KAG04153.1 | 16575 | 21932 | 202 | KAG04154.1 | 16576 | 21933 | 308 | | | | |
| 1303 | 21934 | 483 | KAG04818.1 | 16578 | 21935 | 202 | KAG04819.1 | 16579 | 21936 | 308 | | | | |
| 1304 | 21937 | 483 | KAG08554.1 | 16581 | 21938 | 202 | KAG08555.1 | 16582 | 21939 | 308 | | | | |
| 1305 | 21940 | 483 | KAG10679.1 | 16584 | 21941 | 202 | KAG10680.1 | 16585 | 21942 | 308 | | | | |
| 1306 | 21943 | 483 | KAG15999.1 | 16587 | 21944 | 202 | KAG16000.1 | 16588 | 21945 | 308 | | | | |
| 1307 | 21946 | 483 | KAG21724.1 | 16590 | 21947 | 202 | KAG21725.1 | 16591 | 21948 | 308 | | | | |
| 1308 | 21949 | 483 | KAG29028.1 | 16593 | 21950 | 202 | KAG29029.1 | 16594 | 21951 | 308 | | | | |
| 1309 | 21952 | 483 | KAG32268.1 | 16596 | 21953 | 202 | KAG32269.1 | 16597 | 21954 | 308 | | | | |
| 1310 | 21955 | 483 | KAG34709.1 | 16599 | 21956 | 202 | KAG34710.1 | 16600 | 21957 | 308 | | | | |
| 1311 | 21958 | 483 | KAG37985.1 | 16602 | 21959 | 202 | KAG37986.1 | 16603 | 21960 | 308 | | | | |
| 1312 | 21961 | 483 | KAG51660.1 | 16605 | 21962 | 202 | KAG51661.1 | 16606 | 21963 | 308 | | | | |
| 1313 | 21964 | 483 | KAG55491.1 | 16608 | 21965 | 202 | KAG55492.1 | 16609 | 21966 | 308 | | | | |
| 1314 | 21967 | 483 | KAG59144.1 | 16611 | 21968 | 202 | KAG59145.1 | 16612 | 21969 | 308 | | | | |
| 1315 | 21970 | 483 | KAG59706.1 | 16614 | 21971 | 202 | KAG59707.1 | 16615 | 21972 | 308 | | | | |
| 1316 | 21973 | 483 | KAG65357.1 | 16617 | 21974 | 202 | KAG65358.1 | 16618 | 21975 | 308 | | | | |
| 1317 | 21976 | 483 | KAG67526.1 | 16620 | 21977 | 202 | KAG67527.1 | 16621 | 21978 | 308 | | | | |
| 1318 | 21979 | 483 | KAG68213.1 | 16623 | 21980 | 202 | KAG68214.1 | 16624 | 21981 | 308 | | | | |
| 1319 | 21982 | 483 | KAG69691.1 | 16626 | 21983 | 202 | KAG69692.1 | 16627 | 21984 | 308 | | | | |
| 1320 | 21985 | 483 | KAG74734.1 | 16629 | 21986 | 202 | KAG74735.1 | 16630 | 21987 | 308 | | | | |
| 1321 | 21988 | 483 | KAG76837.1 | 16632 | 21989 | 202 | KAG76838.1 | 16633 | 21990 | 308 | | | | |
| 1322 | 21991 | 483 | KAG76106.1 | 16635 | 21992 | 202 | KAG76107.1 | 16636 | 21993 | 308 | | | | |
| 1323 | 21994 | 483 | KAG81174.1 | 16638 | 21995 | 202 | KAG81175.1 | 16639 | 21996 | 308 | | | | |
| 1324 | 21997 | 483 | KAG82428.1 | 16641 | 21998 | 202 | KAG82429.1 | 16642 | 21999 | 308 | | | | |
| 1325 | 22000 | 483 | KAG84390.1 | 16644 | 22001 | 202 | KAG84391.1 | 16645 | 22002 | 308 | | | | |
| 1326 | 22003 | 483 | KAG88851.1 | 16647 | 22004 | 202 | KAG88852.1 | 16648 | 22005 | 308 | | | | |
| 1327 | 22006 | 483 | KAG92814.1 | 16650 | 22007 | 202 | KAG92815.1 | 16651 | 22008 | 308 | | | | |
| 1328 | 22009 | 483 | KAG95313.1 | 16653 | 22010 | 202 | KAG95314.1 | 16654 | 22011 | 308 | | | | |
| 1329 | 22012 | 483 | KAH01281.1 | 16656 | 22013 | 202 | KAH01282.1 | 16657 | 22014 | 308 | | | | |
| 1330 | 22015 | 483 | KAH06867.1 | 16659 | 22016 | 202 | KAH06868.1 | 16660 | 22017 | 308 | | | | |
| 1331 | 22018 | 483 | KAH07512.1 | 16662 | 22019 | 202 | KAH07513.1 | 16663 | 22020 | 308 | | | | |
| 1332 | 22021 | 483 | KAH16051.1 | 16665 | 22022 | 202 | KAH16052.1 | 16666 | 22023 | 308 | | | | |
| 1333 | 22024 | 483 | KAH15236.1 | 16668 | 22025 | 202 | KAH15237.1 | 16669 | 22026 | 308 | | | | |
| 1334 | 22027 | 483 | KAH19615.1 | 16671 | 22028 | 202 | KAH19616.1 | 16672 | 22029 | 308 | | | | |
| 1335 | 22030 | 483 | KAH24555.1 | 16674 | 22031 | 202 | KAH24556.1 | 16675 | 22032 | 308 | | | | |
| 1336 | 22033 | 483 | KAH28156.1 | 16677 | 22034 | 202 | KAH28157.1 | 16678 | 22035 | 308 | | | | |
| 1337 | 22036 | 483 | KAH29213.1 | 16680 | 22037 | 202 | KAH29214.1 | 16681 | 22038 | 308 | | | | |
| 1338 | 22039 | 483 | KAH33222.1 | 16683 | 22040 | 202 | KAH33223.1 | 16684 | 22041 | 308 | | | | |
| 1339 | 22042 | 483 | KAH35671.1 | 16686 | 22043 | 202 | KAH35672.1 | 16687 | 22044 | 308 | | | | |
| 1340 | 22045 | 483 | KAH37680.1 | 16689 | 22046 | 202 | KAH37681.1 | 16690 | 22047 | 308 | | | | |
| 1341 | 22048 | 483 | KAH40128.1 | 16692 | 22049 | 202 | KAH40129.1 | 16693 | 22050 | 308 | | | | |
| 1342 | 22051 | 483 | KAH41310.1 | 16695 | 22052 | 202 | KAH41311.1 | 16696 | 22053 | 308 | | | | |
| 1343 | 22054 | 483 | KAH45886.1 | 16698 | 22055 | 202 | KAH45887.1 | 16699 | 22056 | 308 | | | | |
| 1344 | 22057 | 483 | KAH47352.1 | 16701 | 22058 | 202 | KAH47353.1 | 16702 | 22059 | 308 | | | | |
| 1345 | 22060 | 483 | KAH50034.1 | 16704 | 22061 | 202 | KAH50035.1 | 16705 | 22062 | 308 | | | | |
| 1346 | 22063 | 483 | KAH53956.1 | 16707 | 22064 | 202 | KAH53957.1 | 16708 | 22065 | 308 | | | | |
| 1347 | 22066 | 483 | KAH55296.1 | 16710 | 22067 | 202 | KAH55297.1 | 16711 | 22068 | 308 | | | | |
| 1348 | 22069 | 483 | KAH59145.1 | 16713 | 22070 | 202 | KAH59146.1 | 16714 | 22071 | 308 | | | | |
| 1349 | 22072 | 483 | KAH62177.1 | 16716 | 22073 | 202 | KAH62178.1 | 16717 | 22074 | 308 | | | | |
| 1350 | 22075 | 483 | KAH64793.1 | 16719 | 22076 | 202 | KAH64794.1 | 16720 | 22077 | 308 | | | | |
| 1351 | 22078 | 483 | KAH67713.1 | 16722 | 22079 | 202 | KAH67714.1 | 16723 | 22080 | 308 | | | | |
| 1352 | 22081 | 483 | KAH70234.1 | 16725 | 22082 | 202 | KAH70235.1 | 16726 | 22083 | 308 | | | | |
| 1353 | 22084 | 483 | KAH70951.1 | 16728 | 22085 | 202 | KAH70952.1 | 16729 | 22086 | 308 | | | | |
| 1354 | 22087 | 483 | KAH74940.1 | 16731 | 22088 | 202 | KAH74941.1 | 16732 | 22089 | 308 | | | | |
| 1355 | 22090 | 483 | KAH77219.1 | 16734 | 22091 | 202 | KAH77220.1 | 16735 | 22092 | 308 | | | | |
| 1356 | 22093 | 483 | KAH77146.1 | 16737 | 22094 | 202 | KAH77147.1 | 16738 | 22095 | 308 | | | | |
| 1357 | 22096 | 483 | KAH82034.1 | 16740 | 22097 | 202 | KAH82035.1 | 16741 | 22098 | 308 | | | | |
| 1358 | 22099 | 131 | KAH85415.1 | 16743 | 22100 | 202 | KAH85416.1 | 16744 | 22101 | 308 | | | | |
| 1359 | 22102 | 483 | KAH87603.1 | 16746 | 22103 | 202 | KAH87604.1 | 16747 | 22104 | 308 | | | | |
| 1360 | 22105 | 483 | KAH91092.1 | 16749 | 22106 | 202 | KAH91093.1 | 16750 | 22107 | 308 | | | | |
| 1361 | 22108 | 483 | KAH91683.1 | 16752 | 22109 | 202 | KAH91684.1 | 16753 | 22110 | 308 | | | | |
| 1362 | 22111 | 483 | KAH96190.1 | 16755 | 22112 | 202 | KAH96191.1 | 16756 | 22113 | 308 | | | | |
| 1363 | 22114 | 483 | KAH96015.1 | 16758 | 22115 | 202 | KAH96016.1 | 16759 | 22116 | 308 | | | | |
| 1364 | 22117 | 483 | KAI00776.1 | 16761 | 22118 | 202 | KAI00777.1 | 16762 | 22119 | 308 | | | | |
| 1365 | 22120 | 483 | KAI04124.1 | 16764 | 22121 | 202 | KAI04125.1 | 16765 | 22122 | 308 | | | | |
| 1366 | 22123 | 483 | KAI02995.1 | 16767 | 22124 | 202 | KAI02996.1 | 16768 | 22125 | 308 | | | | |
| 1367 | 22126 | 483 | KAI08746.1 | 16770 | 22127 | 202 | KAI08747.1 | 16771 | 22128 | 308 | | | | |
| 1368 | 22129 | 483 | KAI10608.1 | 16773 | 22130 | 202 | KAI10609.1 | 16774 | 22131 | 308 | | | | |
| 1369 | 22132 | 483 | KAI13048.1 | 16776 | 22133 | 202 | KAI13049.1 | 16777 | 22134 | 308 | | | | |
| 1370 | 22135 | 483 | KAI15460.1 | 16779 | 22136 | 202 | KAI15461.1 | 16780 | 22137 | 308 | | | | |
| 1371 | 22138 | 375 | KAI16286.1 | 16782 | 22139 | 202 | KAI16287.1 | 16783 | 22140 | 308 | | | | |
| 1372 | 22141 | 483 | KAI19039.1 | 16785 | 22142 | 202 | KAI19040.1 | 16786 | 22143 | 308 | | | | |
| 1373 | 22144 | 483 | KAI22532.1 | 16788 | 22145 | 202 | KAI22533.1 | 16789 | 22146 | 308 | | | | |
| 1374 | 22147 | 375 | KAI26856.1 | 16791 | 22148 | 202 | KAI26857.1 | 16792 | 22149 | 308 | | | | |
| 1375 | 22150 | 375 | KAI29883.1 | 16794 | 22151 | 202 | KAI29884.1 | 16795 | 22152 | 308 | | | | |
| 1376 | 22153 | 483 | KAI31278.1 | 16797 | 22154 | 202 | KAI31279.1 | 16798 | 22155 | 308 | | | | |
| 1377 | 22156 | 483 | KAI34384.1 | 16800 | 22157 | 202 | KAI34385.1 | 16801 | 22158 | 308 | | | | |
| 1378 | 22159 | 483 | KAI37684.1 | 16803 | 22160 | 202 | KAI37685.1 | 16804 | 22161 | 308 | | | | |
| 1379 | 22162 | 483 | KAI38931.1 | 16806 | 22163 | 202 | KAI38932.1 | 16807 | 22164 | 308 | | | | |
| 1380 | 22165 | 483 | KAI42592.1 | 16809 | 22166 | 202 | KAI42593.1 | 16810 | 22167 | 308 | | | | |
| 1381 | 22168 | 483 | KAI44806.1 | 16812 | 22169 | 202 | KAI44807.1 | 16813 | 22170 | 308 | | | | |
| 1382 | 22171 | 483 | KAI46180.1 | 16815 | 22172 | 202 | KAI46181.1 | 16816 | 22173 | 308 | | | | |
| 1383 | 22174 | 483 | KAI50312.1 | 16818 | 22175 | 202 | KAI50313.1 | 16819 | 22176 | 308 | | | | |
| 1384 | 22177 | 483 | KAI52599.1 | 16821 | 22178 | 202 | KAI52600.1 | 16822 | 22179 | 308 | | | | |
| 1385 | 22180 | 483 | KAI51893.1 | 16824 | 22181 | 202 | KAI51894.1 | 16825 | 22182 | 308 | | | | |
| 1386 | 22183 | 483 | KAI58510.1 | 16827 | 22184 | 202 | KAI58511.1 | 16828 | 22185 | 308 | | | | |
| 1387 | 22186 | 483 | KAI59068.1 | 16830 | 22187 | 202 | KAI59069.1 | 16831 | 22188 | 308 | | | | |
| 1388 | 22189 | 375 | KAI62092.1 | 16833 | 22190 | 202 | KAI62093.1 | 16834 | 22191 | 308 | | | | |
| 1389 | 22192 | 483 | KAI65036.1 | 16836 | 22193 | 202 | KAI65037.1 | 16837 | 22194 | 308 | | | | |
| 1390 | 22195 | 483 | KAI67114.1 | 16839 | 22196 | 202 | KAI67115.1 | 16840 | 22197 | 72 | | | | |
| 1391 | 22198 | 483 | KAI71115.1 | 16842 | 22199 | 202 | KAI71116.1 | 16843 | 22200 | 72 | | | | |
| 1392 | 22201 | 483 | KAI72296.1 | 16845 | 22202 | 202 | KAI72297.1 | 16846 | 22203 | 308 | | | | |
| 1393 | 22204 | 483 | KAI76026.1 | 16848 | 22205 | 202 | KAI76027.1 | 16849 | 22206 | 308 | | | | |
| 1394 | 22207 | 483 | KAI77489.1 | 16851 | 22208 | 202 | KAI77490.1 | 16852 | 22209 | 308 | | | | |
| 1395 | 22210 | 483 | KAI79405.1 | 16854 | 22211 | 202 | KAI79406.1 | 16855 | 22212 | 308 | | | | |
| 1396 | 22213 | 483 | KAI83419.1 | 16857 | 22214 | 202 | KAI83420.1 | 16858 | 22215 | 308 | | | | |
| 1397 | 22216 | 483 | KAF82850.1 | 16860 | 22217 | 202 | KAF82851.1 | 16861 | 22218 | 308 | | | | |
| 1398 | 22219 | 487 | KES25285.1 | 16863 | 22220 | 167 | KES25283.1 | 16864 | 22221 | 183 | | | | |
| 1399 | 22222 | 487 | KKB51169.1 | 16866 | 22223 | 160 | KKB51171.1 | 16867 | 22224 | 186 | | | | |
| 1400 | 22225 | 481 | KKB46311.1 | 16869 | 22226 | 163 | KKB46308.1 | 16870 | 22227 | 181 | | | | |
| 1401 | 22228 | 478 | KME80491.1 | 16872 | 22229 | 203 | | | | | | | | |
| 1402 | 22230 | 484 | KMJ04348.1 | 16874 | 22231 | 163 | | | | | | | | |
| 1403 | 22232 | 480 | KSU86124.1 | 16876 | 22233 | 202 | | | | | | | | |
| 1404 | 22234 | 484 | KUR80454.1 | 16878 | 22235 | 165 | KUR80452.1 | 16879 | 22236 | 184 | KUR80451.1 | 16880 | 22237 | 259 |
| 1405 | 22238 | 476 | KXT60078.1 | 16882 | 22239 | 207 | | | | | | | | |
| 1406 | 22240 | 477 | KJP12012.1 | 16884 | 22241 | 146 | KJP12010.1 | 16885 | 22242 | 161 | | | | |
| 1407 | 22243 | 486 | KKO42007.1 | 16887 | 22244 | 202 | | | | | | | | |
| 1408 | 22245 | 480 | KMQ31910.1 | 16889 | 22246 | 202 | | | | | | | | |
| 1409 | 22247 | 480 | KMQ31455.1 | 16891 | 22248 | 202 | | | | | | | | |
| 1410 | 22249 | 480 | KMQ31338.1 | 16893 | 22250 | 202 | | | | | | | | |
| 1411 | 22251 | 477 | KMQ07577.1 | 16895 | 22252 | 226 | | | | | | | | |
| 1412 | 22253 | 488 | KJU85604.1 | 16897 | 22254 | 162 | | | | | | | | |
| 1413 | 22255 | 475 | KJS18753.1 | 16899 | 22256 | 160 | KJS18754.1 | 16900 | 22257 | 228 | | | | |
| 1414 | 22258 | 478 | KLD44467.1 | 16902 | 22259 | 203 | | | | | | | | |
| 1415 | 22260 | 481 | KKZ08482.1 | 16904 | 22261 | 200 | KKZ08481.1 | 16905 | 22262 | 191 | | | | |
| 1416 | 22263 | 479 | KKX43504.1 | 16907 | 22264 | 209 | | | | | | | | |
| 1417 | 22265 | 478 | KKJ66888.1 | 16909 | 22266 | 161 | KKJ66890.1 | 16910 | 22267 | 283 | | | | |
| 1418 | 22268 | 480 | KKR96939.1 | 16912 | 22269 | 168 | KKR96941.1 | 16913 | 22270 | 393 | | | | |
| 1419 | 22271 | 484 | KKZ15777.1 | 16915 | 22272 | 163 | | | | | | | | |
| 1420 | 22273 | 586 | KLA35046.1 | 16917 | 22274 | 325 | | | | | | | | |
| 1421 | 22275 | 477 | KLA36291.1 | 16919 | 22276 | 226 | | | | | | | | |
| 1422 | 22277 | 481 | KLF79288.1 | 16921 | 22278 | 155 | | | | | | | | |
| 1423 | 22279 | 484 | KLE38478.1 | 16923 | 22280 | 163 | | | | | | | | |
| 1424 | 22281 | 481 | KMN72582.1 | 16925 | 22282 | 202 | | | | | | | | |
| 1425 | 22283 | 481 | KMN78964.1 | 16927 | 22284 | 155 | KMN78968.1 | 16928 | 22285 | 155 | KMN78965.1 | 16929 | 22286 | 190 |
| 1426 | 22287 | 477 | KOQ86135.1 | 16931 | 22288 | 146 | KOQ86133.1 | 16932 | 22289 | 161 | | | | |
| 1427 | 22290 | 479 | KOQ96627.1 | 16934 | 22291 | 205 | KOQ96628.1 | 16935 | 22292 | 165 | | | | |
| 1428 | 22293 | 487 | KXU94745.1 | 16937 | 22294 | 167 | KXU94712.1 | 16938 | 22295 | 183 | | | | |
| 1429 | 22296 | 484 | KMU49984.1 | 16940 | 22297 | 163 | | | | | | | | |
| 1430 | 22298 | 269 | KMZ12178.1 | 16942 | 22299 | 103 | KMZ12179.1 | 16943 | 22300 | 174 | | | | |
| 1431 | 22301 | 477 | KMY27374.1 | 16945 | 22302 | 155 | KMY27378.1 | 16946 | 22303 | 147 | KMY27376.1 | 16947 | 22304 | 165 |
| 1432 | 22305 | 481 | KOF39298.1 | 16949 | 22306 | 200 | KOF39299.1 | 16950 | 22307 | 191 | | | | |
| 1433 | 22308 | 492 | KPH74234.1 | 16952 | 22309 | 161 | KPH74237.1 | 16953 | 22310 | 175 | | | | |
| 1434 | 22311 | 487 | KPG99047.1 | 16955 | 22312 | 167 | KPG99049.1 | 16956 | 22313 | 183 | | | | |
| 1435 | 22314 | 486 | KUG12362.1 | 16958 | 22315 | 163 | KUG12363.1 | 16959 | 22316 | 235 | KUG12375.1 | 16960 | 22317 | 178 |
| 1436 | 22318 | 477 | KPS74517.1 | 16962 | 22319 | 200 | KPS74518.1 | 16963 | 22320 | 146 | KPS74516.1 | 16964 | 22321 | 395 |
| 1437 | 22322 | 477 | KPS95937.1 | 16966 | 22323 | 146 | KPS95938.1 | 16967 | 22324 | 200 | KPS95939.1 | 16968 | 22325 | 395 |
| 1438 | 22326 | 487 | KPF70567.1 | 16970 | 22327 | 165 | | | | | | | | |
| 1439 | 22328 | 477 | KQB82199.1 | 16972 | 22329 | 202 | | | | | | | | |
| 1440 | 22330 | 474 | KQL33556.1 | 16974 | 22331 | 222 | | | | | | | | |
| 1441 | 22332 | 477 | KPY89191.1 | 16976 | 22333 | 147 | KPY89133.1 | 16977 | 22334 | 167 | KPY89165.1 | 16978 | 22335 | 276 |
| 1442 | 22336 | 482 | CDT62295.1 | 16980 | 22337 | 166 | CDT62262.1 | 16981 | 22338 | 228 | | | | |
| 1443 | 22339 | 482 | CDT49130.1 | 16983 | 22340 | 166 | CDT49099.1 | 16984 | 22341 | 228 | | | | |
| 1444 | 22342 | 475 | KTC51735.1 | 16986 | 22343 | 160 | | | | | | | | |
| 1445 | 22344 | 475 | KTB70324.1 | 16988 | 22345 | 160 | | | | | | | | |
| 1446 | 22346 | 494 | KTB90115.1 | 16990 | 22347 | 312 | | | | | | | | |
| 1447 | 22348 | 388 | KTC03052.1 | 16992 | 22349 | 231 | | | | | | | | |
| 1448 | 22350 | 474 | KRF62305.1 | 16994 | 22351 | 200 | | | | | | | | |
| 1449 | 22352 | 474 | KSF14310.1 | 16996 | 22353 | 163 | | | | | | | | |
| 1450 | 22354 | 482 | KSG00434.1 | 16998 | 22355 | 158 | KSG00432.1 | 16999 | 22356 | 179 | KSG00433.1 | 17000 | 22357 | 183 |
| 1451 | 22359 | 482 | KSO26595.1 | 17003 | 22360 | 158 | KSO26596.1 | 17004 | 22361 | 183 | KSO26597.1 | 17005 | 22362 | 179 |
| 1452 | 22364 | 482 | KSQ24405.1 | 17008 | 22365 | 158 | KSQ24406.1 | 17009 | 22366 | 183 | KSQ24407.1 | 17010 | 22367 | 179 |
| 1453 | 22369 | 487 | KSQ18858.1 | 17013 | 22370 | 167 | KSQ18860.1 | 17014 | 22371 | 183 | | | | |
| 1454 | 22372 | 501 | KQV52822.1 | 17016 | 22373 | 158 | | | | | | | | |
| 1455 | 22374 | 596 | KQW19001.1 | 17018 | 22375 | 370 | | | | | | | | |
| 1456 | 22376 | 480 | KQN02370.1 | 17020 | 22377 | 158 | | | | | | | | |
| 1457 | 22378 | 476 | KQS95551.1 | 17022 | 22379 | 205 | KQS95550.1 | 17023 | 22380 | 174 | | | | |
| 1458 | 22381 | 334 | KRE80989.1 | 17025 | 22382 | 318 | | | | | | | | |
| 1459 | 22383 | 240 | CEA11437.1 | 17027 | 22384 | 156 | | | | | | | | |
| 1460 | 22385 | 240 | CEA10433.1 | 17029 | 22386 | 156 | | | | | | | | |
| 1461 | 22387 | 307 | CUU52510.1 | 17031 | 22388 | 165 | CUU52511.1 | 17032 | 22389 | 214 | | | | |
| 1462 | 22390 | 482 | KSX76370.1 | 17034 | 22391 | 166 | | | | | | | | |
| 1463 | 22392 | 478 | KWY00932.1 | 17036 | 22393 | 161 | KWY00934.1 | 17037 | 22394 | 283 | | | | |
| 1464 | 22395 | 478 | KWY16708.1 | 17039 | 22396 | 161 | KWY16706.1 | 17040 | 22397 | 283 | | | | |
| 1465 | 22398 | 478 | KWY36997.1 | 17042 | 22399 | 161 | KWY36995.1 | 17043 | 22400 | 283 | | | | |
| 1466 | 22401 | 329 | KWY51063.1 | 17045 | 22402 | 161 | | | | | | | | |
| 1467 | 22403 | 314 | KWY60249.1 | 17047 | 22404 | 161 | | | | | | | | |
| 1468 | 22405 | 478 | KWY71635.1 | 17049 | 22406 | 161 | | | | | | | | |
| 1469 | 22407 | 478 | KWY79779.1 | 17051 | 22408 | 161 | KWY79777.1 | 17052 | 22409 | 283 | | | | |
| 1470 | 22410 | 478 | KWY89824.1 | 17054 | 22411 | 114 | | | | | | | | |
| 1471 | 22412 | 478 | KWY92723.1 | 17056 | 22413 | 161 | KWY92721.1 | 17057 | 22414 | 283 | | | | |
| 1472 | 22415 | 478 | KWY92991.1 | 17059 | 22416 | 161 | KWY92993.1 | 17060 | 22417 | 283 | | | | |
| 1473 | 22418 | 478 | KWY96006.1 | 17062 | 22419 | 161 | KWY96008.1 | 17063 | 22420 | 283 | | | | |
| 1474 | 22421 | 478 | KWZ06303.1 | 17065 | 22422 | 161 | KWZ06305.1 | 17066 | 22423 | 283 | | | | |
| 1475 | 22424 | 489 | KST54507.1 | 17068 | 22425 | 202 | KST54506.1 | 17069 | 22426 | 344 | | | | |
| 1476 | 22427 | 477 | KTD46364.1 | 17071 | 22428 | 163 | | | | | | | | |
| 1477 | 22429 | 479 | KUO54663.1 | 17073 | 22430 | 155 | | | | | | | | |
| 1478 | 22431 | 500 | KXY14128.1 | 17075 | 22432 | 206 | | | | | | | | |
| 1479 | 22433 | 126 | KXQ35633.1 | 17077 | 22434 | 155 | | | | | | | | |
| 1480 | 22435 | 126 | KXG66577.1 | 17079 | 22436 | 155 | | | | | | | | |
| 1481 | 22437 | 476 | KVM18169.1 | 17081 | 22438 | 160 | KVM18174.1 | 17082 | 22439 | 155 | KVM18170.1 | 17083 | 22440 | 197 |
| 1482 | 22441 | 476 | KVM22188.1 | 17085 | 22442 | 155 | KVM22193.1 | 17086 | 22443 | 160 | KVM22192.1 | 17087 | 22444 | 197 |
| 1483 | 22445 | 476 | KVM54442.1 | 17089 | 22446 | 160 | KVM54448.1 | 17090 | 22447 | 155 | KVM54443.1 | 17091 | 22448 | 197 |
| 1484 | 22449 | 476 | KVO16516.1 | 17093 | 22450 | 146 | | | | | | | | |
| 1485 | 22451 | 536 | KVR44247.1 | 17095 | 22452 | 315 | | | | | | | | |
| 1486 | 22453 | 484 | KVR99615.1 | 17097 | 22454 | 189 | KVR99752.1 | 17098 | 22455 | 129 | | | | |
| 1487 | 22456 | 477 | KVS07628.1 | 17100 | 22457 | 203 | | | | | | | | |
| 1488 | 22458 | 484 | KVU94134.1 | 17102 | 22459 | 189 | KVU94209.1 | 17103 | 22460 | 129 | | | | |
| 1489 | 22461 | 476 | KVX54695.1 | 17105 | 22462 | 160 | | | | | | | | |
| 1490 | 22463 | 493 | KWA77748.1 | 17107 | 22464 | 189 | KWA77756.1 | 17108 | 22465 | 129 | | | | |
| 1491 | 22466 | 493 | KWB32212.1 | 17110 | 22467 | 189 | KWB32219.1 | 17111 | 22468 | 129 | | | | |
| 1492 | 22469 | 536 | KWB80881.1 | 17113 | 22470 | 315 | | | | | | | | |
| 1493 | 22471 | 481 | KTI37618.1 | 17115 | 22472 | 155 | KTI37617.1 | 17116 | 22473 | 280 | | | | |
| 1494 | 22474 | 529 | KTJ90667.1 | 17118 | 22475 | 323 | | | | | | | | |
| 1495 | 22476 | 481 | KXM51395.1 | 17120 | 22477 | 155 | | | | | | | | |
| 1496 | 22478 | 481 | KXM54362.1 | 17122 | 22479 | 155 | | | | | | | | |
| 1497 | 22480 | 481 | KXM99994.1 | 17124 | 22481 | 155 | | | | | | | | |
| 1498 | 22482 | 478 | KXH57775.1 | 17126 | 22483 | 161 | KXH57777.1 | 17127 | 22484 | 283 | | | | |
| 1499 | 22485 | 482 | KUS35847.1 | 17129 | 22486 | 166 | | | | | | | | |
| 1500 | 22487 | 482 | KUT10060.1 | 17131 | 22488 | 166 | | | | | | | | |
| 1501 | 22489 | 481 | KUT23042.1 | 17133 | 22490 | 155 | | | | | | | | |
| 1502 | 22491 | 482 | KUT23266.1 | 17135 | 22492 | 166 | | | | | | | | |
| 1503 | 22493 | 482 | KUT30719.1 | 17137 | 22494 | 166 | | | | | | | | |
| 1504 | 22495 | 481 | KUT68248.1 | 17139 | 22496 | 155 | | | | | | | | |
| 1505 | 22497 | 481 | KUU91588.1 | 17141 | 22498 | 155 | | | | | | | | |
| 1506 | 22499 | 482 | KUX27114.1 | 17143 | 22500 | 166 | | | | | | | | |
| 1507 | 22501 | 481 | KUQ77104.1 | 17145 | 22502 | 155 | | | | | | | | |
| 1508 | 22503 | 481 | KUQ90477.1 | 17147 | 22504 | 155 | | | | | | | | |
| 1509 | 22505 | 477 | KVX01472.1 | 17149 | 22506 | 147 | | | | | | | | |
| 1510 | 22507 | 481 | KVK21769.1 | 17151 | 22508 | 155 | | | | | | | | |
| 1511 | 22509 | 103 | KYQ15614.1 | 17153 | 22510 | 155 | KYQ15615.1 | 17154 | 22511 | 192 | | | | |
| 1512 | 22512 | 103 | KYQ10110.1 | 17156 | 22513 | 155 | KYQ10109.1 | 17157 | 22514 | 192 | | | | |
| 1513 | 22515 | 103 | KYQ13515.1 | 17159 | 22516 | 155 | KYQ13514.1 | 17160 | 22517 | 192 | | | | |
| 1514 | 22518 | 103 | KYQ20475.1 | 17162 | 22519 | 155 | KYQ20476.1 | 17163 | 22520 | 192 | | | | |
| 1515 | 22521 | 487 | KXA74274.1 | 17165 | 22522 | 239 | | | | | | | | |
| 1516 | 22523 | 1197 | AAB91634.1 | 17167 | 22524 | 640 | | | | | | | | |
| 1517 | 22525 | 278 | ABG41253.1 | 17169 | 22526 | 189 | | | | | | | | |
| 1518 | 22527 | 282 | ACM32748.1 | 17171 | 22528 | 187 | | | | | | | | |
| 1519 | 22529 | 296 | ACR72775.1 | 17173 | 22530 | 184 | | | | | | | | |
| 1520 | 22531 | 297 | ACR74434.1 | 17175 | 22532 | 188 | | | | | | | | |
| 1521 | 22533 | 283 | ADY24841.1 | 17177 | 22534 | 189 | | | | | | | | |
| 1522 | 22535 | 297 | AFJ62118.1 | 17179 | 22536 | 156 | | | | | | | | |
| 1523 | 22537 | 278 | AHC83881.1 | 17181 | 22538 | 187 | | | | | | | | |
| 1524 | 22539 | 278 | AHC89252.1 | 17183 | 22540 | 187 | | | | | | | | |
| 1525 | 22541 | 285 | AHJ13795.1 | 17185 | 22542 | 187 | | | | | | | | |
| 1526 | 22543 | 278 | AIL63103.1 | 17187 | 22544 | 187 | | | | | | | | |
| 1527 | 22545 | 278 | AIX52586.1 | 17189 | 22546 | 184 | | | | | | | | |
| 1528 | 22547 | 278 | AIX76374.1 | 17191 | 22548 | 184 | | | | | | | | |
| 1529 | 22549 | 275 | AJE78820.1 | 17193 | 22550 | 190 | | | | | | | | |
| 1530 | 22551 | 278 | AKL33256.1 | 17195 | 22552 | 184 | | | | | | | | |
| 1531 | 22553 | 92 | BAB73899.1 | 17197 | 22554 | 186 | | | | | | | | |
| 1532 | 22555 | 282 | CAD16318.1 | 17199 | 22556 | 187 | | | | | | | | |
| 1533 | 22557 | 285 | CBK39911.1 | 17201 | 22558 | 189 | | | | | | | | |
| 1534 | 22559 | 297 | CCG49954.1 | 17203 | 22560 | 190 | | | | | | | | |
| 1535 | 22561 | 156 | CDE97487.1 | 17205 | 22562 | 186 | | | | | | | | |
| 1536 | 22563 | 307 | CDG89551.1 | 17207 | 22564 | 187 | | | | | | | | |
| 1537 | 22565 | 277 | CDG92167.1 | 17209 | 22566 | 187 | | | | | | | | |
| 1538 | 22567 | 278 | CDZ76666.1 | 17211 | 22568 | 187 | | | | | | | | |
| 1539 | 22569 | 278 | CEE12404.1 | 17213 | 22570 | 187 | | | | | | | | |
| 1540 | 22571 | 282 | CUJ73678.1 | 17215 | 22572 | 187 | | | | | | | | |
| 1541 | 22573 | 278 | CVH06653.1 | 17217 | 22574 | 187 | | | | | | | | |
| 1542 | 22575 | 278 | CVH45994.1 | 17219 | 22576 | 185 | | | | | | | | |
| 1543 | 22577 | 278 | CZP78194.1 | 17221 | 22578 | 187 | | | | | | | | |
| 1544 | 22579 | 278 | CZQ07179.1 | 17223 | 22580 | 187 | | | | | | | | |
| 1545 | 22581 | 282 | EAZ59086.1 | 17225 | 22582 | 187 | | | | | | | | |
| 1546 | 22583 | 286 | EEG71311.1 | 17227 | 22584 | 188 | | | | | | | | |
| 1547 | 22585 | 297 | EEU99050.1 | 17229 | 22586 | 188 | | | | | | | | |
| 1548 | 22587 | 278 | EHL32739.1 | 17231 | 22588 | 187 | | | | | | | | |
| 1549 | 22589 | 278 | EHT09459.1 | 17233 | 22590 | 184 | | | | | | | | |
| 1550 | 22591 | 187 | EJO27434.1 | 17235 | 22592 | 99 | | | | | | | | |
| 1551 | 22593 | 278 | ENO98789.1 | 17237 | 22594 | 187 | | | | | | | | |
| 1552 | 22595 | 282 | EPD37370.1 | 17239 | 22596 | 187 | | | | | | | | |
| 1553 | 22597 | 283 | ERI11821.1 | 17241 | 22598 | 189 | | | | | | | | |
| 1554 | 22599 | 282 | ERV92400.1 | 17243 | 22600 | 187 | | | | | | | | |
| 1555 | 22601 | 278 | ESF54844.1 | 17245 | 22602 | 184 | | | | | | | | |
| 1556 | 22603 | 278 | ESM46332.1 | 17247 | 22604 | 186 | | | | | | | | |
| 1557 | 22605 | 278 | EUL65866.1 | 17249 | 22606 | 186 | | | | | | | | |
| 1558 | 22607 | 278 | EUL69872.1 | 17251 | 22608 | 186 | | | | | | | | |
| 1559 | 22609 | 278 | EWC39937.1 | 17253 | 22610 | 85 | | | | | | | | |
| 1560 | 22611 | 278 | EXS68250.1 | 17255 | 22612 | 187 | | | | | | | | |
| 1561 | 22613 | 283 | KEP24868.1 | 17257 | 22614 | 190 | | | | | | | | |
| 1562 | 22615 | 280 | KFC21767.1 | 17259 | 22616 | 187 | | | | | | | | |
| 1563 | 22617 | 275 | KFI14245.1 | 17261 | 22618 | 190 | | | | | | | | |
| 1564 | 22619 | 282 | KFI74924.1 | 17263 | 22620 | 196 | | | | | | | | |
| 1565 | 22621 | 278 | KHJ15950.1 | 17265 | 22622 | 184 | | | | | | | | |
| 1566 | 22623 | 278 | KIZ39819.1 | 17267 | 22624 | 184 | | | | | | | | |
| 1567 | 22625 | 278 | KJB99791.1 | 17269 | 22626 | 184 | | | | | | | | |
| 1568 | 22627 | 278 | KJN38559.1 | 17271 | 22628 | 184 | | | | | | | | |
| 1569 | 22629 | 277 | KJV39509.1 | 17273 | 22630 | 185 | | | | | | | | |
| 1570 | 22631 | 276 | KML18442.1 | 17275 | 22632 | 190 | | | | | | | | |
| 1571 | 22633 | 276 | KML61951.1 | 17277 | 22634 | 190 | | | | | | | | |
| 1572 | 22635 | 276 | KMN31256.1 | 17279 | 22636 | 190 | | | | | | | | |
| 1573 | 22637 | 276 | KMN70227.1 | 17281 | 22638 | 190 | | | | | | | | |
| 1574 | 22639 | 282 | KOC82291.1 | 17283 | 22640 | 190 | | | | | | | | |
| 1575 | 22641 | 278 | KOY23386.1 | 17285 | 22642 | 187 | | | | | | | | |
| 1576 | 22643 | 291 | KQQ38325.1 | 17287 | 22644 | 185 | | | | | | | | |
| 1577 | 22645 | 282 | KRG37250.1 | 17289 | 22646 | 187 | | | | | | | | |
| 1578 | 22647 | 282 | KRG58644.1 | 17291 | 22648 | 187 | | | | | | | | |
| 1579 | 22649 | 278 | KSC65529.1 | 17293 | 22650 | 187 | | | | | | | | |
| 1580 | 22651 | 282 | KSQ38236.1 | 17295 | 22652 | 187 | | | | | | | | |
| 1581 | 22653 | 297 | KSV97270.1 | 17297 | 22654 | 190 | | | | | | | | |
| 1582 | 22655 | 297 | KSV97838.1 | 17299 | 22656 | 190 | | | | | | | | |
| 1583 | 22657 | 297 | KTF62016.1 | 17301 | 22658 | 190 | | | | | | | | |
| 1584 | 22659 | 280 | KUJ59694.1 | 17303 | 22660 | 188 | | | | | | | | |
| 1585 | 22661 | 292 | KUR72679.1 | 17305 | 22662 | 186 | | | | | | | | |
| 1586 | 22663 | 278 | KVL39771.1 | 17307 | 22664 | 187 | | | | | | | | |
| 1587 | 22665 | 285 | KYG88424.1 | 17309 | 22666 | 187 | | | | | | | | |
| 1588 | 22667 | 278 | ABG69916.1 | 17311 | 22668 | 287 | | | | | | | | |
| 1589 | 22669 | 278 | CCQ05513.1 | 17313 | 22670 | 287 | | | | | | | | |
| 1590 | 22671 | 278 | EZJ21711.1 | 17315 | 22672 | 307 | | | | | | | | |
| 1591 | 22673 | 278 | EZJ42019.1 | 17317 | 22674 | 307 | | | | | | | | |
| 1592 | 22675 | 278 | EZJ61190.1 | 17319 | 22676 | 307 | | | | | | | | |
| 1593 | 22677 | 278 | KEJ12466.1 | 17321 | 22678 | 287 | | | | | | | | |
| 1594 | 22679 | 278 | KEJ13625.1 | 17323 | 22680 | 287 | | | | | | | | |
| 1595 | 22681 | 278 | KEJ33278.1 | 17325 | 22682 | 287 | | | | | | | | |
| 1596 | 22683 | 278 | KEN34069.1 | 17327 | 22684 | 287 | | | | | | | | |
| 1597 | 22685 | 278 | KEN41711.1 | 17329 | 22686 | 287 | | | | | | | | |
| 1598 | 22687 | 278 | KEN74068.1 | 17331 | 22688 | 287 | | | | | | | | |
| 1599 | 22689 | 278 | KKA59532.1 | 17333 | 22690 | 287 | | | | | | | | |
| 1600 | 22691 | 226 | ABO13065.2 | 17335 | 22692 | 169 | | | | | | | | |
| 1601 | 22693 | 278 | AGN81862.1 | 17337 | 22694 | 169 | | | | | | | | |
| 1602 | 22695 | 292 | AKC78199.1 | 17339 | 22696 | 166 | | | | | | | | |
| 1603 | 22697 | 270 | AMP74180.1 | 17341 | 22698 | 185 | | | | | | | | |
| 1604 | 22699 | 285 | ENW63935.1 | 17343 | 22700 | 169 | | | | | | | | |
| 1605 | 22701 | 292 | KJZ35757.1 | 17345 | 22702 | 166 | | | | | | | | |
| 1606 | 22703 | 292 | KSM97146.1 | 17347 | 22704 | 166 | | | | | | | | |
| 1607 | 22705 | 285 | KWX65127.1 | 17349 | 22706 | 169 | | | | | | | | |
| 1608 | 22707 | 278 | KJX33868.1 | 17351 | 22708 | 169 | | | | | | | | |
| 1609 | 22709 | 278 | EHW83929.1 | 17353 | 22710 | 169 | | | | | | | | |
| 1610 | 22711 | 278 | EHX90141.1 | 17355 | 22712 | 169 | | | | | | | | |
| 1611 | 22713 | 278 | EOW20699.1 | 17357 | 22714 | 169 | | | | | | | | |
| 1612 | 22715 | 278 | EQT99521.1 | 17359 | 22716 | 169 | | | | | | | | |
| 1613 | 22717 | 278 | ESE28057.1 | 17361 | 22718 | 148 | | | | | | | | |
| 1614 | 22719 | 278 | KDA72452.1 | 17363 | 22720 | 169 | | | | | | | | |
| 1615 | 22721 | 278 | KEJ24821.1 | 17365 | 22722 | 148 | | | | | | | | |
| 1616 | 22723 | 278 | KEJ23492.1 | 17367 | 22724 | 148 | | | | | | | | |
| 1617 | 22725 | 278 | KEL24739.1 | 17369 | 22726 | 169 | | | | | | | | |
| 1618 | 22727 | 278 | KEL41025.1 | 17371 | 22728 | 169 | | | | | | | | |
| 1619 | 22729 | 278 | KEL61645.1 | 17373 | 22730 | 169 | | | | | | | | |
| 1620 | 22731 | 278 | KIG27436.1 | 17375 | 22732 | 169 | | | | | | | | |
| 1621 | 22733 | 278 | CTV70042.1 | 17377 | 22734 | 169 | | | | | | | | |
| 1622 | 22735 | 278 | ESL95858.1 | 17379 | 22736 | 188 | | | | | | | | |
| 1623 | 22737 | 278 | EZR09257.1 | 17381 | 22738 | 188 | | | | | | | | |
| 1624 | 22739 | 278 | KMI15681.1 | 17383 | 22740 | 188 | | | | | | | | |
| 1625 | 22741 | 278 | BAO34670.1 | 17385 | 22742 | 169 | | | | | | | | |
| 1626 | 22743 | 278 | CNG20796.1 | 17387 | 22744 | 169 | | | | | | | | |
| 1627 | 22745 | 278 | CNJ07156.1 | 17389 | 22746 | 169 | | | | | | | | |
| 1628 | 22747 | 286 | KUO23348.1 | 17391 | 22748 | 183 | | | | | | | | |
| 1629 | 22749 | 277 | AKA50671.1 | 17393 | 22750 | 173 | | | | | | | | |
| 1630 | 22751 | 276 | EKN28635.1 | 17395 | 22752 | 170 | | | | | | | | |
| 1631 | 22753 | 276 | EEB34164.1 | 17397 | 22754 | 152 | | | | | | | | |
| 1632 | 22755 | 370 | ABE61673.1 | 17399 | 22756 | 183 | | | | | | | | |
| 1633 | 22757 | 286 | EKS39931.1 | 17401 | 22758 | 183 | | | | | | | | |
| 1634 | 22759 | 285 | KGB50926.1 | 17403 | 22760 | 166 | | | | | | | | |
| 1635 | 22761 | 290 | EFL96229.1 | 17405 | 22762 | 158 | | | | | | | | |
| 1636 | 22763 | 277 | EGF16081.1 | 17407 | 22764 | 166 | | | | | | | | |
| 1637 | 22765 | 275 | CYU22341.1 | 17409 | 22766 | 169 | | | | | | | | |
| 1638 | 22767 | 275 | CYX44050.1 | 17411 | 22768 | 169 | | | | | | | | |
| 1639 | 22769 | 275 | EMB57080.1 | 17413 | 22770 | 166 | | | | | | | | |
| 1640 | 22771 | 275 | EMC13031.1 | 17415 | 22772 | 166 | | | | | | | | |
| 1641 | 22773 | 275 | AMF85253.1 | 17417 | 22774 | 166 | | | | | | | | |
| 1642 | 22775 | 275 | EFV96551.1 | 17419 | 22776 | 166 | | | | | | | | |
| 1643 | 22777 | 212 | EGS28537.1 | 17421 | 22778 | 166 | | | | | | | | |
| 1644 | 22779 | 275 | EPT39846.1 | 17423 | 22780 | 166 | | | | | | | | |
| 1645 | 22781 | 212 | EPV87466.1 | 17425 | 22782 | 166 | | | | | | | | |
| 1646 | 22783 | 78 | EPV95020.1 | 17427 | 22784 | 166 | | | | | | | | |
| 1647 | 22785 | 275 | KLL29855.1 | 17429 | 22786 | 166 | | | | | | | | |
| 1648 | 22787 | 275 | KLL34441.1 | 17431 | 22788 | 166 | | | | | | | | |
| 1649 | 22789 | 212 | KLL34968.1 | 17433 | 22790 | 166 | | | | | | | | |
| 1650 | 22791 | 275 | KKF49830.1 | 17435 | 22792 | 166 | | | | | | | | |
| 1651 | 22793 | 302 | EGG58908.1 | 17437 | 22794 | 186 | | | | | | | | |
| 1652 | 22795 | 284 | EOL13669.1 | 17439 | 22796 | 186 | | | | | | | | |
| 1653 | 22797 | 284 | EOK19567.1 | 17441 | 22798 | 186 | | | | | | | | |
| 1654 | 22799 | 284 | EOJ40183.1 | 17443 | 22800 | 186 | | | | | | | | |
| 1655 | 22801 | 284 | EOJ44766.1 | 17445 | 22802 | 186 | | | | | | | | |
| 1656 | 22803 | 291 | EPI04162.1 | 17447 | 22804 | 186 | | | | | | | | |
| 1657 | 22805 | 284 | ETT98568.1 | 17449 | 22806 | 186 | | | | | | | | |
| 1658 | 22807 | 284 | ETU01532.1 | 17451 | 22808 | 186 | | | | | | | | |
| 1659 | 22809 | 284 | ETU06237.1 | 17453 | 22810 | 186 | | | | | | | | |
| 1660 | 22811 | 284 | ETU10203.1 | 17455 | 22812 | 186 | | | | | | | | |
| 1661 | 22813 | 284 | ETU16614.1 | 17457 | 22814 | 186 | | | | | | | | |
| 1662 | 22815 | 284 | ETU21339.1 | 17459 | 22816 | 186 | | | | | | | | |
| 1663 | 22817 | 284 | ETU24457.1 | 17461 | 22818 | 186 | | | | | | | | |
| 1664 | 22819 | 284 | ETU31994.1 | 17463 | 22820 | 186 | | | | | | | | |
| 1665 | 22821 | 284 | ETU40538.1 | 17465 | 22822 | 186 | | | | | | | | |
| 1666 | 22823 | 284 | ETU48374.1 | 17467 | 22824 | 186 | | | | | | | | |
| 1667 | 22825 | 277 | CDG04461.1 | 17469 | 22826 | 166 | | | | | | | | |
| 1668 | 22827 | 259 | KMT21892.1 | 17471 | 22828 | 174 | | | | | | | | |
| 1669 | 22829 | 285 | AMN36764.1 | 17473 | 22830 | 202 | | | | | | | | |
| 1670 | 22831 | 278 | CEQ11380.1 | 17475 | 22832 | 200 | | | | | | | | |
| 1671 | 22833 | 275 | CDG36275.1 | 17477 | 22834 | 170 | | | | | | | | |
| 1672 | 22835 | 271 | EHG33945.1 | 17479 | 22836 | 203 | | | | | | | | |
| 1673 | 22837 | 271 | KEH95235.1 | 17481 | 22838 | 203 | | | | | | | | |
| 1674 | 22839 | 285 | ERK44587.1 | 17483 | 22840 | 164 | | | | | | | | |
| 1675 | 22841 | 285 | KRK21386.1 | 17485 | 22842 | 148 | | | | | | | | |
| 1676 | 22843 | 286 | EGE38622.1 | 17487 | 22844 | 390 | | | | | | | | |
| 1677 | 22845 | 269 | AMS04502.1 | 17489 | 22846 | 171 | | | | | | | | |
| 1678 | 22847 | 286 | EZP69578.1 | 17491 | 22848 | 181 | | | | | | | | |
| 1679 | 22849 | 271 | KJJ86349.1 | 17493 | 22850 | 231 | | | | | | | | |
| 1680 | 22851 | 280 | CAH34733.1 | 17495 | 22852 | 185 | | | | | | | | |
| 1681 | 22853 | 265 | ABN91208.1 | 17497 | 22854 | 185 | | | | | | | | |
| 1682 | 22855 | 265 | EDO90950.1 | 17499 | 22856 | 185 | | | | | | | | |
| 1683 | 22857 | 265 | EET07925.1 | 17501 | 22858 | 185 | | | | | | | | |
| 1684 | 22859 | 265 | EES25673.1 | 17503 | 22860 | 185 | | | | | | | | |
| 1685 | 22861 | 207 | EIF62859.1 | 17505 | 22862 | 185 | | | | | | | | |
| 1686 | 22863 | 207 | EIF64460.1 | 17507 | 22864 | 185 | | | | | | | | |
| 1687 | 22865 | 207 | EIF75598.1 | 17509 | 22866 | 185 | | | | | | | | |
| 1688 | 22867 | 207 | EIF80280.1 | 17511 | 22868 | 185 | | | | | | | | |
| 1689 | 22869 | 265 | AFR14681.1 | 17513 | 22870 | 177 | | | | | | | | |
| 1690 | 22871 | 263 | AIO13871.1 | 17515 | 22872 | 185 | | | | | | | | |
| 1691 | 22873 | 263 | AIO91464.1 | 17517 | 22874 | 185 | | | | | | | | |
| 1692 | 22875 | 263 | AJX61766.1 | 17519 | 22876 | 185 | | | | | | | | |
| 1693 | 22877 | 273 | KGC79013.1 | 17521 | 22878 | 185 | | | | | | | | |
| 1694 | 22879 | 263 | KGD17019.1 | 17523 | 22880 | 185 | | | | | | | | |
| 1695 | 22881 | 273 | AIS48740.1 | 17525 | 22882 | 185 | | | | | | | | |
| 1696 | 22883 | 280 | AIV89829.1 | 17527 | 22884 | 185 | | | | | | | | |
| 1697 | 22885 | 280 | AIV96226.1 | 17529 | 22886 | 185 | | | | | | | | |
| 1698 | 22887 | 263 | KGX68791.1 | 17531 | 22888 | 185 | | | | | | | | |
| 1699 | 22889 | 280 | KGY01706.1 | 17533 | 22890 | 185 | | | | | | | | |
| 1700 | 22891 | 280 | KGY04132.1 | 17535 | 22892 | 185 | | | | | | | | |
| 1701 | 22893 | 265 | KIX42365.1 | 17537 | 22894 | 185 | | | | | | | | |
| 1702 | 22895 | 265 | KIX63304.1 | 17539 | 22896 | 185 | | | | | | | | |
| 1703 | 22897 | 280 | CDU27412.1 | 17541 | 22898 | 185 | | | | | | | | |
| 1704 | 22899 | 265 | AJW52246.1 | 17543 | 22900 | 185 | | | | | | | | |
| 1705 | 22901 | 263 | AJX27503.1 | 17545 | 22902 | 185 | | | | | | | | |
| 1706 | 22903 | 273 | CRY48214.1 | 17547 | 22904 | 185 | | | | | | | | |
| 1707 | 22905 | 263 | CPN90172.1 | 17549 | 22906 | 185 | | | | | | | | |
| 1708 | 22907 | 263 | CPO07156.1 | 17551 | 22908 | 185 | | | | | | | | |
| 1709 | 22909 | 263 | CPM40598.1 | 17553 | 22910 | 185 | | | | | | | | |
| 1710 | 22911 | 263 | CPQ62540.1 | 17555 | 22912 | 185 | | | | | | | | |
| 1711 | 22913 | 263 | CPQ18506.1 | 17557 | 22914 | 185 | | | | | | | | |
| 1712 | 22915 | 263 | CPI70778.1 | 17559 | 22916 | 185 | | | | | | | | |
| 1713 | 22917 | 273 | CPK87974.1 | 17561 | 22918 | 185 | | | | | | | | |
| 1714 | 22919 | 263 | CPJ40996.1 | 17563 | 22920 | 185 | | | | | | | | |
| 1715 | 22921 | 263 | CPJ76845.1 | 17565 | 22922 | 185 | | | | | | | | |
| 1716 | 22923 | 263 | CPJ85529.1 | 17567 | 22924 | 185 | | | | | | | | |
| 1717 | 22925 | 263 | CPH77120.1 | 17569 | 22926 | 185 | | | | | | | | |
| 1718 | 22927 | 273 | CPJ25350.1 | 17571 | 22928 | 185 | | | | | | | | |
| 1719 | 22929 | 273 | CPR02274.1 | 17573 | 22930 | 185 | | | | | | | | |
| 1720 | 22931 | 273 | CPJ69705.1 | 17575 | 22932 | 185 | | | | | | | | |
| 1721 | 22933 | 273 | CPK70888.1 | 17577 | 22934 | 185 | | | | | | | | |
| 1722 | 22935 | 263 | CPQ22962.1 | 17579 | 22936 | 185 | | | | | | | | |
| 1723 | 22937 | 263 | CPN03567.1 | 17581 | 22938 | 185 | | | | | | | | |
| 1724 | 22939 | 263 | CPH78867.1 | 17583 | 22940 | 185 | | | | | | | | |
| 1725 | 22941 | 273 | CPI57666.1 | 17585 | 22942 | 185 | | | | | | | | |
| 1726 | 22943 | 263 | CPN26725.1 | 17587 | 22944 | 185 | | | | | | | | |
| 1727 | 22945 | 273 | CPK20278.1 | 17589 | 22946 | 185 | | | | | | | | |
| 1728 | 22947 | 273 | CPM33040.1 | 17591 | 22948 | 185 | | | | | | | | |
| 1729 | 22949 | 263 | CPN87647.1 | 17593 | 22950 | 185 | | | | | | | | |
| 1730 | 22951 | 263 | CPQ68085.1 | 17595 | 22952 | 185 | | | | | | | | |
| 1731 | 22953 | 273 | CPM53745.1 | 17597 | 22954 | 185 | | | | | | | | |
| 1732 | 22955 | 273 | CPM10536.1 | 17599 | 22956 | 185 | | | | | | | | |
| 1733 | 22957 | 273 | CPP09107.1 | 17601 | 22958 | 185 | | | | | | | | |
| 1734 | 22959 | 263 | CPL40913.1 | 17603 | 22960 | 185 | | | | | | | | |
| 1735 | 22961 | 263 | CPN14465.1 | 17605 | 22962 | 185 | | | | | | | | |
| 1736 | 22963 | 263 | CPK90364.1 | 17607 | 22964 | 185 | | | | | | | | |
| 1737 | 22965 | 273 | CPP68466.1 | 17609 | 22966 | 185 | | | | | | | | |
| 1738 | 22967 | 273 | CPP97961.1 | 17611 | 22968 | 185 | | | | | | | | |
| 1739 | 22969 | 273 | CPN87403.1 | 17613 | 22970 | 185 | | | | | | | | |
| 1740 | 22971 | 263 | CPR00114.1 | 17615 | 22972 | 185 | | | | | | | | |
| 1741 | 22973 | 273 | CPH39487.1 | 17617 | 22974 | 185 | | | | | | | | |
| 1742 | 22975 | 263 | CPG82791.1 | 17619 | 22976 | 185 | | | | | | | | |
| 1743 | 22977 | 263 | CPM46639.1 | 17621 | 22978 | 185 | | | | | | | | |
| 1744 | 22979 | 273 | CPG38295.1 | 17623 | 22980 | 185 | | | | | | | | |
| 1745 | 22981 | 273 | CPH00861.1 | 17625 | 22982 | 185 | | | | | | | | |
| 1746 | 22983 | 273 | CPH41999.1 | 17627 | 22984 | 185 | | | | | | | | |
| 1747 | 22985 | 265 | ALB92816.1 | 17629 | 22986 | 185 | | | | | | | | |
| 1748 | 22987 | 265 | ALB98878.1 | 17631 | 22988 | 185 | | | | | | | | |
| 1749 | 22989 | 265 | ALC58208.1 | 17633 | 22990 | 185 | | | | | | | | |
| 1750 | 22991 | 273 | CFT55150.1 | 17635 | 22992 | 185 | | | | | | | | |
| 1751 | 22993 | 273 | CPQ86657.1 | 17637 | 22994 | 185 | | | | | | | | |
| 1752 | 22995 | 263 | CFP14334.1 | 17639 | 22996 | 185 | | | | | | | | |
| 1753 | 22997 | 273 | CFU67051.1 | 17641 | 22998 | 185 | | | | | | | | |
| 1754 | 22999 | 263 | CFM98894.1 | 17643 | 23000 | 185 | | | | | | | | |
| 1755 | 23001 | 263 | CFM81861.1 | 17645 | 23002 | 185 | | | | | | | | |
| 1756 | 23003 | 273 | CPM85694.1 | 17647 | 23004 | 185 | | | | | | | | |
| 1757 | 23005 | 263 | CPL97321.1 | 17649 | 23006 | 185 | | | | | | | | |
| 1758 | 23007 | 273 | CFO92223.1 | 17651 | 23008 | 185 | | | | | | | | |
| 1759 | 23009 | 263 | CFN19257.1 | 17653 | 23010 | 185 | | | | | | | | |
| 1760 | 23011 | 263 | CPL11614.1 | 17655 | 23012 | 185 | | | | | | | | |
| 1761 | 23013 | 273 | CPN25033.1 | 17657 | 23014 | 185 | | | | | | | | |
| 1762 | 23015 | 263 | CPO46711.1 | 17659 | 23016 | 185 | | | | | | | | |
| 1763 | 23017 | 263 | CFL99477.1 | 17661 | 23018 | 185 | | | | | | | | |
| 1764 | 23019 | 263 | CPO89917.1 | 17663 | 23020 | 185 | | | | | | | | |
| 1765 | 23021 | 263 | CFW49157.1 | 17665 | 23022 | 185 | | | | | | | | |
| 1766 | 23023 | 273 | CFM22758.1 | 17667 | 23024 | 185 | | | | | | | | |
| 1767 | 23025 | 273 | CPK84381.1 | 17669 | 23026 | 185 | | | | | | | | |
| 1768 | 23027 | 263 | CFO79489.1 | 17671 | 23028 | 185 | | | | | | | | |
| 1769 | 23029 | 273 | CFU75865.1 | 17673 | 23030 | 185 | | | | | | | | |
| 1770 | 23031 | 273 | CFU18825.1 | 17675 | 23032 | 185 | | | | | | | | |
| 1771 | 23033 | 273 | CFM67596.1 | 17677 | 23034 | 185 | | | | | | | | |
| 1772 | 23035 | 273 | CFW79172.1 | 17679 | 23036 | 185 | | | | | | | | |
| 1773 | 23037 | 263 | CFO54183.1 | 17681 | 23038 | 185 | | | | | | | | |
| 1774 | 23039 | 263 | CFN47252.1 | 17683 | 23040 | 185 | | | | | | | | |
| 1775 | 23041 | 273 | CFU32913.1 | 17685 | 23042 | 185 | | | | | | | | |
| 1776 | 23043 | 263 | CFP26211.1 | 17687 | 23044 | 185 | | | | | | | | |
| 1777 | 23045 | 263 | CPP85412.1 | 17689 | 23046 | 185 | | | | | | | | |
| 1778 | 23047 | 273 | CFM37247.1 | 17691 | 23048 | 185 | | | | | | | | |
| 1779 | 23049 | 273 | CPQ63792.1 | 17693 | 23050 | 185 | | | | | | | | |
| 1780 | 23051 | 263 | CFO10821.1 | 17695 | 23052 | 185 | | | | | | | | |
| 1781 | 23053 | 273 | CPL75805.1 | 17697 | 23054 | 185 | | | | | | | | |
| 1782 | 23055 | 273 | CFM72559.1 | 17699 | 23056 | 185 | | | | | | | | |
| 1783 | 23057 | 273 | CPK97857.1 | 17701 | 23058 | 185 | | | | | | | | |
| 1784 | 23059 | 263 | CPN81591.1 | 17703 | 23060 | 185 | | | | | | | | |
| 1785 | 23061 | 273 | CFW09150.1 | 17705 | 23062 | 185 | | | | | | | | |
| 1786 | 23063 | 263 | CFU54704.1 | 17707 | 23064 | 185 | | | | | | | | |
| 1787 | 23065 | 263 | CFK50093.1 | 17709 | 23066 | 185 | | | | | | | | |
| 1788 | 23067 | 273 | CPG83454.1 | 17711 | 23068 | 185 | | | | | | | | |
| 1789 | 23069 | 273 | CFT72111.1 | 17713 | 23070 | 185 | | | | | | | | |
| 1790 | 23071 | 273 | CFL13096.1 | 17715 | 23072 | 185 | | | | | | | | |
| 1791 | 23073 | 273 | CFL88482.1 | 17717 | 23074 | 185 | | | | | | | | |
| 1792 | 23075 | 263 | CPE71771.1 | 17719 | 23076 | 185 | | | | | | | | |
| 1793 | 23077 | 273 | CFT96164.1 | 17721 | 23078 | 185 | | | | | | | | |
| 1794 | 23079 | 273 | CFT85443.1 | 17723 | 23080 | 185 | | | | | | | | |
| 1795 | 23081 | 263 | CFL56340.1 | 17725 | 23082 | 185 | | | | | | | | |
| 1796 | 23083 | 263 | CPI51266.1 | 17727 | 23084 | 185 | | | | | | | | |
| 1797 | 23085 | 249 | ESG20658.1 | 17729 | 23086 | 295 | | | | | | | | |
| 1798 | 23087 | 278 | AJQ64507.1 | 17731 | 23088 | 303 | | | | | | | | |
| 1799 | 23089 | 278 | AJZ80319.1 | 17733 | 23090 | 303 | | | | | | | | |
| 1800 | 23091 | 234 | CPW02870.1 | 17735 | 23092 | 170 | | | | | | | | |
| 1801 | 23093 | 279 | GAC48718.1 | 17737 | 23094 | 171 | | | | | | | | |
| 1802 | 23095 | 258 | ABM10182.1 | 17739 | 23096 | 169 | | | | | | | | |
| 1803 | 23097 | 285 | ERN46352.1 | 17741 | 23098 | 169 | | | | | | | | |
| 1804 | 23099 | 230 | KTD01947.1 | 17743 | 23100 | 185 | | | | | | | | |
| 1805 | 23101 | 297 | CCV65563.1 | 17745 | 23102 | 162 | | | | | | | | |
| 1806 | 23103 | 278 | KMK02864.1 | 17747 | 23104 | 169 | | | | | | | | |
| 1807 | 23105 | 276 | AHJ12535.1 | 17749 | 23106 | 183 | | | | | | | | |
| 1808 | 23107 | 281 | KUL42777.1 | 17751 | 23108 | 424 | | | | | | | | |
| 1809 | 23109 | 275 | EID21941.1 | 17753 | 23110 | 166 | | | | | | | | |
| 1810 | 23111 | 275 | GAD37766.1 | 17755 | 23112 | 166 | | | | | | | | |
| 1811 | 23113 | 279 | KRK83039.1 | 17757 | 23114 | 165 | | | | | | | | |
| 1812 | 23115 | 279 | EFV85441.1 | 17759 | 23116 | 186 | | | | | | | | |
| 1813 | 23117 | 273 | EMZ26177.1 | 17761 | 23118 | 202 | | | | | | | | |
| 1814 | 23119 | 290 | EKX62814.1 | 17763 | 23120 | 410 | | | | | | | | |
| 1815 | 23121 | 293 | ABR64201.1 | 17765 | 23122 | 166 | | | | | | | | |
| 1816 | 23123 | 292 | KND18806.1 | 17767 | 23124 | 166 | | | | | | | | |
| 1817 | 23125 | 285 | ADG41467.1 | 17769 | 23126 | 166 | | | | | | | | |
| 1818 | 23127 | 290 | EEA91363.1 | 17771 | 23128 | 168 | | | | | | | | |
| 1819 | 23129 | 284 | EHI61154.1 | 17773 | 23130 | 331 | | | | | | | | |
| 1820 | 23131 | 281 | EFF62518.1 | 17775 | 23132 | 181 | | | | | | | | |
| 1821 | 23133 | 276 | ALS25373.1 | 17777 | 23134 | 184 | | | | | | | | |
| 1822 | 23135 | 275 | KGM37270.1 | 17779 | 23136 | 166 | | | | | | | | |
| 1823 | 23137 | 293 | EWG70340.1 | 17781 | 23138 | 167 | | | | | | | | |
| 1824 | 23139 | 309 | AKP49794.1 | 17783 | 23140 | 167 | | | | | | | | |
| 1825 | 23141 | 207 | KJV29336.1 | 17785 | 23142 | 186 | | | | | | | | |
| 1826 | 23143 | 253 | EIL89964.1 | 17787 | 23144 | 125 | | | | | | | | |
| 1827 | 23145 | 291 | KFF05552.1 | 17789 | 23146 | 166 | | | | | | | | |
| 1828 | 23147 | 306 | CTQ72907.1 | 17791 | 23148 | 169 | | | | | | | | |
| 1829 | 23149 | 280 | KRU21992.1 | 17793 | 23150 | 188 | | | | | | | | |
| 1830 | 23151 | 284 | KJL32260.1 | 17795 | 23152 | 169 | | | | | | | | |
| 1831 | 23153 | 276 | EHS54841.1 | 17797 | 23154 | 183 | | | | | | | | |
| 1832 | 23155 | 291 | EJL63881.1 | 17799 | 23156 | 166 | | | | | | | | |
| 1833 | 23157 | 278 | EJL84706.1 | 17801 | 23158 | 166 | | | | | | | | |
| 1834 | 23159 | 309 | EID73850.1 | 17803 | 23160 | 167 | | | | | | | | |
| 1835 | 23161 | 280 | KWF17575.1 | 17805 | 23162 | 185 | | | | | | | | |
| 1836 | 23163 | 285 | ERI96810.1 | 17807 | 23164 | 215 | | | | | | | | |
| 1837 | 23165 | 319 | EOS38322.1 | 17809 | 23166 | 166 | | | | | | | | |
| 1838 | 23167 | 285 | EOS41469.1 | 17811 | 23168 | 202 | | | | | | | | |
| 1839 | 23169 | 271 | CDF26097.1 | 17813 | 23170 | 203 | | | | | | | | |
| 1840 | 23171 | 317 | KGN67553.1 | 17815 | 23172 | 170 | | | | | | | | |
| 1841 | 23173 | 277 | KUK53686.1 | 17817 | 23174 | 170 | | | | | | | | |
| 1842 | 23175 | 293 | KKO89197.1 | 17819 | 23176 | 183 | | | | | | | | |
| 1843 | 23177 | 278 | KNC08319.1 | 17821 | 23178 | 166 | | | | | | | | |
| 1844 | 23179 | 209 | KQN47926.1 | 17823 | 23180 | 188 | | | | | | | | |
| 1845 | 23181 | 276 | KKH38513.1 | 17825 | 23182 | 193 | | | | | | | | |
| 1846 | 23183 | 276 | KKH53103.1 | 17827 | 23184 | 193 | | | | | | | | |
| 1847 | 23185 | 276 | KKH68856.1 | 17829 | 23186 | 193 | | | | | | | | |
| 1848 | 23187 | 276 | KKH71867.1 | 17831 | 23188 | 193 | | | | | | | | |
| 1849 | 23189 | 276 | KKH80639.1 | 17833 | 23190 | 193 | | | | | | | | |
| 1850 | 23191 | 276 | KKF98497.1 | 17835 | 23192 | 193 | | | | | | | | |
| 1851 | 23193 | 276 | KKH51285.1 | 17837 | 23194 | 193 | | | | | | | | |
| 1852 | 23195 | 276 | KKH64072.1 | 17839 | 23196 | 193 | | | | | | | | |
| 1853 | 23197 | 276 | KKH76319.1 | 17841 | 23198 | 193 | | | | | | | | |
| 1854 | 23199 | 276 | KKH88480.1 | 17843 | 23200 | 193 | | | | | | | | |
| 1855 | 23201 | 276 | KKH75120.1 | 17845 | 23202 | 193 | | | | | | | | |
| 1856 | 23203 | 276 | KKH91068.1 | 17847 | 23204 | 193 | | | | | | | | |
| 1857 | 23205 | 276 | KKI00019.1 | 17849 | 23206 | 193 | | | | | | | | |
| 1858 | 23207 | 276 | KKI06937.1 | 17851 | 23208 | 193 | | | | | | | | |
| 1859 | 23209 | 276 | KKI04816.1 | 17853 | 23210 | 193 | | | | | | | | |
| 1860 | 23211 | 255 | ERH59125.1 | 17855 | 23212 | 190 | | | | | | | | |
| 1861 | 23213 | 279 | ADG31356.1 | 17857 | 23214 | 187 | ADG31358.1 | 17858 | 23215 | 186 | | | | |
| 1862 | 23216 | 273 | AKV63927.1 | 17860 | 23217 | 188 | AKV63929.1 | 17861 | 23218 | 231 | | | | |
| 1863 | 23219 | 281 | CDB59853.1 | 17863 | 23220 | 187 | CDB59854.1 | 17864 | 23221 | 170 | | | | |
| 1864 | 23222 | 297 | EDO56708.1 | 17866 | 23223 | 81 | EDO56706.1 | 17867 | 23224 | 184 | | | | |
| 1865 | 23225 | 271 | KGN82594.1 | 17869 | 23226 | 187 | KGN82592.1 | 17870 | 23227 | 224 | | | | |
| 1866 | 23228 | 277 | AKR49339.1 | 17872 | 23229 | 183 | AKR49342.1 | 17873 | 23230 | 169 | | | | |
| 1867 | 23231 | 292 | ESS57196.1 | 17875 | 23232 | 304 | ESS57523.1 | 17876 | 23233 | 183 | | | | |
| 1868 | 23234 | 278 | AAN80857.1 | 17878 | 23235 | 307 | AAN80858.1 | 17879 | 23236 | 169 | | | | |
| 1869 | 23237 | 278 | EFJ93883.1 | 17881 | 23238 | 307 | EFJ93882.1 | 17882 | 23239 | 169 | | | | |
| 1870 | 23240 | 278 | EFU46135.1 | 17884 | 23241 | 307 | EFU46134.1 | 17885 | 23242 | 169 | | | | |
| 1871 | 23243 | 278 | EFU49593.1 | 17887 | 23244 | 307 | EFU49594.1 | 17888 | 23245 | 169 | | | | |
| 1872 | 23246 | 278 | EFJ59504.1 | 17890 | 23247 | 307 | EFJ59503.1 | 17891 | 23248 | 169 | | | | |
| 1873 | 23249 | 278 | EGB82663.1 | 17893 | 23250 | 307 | EGB82664.1 | 17894 | 23251 | 169 | | | | |
| 1874 | 23252 | 278 | EFM52808.1 | 17896 | 23253 | 307 | EFM52807.1 | 17897 | 23254 | 169 | | | | |
| 1875 | 23255 | 278 | EGB52116.1 | 17899 | 23256 | 287 | EGB52117.1 | 17900 | 23257 | 169 | | | | |
| 1876 | 23258 | 278 | AER84778.1 | 17902 | 23259 | 307 | AER84779.1 | 17903 | 23260 | 169 | | | | |
| 1877 | 23261 | 278 | AER89697.1 | 17905 | 23262 | 307 | AER89698.1 | 17906 | 23263 | 169 | | | | |
| 1878 | 23264 | 278 | EHO02521.1 | 17908 | 23265 | 307 | EHO02520.1 | 17909 | 23266 | 169 | | | | |
| 1879 | 23267 | 278 | ELL42846.1 | 17911 | 23268 | 287 | ELL42847.1 | 17912 | 23269 | 169 | | | | |
| 1880 | 23270 | 278 | ELI13534.1 | 17914 | 23271 | 307 | ELI13535.1 | 17915 | 23272 | 169 | | | | |
| 1881 | 23273 | 278 | ELI43904.1 | 17917 | 23274 | 307 | ELI43905.1 | 17918 | 23275 | 169 | | | | |
| 1882 | 23276 | 278 | ELI67624.1 | 17920 | 23277 | 307 | ELI67625.1 | 17921 | 23278 | 169 | | | | |
| 1883 | 23279 | 278 | ELI72587.1 | 17923 | 23280 | 307 | ELI72588.1 | 17924 | 23281 | 169 | | | | |
| 1884 | 23282 | 278 | ELI75958.1 | 17926 | 23283 | 307 | ELI75959.1 | 17927 | 23284 | 169 | | | | |
| 1885 | 23285 | 278 | ELJ03559.1 | 17929 | 23286 | 307 | ELJ03560.1 | 17930 | 23287 | 169 | | | | |
| 1886 | 23288 | 278 | ELJ14332.1 | 17932 | 23289 | 307 | ELJ14333.1 | 17933 | 23290 | 169 | | | | |
| 1887 | 23291 | 278 | ELJ38403.1 | 17935 | 23292 | 307 | ELJ38404.1 | 17936 | 23293 | 169 | | | | |
| 1888 | 23294 | 278 | ELJ71311.1 | 17938 | 23295 | 307 | ELJ71312.1 | 17939 | 23296 | 169 | | | | |
| 1889 | 23297 | 278 | ELI89430.1 | 17941 | 23298 | 307 | ELI89431.1 | 17942 | 23299 | 169 | | | | |
| 1890 | 23300 | 278 | ELJ28708.1 | 17944 | 23301 | 307 | ELJ28709.1 | 17945 | 23302 | 169 | | | | |
| 1891 | 23303 | 278 | ELC30029.1 | 17947 | 23304 | 307 | ELC30030.1 | 17948 | 23305 | 169 | | | | |
| 1892 | 23306 | 278 | ELC84582.1 | 17950 | 23307 | 307 | ELC84583.1 | 17951 | 23308 | 169 | | | | |
| 1893 | 23309 | 278 | ELC89742.1 | 17953 | 23310 | 307 | ELC89743.1 | 17954 | 23311 | 169 | | | | |
| 1894 | 23312 | 278 | ELC99566.1 | 17956 | 23313 | 307 | ELC99567.1 | 17957 | 23314 | 169 | | | | |
| 1895 | 23315 | 278 | ELD14725.1 | 17959 | 23316 | 307 | ELD14726.1 | 17960 | 23317 | 169 | | | | |
| 1896 | 23318 | 278 | ELD50498.1 | 17962 | 23319 | 307 | ELD50499.1 | 17963 | 23320 | 169 | | | | |
| 1897 | 23321 | 278 | ELE05783.1 | 17965 | 23322 | 307 | ELE05784.1 | 17966 | 23323 | 169 | | | | |
| 1898 | 23324 | 278 | ELE19655.1 | 17968 | 23325 | 307 | ELE19656.1 | 17969 | 23326 | 169 | | | | |
| 1899 | 23327 | 278 | ELE23558.1 | 17971 | 23328 | 307 | ELE23559.1 | 17972 | 23329 | 169 | | | | |
| 1900 | 23330 | 278 | ELE50399.1 | 17974 | 23331 | 307 | ELE50400.1 | 17975 | 23332 | 169 | | | | |
| 1901 | 23333 | 278 | ELE80390.1 | 17977 | 23334 | 307 | ELE80391.1 | 17978 | 23335 | 169 | | | | |
| 1902 | 23336 | 278 | ELE90660.1 | 17980 | 23337 | 307 | ELE90661.1 | 17981 | 23338 | 169 | | | | |
| 1903 | 23339 | 278 | ELE91476.1 | 17983 | 23340 | 307 | ELE91477.1 | 17984 | 23341 | 169 | | | | |
| 1904 | 23342 | 278 | ELF50403.1 | 17986 | 23343 | 307 | ELF50404.1 | 17987 | 23344 | 169 | | | | |
| 1905 | 23345 | 278 | ELF92088.1 | 17989 | 23346 | 307 | ELF92089.1 | 17990 | 23347 | 169 | | | | |
| 1906 | 23348 | 278 | ELG14336.1 | 17992 | 23349 | 307 | ELG14337.1 | 17993 | 23350 | 169 | | | | |
| 1907 | 23351 | 278 | ELG17001.1 | 17995 | 23352 | 307 | ELG17002.1 | 17996 | 23353 | 169 | | | | |
| 1908 | 23354 | 278 | ELG24589.1 | 17998 | 23355 | 307 | ELG24590.1 | 17999 | 23356 | 169 | | | | |
| 1909 | 23357 | 278 | ELG54536.1 | 18001 | 23358 | 307 | ELG54537.1 | 18002 | 23359 | 169 | | | | |
| 1910 | 23360 | 278 | ELG58276.1 | 18004 | 23361 | 307 | ELG58277.1 | 18005 | 23362 | 169 | | | | |
| 1911 | 23363 | 278 | ELH44354.1 | 18007 | 23364 | 307 | ELH44355.1 | 18008 | 23365 | 169 | | | | |
| 1912 | 23366 | 278 | ELH62527.1 | 18010 | 23367 | 307 | ELH62528.1 | 18011 | 23368 | 169 | | | | |
| 1913 | 23369 | 278 | ELH59266.1 | 18013 | 23370 | 307 | ELH59267.1 | 18014 | 23371 | 169 | | | | |
| 1914 | 23372 | 278 | ELH80075.1 | 18016 | 23373 | 307 | ELH80076.1 | 18017 | 23374 | 169 | | | | |
| 1915 | 23375 | 278 | ELH85628.1 | 18019 | 23376 | 307 | ELH85629.1 | 18020 | 23377 | 169 | | | | |
| 1916 | 23378 | 278 | ELH88469.1 | 18022 | 23379 | 307 | ELH88470.1 | 18023 | 23380 | 169 | | | | |
| 1917 | 23381 | 278 | ELI08745.1 | 18025 | 23382 | 307 | ELI08746.1 | 18026 | 23383 | 169 | | | | |
| 1918 | 23384 | 278 | EOR52538.1 | 18028 | 23385 | 307 | EOR52539.1 | 18029 | 23386 | 169 | | | | |
| 1919 | 23387 | 278 | EOV07666.1 | 18031 | 23388 | 307 | EOV07667.1 | 18032 | 23389 | 169 | | | | |
| 1920 | 23390 | 278 | EOX10650.1 | 18034 | 23391 | 307 | EOX10651.1 | 18035 | 23392 | 169 | | | | |
| 1921 | 23393 | 278 | EOV94184.1 | 18037 | 23394 | 307 | EOV94185.1 | 18038 | 23395 | 169 | | | | |
| 1922 | 23396 | 278 | EQN11055.1 | 18040 | 23397 | 307 | EQN11054.1 | 18041 | 23398 | 169 | | | | |
| 1923 | 23399 | 278 | EQN19683.1 | 18043 | 23400 | 307 | EQN19684.1 | 18044 | 23401 | 169 | | | | |
| 1924 | 23402 | 278 | EQN35017.1 | 18046 | 23403 | 307 | EQN35018.1 | 18047 | 23404 | 140 | | | | |
| 1925 | 23405 | 278 | EQN48987.1 | 18049 | 23406 | 307 | EQN48988.1 | 18050 | 23407 | 169 | | | | |
| 1926 | 23408 | 278 | EQN62514.1 | 18052 | 23409 | 307 | EQN62515.1 | 18053 | 23410 | 169 | | | | |
| 1927 | 23411 | 278 | EQN79329.1 | 18055 | 23412 | 307 | EQN79330.1 | 18056 | 23413 | 169 | | | | |
| 1928 | 23414 | 278 | EQN86133.1 | 18058 | 23415 | 307 | EQN86134.1 | 18059 | 23416 | 169 | | | | |
| 1929 | 23417 | 278 | EQN96593.1 | 18061 | 23418 | 307 | EQN96594.1 | 18062 | 23419 | 169 | | | | |
| 1930 | 23420 | 278 | EQO12275.1 | 18064 | 23421 | 307 | EQO12274.1 | 18065 | 23422 | 169 | | | | |
| 1931 | 23423 | 278 | EQO16636.1 | 18067 | 23424 | 307 | EQO16637.1 | 18068 | 23425 | 169 | | | | |
| 1932 | 23426 | 278 | EQO18513.1 | 18070 | 23427 | 307 | EQO18514.1 | 18071 | 23428 | 169 | | | | |
| 1933 | 23429 | 278 | EQO32109.1 | 18073 | 23430 | 307 | EQO32110.1 | 18074 | 23431 | 169 | | | | |
| 1934 | 23432 | 278 | EQO40645.1 | 18076 | 23433 | 307 | EQO40646.1 | 18077 | 23434 | 169 | | | | |
| 1935 | 23435 | 278 | EQO47385.1 | 18079 | 23436 | 307 | EQO47386.1 | 18080 | 23437 | 169 | | | | |
| 1936 | 23438 | 278 | EQO84678.1 | 18082 | 23439 | 307 | EQO84679.1 | 18083 | 23440 | 169 | | | | |
| 1937 | 23441 | 278 | EQO93034.1 | 18085 | 23442 | 307 | EQO93035.1 | 18086 | 23443 | 169 | | | | |
| 1938 | 23444 | 278 | EQO00511.1 | 18088 | 23445 | 307 | EQP00512.1 | 18089 | 23446 | 169 | | | | |
| 1939 | 23447 | 278 | EQP09248.1 | 18091 | 23448 | 307 | EQP09249.1 | 18092 | 23449 | 169 | | | | |
| 1940 | 23450 | 278 | EQP11536.1 | 18094 | 23451 | 307 | EQP11537.1 | 18095 | 23452 | 169 | | | | |
| 1941 | 23453 | 278 | EQP21161.1 | 18097 | 23454 | 307 | EQP21162.1 | 18098 | 23455 | 169 | | | | |
| 1942 | 23456 | 278 | EQP38128.1 | 18100 | 23457 | 307 | EQP38129.1 | 18101 | 23458 | 169 | | | | |
| 1943 | 23459 | 278 | EQP55411.1 | 18103 | 23460 | 307 | EQP55412.1 | 18104 | 23461 | 169 | | | | |
| 1944 | 23462 | 278 | EQP53331.1 | 18106 | 23463 | 307 | EQP53332.1 | 18107 | 23464 | 169 | | | | |
| 1945 | 23465 | 278 | EQP61512.1 | 18109 | 23466 | 307 | EQP61513.1 | 18110 | 23467 | 169 | | | | |
| 1946 | 23468 | 278 | EQP73528.1 | 18112 | 23469 | 307 | EQP73529.1 | 18113 | 23470 | 169 | | | | |
| 1947 | 23471 | 278 | EQP70427.1 | 18115 | 23472 | 307 | EQP70428.1 | 18116 | 23473 | 169 | | | | |
| 1948 | 23474 | 278 | EQQ06478.1 | 18118 | 23475 | 307 | EQQ06479.1 | 18119 | 23476 | 169 | | | | |
| 1949 | 23477 | 278 | EQQ25250.1 | 18121 | 23478 | 307 | EQQ25251.1 | 18122 | 23479 | 169 | | | | |
| 1950 | 23480 | 278 | EQQ27931.1 | 18124 | 23481 | 307 | EQQ27932.1 | 18125 | 23482 | 169 | | | | |
| 1951 | 23483 | 278 | EQQ41430.1 | 18127 | 23484 | 307 | EQQ41431.1 | 18128 | 23485 | 169 | | | | |
| 1952 | 23486 | 278 | EQQ33645.1 | 18130 | 23487 | 307 | EQQ33646.1 | 18131 | 23488 | 169 | | | | |
| 1953 | 23489 | 278 | EQQ53132.1 | 18133 | 23490 | 307 | EQQ53133.1 | 18134 | 23491 | 169 | | | | |
| 1954 | 23492 | 278 | EQQ74420.1 | 18136 | 23493 | 307 | EQQ74421.1 | 18137 | 23494 | 169 | | | | |
| 1955 | 23495 | 278 | EQQ75979.1 | 18139 | 23496 | 307 | EQQ75980.1 | 18140 | 23497 | 169 | | | | |
| 1956 | 23498 | 278 | EQQ88666.1 | 18142 | 23499 | 307 | EQQ88667.1 | 18143 | 23500 | 169 | | | | |
| 1957 | 23501 | 278 | EQQ90543.1 | 18145 | 23502 | 307 | EQQ90544.1 | 18146 | 23503 | 169 | | | | |
| 1958 | 23504 | 278 | EQR07408.1 | 18148 | 23505 | 307 | EQR07409.1 | 18149 | 23506 | 169 | | | | |
| 1959 | 23507 | 278 | EQR15136.1 | 18151 | 23508 | 307 | EQR15137.1 | 18152 | 23509 | 169 | | | | |
| 1960 | 23510 | 278 | EQR19369.1 | 18154 | 23511 | 307 | EQR19370.1 | 18155 | 23512 | 169 | | | | |
| 1961 | 23513 | 278 | EQR28928.1 | 18157 | 23514 | 307 | EQR28929.1 | 18158 | 23515 | 169 | | | | |
| 1962 | 23516 | 278 | EQR67052.1 | 18160 | 23517 | 307 | EQR67053.1 | 18161 | 23518 | 169 | | | | |
| 1963 | 23519 | 278 | EQR88162.1 | 18163 | 23520 | 307 | EQR88163.1 | 18164 | 23521 | 169 | | | | |
| 1964 | 23522 | 278 | EQR94356.1 | 18166 | 23523 | 307 | EQR94357.1 | 18167 | 23524 | 169 | | | | |
| 1965 | 23525 | 278 | EQS19448.1 | 18169 | 23526 | 307 | EQS19449.1 | 18170 | 23527 | 169 | | | | |
| 1966 | 23528 | 278 | EQS13122.1 | 18172 | 23529 | 307 | EQS13123.1 | 18173 | 23530 | 169 | | | | |
| 1967 | 23531 | 278 | EQS20957.1 | 18175 | 23532 | 307 | EQS20958.1 | 18176 | 23533 | 169 | | | | |
| 1968 | 23534 | 278 | EQS40212.1 | 18178 | 23535 | 307 | EQS40213.1 | 18179 | 23536 | 169 | | | | |
| 1969 | 23537 | 278 | ERA74999.1 | 18181 | 23538 | 307 | ERA75000.1 | 18182 | 23539 | 169 | | | | |
| 1970 | 23540 | 278 | EQS62806.1 | 18184 | 23541 | 307 | EQS62807.1 | 18185 | 23542 | 169 | | | | |
| 1971 | 23543 | 278 | ERA80455.1 | 18187 | 23544 | 307 | ERA80456.1 | 18188 | 23545 | 169 | | | | |
| 1972 | 23546 | 278 | ERA86691.1 | 18190 | 23547 | 307 | ERA86692.1 | 18191 | 23548 | 169 | | | | |
| 1973 | 23549 | 278 | EQS67054.1 | 18193 | 23550 | 307 | EQS67055.1 | 18194 | 23551 | 169 | | | | |
| 1974 | 23552 | 278 | EQS96895.1 | 18196 | 23553 | 307 | EQS96896.1 | 18197 | 23554 | 169 | | | | |
| 1975 | 23555 | 278 | EQT00424.1 | 18199 | 23556 | 307 | EQT00425.1 | 18200 | 23557 | 169 | | | | |
| 1976 | 23558 | 278 | EQT14972.1 | 18202 | 23559 | 307 | EQT14973.1 | 18203 | 23560 | 169 | | | | |
| 1977 | 23561 | 278 | EQT25529.1 | 18205 | 23562 | 307 | EQT25530.1 | 18206 | 23563 | 169 | | | | |
| 1978 | 23564 | 278 | EQT45490.1 | 18208 | 23565 | 307 | EQT45491.1 | 18209 | 23566 | 169 | | | | |
| 1979 | 23567 | 278 | EQT50679.1 | 18211 | 23568 | 307 | EQT50680.1 | 18212 | 23569 | 169 | | | | |
| 1980 | 23570 | 278 | EQT83219.1 | 18214 | 23571 | 307 | EQT83220.1 | 18215 | 23572 | 169 | | | | |
| 1981 | 23573 | 249 | EQT95716.1 | 18217 | 23574 | 307 | EQT95717.1 | 18218 | 23575 | 169 | | | | |
| 1982 | 23576 | 278 | EQU21867.1 | 18220 | 23577 | 307 | EQU21868.1 | 18221 | 23578 | 169 | | | | |
| 1983 | 23579 | 278 | EQU12096.1 | 18223 | 23580 | 307 | EQU12097.1 | 18224 | 23581 | 169 | | | | |
| 1984 | 23582 | 278 | ERA90776.1 | 18226 | 23583 | 307 | ERA90777.1 | 18227 | 23584 | 169 | | | | |
| 1985 | 23585 | 278 | EQU70204.1 | 18229 | 23586 | 307 | EQU70205.1 | 18230 | 23587 | 169 | | | | |
| 1986 | 23588 | 278 | EQU77944.1 | 18232 | 23589 | 307 | EQU77945.1 | 18233 | 23590 | 169 | | | | |
| 1987 | 23591 | 278 | EQU95024.1 | 18235 | 23592 | 307 | EQU95025.1 | 18236 | 23593 | 169 | | | | |
| 1988 | 23594 | 278 | EQV01573.1 | 18238 | 23595 | 307 | EQV01574.1 | 18239 | 23596 | 169 | | | | |
| 1989 | 23597 | 278 | EQV09454.1 | 18241 | 23598 | 307 | EQV09455.1 | 18242 | 23599 | 169 | | | | |
| 1990 | 23600 | 278 | EQV27902.1 | 18244 | 23601 | 307 | EQV27903.1 | 18245 | 23602 | 169 | | | | |
| 1991 | 23603 | 278 | ERA94626.1 | 18247 | 23604 | 307 | ERA94627.1 | 18248 | 23605 | 169 | | | | |
| 1992 | 23606 | 278 | ERB07222.1 | 18250 | 23607 | 307 | ERB07223.1 | 18251 | 23608 | 169 | | | | |
| 1993 | 23609 | 278 | EQV33720.1 | 18253 | 23610 | 307 | EQV33721.1 | 18254 | 23611 | 169 | | | | |
| 1994 | 23612 | 278 | EQV70970.1 | 18256 | 23613 | 307 | EQV70971.1 | 18257 | 23614 | 169 | | | | |
| 1995 | 23615 | 278 | EQV84932.1 | 18259 | 23616 | 307 | EQV84933.1 | 18260 | 23617 | 169 | | | | |
| 1996 | 23618 | 278 | EQW43213.1 | 18262 | 23619 | 307 | EQW43214.1 | 18263 | 23620 | 169 | | | | |
| 1997 | 23621 | 278 | EQW70391.1 | 18265 | 23622 | 307 | EQW70392.1 | 18266 | 23623 | 169 | | | | |
| 1998 | 23624 | 278 | EQW80281.1 | 18268 | 23625 | 307 | EQW80282.1 | 18269 | 23626 | 169 | | | | |
| 1999 | 23627 | 278 | EQW87484.1 | 18271 | 23628 | 307 | EQW87485.1 | 18272 | 23629 | 169 | | | | |
| 2000 | 23630 | 278 | EQX12314.1 | 18274 | 23631 | 307 | EQX12315.1 | 18275 | 23632 | 169 | | | | |
| 2001 | 23633 | 278 | EQX35783.1 | 18277 | 23634 | 307 | EQX35784.1 | 18278 | 23635 | 169 | | | | |
| 2002 | 23636 | 278 | EQX43606.1 | 18280 | 23637 | 307 | EQX43607.1 | 18281 | 23638 | 169 | | | | |
| 2003 | 23639 | 278 | EQX66167.1 | 18283 | 23640 | 307 | EQX66168.1 | 18284 | 23641 | 169 | | | | |
| 2004 | 23642 | 278 | EQX76185.1 | 18286 | 23643 | 307 | EQX76186.1 | 18287 | 23644 | 169 | | | | |
| 2005 | 23645 | 278 | EQY22297.1 | 18289 | 23646 | 307 | EQY22298.1 | 18290 | 23647 | 169 | | | | |
| 2006 | 23648 | 278 | EQY33194.1 | 18292 | 23649 | 307 | EQY33195.1 | 18293 | 23650 | 169 | | | | |
| 2007 | 23651 | 278 | EQY45030.1 | 18295 | 23652 | 307 | EQY45031.1 | 18296 | 23653 | 169 | | | | |
| 2008 | 23654 | 278 | EQY55712.1 | 18298 | 23655 | 307 | EQY55713.1 | 18299 | 23656 | 169 | | | | |
| 2009 | 23657 | 278 | EQY72169.1 | 18301 | 23658 | 307 | EQY72170.1 | 18302 | 23659 | 169 | | | | |
| 2010 | 23660 | 278 | EQZ19656.1 | 18304 | 23661 | 307 | EQZ19657.1 | 18305 | 23662 | 169 | | | | |
| 2011 | 23663 | 278 | EQZ26677.1 | 18307 | 23664 | 307 | EQZ26676.1 | 18308 | 23665 | 169 | | | | |
| 2012 | 23666 | 278 | EQZ41388.1 | 18310 | 23667 | 307 | EQZ41389.1 | 18311 | 23668 | 169 | | | | |
| 2013 | 23669 | 278 | EQZ91635.1 | 18313 | 23670 | 307 | EQZ91636.1 | 18314 | 23671 | 169 | | | | |
| 2014 | 23672 | 278 | ERA32821.1 | 18316 | 23673 | 307 | ERA32822.1 | 18317 | 23674 | 169 | | | | |
| 2015 | 23675 | 278 | ERA36346.1 | 18319 | 23676 | 307 | ERA36347.1 | 18320 | 23677 | 169 | | | | |
| 2016 | 23678 | 278 | ERF54132.1 | 18322 | 23679 | 307 | ERF54133.1 | 18323 | 23680 | 169 | | | | |
| 2017 | 23681 | 278 | ESK18130.1 | 18325 | 23682 | 307 | ESK18131.1 | 18326 | 23683 | 169 | | | | |
| 2018 | 23684 | 278 | ESK18552.1 | 18328 | 23685 | 307 | ESK18553.1 | 18329 | 23686 | 169 | | | | |
| 2019 | 23687 | 278 | ESK29584.1 | 18331 | 23688 | 307 | ESK29585.1 | 18332 | 23689 | 169 | | | | |
| 2020 | 23690 | 278 | ESC95629.1 | 18334 | 23691 | 307 | ESC95630.1 | 18335 | 23692 | 169 | | | | |
| 2021 | 23693 | 278 | ESD43647.1 | 18337 | 23694 | 81 | ESD43646.1 | 18338 | 23695 | 169 | | | | |
| 2022 | 23696 | 278 | ESE27408.1 | 18340 | 23697 | 307 | ESE27409.1 | 18341 | 23698 | 169 | | | | |
| 2023 | 23699 | 278 | ESE32329.1 | 18343 | 23700 | 307 | ESE32328.1 | 18344 | 23701 | 169 | | | | |
| 2024 | 23702 | 278 | ESE38126.1 | 18346 | 23703 | 307 | ESE38127.1 | 18347 | 23704 | 169 | | | | |
| 2025 | 23705 | 278 | ESP10884.1 | 18349 | 23706 | 307 | ESP10883.1 | 18350 | 23707 | 169 | | | | |
| 2026 | 23708 | 278 | ESP23169.1 | 18352 | 23709 | 307 | ESP23170.1 | 18353 | 23710 | 169 | | | | |
| 2027 | 23711 | 278 | ETE11167.1 | 18355 | 23712 | 307 | ETE11168.1 | 18356 | 23713 | 169 | | | | |
| 2028 | 23714 | 278 | ETF35982.1 | 18358 | 23715 | 307 | ETF35983.1 | 18359 | 23716 | 169 | | | | |
| 2029 | 23717 | 278 | EZQ63562.1 | 18361 | 23718 | 307 | EZQ63563.1 | 18362 | 23719 | 169 | | | | |
| 2030 | 23720 | 278 | KDG03092.1 | 18364 | 23721 | 307 | KDG03093.1 | 18365 | 23722 | 169 | | | | |
| 2031 | 23723 | 278 | KDO90446.1 | 18367 | 23724 | 307 | KDO90447.1 | 18368 | 23725 | 169 | | | | |
| 2032 | 23726 | 278 | AID79059.1 | 18370 | 23727 | 307 | AID79060.1 | 18371 | 23728 | 169 | | | | |
| 2033 | 23729 | 278 | AIL14919.1 | 18373 | 23730 | 307 | AIL14831.1 | 18374 | 23731 | 169 | | | | |
| 2034 | 23732 | 278 | KLX17103.1 | 18376 | 23733 | 307 | KLX17104.1 | 18377 | 23734 | 169 | | | | |
| 2035 | 23735 | 278 | KLX44350.1 | 18379 | 23736 | 307 | KLX44351.1 | 18380 | 23737 | 169 | | | | |
| 2036 | 23738 | 278 | KLX45651.1 | 18382 | 23739 | 307 | KLX45652.1 | 18383 | 23740 | 169 | | | | |
| 2037 | 23741 | 278 | ALD37596.1 | 18385 | 23742 | 287 | ALD34923.1 | 18386 | 23743 | 169 | | | | |
| 2038 | 23744 | 278 | KSY03096.1 | 18388 | 23745 | 287 | KSY02660.1 | 18389 | 23746 | 169 | | | | |
| 2039 | 23747 | 278 | KUR38293.1 | 18391 | 23748 | 287 | KUR38255.1 | 18392 | 23749 | 169 | | | | |
| 2040 | 23750 | 278 | KUR81992.1 | 18394 | 23751 | 287 | KUR81833.1 | 18395 | 23752 | 169 | | | | |
| 2041 | 23753 | 278 | KUR94139.1 | 18397 | 23754 | 287 | KUR94070.1 | 18398 | 23755 | 169 | | | | |
| 2042 | 23756 | 278 | KUR99652.1 | 18400 | 23757 | 287 | KUR99611.1 | 18401 | 23758 | 169 | | | | |
| 2043 | 23759 | 278 | KUS68975.1 | 18403 | 23760 | 287 | KUS68706.1 | 18404 | 23761 | 169 | | | | |
| 2044 | 23762 | 278 | KUS65771.1 | 18406 | 23763 | 287 | KUS65753.1 | 18407 | 23764 | 169 | | | | |
| 2045 | 23765 | 278 | KUS06605.1 | 18409 | 23766 | 287 | KUS06587.1 | 18410 | 23767 | 169 | | | | |
| 2046 | 23768 | 278 | KUW86276.1 | 18412 | 23769 | 287 | KUW86272.1 | 18413 | 23770 | 169 | | | | |
| 2047 | 23771 | 278 | KUT33564.1 | 18415 | 23772 | 287 | KUT33560.1 | 18416 | 23773 | 169 | | | | |
| 2048 | 23774 | 278 | KUV71943.1 | 18418 | 23775 | 287 | KUV71917.1 | 18419 | 23776 | 169 | | | | |
| 2049 | 23777 | 278 | KUT65778.1 | 18421 | 23778 | 287 | KUT65774.1 | 18422 | 23779 | 169 | | | | |
| 2050 | 23780 | 278 | KUT92675.1 | 18424 | 23781 | 287 | KUT92653.1 | 18425 | 23782 | 169 | | | | |
| 2051 | 23783 | 278 | KUV55803.1 | 18427 | 23784 | 287 | KUV55765.1 | 18428 | 23785 | 169 | | | | |
| 2052 | 23786 | 278 | KUU93006.1 | 18430 | 23787 | 287 | KUU92986.1 | 18431 | 23788 | 169 | | | | |
| 2053 | 23789 | 278 | KUV32585.1 | 18433 | 23790 | 287 | KUV32575.1 | 18434 | 23791 | 169 | | | | |
| 2054 | 23792 | 278 | KUX05541.1 | 18436 | 23793 | 287 | KUX05522.1 | 18437 | 23794 | 169 | | | | |
| 2055 | 23795 | 278 | KUX02226.1 | 18439 | 23796 | 287 | KUX02163.1 | 18440 | 23797 | 169 | | | | |
| 2056 | 23798 | 278 | KUW18250.1 | 18442 | 23799 | 287 | KUW18189.1 | 18443 | 23800 | 169 | | | | |
| 2057 | 23801 | 278 | KUU04918.1 | 18445 | 23802 | 287 | KUU04901.1 | 18446 | 23803 | 169 | | | | |
| 2058 | 23804 | 278 | KUW44263.1 | 18448 | 23805 | 287 | KUW44251.1 | 18449 | 23806 | 169 | | | | |
| 2059 | 23807 | 278 | KUW29429.1 | 18451 | 23808 | 287 | KUW29414.1 | 18452 | 23809 | 169 | | | | |
| 2060 | 23810 | 278 | KUT58705.1 | 18454 | 23811 | 287 | KUT58680.1 | 18455 | 23812 | 169 | | | | |
| 2061 | 23813 | 278 | KUX37247.1 | 18457 | 23814 | 287 | KUX37209.1 | 18458 | 23815 | 169 | | | | |
| 2062 | 23816 | 278 | KUV14431.1 | 18460 | 23817 | 287 | KUV14409.1 | 18461 | 23818 | 169 | | | | |
| 2063 | 23819 | 278 | KUX73675.1 | 18463 | 23820 | 287 | KUX73638.1 | 18464 | 23821 | 169 | | | | |
| 2064 | 23822 | 278 | KUW86808.1 | 18466 | 23823 | 287 | KUW86784.1 | 18467 | 23824 | 169 | | | | |
| 2065 | 23825 | 278 | KUX51137.1 | 18469 | 23826 | 287 | KUX51101.1 | 18470 | 23827 | 169 | | | | |
| 2066 | 23828 | 278 | KVI42459.1 | 18472 | 23829 | 287 | KVI42423.1 | 18473 | 23830 | 169 | | | | |
| 2067 | 23831 | 278 | KVI22812.1 | 18475 | 23832 | 287 | KVI22807.1 | 18476 | 23833 | 169 | | | | |
| 2068 | 23834 | 278 | KXG92286.1 | 18478 | 23835 | 307 | KXG92285.1 | 18479 | 23836 | 169 | | | | |
| 2069 | 23837 | 278 | KXL04892.1 | 18481 | 23838 | 287 | KXL04868.1 | 18482 | 23839 | 169 | | | | |
| 2070 | 23840 | 278 | KXL27416.1 | 18484 | 23841 | 287 | KXL27377.1 | 18485 | 23842 | 169 | | | | |
| 2071 | 23843 | 278 | KXL05688.1 | 18487 | 23844 | 287 | KXL05684.1 | 18488 | 23845 | 169 | | | | |
| 2072 | 23846 | 278 | KXL13376.1 | 18490 | 23847 | 287 | KXL13116.1 | 18491 | 23848 | 169 | | | | |
| 2073 | 23849 | 278 | KTK78308.1 | 18493 | 23850 | 287 | KTK75706.1 | 18494 | 23851 | 169 | | | | |
| 2074 | 23852 | 285 | EPI32469.1 | 18496 | 23853 | 474 | EPI32467.1 | 18497 | 23854 | 153 | | | | |
| 2075 | 23855 | 283 | ETU24521.1 | 18499 | 23856 | 281 | ETU24519.1 | 18500 | 23857 | 173 | | | | |
| 2076 | 23858 | 281 | ELB67023.1 | 18502 | 23859 | 277 | ELB67021.1 | 18503 | 23860 | 166 | | | | |
| 2077 | 23861 | 271 | ENZ13054.1 | 18505 | 23862 | 98 | ENZ13056.1 | 18506 | 23863 | 134 | | | | |
| 2078 | 23864 | 278 | AHW13888.1 | 18508 | 23865 | 294 | AHW13889.1 | 18509 | 23866 | 169 | | | | |
| 2079 | 23867 | 278 | ESP72123.1 | 18511 | 23868 | 295 | ESP72122.1 | 18512 | 23869 | 169 | | | | |
| 2080 | 23870 | 278 | ESP76606.1 | 18514 | 23871 | 295 | ESP76605.1 | 18515 | 23872 | 169 | | | | |
| 2081 | 23873 | 278 | KFT73589.1 | 18517 | 23874 | 303 | KFT73590.1 | 18518 | 23875 | 169 | | | | |
| 2082 | 23876 | 278 | KHP33250.1 | 18520 | 23877 | 287 | KHP33098.1 | 18521 | 23878 | 169 | | | | |
| 2083 | 23879 | 278 | KHP35541.1 | 18523 | 23880 | 287 | KHP34816.1 | 18524 | 23881 | 169 | | | | |
| 2084 | 23882 | 278 | AKF88466.1 | 18526 | 23883 | 303 | AMQ08961.1 | 18527 | 23884 | 169 | | | | |
| 2085 | 23885 | 278 | KNK74746.1 | 18529 | 23886 | 303 | KNK74745.1 | 18530 | 23887 | 169 | | | | |
| 2086 | 23888 | 278 | KNW86451.1 | 18532 | 23889 | 303 | KNW86450.1 | 18533 | 23890 | 169 | | | | |
| 2087 | 23891 | 277 | ALO88018.1 | 18535 | 23892 | 303 | ALO88019.1 | 18536 | 23893 | 169 | | | | |
| 2088 | 23894 | 278 | KTQ22862.1 | 18538 | 23895 | 287 | KTQ21994.1 | 18539 | 23896 | 169 | | | | |
| 2089 | 23897 | 278 | KUB19504.1 | 18541 | 23898 | 287 | KUB19292.1 | 18542 | 23899 | 169 | | | | |
| 2090 | 23900 | 278 | KTY61531.1 | 18544 | 23901 | 287 | KTY61368.1 | 18545 | 23902 | 169 | | | | |
| 2091 | 23903 | 278 | KUB06355.1 | 18547 | 23904 | 287 | KUB06250.1 | 18548 | 23905 | 169 | | | | |
| 2092 | 23906 | 278 | KUD95102.1 | 18550 | 23907 | 287 | KUD94943.1 | 18551 | 23908 | 169 | | | | |
| 2093 | 23909 | 278 | GAR53163.1 | 18553 | 23910 | 303 | GAR53164.1 | 18554 | 23911 | 169 | | | | |
| 2094 | 23912 | 282 | EDS74763.1 | 18556 | 23913 | 284 | EDS74762.1 | 18557 | 23914 | 217 | | | | |
| 2095 | 23915 | 291 | KUG13795.1 | 18559 | 23916 | 284 | KUG13797.1 | 18560 | 23917 | 168 | | | | |
| 2096 | 23918 | 278 | EIY23904.1 | 18562 | 23919 | 176 | EIY23906.1 | 18563 | 23920 | 176 | | | | |
| 2097 | 23921 | 297 | EOS20512.1 | 18565 | 23922 | 280 | EOS20510.1 | 18566 | 23923 | 154 | | | | |
| 2098 | 23924 | 278 | EEH86955.2 | 18568 | 23925 | 307 | EEH86956.1 | 18569 | 23926 | 169 | | | | |
| 2099 | 23927 | 293 | CDE34945.1 | 18571 | 23928 | 266 | CDE34947.1 | 18572 | 23929 | 185 | | | | |
| 2100 | 23930 | 278 | AKW15255.1 | 18574 | 23931 | 303 | AKW15260.1 | 18575 | 23932 | 291 | AKW15254.1 | 18576 | 23933 | 169 |

(Part C)

| | | | | AB | | | | AF | | | |
|---|---|---|---|---|---|---|---|---|---|---|---|
| | Y | Z | AA | ThsB (iv) | AC | AD | AE | ThsB (v) | AG | AH | |
| | ThsB (iv) | PRT SEQ | DNA SEQ | protein | ThsB (v) | PRT SEQ | DNA SEQ | protein | Genomic | Genomic | AI |
| 1 | protein_accession | ID NO: | ID NO: | length (aa) | protein_accession | ID NO: | ID NO: | length (aa) | Start Point | End Point | comments |
| 2 | | | | | | | | | 18199 | 21006 | |
| 3 | | | | | | | | | 629 | 2777 | |
| 4 | | | | | | | | | 5626 | 8433 | |
| 5 | | | | | | | | | 22562 | 25369 | |
| 6 | | | | | | | | | 51158 | 53041 | |
| 7 | | | | | | | | | 972 | 2894 | |
| 8 | | | | | | | | | 7781 | 10368 | |
| 9 | | | | | | | | | 4395990 | 4398131 | |
| 10 | | | | | | | | | 72122 | 74690 | |
| 11 | | | | | | | | | 36696 | 39253 | |
| 12 | | | | | | | | | 36738 | 39295 | |
| 13 | | | | | | | | | 12931 | 15738 | |
| 14 | | | | | | | | | 26929 | 28839 | |
| 15 | | | | | | | | | 168640 | 171278 | Additional ThsA homolog EGV07143.1 |
| 16 | | | | | | | | | 117544 | 120507 | |
| 17 | | | | | | | | | 6436 | 9650 | Additional ThsA homolog EHM75397.1 |
| 18 | | | | | | | | | 29271 | 31828 | |
| 19 | | | | | | | | | 13966 | 17199 | |
| 20 | | | | | | | | | 5865 | 9078 | |
| 21 | | | | | | | | | 89212 | 92444 | Additional ThsA homolog EIA14316.1 |
| 22 | | | | | | | | | 52056 | 55538 | Additional ThsA homolog EIC95445.1 and EIC95416.1 |
| 23 | | | | | | | | | 1081676 | 1083596 | |
| 24 | | | | | | | | | 66368 | 68925 | |
| 25 | | | | | | | | | 66447 | 69004 | |
| 26 | | | | | | | | | 17507 | 20048 | |
| 27 | | | | | | | | | 86 | 1182 | |
| 28 | | | | | | | | | 11678 | 13703 | |
| 29 | | | | | | | | | 329879 | 331798 | |
| 30 | | | | | | | | | 5296579 | 5302199 | |
| 31 | | | | | | | | | 2271775 | 2274990 | |
| 32 | | | | | | | | | 5587 | 8095 | |
| 33 | | | | | | | | | 7411 | 9563 | |
| 34 | | | | | | | | | 7716 | 9868 | |
| 35 | | | | | | | | | 166 | 2264 | |
| 36 | | | | | | | | | 331145 | 333209 | |
| 37 | | | | | | | | | 416875 | 418939 | |
| 38 | | | | | | | | | 9843 | 12589 | |
| 39 | | | | | | | | | 137838 | 139780 | |
| 40 | | | | | | | | | 3230645 | 3232587 | |
| 41 | | | | | | | | | 214042 | 218633 | |
| 42 | BAQ74698.1 | 13325 | 18682 | 282 | | | | | 3398464 | 3402455 | |
| 43 | | | | | | | | | 222931 | 225520 | |
| 44 | | | | | | | | | 46820 | 51171 | |
| 45 | | | | | | | | | 29183 | 31097 | |
| 46 | | | | | | | | | 46863 | 51213 | |
| 47 | | | | | | | | | 6531 | 9746 | |
| 48 | | | | | | | | | 58762 | 61977 | |
| 49 | | | | | | | | | 29869 | 33084 | |
| 50 | | | | | | | | | 6530 | 9744 | Additional ThsA homolog EPZ03687.1 |
| 51 | | | | | | | | | 29869 | 33083 | Additional ThsA homolog EPZ11496.1 |
| 52 | | | | | | | | | 1186644 | 1187914 | |
| 53 | | | | | | | | | 4035 | 5954 | |
| 54 | | | | | | | | | 4032 | 5951 | |
| 55 | ETR95047.1 | 13360 | 18717 | 392 | ETR95035.1 | 13361 | 18718 | 258 | 57073 | 63348 | |
| 56 | | | | | | | | | 102852 | 105529 | |
| 57 | | | | | | | | | 68333 | 70275 | |
| 58 | | | | | | | | | 29849 | 31768 | |
| 59 | | | | | | | | | 10611 | 13921 | |
| 60 | | | | | | | | | 38796 | 40715 | |
| 61 | ERT19164.1 | 13378 | 18735 | 284 | | | | | 47778 | 51812 | |
| 62 | | | | | | | | | 13859 | 16441 | |
| 63 | | | | | | | | | 12425 | 15043 | |
| 64 | | | | | | | | | 4783 | 6845 | |
| 65 | | | | | | | | | 15034 | 16957 | |
| 66 | | | | | | | | | 140001 | 142539 | |
| 67 | | | | | | | | | 28373 | 30424 | |
| 68 | | | | | | | | | 1 | 1825 | |
| 69 | | | | | | | | | 64004 | 65911 | |
| 70 | | | | | | | | | 166 | 2021 | |
| 71 | | | | | | | | | 6080 | 8527 | |
| 72 | | | | | | | | | 515442 | 517994 | |
| 73 | | | | | | | | | 674 | 3536 | |
| 74 | | | | | | | | | 139546 | 141467 | |
| 75 | | | | | | | | | 41136 | 43033 | |
| 76 | | | | | | | | | 13018 | 14436 | |
| 77 | | | | | | | | | 4125512 | 4127653 | |
| 78 | | | | | | | | | 5228544 | 5231702 | |
| 79 | | | | | | | | | 5761473 | 5764631 | |
| 80 | | | | | | | | | 1756503 | 1758422 | |
| 81 | | | | | | | | | 257376 | 259446 | |
| 82 | | | | | | | | | 3144948 | 3147551 | |
| 83 | | | | | | | | | 416071 | 423425 | |
| 84 | | | | | | | | | 1137270 | 1142967 | |
| 85 | | | | | | | | | 3070609 | 3073154 | |
| 86 | | | | | | | | | 1196726 | 1201628 | |
| 87 | | | | | | | | | 1362278 | 1364836 | |
| 88 | | | | | | | | | 1106775 | 1110408 | |
| 89 | | | | | | | | | 6843 | 9373 | |
| 90 | ABR34956.1 | 13455 | 18812 | 397 | | | | | 3262303 | 3271086 | |
| 91 | | | | | | | | | 193025 | 201754 | |
| 92 | ACA73841.1 | 13462 | 18819 | 284 | | | | | 3700507 | 3704541 | |
| 93 | | | | | | | | | 1522479 | 1525210 | |
| 94 | | | | | | | | | 159043 | 161228 | |
| 95 | | | | | | | | | 26150 | 28218 | |
| 96 | | | | | | | | | 3660129 | 3669571 | |
| 97 | | | | | | | | | 30739 | 34915 | |
| 98 | | | | | | | | | 8582744 | 8587380 | |
| 99 | | | | | | | | | 1144241 | 1146856 | |
| 100 | AEA61153.1 | 13487 | 18844 | 185 | AEA61148.1 | 13488 | 18845 | 380 | 2903631 | 2911620 | |
| 101 | | | | | | | | | 2114555 | 2117787 | Additional ThsA homolog AFH70386.1 |
| 102 | | | | | | | | | 463662 | 466219 | |
| 103 | | | | | | | | | 4207854 | 4209995 | |
| 104 | | | | | | | | | 2480783 | 2484341 | |
| 105 | | | | | | | | | 3773861 | 3775803 | |
| 106 | | | | | | | | | 2704998 | 2706901 | |
| 107 | | | | | | | | | 587283 | 590090 | |
| 108 | | | | | | | | | 3506208 | 3510086 | |
| 109 | | | | | | | | | 2181958 | 2185173 | |
| 110 | | | | | | | | | 5998143 | 6005265 | |
| 111 | | | | | | | | | 3932979 | 3934921 | |
| 112 | | | | | | | | | 1794531 | 1800432 | Additional ThsA homolog AHZ68659.1 |
| 113 | | | | | | | | | 3384959 | 3385740 | |
| 114 | | | | | | | | | 10892 | 12978 | |
| 115 | | | | | | | | | 3875996 | 3877938 | |
| 116 | | | | | | | | | 1315665 | 1318348 | |
| 117 | AIU01467.1 | 13536 | 18893 | 397 | | | | | 3262298 | 3271081 | |
| 118 | | | | | | | | | 4055767 | 4058527 | |
| 119 | | | | | | | | | 77843 | 79615 | Additional ThsA homolog AJK51070.1 |
| 120 | | | | | | | | | 333850 | 336261 | |
| 121 | | | | | | | | | 329400 | 331811 | |
| 122 | | | | | | | | | 347430 | 349849 | |
| 123 | | | | | | | | | 347423 | 349980 | |
| 124 | | | | | | | | | 3945969 | 3949326 | |
| 125 | | | | | | | | | 4205818 | 4210073 | |
| 126 | | | | | | | | | 1170644 | 1172700 | |
| 127 | | | | | | | | | 2330122 | 2333479 | |
| 128 | | | | | | | | | 1113818 | 1116217 | |
| 129 | | | | | | | | | 882751 | 885296 | |
| 130 | | | | | | | | | 2831462 | 2835547 | |
| 131 | | | | | | | | | 311495 | 313453 | |
| 132 | | | | | | | | | 6039155 | 6041758 | |
| 133 | | | | | | | | | 79256 | 82956 | |
| 134 | | | | | | | | | 1727530 | 1732447 | |
| 135 | | | | | | | | | 1268306 | 1270321 | |
| 136 | | | | | | | | | 3178713 | 3180655 | |
| 137 | | | | | | | | | 2230390 | 2233379 | |
| 138 | | | | | | | | | 2056187 | 2058744 | |
| 139 | | | | | | | | | 1551820 | 1554323 | |
| 140 | | | | | | | | | 1705326 | 1706706 | |
| 141 | | | | | | | | | 2176463 | 2179695 | |
| 142 | | | | | | | | | 2168129 | 2171362 | |
| 143 | | | | | | | | | 2280993 | 2284226 | |
| 144 | | | | | | | | | 3915939 | 3920392 | |
| 145 | | | | | | | | | 1704217 | 1705597 | |
| 146 | | | | | | | | | 2183524 | 2186331 | |
| 147 | | | | | | | | | 1361260 | 1364863 | Additional ThsA homolog AMJ40915.1 |
| 148 | | | | | | | | | 1163503 | 1166716 | |
| 149 | | | | | | | | | 5251680 | 5253446 | |
| 150 | | | | | | | | | 4624 | 9364 | |
| 151 | | | | | | | | | 123406 | 125800 | |
| 152 | | | | | | | | | 414 | 2808 | |
| 153 | | | | | | | | | 4336 | 6730 | |
| 154 | | | | | | | | | 112666 | 114575 | |
| 155 | CQJ38345.1 | 13644 | 19001 | 395 | | | | | 119502 | 126440 | |
| 156 | | | | | | | | | 170171 | 175125 | |
| 157 | | | | | | | | | 22084 | 24292 | |
| 158 | | | | | | | | | 15713 | 17632 | |
| 159 | | | | | | | | | 97 | 2016 | |
| 160 | | | | | | | | | 3516 | 5435 | |
| 161 | | | | | | | | | 86 | 2005 | |
| 162 | | | | | | | | | 126 | 2045 | |
| 163 | | | | | | | | | 86 | 2005 | |
| 164 | | | | | | | | | 86504 | 88423 | |
| 165 | | | | | | | | | 126 | 2045 | |
| 166 | | | | | | | | | 3572 | 5491 | |
| 167 | | | | | | | | | 86 | 2005 | |
| 168 | | | | | | | | | 86 | 2005 | |
| 169 | | | | | | | | | 86 | 2005 | |
| 170 | | | | | | | | | 3523 | 5442 | |
| 171 | | | | | | | | | 86 | 2005 | |
| 172 | | | | | | | | | 15712 | 17631 | |
| 173 | | | | | | | | | 15714 | 17633 | |
| 174 | | | | | | | | | 15715 | 17634 | |
| 175 | | | | | | | | | 15715 | 17634 | |
| 176 | | | | | | | | | 17014 | 18933 | |
| 177 | | | | | | | | | 86 | 2005 | |
| 178 | | | | | | | | | 15715 | 17634 | |
| 179 | | | | | | | | | 16634 | 18553 | |
| 180 | | | | | | | | | 17014 | 18933 | |
| 181 | | | | | | | | | 15714 | 17633 | |
| 182 | | | | | | | | | 86 | 2005 | |
| 183 | | | | | | | | | 86 | 2005 | |
| 184 | | | | | | | | | 86 | 2005 | |
| 185 | | | | | | | | | 15916 | 17835 | |
| 186 | | | | | | | | | 86 | 2005 | |
| 187 | | | | | | | | | 86 | 2005 | |
| 188 | | | | | | | | | 86 | 2005 | |
| 189 | | | | | | | | | 86 | 2005 | |
| 190 | | | | | | | | | 17014 | 18933 | |
| 191 | | | | | | | | | 16688 | 18607 | |
| 192 | | | | | | | | | 86 | 2005 | |
| 193 | | | | | | | | | 86 | 2005 | |
| 194 | | | | | | | | | 86 | 2005 | |
| 195 | | | | | | | | | 15714 | 17633 | |
| 196 | | | | | | | | | 86 | 2005 | |
| 197 | | | | | | | | | 15712 | 17631 | |
| 198 | | | | | | | | | 15707 | 17626 | |
| 199 | | | | | | | | | 15715 | 17634 | |
| 200 | | | | | | | | | 16688 | 18607 | |
| 201 | | | | | | | | | 86 | 2005 | |
| 202 | | | | | | | | | 15713 | 17632 | |
| 203 | | | | | | | | | 86 | 2005 | |
| 204 | | | | | | | | | 86 | 2005 | |
| 205 | | | | | | | | | 86 | 2005 | |
| 206 | | | | | | | | | 15727 | 17646 | |
| 207 | | | | | | | | | 86 | 2005 | |
| 208 | | | | | | | | | 19604 | 21523 | |
| 209 | | | | | | | | | 15675 | 17594 | |
| 210 | | | | | | | | | 86 | 2005 | |
| 211 | | | | | | | | | 86 | 2005 | |
| 212 | | | | | | | | | 103 | 2022 | |
| 213 | | | | | | | | | 86 | 2005 | |
| 214 | | | | | | | | | 15667 | 17586 | |
| 215 | | | | | | | | | 86 | 2005 | |
| 216 | | | | | | | | | 86 | 2005 | |
| 217 | | | | | | | | | 86 | 2005 | |
| 218 | | | | | | | | | 86 | 2005 | |
| 219 | | | | | | | | | 111 | 2030 | |
| 220 | | | | | | | | | 86 | 2005 | |
| 221 | | | | | | | | | 86 | 2005 | |
| 222 | | | | | | | | | 86 | 2005 | |
| 223 | | | | | | | | | 15714 | 17633 | |
| 224 | | | | | | | | | 20763 | 22682 | |
| 225 | | | | | | | | | 15715 | 17634 | |
| 226 | | | | | | | | | 90 | 2009 | |
| 227 | | | | | | | | | 86 | 2005 | |
| 228 | | | | | | | | | 86 | 2005 | |
| 229 | | | | | | | | | 86 | 2005 | |
| 230 | | | | | | | | | 15715 | 17634 | |
| 231 | | | | | | | | | 86 | 2005 | |
| 232 | | | | | | | | | 90 | 2009 | |
| 233 | | | | | | | | | 126 | 2045 | |
| 234 | | | | | | | | | 93 | 2012 | |
| 235 | | | | | | | | | 86 | 2005 | |
| 236 | | | | | | | | | 86 | 2005 | |
| 237 | | | | | | | | | 15713 | 17632 | |
| 238 | | | | | | | | | 86 | 2005 | |
| 239 | | | | | | | | | 15711 | 17630 | |
| 240 | | | | | | | | | 15713 | 17632 | |
| 241 | | | | | | | | | 86 | 2005 | |
| 242 | | | | | | | | | 9021 | 10940 | |
| 243 | | | | | | | | | 86 | 2005 | |
| 244 | | | | | | | | | 86 | 2005 | |
| 245 | | | | | | | | | 86 | 2005 | |
| 246 | | | | | | | | | 85 | 2004 | |
| 247 | | | | | | | | | 86 | 2005 | |
| 248 | | | | | | | | | 86 | 2005 | |
| 249 | | | | | | | | | 19605 | 21524 | |
| 250 | | | | | | | | | 15916 | 17835 | |
| 251 | | | | | | | | | 15715 | 17634 | |
| 252 | | | | | | | | | 15916 | 17835 | |
| 253 | | | | | | | | | 15916 | 17835 | |
| 254 | | | | | | | | | 86 | 2005 | |
| 255 | | | | | | | | | 85 | 2004 | |
| 256 | | | | | | | | | 86 | 2005 | |
| 257 | | | | | | | | | 86 | 2005 | |
| 258 | | | | | | | | | 86 | 2005 | |
| 259 | | | | | | | | | 3523 | 5442 | |
| 260 | | | | | | | | | 15715 | 17634 | |
| 261 | | | | | | | | | 15715 | 17634 | |
| 262 | | | | | | | | | 15715 | 17634 | |
| 263 | | | | | | | | | 86 | 2005 | |
| 264 | | | | | | | | | 86 | 2005 | |
| 265 | | | | | | | | | 86 | 2005 | |
| 266 | | | | | | | | | 86 | 2005 | |
| 267 | | | | | | | | | 86 | 2005 | |
| 268 | | | | | | | | | 15916 | 17835 | |
| 269 | | | | | | | | | 86 | 2005 | |
| 270 | | | | | | | | | 86 | 2005 | |
| 271 | | | | | | | | | 86 | 2005 | |
| 272 | | | | | | | | | 15916 | 17835 | |
| 273 | | | | | | | | | 15916 | 17835 | |
| 274 | | | | | | | | | 15916 | 17835 | |
| 275 | | | | | | | | | 15713 | 17632 | |
| 276 | | | | | | | | | 15715 | 17634 | |
| 277 | | | | | | | | | 85 | 2004 | |
| 278 | | | | | | | | | 20706 | 22625 | |
| 279 | | | | | | | | | 85 | 2004 | |
| 280 | | | | | | | | | 85 | 2004 | |
| 281 | | | | | | | | | 86 | 2005 | |
| 282 | | | | | | | | | 86 | 2005 | |
| 283 | | | | | | | | | 90 | 2009 | |
| 284 | | | | | | | | | 86 | 2005 | |
| 285 | | | | | | | | | 15714 | 17633 | |
| 286 | | | | | | | | | 15719 | 17638 | |
| 287 | | | | | | | | | 15710 | 17629 | |
| 288 | | | | | | | | | 15726 | 17645 | |
| 289 | | | | | | | | | 3523 | 5442 | |
| 290 | | | | | | | | | 15715 | 17634 | |
| 291 | | | | | | | | | 15915 | 17834 | |
| 292 | | | | | | | | | 86 | 2005 | |
| 293 | | | | | | | | | 86 | 2005 | |
| 294 | | | | | | | | | 86 | 2005 | |
| 295 | | | | | | | | | 86 | 2005 | |
| 296 | | | | | | | | | 86 | 2005 | |
| 297 | | | | | | | | | 86 | 2005 | |
| 298 | | | | | | | | | 15715 | 17634 | |
| 299 | | | | | | | | | 86 | 2005 | |
| 300 | | | | | | | | | 86 | 2005 | |
| 301 | | | | | | | | | 86 | 2005 | |
| 302 | | | | | | | | | 86 | 2005 | |
| 303 | | | | | | | | | 86 | 2005 | |
| 304 | | | | | | | | | 86 | 2005 | |
| 305 | | | | | | | | | 86 | 2005 | |
| 306 | | | | | | | | | 86 | 2005 | |
| 307 | | | | | | | | | 86 | 2005 | |
| 308 | | | | | | | | | 86 | 2005 | |
| 309 | | | | | | | | | 86 | 2005 | |
| 310 | | | | | | | | | 3520 | 5439 | |
| 311 | | | | | | | | | 86 | 2005 | |
| 312 | | | | | | | | | 86 | 2005 | |
| 313 | | | | | | | | | 86 | 2005 | |
| 314 | | | | | | | | | 86 | 2005 | |
| 315 | | | | | | | | | 15715 | 17634 | |
| 316 | | | | | | | | | 85 | 2004 | |
| 317 | | | | | | | | | 19612 | 21531 | |
| 318 | | | | | | | | | 15715 | 17634 | |
| 319 | | | | | | | | | 15712 | 17631 | |
| 320 | | | | | | | | | 15715 | 17634 | |
| 321 | | | | | | | | | 19605 | 21524 | |
| 322 | | | | | | | | | 86 | 2005 | |
| 323 | | | | | | | | | 15714 | 17633 | |
| 324 | | | | | | | | | 15715 | 17634 | |
| 325 | | | | | | | | | 85 | 2004 | |
| 326 | | | | | | | | | 15715 | 17634 | |
| 327 | | | | | | | | | 19605 | 21524 | |
| 328 | | | | | | | | | 85 | 2004 | |
| 329 | | | | | | | | | 86 | 2005 | |
| 330 | | | | | | | | | 86 | 2005 | |
| 331 | | | | | | | | | 15714 | 17633 | |
| 332 | | | | | | | | | 15713 | 17632 | |
| 333 | | | | | | | | | 3523 | 5442 | |
| 334 | | | | | | | | | 15715 | 17634 | |
| 335 | | | | | | | | | 19605 | 21524 | |
| 336 | | | | | | | | | 86 | 2005 | |
| 337 | | | | | | | | | 86 | 2005 | |
| 338 | | | | | | | | | 57301 | 59220 | |
| 339 | | | | | | | | | 16030 | 17949 | |
| 340 | | | | | | | | | 86 | 2005 | |
| 341 | | | | | | | | | 86 | 2005 | |
| 342 | | | | | | | | | 86 | 2005 | |
| 343 | | | | | | | | | 15714 | 17633 | |
| 344 | | | | | | | | | 15715 | 17634 | |
| 345 | | | | | | | | | 86 | 2005 | |
| 346 | | | | | | | | | 90 | 2009 | |
| 347 | | | | | | | | | 85 | 2004 | |
| 348 | | | | | | | | | 86 | 2005 | |
| 349 | | | | | | | | | 21322 | 23241 | |
| 350 | | | | | | | | | 86 | 2005 | |
| 351 | | | | | | | | | 86 | 2005 | |
| 352 | | | | | | | | | 86 | 2005 | |
| 353 | | | | | | | | | 86 | 2005 | |
| 354 | | | | | | | | | 86 | 2005 | |
| 355 | | | | | | | | | 84 | 2003 | |
| 356 | | | | | | | | | 86 | 2005 | |
| 357 | | | | | | | | | 86 | 2005 | |
| 358 | | | | | | | | | 86 | 2005 | |
| 359 | | | | | | | | | 86 | 2005 | |
| 360 | | | | | | | | | 57 | 1976 | |
| 361 | | | | | | | | | 86 | 2005 | |
| 362 | | | | | | | | | 90 | 2009 | |
| 363 | | | | | | | | | 86 | 2005 | |
| 364 | | | | | | | | | 126 | 2045 | |
| 365 | | | | | | | | | 90 | 2009 | |
| 366 | | | | | | | | | 86 | 2005 | |
| 367 | | | | | | | | | 86 | 2005 | |
| 368 | | | | | | | | | 86 | 2005 | |
| 369 | | | | | | | | | 3523 | 5442 | |
| 370 | | | | | | | | | 86 | 2005 | |
| 371 | | | | | | | | | 86 | 2005 | |
| 372 | | | | | | | | | 86 | 2005 | |
| 373 | | | | | | | | | 86 | 2005 | |
| 374 | | | | | | | | | 86 | 2005 | |
| 375 | | | | | | | | | 86 | 2005 | |
| 376 | | | | | | | | | 86 | 2005 | |
| 377 | | | | | | | | | 3523 | 5442 | |
| 378 | | | | | | | | | 3523 | 5442 | |
| 379 | | | | | | | | | 86 | 2005 | |
| 380 | | | | | | | | | 86 | 2005 | |
| 381 | | | | | | | | | 86 | 2005 | |
| 382 | | | | | | | | | 20582 | 22497 | |
| 383 | | | | | | | | | 69792 | 71707 | |
| 384 | | | | | | | | | 473455 | 475428 | |
| 385 | CUI40923.1 | 14109 | 19466 | 380 | | | | | 61503 | 69491 | |
| 386 | | | | | | | | | 29199 | 31433 | |
| 387 | | | | | | | | | 91096 | 93166 | |
| 388 | | | | | | | | | 13294 | 15364 | |
| 389 | | | | | | | | | 91096 | 93166 | |
| 390 | | | | | | | | | 208463 | 212572 | |
| 391 | | | | | | | | | 52908 | 54850 | |
| 392 | | | | | | | | | 205694 | 207636 | |
| 393 | | | | | | | | | 51817 | 53759 | |
| 394 | | | | | | | | | 52565 | 54507 | |
| 395 | | | | | | | | | 40795 | 42737 | |
| 396 | | | | | | | | | 208781 | 210723 | |
| 397 | | | | | | | | | 416502 | 418444 | |
| 398 | | | | | | | | | 52868 | 54810 | |
| 399 | | | | | | | | | 205143 | 207085 | |
| 400 | | | | | | | | | 205136 | 207078 | |
| 401 | | | | | | | | | 52762 | 54704 | |
| 402 | | | | | | | | | 48586 | 50528 | |
| 403 | | | | | | | | | 205291 | 207233 | |
| 404 | | | | | | | | | 227349 | 229291 | |
| 405 | | | | | | | | | 54635 | 56577 | |
| 406 | | | | | | | | | 205150 | 207092 | |
| 407 | | | | | | | | | 52282 | 54224 | |
| 408 | | | | | | | | | 98754 | 100696 | |
| 409 | | | | | | | | | 459698 | 461640 | |
| 410 | | | | | | | | | 1072447 | 1074389 | |
| 411 | | | | | | | | | 52866 | 54808 | |
| 412 | | | | | | | | | 52771 | 54713 | |
| 413 | | | | | | | | | 53129 | 55071 | |
| 414 | | | | | | | | | 52821 | 54763 | |
| 415 | | | | | | | | | 381639 | 383581 | |
| 416 | | | | | | | | | 251604 | 253547 | Additional ThsA homolog CUZ65536.1 |
| 417 | | | | | | | | | 227335 | 229277 | |
| 418 | | | | | | | | | 215912 | 217854 | |
| 419 | | | | | | | | | 170621 | 172563 | |
| 420 | | | | | | | | | 54612 | 56554 | |
| 421 | | | | | | | | | 259463 | 261405 | |
| 422 | | | | | | | | | 52769 | 54711 | |
| 423 | | | | | | | | | 215028 | 216970 | |
| 424 | | | | | | | | | 55119 | 57061 | |
| 425 | | | | | | | | | 145344 | 147286 | |
| 426 | | | | | | | | | 51538 | 53480 | |
| 427 | | | | | | | | | 54675 | 56617 | |
| 428 | | | | | | | | | 52756 | 54698 | |
| 429 | | | | | | | | | 247802 | 249745 | Additional ThsA homolog CUZ82852.1 |
| 430 | | | | | | | | | 468965 | 470907 | |
| 431 | | | | | | | | | 52873 | 54815 | |
| 432 | | | | | | | | | 58418 | 60361 | Additional ThsA homolog CUZ43256.1 |
| 433 | | | | | | | | | 52608 | 54550 | |
| 434 | | | | | | | | | 98756 | 100698 | |
| 435 | | | | | | | | | 51815 | 53757 | |
| 436 | | | | | | | | | 48717 | 50659 | |
| 437 | | | | | | | | | 378607 | 380549 | |
| 438 | | | | | | | | | 259489 | 261431 | |
| 439 | | | | | | | | | 259461 | 261403 | |
| 440 | | | | | | | | | 53320 | 55262 | |
| 441 | | | | | | | | | 52797 | 54739 | |
| 442 | | | | | | | | | 259463 | 261405 | |
| 443 | | | | | | | | | 71559 | 73501 | |
| 444 | | | | | | | | | 71562 | 73504 | |
| 445 | | | | | | | | | 205150 | 207092 | |
| 446 | | | | | | | | | 54661 | 56603 | |
| 447 | | | | | | | | | 2774448 | 2776391 | Additional ThsA homolog CVB24107.1 |
| 448 | | | | | | | | | 474999 | 476941 | |
| 449 | | | | | | | | | 205287 | 207229 | |
| 450 | | | | | | | | | 54153 | 56096 | Additional ThsA homolog CVB73330.1 |
| 451 | | | | | | | | | 287703 | 289646 | Additional ThsA homolog CVA22598.1 |
| 452 | | | | | | | | | 205297 | 207239 | |
| 453 | | | | | | | | | 54674 | 56616 | |
| 454 | | | | | | | | | 227325 | 229267 | |
| 455 | | | | | | | | | 259463 | 261405 | |
| 456 | | | | | | | | | 52811 | 54753 | |
| 457 | | | | | | | | | 259443 | 261385 | |
| 458 | | | | | | | | | 259454 | 261396 | |
| 459 | | | | | | | | | 52807 | 54749 | |
| 460 | | | | | | | | | 54610 | 56552 | |
| 461 | | | | | | | | | 54003 | 55945 | |
| 462 | | | | | | | | | 52860 | 54802 | |
| 463 | | | | | | | | | 555244 | 557186 | |
| 464 | | | | | | | | | 205101 | 207043 | |
| 465 | | | | | | | | | 259463 | 261405 | |
| 466 | | | | | | | | | 55632 | 57574 | |
| 467 | | | | | | | | | 469398 | 471341 | Additional ThsA homolog CVB85980.1 |
| 468 | | | | | | | | | 52988 | 54930 | |
| 469 | | | | | | | | | 53025 | 54967 | |
| 470 | | | | | | | | | 52986 | 54928 | |
| 471 | | | | | | | | | 245145 | 247087 | |
| 472 | | | | | | | | | 228659 | 230601 | |
| 473 | | | | | | | | | 259502 | 261444 | |
| 474 | | | | | | | | | 72560 | 74502 | |
| 475 | | | | | | | | | 54144 | 56087 | Additional ThsA homolog CVD13385.1 |
| 476 | | | | | | | | | 53587 | 55529 | |
| 477 | | | | | | | | | 205145 | 207087 | |
| 478 | | | | | | | | | 259537 | 261479 | |
| 479 | | | | | | | | | 52763 | 54705 | |
| 480 | | | | | | | | | 204839 | 206781 | |
| 481 | | | | | | | | | 250690 | 252632 | |
| 482 | | | | | | | | | 52792 | 54734 | |
| 483 | | | | | | | | | 52806 | 54748 | |
| 484 | | | | | | | | | 259463 | 261405 | |
| 485 | | | | | | | | | 53587 | 55529 | |
| 486 | | | | | | | | | 54693 | 56635 | |
| 487 | | | | | | | | | 381593 | 383535 | |
| 488 | | | | | | | | | 259463 | 261405 | |
| 489 | | | | | | | | | 53129 | 55071 | |
| 490 | | | | | | | | | 229979 | 231922 | Additional ThsA homolog CVC59825.1 |
| 491 | | | | | | | | | 40797 | 42739 | |
| 492 | | | | | | | | | 53318 | 55260 | |
| 493 | | | | | | | | | 474325 | 476267 | |
| 494 | | | | | | | | | 276598 | 278540 | |
| 495 | | | | | | | | | 205145 | 207087 | |
| 496 | | | | | | | | | 56080 | 58023 | Additional ThsA homolog CVD28877.1 |
| 497 | | | | | | | | | 203403 | 205345 | |
| 498 | | | | | | | | | 205188 | 207130 | |
| 499 | | | | | | | | | 100253 | 102196 | Additional ThsA homolog CVC40444.1 |
| 500 | | | | | | | | | 54152 | 56095 | Additional ThsA homolog CVE27748.1 |
| 501 | | | | | | | | | 52837 | 54779 | |
| 502 | | | | | | | | | 287741 | 289684 | Additional ThsA homolog CVE69273.1 |
| 503 | | | | | | | | | 250718 | 252660 | |
| 504 | | | | | | | | | 53129 | 55071 | |
| 505 | | | | | | | | | 409590 | 411532 | |
| 506 | | | | | | | | | 225217 | 227159 | |
| 507 | | | | | | | | | 55828 | 57770 | |
| 508 | | | | | | | | | 52615 | 54557 | |
| 509 | | | | | | | | | 259463 | 261405 | |
| 510 | | | | | | | | | 85596 | 87538 | |
| 511 | | | | | | | | | 40786 | 42728 | |
| 512 | | | | | | | | | 51813 | 53755 | |
| 513 | | | | | | | | | 331093 | 333036 | Additional ThsA homolog CVE63008.1 |
| 514 | | | | | | | | | 205143 | 207085 | |
| 515 | | | | | | | | | 246483 | 248425 | |
| 516 | | | | | | | | | 55632 | 57574 | |
| 517 | | | | | | | | | 203360 | 205302 | |
| 518 | | | | | | | | | 203361 | 205303 | |
| 519 | | | | | | | | | 53129 | 55071 | |
| 520 | | | | | | | | | 302434 | 304376 | |
| 521 | | | | | | | | | 205143 | 207085 | |
| 522 | | | | | | | | | 250747 | 252689 | |
| 523 | | | | | | | | | 51815 | 53757 | |
| 524 | | | | | | | | | 52610 | 54552 | |
| 525 | | | | | | | | | 218394 | 220336 | |
| 526 | | | | | | | | | 204804 | 206746 | |
| 527 | | | | | | | | | 56080 | 58023 | Additional ThsA homolog CVF09827.1 |
| 528 | | | | | | | | | 225215 | 227157 | |
| 529 | | | | | | | | | 380827 | 382769 | |
| 530 | | | | | | | | | 507350 | 509292 | |
| 531 | | | | | | | | | 205145 | 207087 | |
| 532 | | | | | | | | | 205180 | 207122 | |
| 533 | | | | | | | | | 468279 | 470221 | |
| 534 | | | | | | | | | 204811 | 206753 | |
| 535 | | | | | | | | | 2911354 | 2913296 | |
| 536 | | | | | | | | | 204806 | 206748 | |
| 537 | | | | | | | | | 48895 | 50837 | |
| 538 | | | | | | | | | 250731 | 252673 | |
| 539 | | | | | | | | | 250678 | 252620 | |
| 540 | | | | | | | | | 209597 | 211539 | |
| 541 | | | | | | | | | 205292 | 207234 | |
| 542 | | | | | | | | | 218370 | 220312 | |
| 543 | | | | | | | | | 204799 | 206741 | |
| 544 | | | | | | | | | 259507 | 261449 | |
| 545 | | | | | | | | | 98756 | 100698 | |
| 546 | | | | | | | | | 52831 | 54773 | |
| 547 | | | | | | | | | 229166 | 231108 | |
| 548 | | | | | | | | | 229192 | 231134 | |
| 549 | | | | | | | | | 52862 | 54804 | |
| 550 | | | | | | | | | 469390 | 471333 | Additional ThsA homolog CVF82665.1 |
| 551 | | | | | | | | | 205176 | 207118 | |
| 552 | | | | | | | | | 86294 | 88236 | |
| 553 | | | | | | | | | 195844 | 197787 | Additional ThsA homolog CVG82395.1 |
| 554 | | | | | | | | | 259485 | 261427 | |
| 555 | | | | | | | | | 52838 | 54780 | |
| 556 | | | | | | | | | 259463 | 261405 | |
| 557 | | | | | | | | | 205143 | 207085 | |
| 558 | | | | | | | | | 204848 | 206790 | |
| 559 | | | | | | | | | 52908 | 54850 | |
| 560 | | | | | | | | | 48895 | 50837 | |
| 561 | | | | | | | | | 204800 | 206742 | |
| 562 | | | | | | | | | 205105 | 207047 | |
| 563 | | | | | | | | | 52761 | 54703 | |
| 564 | | | | | | | | | 205143 | 207085 | |
| 565 | | | | | | | | | 804248 | 806190 | |
| 566 | | | | | | | | | 42050 | 43992 | |
| 567 | | | | | | | | | 259463 | 261405 | |
| 568 | | | | | | | | | 98758 | 100700 | |
| 569 | | | | | | | | | 205139 | 207081 | |
| 570 | | | | | | | | | 203358 | 205300 | |
| 571 | | | | | | | | | 245017 | 246902 | |
| 572 | | | | | | | | | 244655 | 246597 | |
| 573 | | | | | | | | | 204808 | 206750 | |
| 574 | | | | | | | | | 55294 | 57236 | |
| 575 | | | | | | | | | 40785 | 42727 | |
| 576 | | | | | | | | | 146358 | 148300 | |
| 577 | | | | | | | | | 203356 | 205298 | |
| 578 | | | | | | | | | 213928 | 215870 | |
| 579 | | | | | | | | | 53145 | 55087 | |
| 580 | | | | | | | | | 302444 | 304386 | |
| 581 | | | | | | | | | 205171 | 207113 | |
| 582 | | | | | | | | | 86298 | 88240 | |
| 583 | | | | | | | | | 225285 | 227227 | |
| 584 | | | | | | | | | 2489848 | 2491790 | |
| 585 | | | | | | | | | 48902 | 50844 | |
| 586 | | | | | | | | | 205139 | 207081 | |
| 587 | | | | | | | | | 52816 | 54758 | |
| 588 | | | | | | | | | 48889 | 50831 | |
| 589 | | | | | | | | | 259463 | 261405 | |
| 590 | | | | | | | | | 276608 | 278550 | |
| 591 | | | | | | | | | 52823 | 54765 | |
| 592 | | | | | | | | | 219855 | 224432 | |
| 593 | | | | | | | | | 665752 | 668658 | |
| 594 | | | | | | | | | 10795 | 15202 | Additional ThsA homolog CVJ34926.1 |
| 595 | | | | | | | | | 91413 | 93483 | |
| 596 | | | | | | | | | 91412 | 93482 | |
| 597 | | | | | | | | | 145450 | 148647 | |
| 598 | | | | | | | | | 170139 | 172016 | |
| 599 | | | | | | | | | 147107 | 150314 | |
| 600 | | | | | | | | | 5221 | 8428 | |
| 601 | | | | | | | | | 27175 | 28106 | |
| 602 | | | | | | | | | 89207 | 90138 | |
| 603 | | | | | | | | | 56578 | 57509 | |
| 604 | | | | | | | | | 2764 | 3695 | |
| 605 | | | | | | | | | 755402 | 757321 | |
| 606 | | | | | | | | | 2281482 | 2283690 | Additional ThsA homolog CBK94115.1 |
| 607 | | | | | | | | | 2147940 | 2151155 | |
| 608 | | | | | | | | | 5550 | 8081 | |
| 609 | | | | | | | | | 216318 | 218740 | |
| 610 | | | | | | | | | 381949 | 385460 | |
| 611 | | | | | | | | | 5760 | 7808 | |
| 612 | | | | | | | | | 300284 | 303091 | |
| 613 | | | | | | | | | 49142 | 51298 | |
| 614 | | | | | | | | | 1929426 | 1932118 | |
| 615 | | | | | | | | | 14797 | 17604 | |
| 616 | | | | | | | | | 684310 | 687507 | |
| 617 | | | | | | | | | 127257 | 129883 | |
| 618 | | | | | | | | | 2141168 | 2149732 | |
| 619 | | | | | | | | | 3041325 | 3043214 | |
| 620 | | | | | | | | | 3085346 | 3087231 | |
| 621 | | | | | | | | | 553 | 2600 | |
| 622 | | | | | | | | | 10886 | 13693 | |
| 623 | | | | | | | | | 14764 | 17571 | |
| 624 | | | | | | | | | 10882 | 13689 | |
| 625 | | | | | | | | | 34164 | 36837 | |
| 626 | | | | | | | | | 58272 | 62622 | |
| 627 | | | | | | | | | 7752 | 11008 | Additional ThsA homolog EWC94486.1 |
| 628 | | | | | | | | | 270 | 5901 | |
| 629 | | | | | | | | | 3054 | 11860 | |
| 630 | EXE88613.1 | 14621 | 19978 | 405 | EXE88615.1 | 14622 | 19979 | 261 | 264895 | 270729 | |
| 631 | | | | | | | | | 55048 | 58095 | |
| 632 | | | | | | | | | 95834 | 100666 | |
| 633 | | | | | | | | | 284960 | 286849 | |
| 634 | | | | | | | | | 509807 | 511734 | |
| 635 | | | | | | | | | 2108537 | 2115530 | |
| 636 | | | | | | | | | 708642 | 710850 | |
| 637 | | | | | | | | | 599550 | 602414 | |
| 638 | | | | | | | | | 83092 | 84822 | |
| 639 | | | | | | | | | 176458 | 181638 | |
| 640 | | | | | | | | | 177762 | 182743 | |
| 641 | | | | | | | | | 207 | 2134 | |
| 642 | | | | | | | | | 251026 | 252953 | |
| 643 | | | | | | | | | 4590 | 6517 | |
| 644 | | | | | | | | | 2641819 | 2643746 | |
| 645 | | | | | | | | | 442583 | 444510 | |
| 646 | | | | | | | | | 430783 | 432710 | |
| 647 | | | | | | | | | 251121 | 253048 | |
| 648 | | | | | | | | | 205694 | 207650 | |
| 649 | | | | | | | | | 4337287 | 4339430 | |
| 650 | | | | | | | | | 154987 | 158145 | |
| 651 | | | | | | | | | 19805 | 21921 | |
| 652 | | | | | | | | | 417 | 3971 | |
| 653 | | | | | | | | | 13781 | 16588 | |
| 654 | | | | | | | | | 7847 | 10654 | |
| 655 | | | | | | | | | 4608 | 7415 | |
| 656 | | | | | | | | | 10909 | 13716 | |
| 657 | | | | | | | | | 36794 | 39601 | |
| 658 | | | | | | | | | 10909 | 13716 | |
| 659 | | | | | | | | | 36880 | 39687 | |
| 660 | | | | | | | | | 42693 | 45500 | |
| 661 | | | | | | | | | 42768 | 45575 | |
| 662 | | | | | | | | | 42629 | 45436 | |
| 663 | | | | | | | | | 13781 | 16588 | |
| 664 | | | | | | | | | 2627330 | 2629968 | |
| 665 | | | | | | | | | 166982 | 169811 | |
| 666 | | | | | | | | | 1603 | 3518 | |
| 667 | | | | | | | | | 23156 | 26372 | |
| 668 | | | | | | | | | 58886 | 62101 | |
| 669 | | | | | | | | | 58887 | 62102 | |
| 670 | | | | | | | | | 58821 | 62036 | |
| 671 | | | | | | | | | 58821 | 62036 | |
| 672 | | | | | | | | | 58887 | 62102 | |
| 673 | | | | | | | | | 58887 | 62102 | |
| 674 | | | | | | | | | 2720 | 5935 | |
| 675 | | | | | | | | | 11491 | 14706 | |
| 676 | | | | | | | | | 58887 | 62102 | |
| 677 | | | | | | | | | 58887 | 61046 | |
| 678 | | | | | | | | | 58887 | 62102 | |
| 679 | | | | | | | | | 58887 | 62102 | |
| 680 | | | | | | | | | 3137 | 6352 | |
| 681 | | | | | | | | | 58887 | 62102 | |
| 682 | | | | | | | | | 58887 | 62102 | |
| 683 | | | | | | | | | 58887 | 62102 | |
| 684 | | | | | | | | | 58887 | 62102 | |
| 685 | | | | | | | | | 89236 | 92451 | |
| 686 | | | | | | | | | 58887 | 62102 | |
| 687 | | | | | | | | | 58881 | 62096 | |
| 688 | | | | | | | | | 58887 | 62102 | |
| 689 | | | | | | | | | 89217 | 92431 | Additional ThsA homolog EZR97100.1 |
| 690 | | | | | | | | | 58887 | 62102 | |
| 691 | | | | | | | | | 89217 | 92432 | |
| 692 | | | | | | | | | 58653 | 61868 | |
| 693 | | | | | | | | | 58887 | 62102 | |
| 694 | | | | | | | | | 11494 | 14709 | |
| 695 | | | | | | | | | 89253 | 92468 | |
| 696 | | | | | | | | | 17149 | 20364 | |
| 697 | | | | | | | | | 58886 | 62101 | |
| 698 | | | | | | | | | 89215 | 92430 | |
| 699 | | | | | | | | | 58887 | 62102 | |
| 700 | | | | | | | | | 58887 | 62102 | |
| 701 | | | | | | | | | 51382 | 54597 | |
| 702 | | | | | | | | | 58887 | 62102 | |
| 703 | | | | | | | | | 58887 | 62102 | |
| 704 | | | | | | | | | 58887 | 62102 | |
| 705 | | | | | | | | | 27394 | 30609 | |
| 706 | | | | | | | | | 11491 | 14706 | |
| 707 | | | | | | | | | 58887 | 62102 | |
| 708 | | | | | | | | | 89217 | 92432 | |
| 709 | | | | | | | | | 58887 | 62102 | |
| 710 | | | | | | | | | 89087 | 92302 | |
| 711 | | | | | | | | | 58821 | 62036 | |
| 712 | | | | | | | | | 58821 | 62036 | |
| 713 | | | | | | | | | 89168 | 92383 | |
| 714 | | | | | | | | | 102659 | 105874 | |
| 715 | | | | | | | | | 58887 | 62102 | |
| 716 | | | | | | | | | 56011 | 59226 | |
| 717 | | | | | | | | | 58887 | 62102 | |
| 718 | | | | | | | | | 58887 | 62102 | |
| 719 | | | | | | | | | 58887 | 62101 | |
| 720 | | | | | | | | | 58887 | 62102 | |
| 721 | | | | | | | | | 13914 | 17129 | |
| 722 | | | | | | | | | 58887 | 62102 | |
| 723 | | | | | | | | | 58887 | 62102 | |
| 724 | | | | | | | | | 58887 | 62102 | |
| 725 | | | | | | | | | 58887 | 62102 | |
| 726 | | | | | | | | | 58886 | 62101 | |
| 727 | | | | | | | | | 58887 | 62102 | |
| 728 | | | | | | | | | 58887 | 62102 | |
| 729 | | | | | | | | | 35404 | 38619 | |
| 730 | | | | | | | | | 58887 | 62102 | |
| 731 | | | | | | | | | 20381 | 23596 | |
| 732 | | | | | | | | | 58887 | 62102 | |
| 733 | | | | | | | | | 58887 | 62102 | |
| 734 | | | | | | | | | 58887 | 62102 | |
| 735 | | | | | | | | | 11491 | 14706 | |
| 736 | | | | | | | | | 86075 | 89290 | |
| 737 | | | | | | | | | 58887 | 62102 | |
| 738 | | | | | | | | | 58887 | 62101 | |
| 739 | | | | | | | | | 58887 | 62102 | |
| 740 | | | | | | | | | 58830 | 62045 | |
| 741 | | | | | | | | | 59025 | 62239 | Additional ThsA homolog EZT27374.1 |
| 742 | | | | | | | | | 58887 | 62102 | |
| 743 | | | | | | | | | 58887 | 62102 | |
| 744 | | | | | | | | | 58887 | 62102 | |
| 745 | | | | | | | | | 58821 | 62036 | |
| 746 | | | | | | | | | 89258 | 92473 | |
| 747 | | | | | | | | | 58692 | 61907 | |
| 748 | | | | | | | | | 58887 | 62101 | Additional ThsA homolog EZT47450.1 |
| 749 | | | | | | | | | 89211 | 92425 | Additional ThsA homolog EZT50535.1 |
| 750 | | | | | | | | | 58886 | 62101 | |
| 751 | | | | | | | | | 58887 | 62102 | |
| 752 | | | | | | | | | 58887 | 62102 | |
| 753 | | | | | | | | | 89173 | 92388 | |
| 754 | | | | | | | | | 85365 | 88580 | |
| 755 | | | | | | | | | 58887 | 62102 | |
| 756 | | | | | | | | | 58887 | 62102 | |
| 757 | | | | | | | | | 58896 | 62111 | |
| 758 | | | | | | | | | 58887 | 62102 | |
| 759 | | | | | | | | | 58887 | 62102 | |
| 760 | | | | | | | | | 58887 | 62102 | |
| 761 | | | | | | | | | 5927 | 9142 | |
| 762 | | | | | | | | | 58887 | 62102 | |
| 763 | | | | | | | | | 58887 | 62102 | |
| 764 | | | | | | | | | 58653 | 61868 | |
| 765 | | | | | | | | | 58821 | 62036 | |
| 766 | | | | | | | | | 58888 | 62103 | |
| 767 | | | | | | | | | 58887 | 62102 | |
| 768 | | | | | | | | | 58887 | 62102 | |
| 769 | | | | | | | | | 58887 | 62102 | |
| 770 | | | | | | | | | 58887 | 62102 | |
| 771 | | | | | | | | | 1635 | 3550 | |
| 772 | | | | | | | | | 1609 | 3524 | |
| 773 | | | | | | | | | 135764 | 138293 | |
| 774 | | | | | | | | | 1226749 | 1227659 | |
| 775 | | | | | | | | | 107019 | 109625 | |
| 776 | | | | | | | | | 92321 | 94908 | |
| 777 | | | | | | | | | 101172 | 103087 | |
| 778 | | | | | | | | | 24694 | 33804 | |
| 779 | | | | | | | | | 261749 | 270859 | |
| 780 | | | | | | | | | 11963 | 13878 | |
| 781 | | | | | | | | | 11673 | 14353 | |
| 782 | | | | | | | | | 11661 | 14339 | |
| 783 | | | | | | | | | 37 | 2714 | |
| 784 | | | | | | | | | 11671 | 14348 | |
| 785 | | | | | | | | | 1494 | 4171 | |
| 786 | | | | | | | | | 10184 | 12273 | |
| 787 | | | | | | | | | 51656 | 53785 | |
| 788 | | | | | | | | | 368690 | 371206 | |
| 789 | | | | | | | | | 20762 | 22677 | |
| 790 | | | | | | | | | 408 | 2323 | |
| 791 | | | | | | | | | 57709 | 59078 | |
| 792 | | | | | | | | | 852 | 2259 | |
| 793 | | | | | | | | | 402013 | 404602 | Additional ThsA homolog KEQ37438.1 |
| 794 | | | | | | | | | 534537 | 537500 | |
| 795 | | | | | | | | | 54006 | 55948 | |
| 796 | | | | | | | | | 268 | 2210 | |
| 797 | KFF62087.1 | 15092 | 20449 | 278 | | | | | 278870 | 286182 | |
| 798 | | | | | | | | | 13328 | 15398 | |
| 799 | | | | | | | | | 29271 | 31828 | |
| 800 | | | | | | | | | 1177641 | 1180423 | |
| 801 | | | | | | | | | 796009 | 798073 | |
| 802 | | | | | | | | | 25866 | 35282 | |
| 803 | | | | | | | | | 14362 | 17169 | |
| 804 | | | | | | | | | 43124 | 45703 | |
| 805 | | | | | | | | | 1357 | 3279 | |
| 806 | | | | | | | | | 14786 | 17593 | |
| 807 | | | | | | | | | 80211 | 82768 | Additional ThsA homolog KIE90699.1 and KIE90686.1 |
| 808 | | | | | | | | | 80286 | 82844 | Additional ThsA homolog KIE90603.1 |
| 809 | | | | | | | | | 80290 | 82848 | Additional ThsA homolog KIE97286.1 |
| 810 | | | | | | | | | 25818 | 28376 | Additional ThsA homolog KIE97673.1 |
| 811 | | | | | | | | | 25803 | 28361 | Additional ThsA homolog KIE96200.1 |
| 812 | | | | | | | | | 80213 | 82771 | Additional ThsA homolog KIE90358.1 |
| 813 | KHN56275.1 | 15137 | 20494 | 183 | | | | | 212601 | 218790 | |
| 814 | | | | | | | | | 89226 | 92441 | |
| 815 | | | | | | | | | 548602 | 550666 | |
| 816 | | | | | | | | | 791385 | 792765 | |
| 817 | | | | | | | | | 4381185 | 4383127 | |
| 818 | | | | | | | | | 79011 | 80966 | |
| 819 | | | | | | | | | 79815 | 81770 | |
| 820 | | | | | | | | | 57400 | 59342 | |
| 821 | | | | | | | | | 343540 | 345493 | |
| 822 | | | | | | | | | 303729 | 307800 | |
| 823 | | | | | | | | | 268769 | 271576 | |
| 824 | | | | | | | | | 540414 | 543221 | |
| 825 | | | | | | | | | 119577 | 122384 | |
| 826 | | | | | | | | | 551887 | 554694 | |
| 827 | | | | | | | | | 743854 | 746661 | |
| 828 | | | | | | | | | 119853 | 122660 | |
| 829 | | | | | | | | | 28372 | 37080 | |
| 830 | | | | | | | | | 1890562 | 1892626 | |
| 831 | | | | | | | | | 923150 | 925214 | |
| 832 | | | | | | | | | 766850 | 768914 | |
| 833 | | | | | | | | | 2675060 | 2675910 | |
| 834 | | | | | | | | | 979222 | 981286 | |
| 835 | | | | | | | | | 1470124 | 1472188 | |
| 836 | | | | | | | | | 93913 | 98742 | Additional ThsA homolog ENU62563.1 |
| 837 | | | | | | | | | 97812 | 100703 | |
| 838 | | | | | | | | | 1497967 | 1506125 | |
| 839 | | | | | | | | | 170794 | 174348 | Additional ThsA homolog ENX27879.1 |
| 840 | | | | | | | | | 676899 | 679468 | |
| 841 | | | | | | | | | 1866683 | 1870168 | |
| 842 | | | | | | | | | 214685 | 217492 | |
| 843 | | | | | | | | | 121299 | 124106 | |
| 844 | | | | | | | | | 1399298 | 1402105 | |
| 845 | | | | | | | | | 123919 | 126726 | |
| 846 | | | | | | | | | 122496 | 125303 | |
| 847 | | | | | | | | | 122329 | 125136 | |
| 848 | | | | | | | | | 448160 | 450967 | |
| 849 | | | | | | | | | 575596 | 578403 | |
| 850 | | | | | | | | | 401264 | 404071 | |
| 851 | | | | | | | | | 254055 | 256166 | |
| 852 | | | | | | | | | 800671 | 802590 | |
| 853 | | | | | | | | | 253248 | 255167 | |
| 854 | | | | | | | | | 476 | 3696 | |
| 855 | | | | | | | | | 212236 | 214349 | |
| 856 | | | | | | | | | 1791824 | 1793888 | |
| 857 | | | | | | | | | 773643 | 775707 | |
| 858 | | | | | | | | | 434828 | 436769 | |
| 859 | | | | | | | | | 397991 | 399932 | |
| 860 | | | | | | | | | 449083 | 451024 | |
| 861 | | | | | | | | | 95 | 2309 | |
| 862 | | | | | | | | | 1377455 | 1381181 | |
| 863 | | | | | | | | | 2693429 | 2697155 | |
| 864 | | | | | | | | | 737416 | 740613 | |
| 865 | | | | | | | | | 1907694 | 1910501 | |
| 866 | | | | | | | | | 1393914 | 1395856 | |
| 867 | | | | | | | | | 103489 | 105607 | |
| 868 | | | | | | | | | 53375 | 55317 | |
| 869 | | | | | | | | | 89124 | 92339 | |
| 870 | | | | | | | | | 58887 | 62102 | |
| 871 | | | | | | | | | 88416 | 91631 | |
| 872 | | | | | | | | | 58887 | 62102 | |
| 873 | | | | | | | | | 58887 | 62102 | |
| 874 | | | | | | | | | 58887 | 62102 | |
| 875 | | | | | | | | | 89258 | 92473 | |
| 876 | | | | | | | | | 59082 | 62297 | |
| 877 | | | | | | | | | 88152 | 91367 | |
| 878 | | | | | | | | | 58887 | 62102 | |
| 879 | | | | | | | | | 89302 | 92517 | |
| 880 | | | | | | | | | 59082 | 62297 | |
| 881 | | | | | | | | | 3860 | 7075 | |
| 882 | | | | | | | | | 58887 | 62102 | |
| 883 | | | | | | | | | 2496 | 5711 | |
| 884 | | | | | | | | | 58887 | 62102 | |
| 885 | | | | | | | | | 89302 | 92517 | |
| 886 | | | | | | | | | 88596 | 91811 | |
| 887 | | | | | | | | | 2217 | 5432 | |
| 888 | | | | | | | | | 89258 | 92473 | |
| 889 | | | | | | | | | 58887 | 62102 | |
| 890 | | | | | | | | | 59471 | 62686 | |
| 891 | | | | | | | | | 76731 | 79946 | |
| 892 | | | | | | | | | 36126 | 39341 | |
| 893 | | | | | | | | | 89173 | 92388 | |
| 894 | | | | | | | | | 89173 | 92388 | |
| 895 | | | | | | | | | 89124 | 92339 | |
| 896 | | | | | | | | | 58887 | 62102 | |
| 897 | | | | | | | | | 89258 | 92472 | Additional ThsA homolog EZV09968.1 |
| 898 | | | | | | | | | 58887 | 62102 | |
| 899 | | | | | | | | | 79669 | 82884 | |
| 900 | | | | | | | | | 89302 | 92517 | |
| 901 | | | | | | | | | 58475 | 61690 | |
| 902 | | | | | | | | | 58887 | 62102 | |
| 903 | | | | | | | | | 58887 | 62102 | |
| 904 | | | | | | | | | 89192 | 92407 | |
| 905 | | | | | | | | | 58887 | 62102 | |
| 906 | | | | | | | | | 89155 | 92370 | |
| 907 | | | | | | | | | 64585 | 67800 | |
| 908 | | | | | | | | | 89258 | 92473 | |
| 909 | | | | | | | | | 88340 | 91555 | |
| 910 | | | | | | | | | 89192 | 92407 | |
| 911 | | | | | | | | | 58821 | 62036 | |
| 912 | | | | | | | | | 58887 | 62102 | |
| 913 | | | | | | | | | 3860 | 7075 | |
| 914 | | | | | | | | | 58765 | 61980 | |
| 915 | | | | | | | | | 58887 | 62101 | Additional ThsA homolog EZV68413.1 |
| 916 | | | | | | | | | 88570 | 91785 | |
| 917 | | | | | | | | | 89253 | 92468 | |
| 918 | | | | | | | | | 58887 | 62102 | |
| 919 | | | | | | | | | 58887 | 62102 | |
| 920 | | | | | | | | | 59048 | 62263 | |
| 921 | | | | | | | | | 35074 | 38289 | |
| 922 | | | | | | | | | 64681 | 67896 | |
| 923 | | | | | | | | | 58887 | 62102 | |
| 924 | | | | | | | | | 88826 | 92041 | |
| 925 | | | | | | | | | 88334 | 91549 | |
| 926 | | | | | | | | | 3114 | 6329 | |
| 927 | | | | | | | | | 58887 | 62102 | |
| 928 | | | | | | | | | 58887 | 62102 | |
| 929 | | | | | | | | | 59079 | 62294 | |
| 930 | | | | | | | | | 3091 | 6306 | |
| 931 | | | | | | | | | 3091 | 6306 | |
| 932 | | | | | | | | | 58887 | 62102 | |
| 933 | | | | | | | | | 59099 | 62314 | |
| 934 | | | | | | | | | 58653 | 61868 | |
| 935 | | | | | | | | | 58887 | 62102 | |
| 936 | | | | | | | | | 89173 | 92388 | |
| 937 | | | | | | | | | 89168 | 92383 | |
| 938 | | | | | | | | | 58887 | 62102 | |
| 939 | | | | | | | | | 89258 | 92473 | |
| 940 | | | | | | | | | 89258 | 92473 | |
| 941 | | | | | | | | | 58887 | 62102 | |
| 942 | | | | | | | | | 58887 | 62102 | |
| 943 | | | | | | | | | 58887 | 62102 | |
| 944 | | | | | | | | | 58887 | 62102 | |
| 945 | | | | | | | | | 58653 | 61868 | |
| 946 | | | | | | | | | 89028 | 92243 | |
| 947 | | | | | | | | | 3800 | 7015 | |
| 948 | | | | | | | | | 87505 | 90720 | |
| 949 | | | | | | | | | 59081 | 62296 | |
| 950 | | | | | | | | | 58655 | 61870 | |
| 951 | | | | | | | | | 89301 | 92515 | |
| 952 | | | | | | | | | 58887 | 62102 | |
| 953 | | | | | | | | | 58887 | 62102 | |
| 954 | | | | | | | | | 58887 | 62102 | |
| 955 | | | | | | | | | 3114 | 6329 | |
| 956 | | | | | | | | | 58887 | 62102 | |
| 957 | | | | | | | | | 89302 | 92517 | |
| 958 | | | | | | | | | 51851 | 55066 | |
| 959 | | | | | | | | | 89258 | 92473 | |
| 960 | | | | | | | | | 58887 | 62102 | |
| 961 | | | | | | | | | 58887 | 62102 | |
| 962 | | | | | | | | | 59503 | 62718 | |
| 963 | | | | | | | | | 58887 | 62102 | |
| 964 | | | | | | | | | 40472 | 43687 | |
| 965 | | | | | | | | | 58887 | 62102 | |
| 966 | | | | | | | | | 58907 | 62122 | |
| 967 | | | | | | | | | 26695 | 29910 | |
| 968 | | | | | | | | | 58887 | 62102 | |
| 969 | | | | | | | | | 89798 | 93013 | |
| 970 | | | | | | | | | 58887 | 62102 | |
| 971 | | | | | | | | | 58887 | 62102 | |
| 972 | | | | | | | | | 89301 | 92515 | Additional ThsA homolog EZX30780.1 |
| 973 | | | | | | | | | 58653 | 61867 | Additional ThsA homolog EZX33811.1 |
| 974 | | | | | | | | | 89253 | 92467 | Additional ThsA homolog EZX38407.1 |
| 975 | | | | | | | | | 89258 | 92473 | |
| 976 | | | | | | | | | 6173 | 9387 | |
| 977 | | | | | | | | | 58887 | 62101 | |
| 978 | | | | | | | | | 85412 | 88627 | |
| 979 | | | | | | | | | 58887 | 62102 | |
| 980 | | | | | | | | | 58887 | 62102 | |
| 981 | | | | | | | | | 58887 | 62101 | Additional ThsA homolog EZX53549.1 |
| 982 | | | | | | | | | 89302 | 92517 | |
| 983 | | | | | | | | | 59081 | 62296 | |
| 984 | | | | | | | | | 58887 | 62102 | |
| 985 | | | | | | | | | 63625 | 66839 | Additional ThsA homolog EZX64344.1 |
| 986 | | | | | | | | | 58887 | 62102 | |
| 987 | | | | | | | | | 58821 | 62036 | |
| 988 | | | | | | | | | 58887 | 62102 | |
| 989 | | | | | | | | | 8858 | 12073 | |
| 990 | | | | | | | | | 89257 | 92472 | |
| 991 | | | | | | | | | 89302 | 92517 | |
| 992 | | | | | | | | | 58887 | 62102 | |
| 993 | | | | | | | | | 63857 | 67072 | |
| 994 | | | | | | | | | 87357 | 90572 | |
| 995 | | | | | | | | | 89258 | 92473 | |
| 996 | | | | | | | | | 58887 | 62102 | |
| 997 | | | | | | | | | 89214 | 92429 | |
| 998 | | | | | | | | | 89253 | 91325 | |
| 999 | | | | | | | | | 89168 | 92383 | |
| 1000 | | | | | | | | | 58887 | 62102 | |
| 1001 | | | | | | | | | 48320 | 51535 | |
| 1002 | | | | | | | | | 89302 | 92517 | |
| 1003 | | | | | | | | | 29770 | 32985 | |
| 1004 | | | | | | | | | 89304 | 92521 | |
| 1005 | | | | | | | | | 58887 | 62102 | |
| 1006 | | | | | | | | | 89253 | 92468 | |
| 1007 | | | | | | | | | 58887 | 62102 | |
| 1008 | | | | | | | | | 89253 | 91412 | |
| 1009 | | | | | | | | | 2625 | 5840 | |
| 1010 | | | | | | | | | 88832 | 92047 | |
| 1011 | | | | | | | | | 89302 | 92517 | |
| 1012 | | | | | | | | | 89302 | 92517 | |
| 1013 | | | | | | | | | 58887 | 62102 | |
| 1014 | | | | | | | | | 89216 | 92431 | |
| 1015 | | | | | | | | | 58887 | 62102 | |
| 1016 | | | | | | | | | 64320 | 67534 | Additional ThsA homolog EZY44866.1 |
| 1017 | | | | | | | | | 58887 | 62102 | |
| 1018 | | | | | | | | | 58887 | 62102 | |
| 1019 | | | | | | | | | 58887 | 62101 | Additional ThsA homolog EZY52188.1 |
| 1020 | | | | | | | | | 58887 | 62101 | Additional ThsA homolog EZY54363.1 |
| 1021 | | | | | | | | | 4154 | 7368 | Additional ThsA homolog EZY58963.1 |
| 1022 | | | | | | | | | 58887 | 62102 | |
| 1023 | | | | | | | | | 58887 | 62102 | |
| 1024 | | | | | | | | | 89258 | 92473 | |
| 1025 | | | | | | | | | 58887 | 62102 | |
| 1026 | | | | | | | | | 58887 | 62102 | |
| 1027 | | | | | | | | | 89302 | 92517 | |
| 1028 | | | | | | | | | 58887 | 62102 | |
| 1029 | | | | | | | | | 58821 | 62036 | |
| 1030 | | | | | | | | | 58831 | 62046 | |
| 1031 | | | | | | | | | 89253 | 92468 | |
| 1032 | | | | | | | | | 14360 | 17575 | |
| 1033 | | | | | | | | | 86376 | 89591 | |
| 1034 | | | | | | | | | 89253 | 92468 | |
| 1035 | | | | | | | | | 58887 | 61350 | |
| 1036 | | | | | | | | | 58821 | 62036 | |
| 1037 | | | | | | | | | 58887 | 61350 | |
| 1038 | | | | | | | | | 3244 | 6459 | |
| 1039 | | | | | | | | | 58887 | 62101 | Additional ThsA homolog EZZ07027.1 |
| 1040 | | | | | | | | | 3860 | 7075 | |
| 1041 | | | | | | | | | 89258 | 92474 | |
| 1042 | | | | | | | | | 58887 | 62102 | |
| 1043 | | | | | | | | | 58887 | 62101 | |
| 1044 | | | | | | | | | 89028 | 92243 | |
| 1045 | | | | | | | | | 57669 | 60884 | |
| 1046 | | | | | | | | | 58887 | 62102 | |
| 1047 | | | | | | | | | 57242 | 60457 | |
| 1048 | | | | | | | | | 11497 | 14712 | |
| 1049 | | | | | | | | | 58887 | 62102 | |
| 1050 | | | | | | | | | 89603 | 92818 | |
| 1051 | | | | | | | | | 14572 | 17787 | |
| 1052 | | | | | | | | | 58887 | 62102 | |
| 1053 | | | | | | | | | 58887 | 62102 | |
| 1054 | | | | | | | | | 88413 | 91628 | |
| 1055 | | | | | | | | | 59194 | 62409 | |
| 1056 | | | | | | | | | 58887 | 62102 | |
| 1057 | | | | | | | | | 89186 | 92401 | |
| 1058 | | | | | | | | | 58887 | 62102 | |
| 1059 | | | | | | | | | 89001 | 92216 | |
| 1060 | | | | | | | | | 58887 | 62101 | Additional ThsA homolog EZZ66975.1 |
| 1061 | | | | | | | | | 58887 | 62102 | |
| 1062 | | | | | | | | | 89304 | 92519 | |
| 1063 | | | | | | | | | 58887 | 62102 | |
| 1064 | | | | | | | | | 89160 | 92375 | |
| 1065 | | | | | | | | | 58830 | 62045 | |
| 1066 | | | | | | | | | 89217 | 92432 | |
| 1067 | | | | | | | | | 58887 | 62102 | |
| 1068 | | | | | | | | | 58821 | 62036 | |
| 1069 | | | | | | | | | 58821 | 62036 | |
| 1070 | | | | | | | | | 58887 | 62102 | |
| 1071 | | | | | | | | | 86561 | 89776 | |
| 1072 | | | | | | | | | 58887 | 62102 | |
| 1073 | | | | | | | | | 89302 | 92517 | |
| 1074 | | | | | | | | | 58887 | 62102 | |
| 1075 | | | | | | | | | 86128 | 89343 | |
| 1076 | | | | | | | | | 58886 | 62101 | |
| 1077 | | | | | | | | | 72244 | 75459 | |
| 1078 | | | | | | | | | 58887 | 62102 | |
| 1079 | | | | | | | | | 89253 | 92468 | |
| 1080 | | | | | | | | | 58828 | 62043 | |
| 1081 | | | | | | | | | 58887 | 62102 | |
| 1082 | | | | | | | | | 58887 | 62102 | |
| 1083 | | | | | | | | | 58887 | 62102 | |
| 1084 | | | | | | | | | 58887 | 62102 | |
| 1085 | | | | | | | | | 89217 | 92432 | |
| 1086 | | | | | | | | | 89168 | 92383 | |
| 1087 | | | | | | | | | 89216 | 92431 | |
| 1088 | | | | | | | | | 58821 | 62036 | |
| 1089 | | | | | | | | | 58887 | 62102 | |
| 1090 | | | | | | | | | 58887 | 62102 | |
| 1091 | | | | | | | | | 58821 | 62036 | |
| 1092 | | | | | | | | | 58887 | 62101 | |
| 1093 | | | | | | | | | 1088 | 4303 | |
| 1094 | | | | | | | | | 89302 | 92517 | |
| 1095 | | | | | | | | | 89258 | 92473 | |
| 1096 | | | | | | | | | 58887 | 62102 | |
| 1097 | | | | | | | | | 58886 | 62101 | |
| 1098 | | | | | | | | | 58886 | 62101 | |
| 1099 | | | | | | | | | 89236 | 92451 | |
| 1100 | | | | | | | | | 58887 | 62102 | |
| 1101 | | | | | | | | | 58887 | 62102 | |
| 1102 | | | | | | | | | 58887 | 62102 | |
| 1103 | | | | | | | | | 58887 | 62102 | |
| 1104 | | | | | | | | | 11491 | 14706 | |
| 1105 | | | | | | | | | 73114 | 76329 | |
| 1106 | | | | | | | | | 58821 | 62036 | |
| 1107 | | | | | | | | | 58887 | 62102 | |
| 1108 | | | | | | | | | 27936 | 31151 | |
| 1109 | | | | | | | | | 58887 | 62102 | |
| 1110 | | | | | | | | | 58887 | 62102 | |
| 1111 | | | | | | | | | 89217 | 92432 | |
| 1112 | | | | | | | | | 86600 | 89815 | |
| 1113 | | | | | | | | | 58887 | 62102 | |
| 1114 | | | | | | | | | 58821 | 62036 | |
| 1115 | | | | | | | | | 58887 | 62102 | |
| 1116 | | | | | | | | | 58821 | 62036 | |
| 1117 | | | | | | | | | 58821 | 62036 | |
| 1118 | | | | | | | | | 58887 | 62102 | |
| 1119 | | | | | | | | | 58887 | 62102 | |
| 1120 | | | | | | | | | 90149 | 93364 | |
| 1121 | | | | | | | | | 89243 | 92458 | |
| 1122 | | | | | | | | | 58887 | 62102 | |
| 1123 | | | | | | | | | 58887 | 62102 | |
| 1124 | | | | | | | | | 58886 | 62101 | |
| 1125 | | | | | | | | | 89302 | 92517 | |
| 1126 | | | | | | | | | 86097 | 89312 | |
| 1127 | | | | | | | | | 89258 | 92473 | |
| 1128 | | | | | | | | | 58887 | 62102 | |
| 1129 | | | | | | | | | 89253 | 92468 | |
| 1130 | | | | | | | | | 58887 | 62102 | |
| 1131 | | | | | | | | | 23191 | 26406 | |
| 1132 | | | | | | | | | 58887 | 62102 | |
| 1133 | | | | | | | | | 58887 | 62102 | |
| 1134 | | | | | | | | | 58887 | 61046 | |
| 1135 | | | | | | | | | 58887 | 62102 | |
| 1136 | | | | | | | | | 28112 | 30271 | |
| 1137 | | | | | | | | | 58886 | 62101 | |
| 1138 | | | | | | | | | 58821 | 62036 | |
| 1139 | | | | | | | | | 58886 | 62101 | |
| 1140 | | | | | | | | | 58887 | 62102 | |
| 1141 | | | | | | | | | 89302 | 92517 | |
| 1142 | | | | | | | | | 58887 | 62102 | |
| 1143 | | | | | | | | | 58887 | 62102 | |
| 1144 | | | | | | | | | 89258 | 92473 | |
| 1145 | | | | | | | | | 89302 | 92517 | |
| 1146 | | | | | | | | | 89258 | 92473 | |
| 1147 | | | | | | | | | 26639 | 29854 | |
| 1148 | | | | | | | | | 58821 | 62036 | |
| 1149 | | | | | | | | | 14243 | 17458 | |
| 1150 | | | | | | | | | 58887 | 62102 | |
| 1151 | | | | | | | | | 58887 | 62102 | |
| 1152 | | | | | | | | | 89217 | 92432 | |
| 1153 | | | | | | | | | 58886 | 62101 | |
| 1154 | | | | | | | | | 89303 | 92518 | |
| 1155 | | | | | | | | | 58886 | 62101 | |
| 1156 | | | | | | | | | 58887 | 61046 | |
| 1157 | | | | | | | | | 7935 | 11150 | |
| 1158 | | | | | | | | | 7491 | 10706 | |
| 1159 | | | | | | | | | 58887 | 62102 | |
| 1160 | | | | | | | | | 89302 | 92517 | |
| 1161 | | | | | | | | | 89283 | 92498 | |
| 1162 | | | | | | | | | 3990 | 6149 | |
| 1163 | | | | | | | | | 58887 | 62102 | |
| 1164 | | | | | | | | | 3990 | 6149 | |
| 1165 | | | | | | | | | 89302 | 92517 | |
| 1166 | | | | | | | | | 89173 | 92388 | |
| 1167 | | | | | | | | | 89167 | 92382 | |
| 1168 | | | | | | | | | 58887 | 62102 | |
| 1169 | | | | | | | | | 29744 | 32959 | |
| 1170 | | | | | | | | | 58821 | 62036 | |
| 1171 | | | | | | | | | 86117 | 89332 | |
| 1172 | | | | | | | | | 89302 | 92517 | |
| 1173 | | | | | | | | | 58887 | 62102 | |
| 1174 | | | | | | | | | 58887 | 62102 | |
| 1175 | | | | | | | | | 59150 | 62365 | |
| 1176 | | | | | | | | | 89257 | 92472 | |
| 1177 | | | | | | | | | 58887 | 61046 | |
| 1178 | | | | | | | | | 89303 | 91462 | |
| 1179 | | | | | | | | | 58887 | 62102 | |
| 1180 | | | | | | | | | 58887 | 62102 | |
| 1181 | | | | | | | | | 58831 | 62046 | |
| 1182 | | | | | | | | | 58887 | 62102 | |
| 1183 | | | | | | | | | 58887 | 62102 | |
| 1184 | | | | | | | | | 59012 | 62227 | |
| 1185 | | | | | | | | | 58887 | 62102 | |
| 1186 | | | | | | | | | 42602 | 45817 | |
| 1187 | | | | | | | | | 58821 | 62036 | |
| 1188 | | | | | | | | | 58821 | 62036 | |
| 1189 | | | | | | | | | 86600 | 89815 | |
| 1190 | | | | | | | | | 58887 | 62102 | |
| 1191 | | | | | | | | | 14572 | 17787 | |
| 1192 | | | | | | | | | 58887 | 62102 | |
| 1193 | | | | | | | | | 88664 | 91879 | |
| 1194 | | | | | | | | | 58887 | 62102 | |
| 1195 | | | | | | | | | 89172 | 92386 | |
| 1196 | | | | | | | | | 87289 | 90503 | |
| 1197 | | | | | | | | | 89172 | 92386 | |
| 1198 | | | | | | | | | 58821 | 62036 | |
| 1199 | | | | | | | | | 89216 | 92430 | |
| 1200 | | | | | | | | | 58887 | 62101 | |
| 1201 | | | | | | | | | 2720 | 5935 | |
| 1202 | | | | | | | | | 58887 | 62101 | |
| 1203 | | | | | | | | | 58887 | 62101 | |
| 1204 | | | | | | | | | 58888 | 62103 | |
| 1205 | | | | | | | | | 58887 | 62102 | |
| 1206 | | | | | | | | | 89173 | 92388 | |
| 1207 | | | | | | | | | 86562 | 89777 | |
| 1208 | | | | | | | | | 89257 | 92472 | |
| 1209 | | | | | | | | | 2720 | 5935 | |
| 1210 | | | | | | | | | 58886 | 62101 | |
| 1211 | | | | | | | | | 87715 | 90930 | |
| 1212 | | | | | | | | | 17386 | 20601 | |
| 1213 | | | | | | | | | 58887 | 62102 | |
| 1214 | | | | | | | | | 89253 | 92468 | |
| 1215 | | | | | | | | | 89302 | 92517 | |
| 1216 | | | | | | | | | 58764 | 61979 | |
| 1217 | | | | | | | | | 58652 | 61867 | |
| 1218 | | | | | | | | | 58886 | 62101 | |
| 1219 | | | | | | | | | 58887 | 62102 | |
| 1220 | | | | | | | | | 58887 | 62102 | |
| 1221 | | | | | | | | | 58887 | 62102 | |
| 1222 | | | | | | | | | 58887 | 62102 | |
| 1223 | | | | | | | | | 58887 | 62102 | |
| 1224 | | | | | | | | | 11769 | 14984 | |
| 1225 | | | | | | | | | 58877 | 62092 | |
| 1226 | | | | | | | | | 329 | 2488 | |
| 1227 | | | | | | | | | 329 | 2488 | |
| 1228 | | | | | | | | | 89258 | 92473 | |
| 1229 | | | | | | | | | 73104 | 76319 | |
| 1230 | | | | | | | | | 11491 | 14706 | |
| 1231 | | | | | | | | | 58887 | 62102 | |
| 1232 | | | | | | | | | 58887 | 62102 | |
| 1233 | | | | | | | | | 29744 | 32959 | |
| 1234 | | | | | | | | | 58887 | 62102 | |
| 1235 | | | | | | | | | 58887 | 62102 | |
| 1236 | | | | | | | | | 58887 | 62102 | |
| 1237 | | | | | | | | | 58821 | 62036 | |
| 1238 | | | | | | | | | 58829 | 62044 | |
| 1239 | | | | | | | | | 58821 | 62036 | |
| 1240 | | | | | | | | | 58887 | 62102 | |
| 1241 | | | | | | | | | 58887 | 62102 | |
| 1242 | | | | | | | | | 58887 | 62102 | |
| 1243 | | | | | | | | | 58887 | 61046 | |
| 1244 | | | | | | | | | 89302 | 91461 | |
| 1245 | | | | | | | | | 58887 | 62102 | |
| 1246 | | | | | | | | | 58887 | 62102 | |
| 1247 | | | | | | | | | 89302 | 92517 | |
| 1248 | | | | | | | | | 58887 | 62102 | |
| 1249 | | | | | | | | | 65904 | 69119 | |
| 1250 | | | | | | | | | 58887 | 62102 | |
| 1251 | | | | | | | | | 58887 | 62102 | |
| 1252 | | | | | | | | | 58887 | 62102 | |
| 1253 | | | | | | | | | 14572 | 17787 | |
| 1254 | | | | | | | | | 89217 | 92432 | |
| 1255 | | | | | | | | | 58887 | 62102 | |
| 1256 | | | | | | | | | 58764 | 61979 | |
| 1257 | | | | | | | | | 86241 | 89456 | |
| 1258 | | | | | | | | | 58887 | 62102 | |
| 1259 | | | | | | | | | 58887 | 62102 | |
| 1260 | | | | | | | | | 58887 | 62102 | |
| 1261 | | | | | | | | | 58887 | 62102 | |
| 1262 | | | | | | | | | 58821 | 62036 | |
| 1263 | | | | | | | | | 89303 | 92518 | |
| 1264 | | | | | | | | | 58821 | 62036 | |
| 1265 | | | | | | | | | 58887 | 62102 | |
| 1266 | | | | | | | | | 58887 | 62102 | |
| 1267 | | | | | | | | | 58887 | 62102 | |
| 1268 | | | | | | | | | 58887 | 62102 | |
| 1269 | | | | | | | | | 58887 | 62101 | Additional ThsA homolog KAF14361.1 |
| 1270 | | | | | | | | | 58886 | 62101 | |
| 1271 | | | | | | | | | 58887 | 62102 | |
| 1272 | | | | | | | | | 89302 | 92517 | |
| 1273 | | | | | | | | | 29744 | 32959 | |
| 1274 | | | | | | | | | 89302 | 92517 | |
| 1275 | | | | | | | | | 58821 | 62036 | |
| 1276 | | | | | | | | | 58887 | 62102 | |
| 1277 | | | | | | | | | 58831 | 62046 | |
| 1278 | | | | | | | | | 58887 | 62102 | |
| 1279 | | | | | | | | | 73077 | 76292 | |
| 1280 | | | | | | | | | 73866 | 77081 | |
| 1281 | | | | | | | | | 58530 | 61745 | |
| 1282 | | | | | | | | | 58887 | 62102 | |
| 1283 | | | | | | | | | 329 | 2488 | |
| 1284 | | | | | | | | | 58821 | 62036 | |
| 1285 | | | | | | | | | 89173 | 92388 | |
| 1286 | | | | | | | | | 58887 | 62102 | |
| 1287 | | | | | | | | | 58887 | 62102 | |
| 1288 | | | | | | | | | 58887 | 62102 | |
| 1289 | | | | | | | | | 58887 | 62102 | |
| 1290 | | | | | | | | | 58887 | 62102 | |
| 1291 | | | | | | | | | 58829 | 62044 | |
| 1292 | | | | | | | | | 58829 | 62044 | |
| 1293 | | | | | | | | | 58887 | 62102 | |
| 1294 | | | | | | | | | 58831 | 62046 | |
| 1295 | | | | | | | | | 2720 | 5935 | |
| 1296 | | | | | | | | | 58887 | 62102 | |
| 1297 | | | | | | | | | 89168 | 92383 | |
| 1298 | | | | | | | | | 58887 | 62102 | |
| 1299 | | | | | | | | | 89253 | 92468 | |
| 1300 | | | | | | | | | 89258 | 91417 | |
| 1301 | | | | | | | | | 89302 | 91461 | |
| 1302 | | | | | | | | | 52248 | 55463 | |
| 1303 | | | | | | | | | 58821 | 62036 | |
| 1304 | | | | | | | | | 58887 | 62102 | |
| 1305 | | | | | | | | | 7905 | 11120 | |
| 1306 | | | | | | | | | 35425 | 38640 | |
| 1307 | | | | | | | | | 89142 | 92357 | |
| 1308 | | | | | | | | | 35344 | 38559 | |
| 1309 | | | | | | | | | 58887 | 62102 | |
| 1310 | | | | | | | | | 7905 | 11120 | |
| 1311 | | | | | | | | | 7905 | 11120 | |
| 1312 | | | | | | | | | 58887 | 62102 | |
| 1313 | | | | | | | | | 58887 | 62102 | |
| 1314 | | | | | | | | | 17266 | 20481 | |
| 1315 | | | | | | | | | 89142 | 92357 | |
| 1316 | | | | | | | | | 89180 | 92395 | |
| 1317 | | | | | | | | | 89217 | 92432 | |
| 1318 | | | | | | | | | 58887 | 62102 | |
| 1319 | | | | | | | | | 58887 | 62102 | |
| 1320 | | | | | | | | | 89216 | 92431 | |
| 1321 | | | | | | | | | 87144 | 90359 | |
| 1322 | | | | | | | | | 58887 | 62102 | |
| 1323 | | | | | | | | | 11773 | 14988 | |
| 1324 | | | | | | | | | 89258 | 92473 | |
| 1325 | | | | | | | | | 59129 | 62344 | |
| 1326 | | | | | | | | | 58887 | 62102 | |
| 1327 | | | | | | | | | 89301 | 92516 | |
| 1328 | | | | | | | | | 58887 | 62102 | |
| 1329 | | | | | | | | | 58887 | 62102 | |
| 1330 | | | | | | | | | 58887 | 62102 | |
| 1331 | | | | | | | | | 58887 | 62102 | |
| 1332 | | | | | | | | | 89302 | 92517 | |
| 1333 | | | | | | | | | 58831 | 62046 | |
| 1334 | | | | | | | | | 3137 | 6352 | |
| 1335 | | | | | | | | | 58887 | 62102 | |
| 1336 | | | | | | | | | 58887 | 62102 | |
| 1337 | | | | | | | | | 58887 | 62102 | |
| 1338 | | | | | | | | | 50208 | 53423 | |
| 1339 | | | | | | | | | 88375 | 91590 | |
| 1340 | | | | | | | | | 58887 | 62102 | |
| 1341 | | | | | | | | | 58887 | 62102 | |
| 1342 | | | | | | | | | 58887 | 62101 | |
| 1343 | | | | | | | | | 58888 | 62103 | |
| 1344 | | | | | | | | | 58888 | 62103 | |
| 1345 | | | | | | | | | 58821 | 62036 | |
| 1346 | | | | | | | | | 58887 | 62102 | |
| 1347 | | | | | | | | | 58764 | 61979 | |
| 1348 | | | | | | | | | 58887 | 62102 | |
| 1349 | | | | | | | | | 58887 | 62102 | |
| 1350 | | | | | | | | | 58887 | 62102 | |
| 1351 | | | | | | | | | 89258 | 92473 | |
| 1352 | | | | | | | | | 58887 | 62102 | |
| 1353 | | | | | | | | | 89302 | 92517 | |
| 1354 | | | | | | | | | 58887 | 62102 | |
| 1355 | | | | | | | | | 58890 | 62105 | |
| 1356 | | | | | | | | | 58887 | 62102 | |
| 1357 | | | | | | | | | 58887 | 62102 | |
| 1358 | | | | | | | | | 58887 | 61046 | |
| 1359 | | | | | | | | | 58887 | 62102 | |
| 1360 | | | | | | | | | 15133 | 18348 | |
| 1361 | | | | | | | | | 58887 | 62102 | |
| 1362 | | | | | | | | | 58887 | 62102 | |
| 1363 | | | | | | | | | 58887 | 62102 | |
| 1364 | | | | | | | | | 58887 | 62102 | |
| 1365 | | | | | | | | | 58887 | 62102 | |
| 1366 | | | | | | | | | 58887 | 62102 | |
| 1367 | | | | | | | | | 89215 | 92430 | |
| 1368 | | | | | | | | | 89173 | 92388 | |
| 1369 | | | | | | | | | 58887 | 62102 | |
| 1370 | | | | | | | | | 58887 | 62102 | |
| 1371 | | | | | | | | | 11492 | 14706 | Additional ThsA homolog KAI16288.1 |
| 1372 | | | | | | | | | 2720 | 5935 | |
| 1373 | | | | | | | | | 58887 | 62102 | |
| 1374 | | | | | | | | | 58887 | 62101 | Additional ThsA homolog KAI26858.1 |
| 1375 | | | | | | | | | 58887 | 62101 | Additional ThsA homolog KAI29885.1 |
| 1376 | | | | | | | | | 58887 | 62102 | |
| 1377 | | | | | | | | | 58887 | 62102 | |
| 1378 | | | | | | | | | 58887 | 62102 | |
| 1379 | | | | | | | | | 89266 | 92481 | |
| 1380 | | | | | | | | | 58887 | 62102 | |
| 1381 | | | | | | | | | 89181 | 92396 | |
| 1382 | | | | | | | | | 89181 | 92396 | |
| 1383 | | | | | | | | | 58887 | 62102 | |
| 1384 | | | | | | | | | 5826 | 9041 | |
| 1385 | | | | | | | | | 58821 | 62036 | |
| 1386 | | | | | | | | | 59195 | 62410 | |
| 1387 | | | | | | | | | 17302 | 20517 | |
| 1388 | | | | | | | | | 58887 | 62101 | Additional ThsA homolog KAI62094.1 |
| 1389 | | | | | | | | | 58887 | 62102 | |
| 1390 | | | | | | | | | 89257 | 92472 | |
| 1391 | | | | | | | | | 23094 | 26309 | |
| 1392 | | | | | | | | | 89302 | 92517 | |
| 1393 | | | | | | | | | 58887 | 62102 | |
| 1394 | | | | | | | | | 58887 | 62102 | |
| 1395 | | | | | | | | | 58887 | 62102 | |
| 1396 | | | | | | | | | 58887 | 62102 | |
| 1397 | | | | | | | | | 2720 | 5935 | |
| 1398 | | | | | | | | | 605684 | 608266 | |
| 1399 | | | | | | | | | 2378987 | 2381503 | |
| 1400 | | | | | | | | | 310640 | 313504 | |
| 1401 | | | | | | | | | 1255726 | 1257790 | |
| 1402 | | | | | | | | | 3826893 | 3828835 | |
| 1403 | | | | | | | | | 1485 | 3579 | |
| 1404 | | | | | | | | | 639688 | 643130 | |
| 1405 | | | | | | | | | 94340 | 96396 | |
| 1406 | | | | | | | | | 1102 | 3496 | |
| 1407 | | | | | | | | | 13655 | 15725 | |
| 1408 | | | | | | | | | 20332 | 22454 | |
| 1409 | | | | | | | | | 974 | 3096 | |
| 1410 | | | | | | | | | 374357 | 376479 | |
| 1411 | | | | | | | | | 74618 | 76770 | |
| 1412 | | | | | | | | | 1153 | 3114 | |
| 1413 | | | | | | | | | 41277 | 43918 | |
| 1414 | | | | | | | | | 69089 | 71153 | |
| 1415 | | | | | | | | | 179848 | 182525 | |
| 1416 | | | | | | | | | 11882 | 13968 | |
| 1417 | | | | | | | | | 12651 | 15458 | |
| 1418 | | | | | | | | | 3676 | 7033 | |
| 1419 | | | | | | | | | 8280 | 10222 | |
| 1420 | | | | | | | | | 2504 | 6185 | |
| 1421 | | | | | | | | | 7387 | 9539 | |
| 1422 | | | | | | | | | 47043 | 48958 | |
| 1423 | | | | | | | | | 241192 | 243134 | |
| 1424 | | | | | | | | | 1908 | 3989 | |
| 1425 | | | | | | | | | 37118 | 42808 | |
| 1426 | | | | | | | | | 1106 | 3500 | |
| 1427 | | | | | | | | | 163 | 2785 | |
| 1428 | | | | | | | | | 15686 | 18266 | |
| 1429 | | | | | | | | | 46608 | 48550 | |
| 1430 | | | | | | | | | 1044 | 3541 | |
| 1431 | | | | | | | | | 8558 | 14045 | |
| 1432 | | | | | | | | | 364692 | 367369 | |
| 1433 | | | | | | | | | 28016 | 30521 | |
| 1434 | | | | | | | | | 69058 | 71661 | |
| 1435 | | | | | | | | | 123469 | 126673 | |
| 1436 | | | | | | | | | 2503 | 6286 | |
| 1437 | | | | | | | | | 10631 | 14414 | |
| 1438 | | | | | | | | | 507977 | 509953 | |
| 1439 | | | | | | | | | 259469 | 261537 | |
| 1440 | | | | | | | | | 93299 | 100962 | Additional ThsA homolog KQL33554.1 |
| 1441 | | | | | | | | | 244173 | 247473 | |
| 1442 | | | | | | | | | 145624 | 150941 | |
| 1443 | | | | | | | | | 184894 | 190211 | |
| 1444 | | | | | | | | | 4452 | 6364 | |
| 1445 | | | | | | | | | 128226 | 130138 | |
| 1446 | | | | | | | | | 298909 | 301699 | |
| 1447 | | | | | | | | | 4866 | 10841 | |
| 1448 | | | | | | | | | 204433 | 206473 | |
| 1449 | | | | | | | | | 16453 | 18427 | |
| 1450 | KSG00431.1 | 17001 | 22358 | 284 | | | | | 2213 | 6247 | |
| 1451 | KSO26598.1 | 17006 | 22363 | 284 | | | | | 124680 | 128714 | |
| 1452 | KSQ24408.1 | 17011 | 22368 | 284 | | | | | 62982 | 67016 | |
| 1453 | | | | | | | | | 49733 | 52315 | |
| 1454 | | | | | | | | | 282217 | 284200 | |
| 1455 | | | | | | | | | 208592 | 217300 | |
| 1456 | | | | | | | | | 41760 | 43858 | |
| 1457 | | | | | | | | | 156668 | 159376 | |
| 1458 | | | | | | | | | 733755 | 736830 | |
| 1459 | | | | | | | | | 77736 | 79508 | Additional ThsA homolog CEA11435.1 |
| 1460 | | | | | | | | | 77793 | 79565 | Additional ThsA homolog CEA10431.1 |
| 1461 | | | | | | | | | 1337272 | 1339830 | Additional ThsA homolog CUU52509.1 |
| 1462 | | | | | | | | | 87151 | 89092 | |
| 1463 | | | | | | | | | 746 | 3553 | |
| 1464 | | | | | | | | | 1614 | 4421 | |
| 1465 | | | | | | | | | 2106 | 4913 | |
| 1466 | | | | | | | | | 131 | 1607 | |
| 1467 | | | | | | | | | 1 | 1432 | |
| 1468 | | | | | | | | | 8 | 1931 | |
| 1469 | | | | | | | | | 1077 | 3884 | |
| 1470 | | | | | | | | | 295 | 2073 | |
| 1471 | | | | | | | | | 2520 | 5327 | |
| 1472 | | | | | | | | | 14947 | 17754 | |
| 1473 | | | | | | | | | 131 | 2938 | |
| 1474 | | | | | | | | | 4405 | 7212 | |
| 1475 | | | | | | | | | 30227 | 33460 | |
| 1476 | | | | | | | | | 244740 | 246667 | |
| 1477 | | | | | | | | | 1617 | 5976 | |
| 1478 | | | | | | | | | 445956 | 448097 | |
| 1479 | | | | | | | | | 102 | 952 | |
| 1480 | | | | | | | | | 450 | 1300 | |
| 1481 | | | | | | | | | 55284 | 63357 | |
| 1482 | | | | | | | | | 42235 | 50308 | |
| 1483 | | | | | | | | | 55284 | 63357 | |
| 1484 | | | | | | | | | 981 | 2861 | |
| 1485 | | | | | | | | | 2598 | 11358 | |
| 1486 | | | | | | | | | 7069 | 9713 | |
| 1487 | | | | | | | | | 132958 | 135057 | |
| 1488 | | | | | | | | | 8547 | 11191 | |
| 1489 | | | | | | | | | 55235 | 57150 | |
| 1490 | | | | | | | | | 935 | 3606 | |
| 1491 | | | | | | | | | 935 | 3606 | |
| 1492 | | | | | | | | | 2598 | 11358 | |
| 1493 | | | | | | | | | 81585 | 84446 | |
| 1494 | | | | | | | | | 155366 | 164406 | |
| 1495 | | | | | | | | | 80319 | 82234 | |
| 1496 | | | | | | | | | 7669 | 9584 | |
| 1497 | | | | | | | | | 7624 | 9539 | |
| 1498 | | | | | | | | | 10977 | 13784 | |
| 1499 | | | | | | | | | 32084 | 34025 | |
| 1500 | | | | | | | | | 16664 | 18605 | |
| 1501 | | | | | | | | | 9359 | 11274 | |
| 1502 | | | | | | | | | 5128 | 7069 | |
| 1503 | | | | | | | | | 5113 | 7054 | |
| 1504 | | | | | | | | | 38647 | 40562 | |
| 1505 | | | | | | | | | 9513 | 11428 | |
| 1506 | | | | | | | | | 15944 | 17885 | |
| 1507 | | | | | | | | | 124218 | 126133 | |
| 1508 | | | | | | | | | 17640 | 19555 | |
| 1509 | | | | | | | | | 2202 | 4082 | |
| 1510 | | | | | | | | | 229143 | 231058 | |
| 1511 | | | | | | | | | 2404458 | 2405838 | |
| 1512 | | | | | | | | | 817577 | 818957 | |
| 1513 | | | | | | | | | 615084 | 616464 | |
| 1514 | | | | | | | | | 152013 | 153393 | |
| 1515 | | | | | | | | | 195157 | 198738 | |
| 1516 | | | | | | | | | 10904 | 18356 | |
| 1517 | | | | | | | | | 3334527 | 3335974 | |
| 1518 | | | | | | | | | 1341773 | 1343206 | |
| 1519 | | | | | | | | | 1844605 | 1846063 | |
| 1520 | | | | | | | | | 584164 | 585641 | |
| 1521 | | | | | | | | | 134834 | 136244 | |
| 1522 | | | | | | | | | 2071675 | 2073130 | |
| 1523 | | | | | | | | | 3926192 | 3927625 | |
| 1524 | | | | | | | | | 3874800 | 3876233 | |
| 1525 | | | | | | | | | 2458217 | 2461483 | |
| 1526 | | | | | | | | | 4332366 | 4333799 | |
| 1527 | | | | | | | | | 232808 | 234255 | |
| 1528 | | | | | | | | | 160530 | 161977 | |
| 1529 | | | | | | | | | 2481111 | 2482500 | |
| 1530 | | | | | | | | | 273049 | 274496 | |
| 1531 | | | | | | | | | 2639516 | 2640982 | |
| 1532 | | | | | | | | | 2812522 | 2813955 | |
| 1533 | | | | | | | | | 97573 | 99025 | |
| 1534 | | | | | | | | | 2075549 | 2077004 | |
| 1535 | | | | | | | | | 26 | 1071 | |
| 1536 | | | | | | | | | 2133 | 3628 | |
| 1537 | | | | | | | | | 84 | 1579 | |
| 1538 | | | | | | | | | 1084123 | 1085545 | |
| 1539 | | | | | | | | | 1084123 | 1085545 | |
| 1540 | | | | | | | | | 11228 | 12661 | |
| 1541 | | | | | | | | | 33036 | 34488 | |
| 1542 | | | | | | | | | 29409 | 30859 | |
| 1543 | | | | | | | | | 224969 | 226401 | |
| 1544 | | | | | | | | | 235 | 1667 | |
| 1545 | | | | | | | | | 2635439 | 2636872 | |
| 1546 | | | | | | | | | 428631 | 430077 | |
| 1547 | | | | | | | | | 25772 | 27249 | |
| 1548 | | | | | | | | | 914 | 2336 | |
| 1549 | | | | | | | | | 2463639 | 2465086 | |
| 1550 | | | | | | | | | 1 | 862 | |
| 1551 | | | | | | | | | 26558 | 27991 | |
| 1552 | | | | | | | | | 34236 | 35669 | |
| 1553 | | | | | | | | | 3765 | 5175 | |
| 1554 | | | | | | | | | 1734329 | 1735762 | |
| 1555 | | | | | | | | | 3509 | 4956 | |
| 1556 | | | | | | | | | 2790710 | 2792159 | |
| 1557 | | | | | | | | | 157503 | 158952 | |
| 1558 | | | | | | | | | 1926980 | 1928429 | |
| 1559 | | | | | | | | | 2177471 | 2178599 | |
| 1560 | | | | | | | | | 1830 | 3263 | |
| 1561 | | | | | | | | | 11498 | 12911 | |
| 1562 | | | | | | | | | 1519 | 2929 | |
| 1563 | | | | | | | | | 76033 | 77422 | |
| 1564 | | | | | | | | | 112479 | 113937 | |
| 1565 | | | | | | | | | 11530 | 12977 | |
| 1566 | | | | | | | | | 2365 | 3812 | |
| 1567 | | | | | | | | | 2349 | 3796 | |
| 1568 | | | | | | | | | 10610 | 12057 | |
| 1569 | | | | | | | | | 1347 | 2737 | |
| 1570 | | | | | | | | | 61132 | 62524 | |
| 1571 | | | | | | | | | 88884 | 90276 | |
| 1572 | | | | | | | | | 89055 | 90447 | |
| 1573 | | | | | | | | | 25772 | 27164 | |
| 1574 | | | | | | | | | 51881 | 53291 | |
| 1575 | | | | | | | | | 190051 | 191475 | |
| 1576 | | | | | | | | | 977432 | 978898 | |
| 1577 | | | | | | | | | 33964 | 35397 | |
| 1578 | | | | | | | | | 207130 | 208563 | |
| 1579 | | | | | | | | | 308501 | 309935 | |
| 1580 | | | | | | | | | 124638 | 126071 | |
| 1581 | | | | | | | | | 75914 | 77369 | |
| 1582 | | | | | | | | | 88200 | 89655 | |
| 1583 | | | | | | | | | 76300 | 77755 | |
| 1584 | | | | | | | | | 25517 | 26932 | |
| 1585 | | | | | | | | | 1192816 | 1194306 | |
| 1586 | | | | | | | | | 150195 | 151627 | |
| 1587 | | | | | | | | | 132737 | 134160 | |
| 1588 | | | | | | | | | 1955978 | 1958455 | |
| 1589 | | | | | | | | | 485658 | 488135 | |
| 1590 | | | | | | | | | 278588 | 281125 | |
| 1591 | | | | | | | | | 83713 | 86250 | |
| 1592 | | | | | | | | | 279549 | 282086 | |
| 1593 | | | | | | | | | 505157 | 507634 | |
| 1594 | | | | | | | | | 505059 | 507536 | |
| 1595 | | | | | | | | | 467434 | 469911 | |
| 1596 | | | | | | | | | 505205 | 507682 | |
| 1597 | | | | | | | | | 467455 | 469932 | |
| 1598 | | | | | | | | | 467255 | 469732 | |
| 1599 | | | | | | | | | 485332 | 487809 | |
| 1600 | | | | | | | | | 3065568 | 3066757 | |
| 1601 | | | | | | | | | 2559672 | 2561088 | |
| 1602 | | | | | | | | | 1235298 | 1236673 | |
| 1603 | | | | | | | | | 1860855 | 1862226 | |
| 1604 | | | | | | | | | 348719 | 350085 | |
| 1605 | | | | | | | | | 251369 | 252744 | |
| 1606 | | | | | | | | | 33638 | 35013 | |
| 1607 | | | | | | | | | 696957 | 698323 | |
| 1608 | | | | | | | | | 90011 | 91494 | |
| 1609 | | | | | | | | | 167083 | 168566 | |
| 1610 | | | | | | | | | 190234 | 191717 | |
| 1611 | | | | | | | | | 421379 | 422862 | |
| 1612 | | | | | | | | | 1485164 | 1486647 | |
| 1613 | | | | | | | | | 41076 | 42559 | |
| 1614 | | | | | | | | | 68604 | 70087 | |
| 1615 | | | | | | | | | 68623 | 70106 | |
| 1616 | | | | | | | | | 115692 | 117175 | |
| 1617 | | | | | | | | | 23055 | 24538 | |
| 1618 | | | | | | | | | 22088 | 23571 | |
| 1619 | | | | | | | | | 195988 | 197471 | |
| 1620 | | | | | | | | | 8031 | 9514 | |
| 1621 | | | | | | | | | 22905 | 24388 | |
| 1622 | | | | | | | | | 655324 | 656726 | |
| 1623 | | | | | | | | | 184 | 1586 | |
| 1624 | | | | | | | | | 378494 | 379896 | |
| 1625 | | | | | | | | | 2737817 | 2739300 | |
| 1626 | | | | | | | | | 188075 | 189558 | |
| 1627 | | | | | | | | | 217136 | 218619 | |
| 1628 | | | | | | | | | 4679 | 6125 | |
| 1629 | | | | | | | | | 618232 | 619597 | |
| 1630 | | | | | | | | | 58857 | 60199 | |
| 1631 | | | | | | | | | 25138 | 26419 | |
| 1632 | | | | | | | | | 878549 | 880212 | |
| 1633 | | | | | | | | | 1017795 | 1019207 | |
| 1634 | | | | | | | | | 970449 | 971790 | |
| 1635 | | | | | | | | | 279792 | 281124 | |
| 1636 | | | | | | | | | 234529 | 235862 | |
| 1637 | | | | | | | | | 43541 | 44877 | |
| 1638 | | | | | | | | | 24580 | 25916 | |
| 1639 | | | | | | | | | 26348 | 27675 | |
| 1640 | | | | | | | | | 4106 | 5433 | |
| 1641 | | | | | | | | | 432088 | 433415 | |
| 1642 | | | | | | | | | 2015511 | 2016838 | |
| 1643 | | | | | | | | | 198483 | 199621 | |
| 1644 | | | | | | | | | 12987 | 14314 | |
| 1645 | | | | | | | | | 10816 | 11954 | |
| 1646 | | | | | | | | | 1 | 738 | |
| 1647 | | | | | | | | | 45207 | 46534 | |
| 1648 | | | | | | | | | 15185 | 16512 | |
| 1649 | | | | | | | | | 11095 | 12233 | |
| 1650 | | | | | | | | | 16291 | 17618 | |
| 1651 | | | | | | | | | 922 | 2380 | |
| 1652 | | | | | | | | | 80649 | 82053 | |
| 1653 | | | | | | | | | 98527 | 99931 | |
| 1654 | | | | | | | | | 80649 | 82053 | |
| 1655 | | | | | | | | | 79320 | 80724 | |
| 1656 | | | | | | | | | 5485 | 6910 | |
| 1657 | | | | | | | | | 2391314 | 2392718 | |
| 1658 | | | | | | | | | 98697 | 100101 | |
| 1659 | | | | | | | | | 1629344 | 1630748 | |
| 1660 | | | | | | | | | 1587489 | 1588893 | |
| 1661 | | | | | | | | | 1758391 | 1759795 | |
| 1662 | | | | | | | | | 1761238 | 1762642 | |
| 1663 | | | | | | | | | 168103 | 169507 | |
| 1664 | | | | | | | | | 98697 | 100101 | |
| 1665 | | | | | | | | | 394942 | 396346 | |
| 1666 | | | | | | | | | 80649 | 82053 | |
| 1667 | | | | | | | | | 63660 | 64995 | |
| 1668 | | | | | | | | | 157063 | 158363 | |
| 1669 | | | | | | | | | 3080200 | 3081662 | |
| 1670 | | | | | | | | | 73291 | 74729 | |
| 1671 | | | | | | | | | 15431 | 16773 | |
| 1672 | | | | | | | | | 367310 | 368729 | |
| 1673 | | | | | | | | | 1719 | 3138 | |
| 1674 | | | | | | | | | 86400 | 87735 | |
| 1675 | | | | | | | | | 17508 | 18843 | |
| 1676 | | | | | | | | | 552979 | 555192 | |
| 1677 | | | | | | | | | 537536 | 538890 | |
| 1678 | | | | | | | | | 50209 | 51614 | |
| 1679 | | | | | | | | | 18293 | 19811 | |
| 1680 | | | | | | | | | 855094 | 856495 | |
| 1681 | | | | | | | | | 790419 | 791775 | |
| 1682 | | | | | | | | | 151715 | 153071 | |
| 1683 | | | | | | | | | 1035215 | 1036571 | |
| 1684 | | | | | | | | | 61907 | 63263 | |
| 1685 | | | | | | | | | 52334 | 53516 | |
| 1686 | | | | | | | | | 51361 | 52543 | |
| 1687 | | | | | | | | | 16395 | 17577 | |
| 1688 | | | | | | | | | 15348 | 16530 | |
| 1689 | | | | | | | | | 774460 | 775816 | |
| 1690 | | | | | | | | | 951413 | 952763 | |
| 1691 | | | | | | | | | 3133822 | 3135172 | |
| 1692 | | | | | | | | | 1666481 | 1667831 | |
| 1693 | | | | | | | | | 1054353 | 1055733 | |
| 1694 | | | | | | | | | 3639547 | 3640897 | |
| 1695 | | | | | | | | | 763489 | 764869 | |
| 1696 | | | | | | | | | 4111 | 5512 | |
| 1697 | | | | | | | | | 3956631 | 3958032 | |
| 1698 | | | | | | | | | 10999 | 12349 | |
| 1699 | | | | | | | | | 51317 | 52718 | |
| 1700 | | | | | | | | | 51317 | 52718 | |
| 1701 | | | | | | | | | 163388 | 164744 | |
| 1702 | | | | | | | | | 207731 | 209087 | |
| 1703 | | | | | | | | | 834005 | 835406 | |
| 1704 | | | | | | | | | 825117 | 826473 | |
| 1705 | | | | | | | | | 848376 | 849726 | |
| 1706 | | | | | | | | | 51424 | 52804 | |
| 1707 | | | | | | | | | 4446 | 5796 | |
| 1708 | | | | | | | | | 4446 | 5796 | |
| 1709 | | | | | | | | | 182936 | 184286 | |
| 1710 | | | | | | | | | 179243 | 180593 | |
| 1711 | | | | | | | | | 4446 | 5796 | |
| 1712 | | | | | | | | | 4446 | 5796 | |
| 1713 | | | | | | | | | 4417 | 5797 | |
| 1714 | | | | | | | | | 179237 | 180587 | |
| 1715 | | | | | | | | | 179433 | 180783 | |
| 1716 | | | | | | | | | 4412 | 5762 | |
| 1717 | | | | | | | | | 2681 | 4031 | |
| 1718 | | | | | | | | | 181925 | 183305 | |
| 1719 | | | | | | | | | 4443 | 5823 | |
| 1720 | | | | | | | | | 51272 | 52652 | |
| 1721 | | | | | | | | | 179390 | 180770 | |
| 1722 | | | | | | | | | 4412 | 5762 | |
| 1723 | | | | | | | | | 179263 | 180613 | |
| 1724 | | | | | | | | | 53137 | 54487 | |
| 1725 | | | | | | | | | 182219 | 183599 | |
| 1726 | | | | | | | | | 347718 | 349068 | |
| 1727 | | | | | | | | | 4443 | 5823 | |
| 1728 | | | | | | | | | 179226 | 180606 | |
| 1729 | | | | | | | | | 179431 | 180781 | |
| 1730 | | | | | | | | | 4446 | 5796 | |
| 1731 | | | | | | | | | 4446 | 5826 | |
| 1732 | | | | | | | | | 181022 | 182402 | |
| 1733 | | | | | | | | | 4446 | 5826 | |
| 1734 | | | | | | | | | 179425 | 180775 | |
| 1735 | | | | | | | | | 181377 | 182727 | |
| 1736 | | | | | | | | | 4443 | 5793 | |
| 1737 | | | | | | | | | 179233 | 180613 | |
| 1738 | | | | | | | | | 4446 | 5826 | |
| 1739 | | | | | | | | | 179233 | 180613 | |
| 1740 | | | | | | | | | 4442 | 5792 | |
| 1741 | | | | | | | | | 201348 | 202728 | |
| 1742 | | | | | | | | | 179317 | 180667 | |
| 1743 | | | | | | | | | 143710 | 145060 | |
| 1744 | | | | | | | | | 56633 | 58013 | |
| 1745 | | | | | | | | | 2681 | 4061 | |
| 1746 | | | | | | | | | 2680 | 4060 | |
| 1747 | | | | | | | | | 837068 | 838424 | |
| 1748 | | | | | | | | | 837352 | 838708 | |
| 1749 | | | | | | | | | 3604904 | 3606260 | |
| 1750 | | | | | | | | | 2690 | 4070 | |
| 1751 | | | | | | | | | 4446 | 5826 | |
| 1752 | | | | | | | | | 179438 | 180788 | |
| 1753 | | | | | | | | | 179224 | 180604 | |
| 1754 | | | | | | | | | 4441 | 5791 | |
| 1755 | | | | | | | | | 179249 | 180599 | |
| 1756 | | | | | | | | | 4446 | 5826 | |
| 1757 | | | | | | | | | 51372 | 52722 | |
| 1758 | | | | | | | | | 4446 | 5826 | |
| 1759 | | | | | | | | | 4425 | 5775 | |
| 1760 | | | | | | | | | 4446 | 5796 | |
| 1761 | | | | | | | | | 4446 | 5826 | |
| 1762 | | | | | | | | | 4446 | 5796 | |
| 1763 | | | | | | | | | 4425 | 5775 | |
| 1764 | | | | | | | | | 179241 | 180591 | |
| 1765 | | | | | | | | | 4412 | 5762 | |
| 1766 | | | | | | | | | 179408 | 180788 | |
| 1767 | | | | | | | | | 4441 | 5821 | |
| 1768 | | | | | | | | | 179422 | 180772 | |
| 1769 | | | | | | | | | 179114 | 180494 | |
| 1770 | | | | | | | | | 179207 | 180587 | |
| 1771 | | | | | | | | | 52653 | 54033 | |
| 1772 | | | | | | | | | 4378 | 5758 | |
| 1773 | | | | | | | | | 4437 | 5787 | |
| 1774 | | | | | | | | | 179117 | 180467 | |
| 1775 | | | | | | | | | 179226 | 180606 | |
| 1776 | | | | | | | | | 179442 | 180792 | |
| 1777 | | | | | | | | | 4414 | 5764 | |
| 1778 | | | | | | | | | 179412 | 180792 | |
| 1779 | | | | | | | | | 4446 | 5826 | |
| 1780 | | | | | | | | | 180295 | 181645 | |
| 1781 | | | | | | | | | 179423 | 180803 | |
| 1782 | | | | | | | | | 51342 | 52722 | |
| 1783 | | | | | | | | | 179412 | 180792 | |
| 1784 | | | | | | | | | 4443 | 5793 | |
| 1785 | | | | | | | | | 347708 | 349088 | |
| 1786 | | | | | | | | | 4433 | 5783 | |
| 1787 | | | | | | | | | 2676 | 4026 | |
| 1788 | | | | | | | | | 2664 | 4044 | |
| 1789 | | | | | | | | | 2671 | 4051 | |
| 1790 | | | | | | | | | 179328 | 180708 | |
| 1791 | | | | | | | | | 2675 | 4055 | |
| 1792 | | | | | | | | | 247106 | 248456 | |
| 1793 | | | | | | | | | 2662 | 4042 | |
| 1794 | | | | | | | | | 137298 | 138678 | |
| 1795 | | | | | | | | | 179122 | 180472 | |
| 1796 | | | | | | | | | 181161 | 182511 | |
| 1797 | | | | | | | | | 24097 | 26600 | |
| 1798 | | | | | | | | | 1774206 | 1776730 | |
| 1799 | | | | | | | | | 2995200 | 2997724 | |
| 1800 | | | | | | | | | 215678 | 217047 | |
| 1801 | | | | | | | | | 11 | 1365 | |
| 1802 | | | | | | | | | 433369 | 434723 | |
| 1803 | | | | | | | | | 116084 | 117447 | |
| 1804 | | | | | | | | | 134 | 1383 | |
| 1805 | | | | | | | | | 614798 | 616228 | |
| 1806 | | | | | | | | | 2913 | 4396 | |
| 1807 | | | | | | | | | 1236162 | 1237611 | |
| 1808 | | | | | | | | | 52273 | 54418 | |
| 1809 | | | | | | | | | 103276 | 104603 | |
| 1810 | | | | | | | | | 103269 | 104596 | |
| 1811 | | | | | | | | | 230894 | 232214 | |
| 1812 | | | | | | | | | 32976 | 34498 | |
| 1813 | | | | | | | | | 142644 | 144066 | |
| 1814 | | | | | | | | | 2712 | 4835 | |
| 1815 | | | | | | | | | 399088 | 400472 | |
| 1816 | | | | | | | | | 239679 | 241054 | |
| 1817 | | | | | | | | | 1893650 | 1894991 | |
| 1818 | | | | | | | | | 392918 | 394286 | |
| 1819 | | | | | | | | | 845508 | 848346 | Additional ThsA homolog EHI61161.1 and EHI61160.1 |
| 1820 | | | | | | | | | 8273 | 9663 | |
| 1821 | | | | | | | | | 5106952 | 5108412 | |
| 1822 | | | | | | | | | 67402 | 68729 | |
| 1823 | | | | | | | | | 385610 | 386991 | |
| 1824 | | | | | | | | | 391196 | 392625 | |
| 1825 | | | | | | | | | 10416 | 11602 | |
| 1826 | | | | | | | | | 1 | 1463 | |
| 1827 | | | | | | | | | 1773192 | 1774570 | |
| 1828 | | | | | | | | | 93771 | 95197 | |
| 1829 | | | | | | | | | 52979 | 54377 | |
| 1830 | | | | | | | | | 169073 | 170436 | |
| 1831 | | | | | | | | | 111454 | 112853 | |
| 1832 | | | | | | | | | 295 | 1674 | |
| 1833 | | | | | | | | | 52811 | 54295 | |
| 1834 | | | | | | | | | 22017 | 23446 | |
| 1835 | | | | | | | | | 46093 | 47494 | |
| 1836 | | | | | | | | | 10780 | 12281 | |
| 1837 | | | | | | | | | 578586 | 580026 | |
| 1838 | | | | | | | | | 18949 | 20411 | |
| 1839 | | | | | | | | | 1720 | 3139 | |
| 1840 | | | | | | | | | 402136 | 403598 | |
| 1841 | | | | | | | | | 17069 | 18543 | |
| 1842 | | | | | | | | | 778829 | 780278 | |
| 1843 | | | | | | | | | 239846 | 241330 | |
| 1844 | | | | | | | | | 8796 | 9991 | |
| 1845 | | | | | | | | | 8027 | 9442 | |
| 1846 | | | | | | | | | 10583 | 11998 | |
| 1847 | | | | | | | | | 10583 | 11998 | |
| 1848 | | | | | | | | | 101221 | 102636 | |
| 1849 | | | | | | | | | 108258 | 109673 | |
| 1850 | | | | | | | | | 73923 | 75338 | |
| 1851 | | | | | | | | | 9557 | 10972 | |
| 1852 | | | | | | | | | 8731 | 10146 | |
| 1853 | | | | | | | | | 10583 | 11998 | |
| 1854 | | | | | | | | | 9409 | 10824 | |
| 1855 | | | | | | | | | 3016 | 4431 | |
| 1856 | | | | | | | | | 9405 | 10820 | |
| 1857 | | | | | | | | | 10583 | 11998 | |
| 1858 | | | | | | | | | 73814 | 75229 | |
| 1859 | | | | | | | | | 10583 | 11998 | |
| 1860 | | | | | | | | | 75727 | 77531 | Additional ThsA homolog ERH59123.1 |
| 1861 | | | | | | | | | 2134919 | 2137041 | |
| 1862 | | | | | | | | | 794273 | 796356 | |
| 1863 | | | | | | | | | 27958 | 29914 | |
| 1864 | | | | | | | | | 58581 | 61165 | |
| 1865 | | | | | | | | | 25655 | 27734 | |
| 1866 | | | | | | | | | 2276956 | 2281580 | |
| 1867 | | | | | | | | | 214397 | 218349 | |
| 1868 | | | | | | | | | 2202763 | 2205300 | |
| 1869 | | | | | | | | | 72963 | 75500 | |
| 1870 | | | | | | | | | 72753 | 75290 | |
| 1871 | | | | | | | | | 335401 | 337938 | |
| 1872 | | | | | | | | | 73026 | 75563 | |
| 1873 | | | | | | | | | 96286 | 98823 | |
| 1874 | | | | | | | | | 78963 | 81500 | |
| 1875 | | | | | | | | | 626450 | 628927 | |
| 1876 | | | | | | | | | 2144499 | 2147036 | |
| 1877 | | | | | | | | | 2144499 | 2147036 | |
| 1878 | | | | | | | | | 857876 | 860413 | |
| 1879 | | | | | | | | | 190277 | 192754 | |
| 1880 | | | | | | | | | 292755 | 295292 | |
| 1881 | | | | | | | | | 332657 | 335194 | |
| 1882 | | | | | | | | | 333878 | 336415 | |
| 1883 | | | | | | | | | 294681 | 297218 | |
| 1884 | | | | | | | | | 115649 | 118186 | |
| 1885 | | | | | | | | | 332547 | 335084 | |
| 1886 | | | | | | | | | 315968 | 318505 | |
| 1887 | | | | | | | | | 299437 | 301974 | |
| 1888 | | | | | | | | | 294697 | 297234 | |
| 1889 | | | | | | | | | 415578 | 418115 | |
| 1890 | | | | | | | | | 299437 | 301974 | |
| 1891 | | | | | | | | | 919475 | 922012 | |
| 1892 | | | | | | | | | 751819 | 754356 | |
| 1893 | | | | | | | | | 414378 | 416915 | |
| 1894 | | | | | | | | | 430384 | 432921 | |
| 1895 | | | | | | | | | 1711734 | 1714271 | |
| 1896 | | | | | | | | | 1827507 | 1830044 | |
| 1897 | | | | | | | | | 807551 | 810088 | |
| 1898 | | | | | | | | | 722094 | 724631 | |
| 1899 | | | | | | | | | 2570589 | 2573126 | |
| 1900 | | | | | | | | | 771268 | 773805 | |
| 1901 | | | | | | | | | 769990 | 772527 | |
| 1902 | | | | | | | | | 1718201 | 1720738 | |
| 1903 | | | | | | | | | 763807 | 766344 | |
| 1904 | | | | | | | | | 745301 | 747838 | |
| 1905 | | | | | | | | | 1739780 | 1742317 | |
| 1906 | | | | | | | | | 1808916 | 1811453 | |
| 1907 | | | | | | | | | 1830255 | 1832792 | |
| 1908 | | | | | | | | | 637302 | 639839 | |
| 1909 | | | | | | | | | 2820435 | 2822972 | |
| 1910 | | | | | | | | | 4138023 | 4140560 | |
| 1911 | | | | | | | | | 952621 | 955158 | |
| 1912 | | | | | | | | | 424893 | 427430 | |
| 1913 | | | | | | | | | 4840540 | 4843077 | |
| 1914 | | | | | | | | | 415549 | 418086 | |
| 1915 | | | | | | | | | 2733635 | 2736172 | |
| 1916 | | | | | | | | | 949017 | 951554 | |
| 1917 | | | | | | | | | 328880 | 331417 | |
| 1918 | | | | | | | | | 390295 | 392832 | |
| 1919 | | | | | | | | | 977582 | 980119 | |
| 1920 | | | | | | | | | 1830964 | 1833501 | |
| 1921 | | | | | | | | | 767420 | 769957 | |
| 1922 | | | | | | | | | 1643560 | 1646097 | |
| 1923 | | | | | | | | | 1378858 | 1381395 | |
| 1924 | | | | | | | | | 755487 | 758023 | |
| 1925 | | | | | | | | | 881168 | 883705 | |
| 1926 | | | | | | | | | 1825551 | 1828088 | |
| 1927 | | | | | | | | | 738544 | 741081 | |
| 1928 | | | | | | | | | 142767 | 145304 | |
| 1929 | | | | | | | | | 964862 | 967399 | |
| 1930 | | | | | | | | | 776235 | 778772 | |
| 1931 | | | | | | | | | 655024 | 657561 | |
| 1932 | | | | | | | | | 1874434 | 1876971 | |
| 1933 | | | | | | | | | 624797 | 627334 | |
| 1934 | | | | | | | | | 128934 | 131471 | |
| 1935 | | | | | | | | | 136721 | 139258 | |
| 1936 | | | | | | | | | 1726846 | 1729383 | |
| 1937 | | | | | | | | | 823627 | 826164 | |
| 1938 | | | | | | | | | 1937935 | 1940472 | |
| 1939 | | | | | | | | | 1944646 | 1947183 | |
| 1940 | | | | | | | | | 993314 | 995851 | |
| 1941 | | | | | | | | | 821085 | 823622 | |
| 1942 | | | | | | | | | 651372 | 653909 | |
| 1943 | | | | | | | | | 958507 | 962380 | |
| 1944 | | | | | | | | | 1037695 | 1040232 | |
| 1945 | | | | | | | | | 2023087 | 2025624 | |
| 1946 | | | | | | | | | 413025 | 415562 | |
| 1947 | | | | | | | | | 925402 | 927939 | |
| 1948 | | | | | | | | | 1824339 | 1826876 | |
| 1949 | | | | | | | | | 1963306 | 1965843 | |
| 1950 | | | | | | | | | 1723817 | 1726354 | |
| 1951 | | | | | | | | | 1061869 | 1064406 | |
| 1952 | | | | | | | | | 455375 | 457912 | |
| 1953 | | | | | | | | | 99107 | 101644 | |
| 1954 | | | | | | | | | 134788 | 137325 | |
| 1955 | | | | | | | | | 415169 | 417706 | |
| 1956 | | | | | | | | | 411378 | 413915 | |
| 1957 | | | | | | | | | 1723198 | 1725735 | |
| 1958 | | | | | | | | | 969440 | 971977 | |
| 1959 | | | | | | | | | 119038 | 121575 | |
| 1960 | | | | | | | | | 779299 | 781836 | |
| 1961 | | | | | | | | | 837980 | 840517 | |
| 1962 | | | | | | | | | 957690 | 960227 | |
| 1963 | | | | | | | | | 647128 | 649665 | |
| 1964 | | | | | | | | | 1304387 | 1306924 | |
| 1965 | | | | | | | | | 118566 | 121103 | |
| 1966 | | | | | | | | | 964548 | 967085 | |
| 1967 | | | | | | | | | 1037220 | 1039757 | |
| 1968 | | | | | | | | | 1765512 | 1768049 | |
| 1969 | | | | | | | | | 959782 | 962319 | |
| 1970 | | | | | | | | | 1631617 | 1634154 | |
| 1971 | | | | | | | | | 955226 | 957763 | |
| 1972 | | | | | | | | | 1051957 | 1054494 | |
| 1973 | | | | | | | | | 404789 | 407326 | |
| 1974 | | | | | | | | | 994327 | 996864 | |
| 1975 | | | | | | | | | 422844 | 425381 | |
| 1976 | | | | | | | | | 1057307 | 1059844 | |
| 1977 | | | | | | | | | 752850 | 755387 | |
| 1978 | | | | | | | | | 435581 | 438118 | |
| 1979 | | | | | | | | | 415671 | 418208 | |
| 1980 | | | | | | | | | 593893 | 596430 | |
| 1981 | | | | | | | | | 2084900 | 2087438 | |
| 1982 | | | | | | | | | 945151 | 947688 | |
| 1983 | | | | | | | | | 699363 | 701900 | |
| 1984 | | | | | | | | | 696094 | 698631 | |
| 1985 | | | | | | | | | 1817777 | 1820314 | |
| 1986 | | | | | | | | | 844786 | 847323 | |
| 1987 | | | | | | | | | 140683 | 143220 | |
| 1988 | | | | | | | | | 849733 | 852270 | |
| 1989 | | | | | | | | | 840414 | 842951 | |
| 1990 | | | | | | | | | 949044 | 951581 | |
| 1991 | | | | | | | | | 415164 | 417701 | |
| 1992 | | | | | | | | | 863928 | 866465 | |
| 1993 | | | | | | | | | 415572 | 418109 | |
| 1994 | | | | | | | | | 747799 | 750336 | |
| 1995 | | | | | | | | | 418408 | 420945 | |
| 1996 | | | | | | | | | 961748 | 964285 | |
| 1997 | | | | | | | | | 419569 | 422106 | |
| 1998 | | | | | | | | | 1015638 | 1018175 | |
| 1999 | | | | | | | | | 889676 | 892213 | |
| 2000 | | | | | | | | | 948468 | 951005 | |
| 2001 | | | | | | | | | 1885183 | 1887720 | |
| 2002 | | | | | | | | | 966038 | 968575 | |
| 2003 | | | | | | | | | 960076 | 962613 | |
| 2004 | | | | | | | | | 122404 | 124941 | |
| 2005 | | | | | | | | | 1681006 | 1683543 | |
| 2006 | | | | | | | | | 993136 | 995673 | |
| 2007 | | | | | | | | | 998786 | 1001323 | |
| 2008 | | | | | | | | | 423592 | 426129 | |
| 2009 | | | | | | | | | 119049 | 121586 | |
| 2010 | | | | | | | | | 967343 | 969880 | |
| 2011 | | | | | | | | | 777273 | 779810 | |
| 2012 | | | | | | | | | 333878 | 336415 | |
| 2013 | | | | | | | | | 135104 | 137641 | |
| 2014 | | | | | | | | | 414973 | 417510 | |
| 2015 | | | | | | | | | 415129 | 417666 | |
| 2016 | | | | | | | | | 953263 | 955800 | |
| 2017 | | | | | | | | | 413367 | 415904 | |
| 2018 | | | | | | | | | 422253 | 424790 | |
| 2019 | | | | | | | | | 414879 | 417416 | |
| 2020 | | | | | | | | | 332578 | 335115 | |
| 2021 | | | | | | | | | 72684 | 74543 | |
| 2022 | | | | | | | | | 991 | 3528 | |
| 2023 | | | | | | | | | 72684 | 75221 | |
| 2024 | | | | | | | | | 204036 | 206573 | |
| 2025 | | | | | | | | | 51535 | 54072 | |
| 2026 | | | | | | | | | 70748 | 73285 | |
| 2027 | | | | | | | | | 166520 | 169057 | |
| 2028 | | | | | | | | | 1268434 | 1270971 | |
| 2029 | | | | | | | | | 327480 | 330017 | |
| 2030 | | | | | | | | | 1970301 | 1972838 | |
| 2031 | | | | | | | | | 6539 | 9076 | |
| 2032 | | | | | | | | | 2178487 | 2181024 | |
| 2033 | | | | | | | | | 3086900 | 3089437 | |
| 2034 | | | | | | | | | 1764944 | 1767481 | |
| 2035 | | | | | | | | | 892818 | 895355 | |
| 2036 | | | | | | | | | 724298 | 726835 | |
| 2037 | | | | | | | | | 2073702 | 2076179 | |
| 2038 | | | | | | | | | 16866 | 19343 | |
| 2039 | | | | | | | | | 11451 | 13928 | |
| 2040 | | | | | | | | | 14738 | 17215 | |
| 2041 | | | | | | | | | 22974 | 25451 | |
| 2042 | | | | | | | | | 163601 | 166078 | |
| 2043 | | | | | | | | | 55002 | 57479 | |
| 2044 | | | | | | | | | 2345 | 4822 | |
| 2045 | | | | | | | | | 1414 | 3891 | |
| 2046 | | | | | | | | | 36221 | 38698 | |
| 2047 | | | | | | | | | 11452 | 13929 | |
| 2048 | | | | | | | | | 11452 | 13929 | |
| 2049 | | | | | | | | | 11452 | 13929 | |
| 2050 | | | | | | | | | 11455 | 13932 | |
| 2051 | | | | | | | | | 11448 | 13925 | |
| 2052 | | | | | | | | | 11452 | 13929 | |
| 2053 | | | | | | | | | 4703 | 7180 | |
| 2054 | | | | | | | | | 11452 | 13929 | |
| 2055 | | | | | | | | | 56836 | 59313 | |
| 2056 | | | | | | | | | 54998 | 57475 | |
| 2057 | | | | | | | | | 11567 | 14044 | |
| 2058 | | | | | | | | | 18041 | 20518 | |
| 2059 | | | | | | | | | 11452 | 13929 | |
| 2060 | | | | | | | | | 36219 | 38696 | |
| 2061 | | | | | | | | | 11452 | 13929 | |
| 2062 | | | | | | | | | 11450 | 13927 | |
| 2063 | | | | | | | | | 120924 | 123401 | |
| 2064 | | | | | | | | | 36218 | 38695 | |
| 2065 | | | | | | | | | 11448 | 13925 | |
| 2066 | | | | | | | | | 11452 | 13929 | |
| 2067 | | | | | | | | | 11452 | 13929 | |
| 2068 | | | | | | | | | 12006 | 14543 | |
| 2069 | | | | | | | | | 117483 | 119960 | |
| 2070 | | | | | | | | | 6719 | 9196 | |
| 2071 | | | | | | | | | 9656 | 12133 | |
| 2072 | | | | | | | | | 94488 | 96965 | |
| 2073 | | | | | | | | | 2528497 | 2530974 | |
| 2074 | | | | | | | | | 1447 | 5265 | |
| 2075 | | | | | | | | | 307506 | 309710 | |
| 2076 | | | | | | | | | 445336 | 447510 | |
| 2077 | | | | | | | | | 197601 | 199542 | |
| 2078 | | | | | | | | | 1343346 | 1345843 | |
| 2079 | | | | | | | | | 1895 | 4396 | |
| 2080 | | | | | | | | | 4806 | 7307 | |
| 2081 | | | | | | | | | 19162 | 21686 | |
| 2082 | | | | | | | | | 185651 | 188127 | |
| 2083 | | | | | | | | | 166065 | 168541 | |
| 2084 | | | | | | | | | 1030001 | 1032525 | |
| 2085 | | | | | | | | | 158687 | 161211 | |
| 2086 | | | | | | | | | 664126 | 666650 | |
| 2087 | | | | | | | | | 1383218 | 1385739 | |
| 2088 | | | | | | | | | 247534 | 250011 | |
| 2089 | | | | | | | | | 19324 | 21800 | |
| 2090 | | | | | | | | | 3794 | 6270 | |
| 2091 | | | | | | | | | 205986 | 208462 | |
| 2092 | | | | | | | | | 163830 | 166306 | |
| 2093 | | | | | | | | | 17595 | 20119 | |
| 2094 | | | | | | | | | 127282 | 129675 | |
| 2095 | | | | | | | | | 140059 | 142319 | |
| 2096 | | | | | | | | | 607545 | 609474 | |
| 2097 | | | | | | | | | 17857 | 20090 | |
| 2098 | | | | | | | | | 811700 | 814237 | |
| 2099 | | | | | | | | | 571 | 3852 | Additional ThsA homolog CDE34944.1 |
| 2100 | | | | | | | | | 1837917 | 1847352 | |

[2113] The TIR domain gene, thsB, has a strong tendency (35%) to appear in multiple copies clustered around the thsA gene (FIG. 5A). Such duplication is typical to specificity-conferring genes in defense systems (such as the S subunit in type I R-M systems), where duplication followed by diversification serves for multiple specificities of the system. It is therefore possible that the TIR domain gene is responsible for identification of specific phage patterns, with multiple TIR domain genes serving for recognition of different phage components. Under this hypothesis, it is tempting to suggest that Thoeris is the prokaryotic ancestral form of pathogen-associated molecular pattern (PAMP) receptors.

[2114] A recent study showed that TIR domains can have enzymatic NAD+ hydrolase activities. In animal neurons, NAD+ hydrolase activity of the SARM1 TIR domain-containing gene leads to NAD+ depletion and generation of ADP-ribose and cyclic ADP-ribose that form signaling molecules regulating axonal degeneration. An E99A point mutation in the B. amyloliquefaciens Y2 KwaB protein, which aligns with the catalytic residue in the SARM1 NAD-cleaving TIR domain (FIG. 5E) abolished the protective activity of Thoeris (FIG. 5C). Moreover, point mutations in the ThsA NAD binding site predicted to abolish NAD binding also resulted in system inactivation (ThsA:N112A and ThsA:D100A/N115A for the B. cereus and B. amyloliquefaciens systems, respectively). These results mark NAD+ binding and hydrolysis as essential for the anti-phage activity of the Thoeris system.

### Example 6

### Genomic Identification and Analysis of the Druantia System

[2115] Objective:

[2116] Identify the candidate defense system based on the enrichment of the anchor COG1205.

[2117] Methods:

[2118] As above

[2119] Results:

[2120] Another system worthwhile of a brief discussion is the Druantia system (named after a deity from the Gallic mythology). This system is characterized by a very large protein (˜1800-2100aa) containing a DUF1998 (a domain of unknown function), as well as a helicase signature and a Walker A/B motif suggestive of ATP utilization. This polypeptide, named DruE, is encoded by a very large gene, named druE.

[2121] The druE gene is typically preceded by a set of highly variable genes with no recognizable domains or function prediction—either 3 genes sized 350-600aa each (Type I; druB, druC, and drub), or two genes sized 700aa-900aa (Type II; druX, druY), or a single large gene of 1000-1200aa (Type III; druF) (FIGS. 6A and 6B). The system is in some cases also preceded by a gene druA, annotated as DUF4338, comprising yet another domain of unknown function; and Type II systems are also associated with a cytosine methylase (FIG. 6A). In at least one instance, druA was downstream (3′) of the druE gene. (FIG. 6A—second embodiment of a Type I Druantia system)

[2122] A Type I system (FIG. 6B) cloned from E. coli UMEA 4076-1 into E. coli MG1655 rendered the engineered strain resistant against 4 of the 6 phages tested, and by serially deleting each of the 4 genes in this system, it was verified that all 4 are essential for its activity (FIG. 6C). Notably, DUF1998-containing genes are among the components of the recently reported DISARM and Dpd defense systems, where their function is also unknown. The sheer size of the Druantia system (12 kb of genomic DNA) was unexpected and surprising, suggesting a complex function, and the near-complete absence of recognizable domains in its encoded polypeptides is suggestive of a new mode of defense not shared by prokaryotic defense systems whose mechanism are currently understood.

[2123] Elements of the Druantia system (Types I, II, and III, are presented in Table 10.

TABLE 10
The Druantia Defense System and Components Thereof
This table is presented in landscape orientation. Due to the number of columns, the table
has been split into parts. Part A includes the first set of columns and therefore should
be place to the left of subsequent parts (Part B and where relevant Part C). To avoid any
doubt, the rows of the table in each part line up once the tables are placed together.
(Part A)

| | | | | | | | | | I |
|---|---|---|---|---|---|---|---|---|---|
| | A | B | C | D | E | F | G | H | #genes |
| 1 | assembly_accession | taxid | species_taxid | organism_name | infraspecific_name | phylum | genomic_accession | Type | identified |
| 2 | GCA_001372455.1 | 1505 | 1505 | [Clostridium] sordellii | R26833 | Firmicutes | CELG01000003.1 | I | 4 |
| 3 | GCA_001516615.1 | 1765683 | 1765683 | Acidibacillus ferrooxidans | ITV01 | Firmicutes | LPVJ01000027.1 | I | 5 |
| 4 | GCA_000367505.1 | 1315967 | 33934 | Anoxybacillus flavithermus NBRC 109594 | NBRC 109594 | Firmicutes | BARH01000005.1 | I | 4 |
| 5 | GCA_001425485.1 | 1736375 | 1736375 | Aureimonas sp. Leaf427 | Leaf427 | Proteobacteria | LMQW01000021.1 | I | 3 |
| 6 | GCA_001425525.1 | 1736384 | 1736384 | Aureimonas sp. Leaf460 | Leaf460 | Proteobacteria | LMQY01000066.1 | I | 3 |
| 7 | GCA_001043655.1 | 1396 | 1396 | Bacillus cereus | LK9 | Firmicutes | LDUP01000008.1 | I | 4 |
| 8 | GCA_000291115.1 | 1053212 | 1396 | Bacillus cereus HuB5-5 | HuB5-5 | Firmicutes | JH792120.1 | I | 4 |
| 9 | GCA_001048695.1 | 1499688 | 1499688 | Bacillus sp. LF1 | LF1 | Firmicutes | CVRB01000003.1 | I | 4 |
| 10 | GCA_000708005.1 | 1454376 | 28026 | Bifidobacterium pseudocatenulatum IPLA36007 | IPLA36007 | Actinobacteria | JEOD01000003.1 | I | 3 |
| 11 | GCA_000513015.1 | 1161409 | 1161409 | Bifidobacterium sp. MSTE12 | MSTE12 | Actinobacteria | AZYA01000034.1 | I | 3 |
| 12 | GCA_001402875.1 | 1079 | 1079 | Blastochloris viridis | ATCC 19567 | Proteobacteria | CP012946.1 | I | 3 |
| 13 | GCA_001459775.1 | 1079 | 1079 | Blastochloris viridis | | Proteobacteria | LN907867.1 | I | 3 |
| 14 | GCA_000757095.1 | 28450 | 28450 | Burkholderia pseudomallei | BDE | Proteobacteria | KN150937.1 | I | 4 |
| 15 | GCA_000774465.1 | 1434201 | 28450 | Burkholderia pseudomallei MSHR4299 | MSHR4299 | Proteobacteria | KN323020.1 | I | 3 |
| 16 | GCA_000152345.1 | 331978 | 28450 | Burkholderia pseudomallei Pasteur 52237 | Pasteur 52237 | Proteobacteria | CH899741.1 | I | 3 |
| 17 | GCA_000757035.2 | 331978 | 28450 | Burkholderia pseudomallei Pasteur 52237 | Pasteur 52237 | Proteobacteria | CP009899.1 | I | 4 |
| 18 | GCA_000808035.2 | 57975 | 57975 | Burkholderia thailandensis | 2003015869 | Proteobacteria | CP008914.2 | I | 3 |
| 19 | GCA_001527035.1 | 101571 | 101571 | Burkholderia ubonensis | MSMB1607WGS | Proteobacteria | LPAR01000085.1 | I | 4 |
| 20 | GCA_001528155.1 | 101571 | 101571 | Burkholderia ubonensis | MSMB1633WGS | Proteobacteria | LPAU01000139.1 | I | 3 |
| 21 | GCA_001051235.2 | 1400863 | 1400862 | Candidatus Competibacter denitrificans Run_A_D11 | Run_A_D11 | Proteobacteria | CBTJ020000108.1 | I | 3 |
| 22 | GCA_001292585.1 | 1509431 | 1509431 | Candidatus Magnetomorum sp. HK-1 | | Proteobacteria | JPDT01002867.1 | I | 4 |
| 23 | GCA_000785145.1 | 1003181 | 1003181 | Candidatus Thiomargarita nelsonii | | Proteobacteria | JSZA01001556.1 | I | 3 |
| 24 | GCA_000952105.1 | 536 | 536 | Chromobacterium violaceum | L_1B5_1 | Proteobacteria | JYGI01000049.1 | I | 5 |
| 25 | GCA_000577895.1 | 1216932 | 1216932 | Clostridium bornimense | type strain: M2/40 | Firmicutes | HG917869.1 | I | 4 |
| 26 | GCA_000724245.2 | 1443123 | 1542 | Clostridium novyi B str. ATCC 27606 | ATCC 27606 | Firmicutes | JENW01000064.1 | I | 3 |
| 27 | GCA_000190355.1 | 556261 | 556261 | Clostridium sp. D5 | D5 | Firmicutes | GL870812.1 | I | 3 |
| 28 | GCA_000021925.1 | 272564 | 49338 | Desulfitobacterium hafniense DCB-2 | DCB-2 | Firmicutes | CP001336.1 | I | 3 |
| 29 | GCA_000024205.1 | 485916 | 58138 | Desulfotomaculum acetoxidans DSM 771 | DSM 771 | Firmicutes | CP001720.1 | I | 3 |
| 30 | GCA_001545095.1 | 1514105 | 1514105 | Erysipelothrix sp. LV19 | LV19 | Firmicutes | CP013213.1 | I | 3 |
| 31 | GCA_000797815.1 | 562 | 562 | Escherichia coli | CVM N41556PS | Proteobacteria | JUBQ01000038.1 | I | 5 |
| 32 | GCA_000797835.1 | 562 | 562 | Escherichia coli | CVM N33804PS | Proteobacteria | JUDE01000009.1 | I | 5 |
| 33 | GCA_000797855.1 | 562 | 562 | Escherichia coli | CVM N33806PS | Proteobacteria | JUDD01000028.1 | I | 3 |
| 34 | GCA_000798155.1 | 562 | 562 | Escherichia coli | CVM N34077PS | Proteobacteria | JUCZ01000011.1 | I | 5 |
| 35 | GCA_000798415.1 | 562 | 562 | Escherichia coli | CVM N34557PS | Proteobacteria | JUCU01000008.1 | I | 4 |
| 36 | GCA_001077875.1 | 562 | 562 | Escherichia coli | KIC-2 | Proteobacteria | LFJZ01000059.1 | I | 5 |
| 37 | GCA_001420165.1 | 562 | 562 | Escherichia coli | 449 | Proteobacteria | LIVL01000002.1 | I | 5 |
| 38 | GCA_001442495.1 | 562 | 562 | Escherichia coli | YD786 | Proteobacteria | CP013112.1 | I | 5 |
| 39 | GCA_001463535.1 | 562 | 562 | Escherichia coli | 50673720 | Proteobacteria | LNHW01000058.1 | I | 5 |
| 40 | GCA_001576545.1 | 562 | 562 | Escherichia coli | G76 | Proteobacteria | LOPR01000035.1 | I | 5 |
| 41 | GCA_000194295.2 | 869676 | 562 | Escherichia coli 97.0264 | 97.0264 | Proteobacteria | AEZP02000004.1 | I | 5 |
| 42 | GCA_000458275.1 | 1281086 | 562 | Escherichia coli HVH 153 (3-9344314) | HVH 153 (3-9344314) | Proteobacteria | KE700289.1 | I | 5 |
| 43 | GCA_000456745.1 | 1280996 | 562 | Escherichia coli HVH 46 (4-2758776) | HVH 46 (4-2758776) | Proteobacteria | KE699287.1 | I | 5 |
| 44 | GCA_000456745.1 | 1280996 | 562 | Escherichia coli HVH 46 (4-2758776) | HVH 46 (4-2758776) | Proteobacteria | KE699283.1 | I | 5 |
| 45 | GCA_000607285.1 | 1409786 | 562 | Escherichia coli K02 | K02 | Proteobacteria | KK097723.1 | I | 5 |
| 46 | GCA_000459655.1 | 1281158 | 562 | Escherichia coli KOEGE 33 (68a) | KOEGE 33 (68a) | Proteobacteria | KE701247.1 | I | 5 |
| 47 | GCA_000350745.1 | 1169334 | 562 | Escherichia coli KTE15 | KTE15 | Proteobacteria | KB732282.1 | I | 5 |
| 48 | GCA_000352905.1 | 1181729 | 562 | Escherichia coli KTE183 | KTE183 | Proteobacteria | KB733173.1 | I | 5 |
| 49 | GCA_000407945.1 | 1169352 | 562 | Escherichia coli KTE34 | KTE34 | Proteobacteria | KE136741.1 | I | 5 |
| 50 | GCA_000407745.1 | 1169320 | 562 | Escherichia coli KTE35 | KTE35 | Proteobacteria | KE136604.1 | I | 5 |
| 51 | GCA_000351665.1 | 1182679 | 562 | Escherichia coli KTE72 | KTE72 | Proteobacteria | KB733389.1 | I | 5 |
| 52 | GCA_000351805.1 | 1182691 | 562 | Escherichia coli KTE86 | KTE86 | Proteobacteria | KB732864.1 | I | 5 |
| 53 | GCA_000326625.1 | 1169366 | 562 | Escherichia coli KTE88 | KTE88 | Proteobacteria | ANYV01000069.1 | I | 5 |
| 54 | GCA_000408505.1 | 1182693 | 562 | Escherichia coli KTE89 | KTE89 | Proteobacteria | KE137143.1 | I | 5 |
| 55 | GCA_000351845.1 | 1182696 | 562 | Escherichia coli KTE93 | KTE93 | Proteobacteria | KB732902.1 | I | 5 |
| 56 | GCA_000576655.1 | 1314835 | 562 | Escherichia coli MP1 | MP1 | Proteobacteria | JEMI01000044.1 | I | 5 |
| 57 | GCA_000179175.1 | 679207 | 562 | Escherichia coli MS 107-1 | MS 107-1 | Proteobacteria | ADWV01000005.1 | I | 5 |
| 58 | GCA_000179095.1 | 796392 | 562 | Escherichia coli MS 79-10 | MS 79-10 | Proteobacteria | ADWR01000035.1 | I | 3 |
| 59 | GCA_000364305.1 | 1235805 | 562 | Escherichia coli SWW33 | SWW33 | Proteobacteria | KB822527.1 | I | 5 |
| 60 | GCA_000176635.2 | 656443 | 562 | Escherichia coli TA271 | TA271 | Proteobacteria | GL884297.1 | I | 4 |
| 61 | GCA_000460495.1 | 1281201 | 562 | Escherichia coli UMEA 3163-1 | UMEA 3163-1 | Proteobacteria | KE701783.1 | I | 5 |
| 62 | GCA_000461335.1 | 1281248 | 562 | Escherichia coli UMEA 3391-1 | UMEA 3391-1 | Proteobacteria | KE702395.1 | I | 5 |
| 63 | GCA_000461855.1 | 1281278 | 562 | Escherichia coli UMEA 4076-1 | UMEA 4076-1 | Proteobacteria | KE702725.1 | I | 5 |
| 64 | GCA_000434955.1 | 1262994 | 1262994 | Firmicutes bacterium CAG:65 | | Firmicutes | FR882409.1 | I | 4 |
| 65 | GCA_000750005.1 | 1430331 | 1430331 | Geobacillus icigianus | G1w1 | Firmicutes | JPYA01000201.1 | I | 4 |
| 66 | GCA_001587475.1 | 1586290 | 1586290 | Geobacillus sp. B4113_201601 | B4113_201601 | Firmicutes | LQYX01000099.1 | I | 4 |
| 67 | GCA_001025095.1 | 1659191 | 1659191 | Geobacillus sp. T6 | T6 | Firmicutes | LDNZ01000120.1 | I | 3 |
| 68 | GCA_000174795.2 | 550542 | 550542 | Geobacillus sp. Y412MC52 | Y412MC52 | Firmicutes | CP002442.1 | I | 4 |
| 69 | GCA_000024705.1 | 544556 | 544556 | Geobacillus sp. Y412MC61 | Y412MC61 | Firmicutes | CP001794.1 | I | 4 |
| 70 | GCA_000743495.1 | 1422 | 1422 | Geobacillus stearothermophilus | 22 | Firmicutes | JQCS01000005.1 | I | 4 |
| 71 | GCA_000749985.1 | 1422 | 1422 | Geobacillus stearothermophilus | 53 | Firmicutes | JPYV01000046.1 | I | 4 |
| 72 | GCA_000154705.2 | 411684 | 244596 | Hoeflea phototrophica DFL-43 | DFL-43 | Proteobacteria | CM002917.1 | I | 3 |
| 73 | GCA_001428625.1 | 1736490 | 1736490 | Hydrogenophaga sp. Root209 | Root209 | Proteobacteria | LMIE01000033.1 | I | 3 |
| 74 | GCA_000230975.3 | 670307 | 53399 | Hyphomicrobium denitrificans 1NES1 | 1NES1 | Proteobacteria | CP005587.1 | I | 3 |
| 75 | GCA_001078195.1 | 883119 | 571 | Klebsiella oxytoca 10-5244 | 10-5244 | Proteobacteria | KQ235774.1 | I | 5 |
| 76 | GCA_000492915.1 | 1328370 | 573 | Klebsiella pneumoniae MGH 32 | MGH 32 | Proteobacteria | KI535619.1 | I | 4 |
| 77 | GCA_000018685.1 | 357809 | 66219 | Lachnoclostridium phytofermentans ISDg | ISDg | Firmicutes | CP000885.1 | I | 3 |
| 78 | GCA_000403475.2 | 1235799 | 1235799 | Lachnospiraceae bacterium 3-2 | 3-2 | Firmicutes | KE159795.1 | I | 4 |
| 79 | GCA_000170755.1 | 313628 | 256847 | Lentisphaera araneosa HTCC2155 | HTCC2155 | Lentisphaerae | ABCK01000024.1 | I | 3 |
| 80 | GCA_000502535.1 | 1287273 | 1287273 | Mesorhizobium sp. LNJC391B00 | LNJC391B00 | Proteobacteria | AYWI01000025.1 | I | 3 |
| 81 | GCA_001508455.1 | 1641382 | 1641382 | Methanocalculus sp. 52_23 | | Euryarchaeota | LGGJ01000025.1 | I | 4 |
| 82 | GCA_000243255.1 | 937775 | 2315 | Methanoplanus limicola DSM 2279 | DSM 2279 | Euryarchaeota | CM001436.1 | I | 4 |
| 83 | GCA_000979685.1 | 2209 | 2209 | Methanosarcina mazei | 3.H.A.2.4 | Euryarchaeota | JJPP01000022.1 | I | 4 |
| 84 | GCA_000455825.1 | 1333857 | 300020 | Microbacterium maritypicum MF109 | MF109 | Actinobacteria | ATAO01000002.1 | I | 3 |
| 85 | GCA_001314225.1 | 1714373 | 1714373 | Microbacterium sp. No. 7 | No. 7 | Actinobacteria | CP012697.1 | I | 3 |
| 86 | GCA_000509385.1 | 1344956 | 1344956 | Microbacteriumsp. TS-1 | TS-1 | Actinobacteria | BASQ01000001.1 | I | 3 |
| 87 | GCA_000143085.1 | 105559 | 473531 | Nitrosococcus watsonii C-113 | C-113 | Proteobacteria | CP002087.1 | I | 3 |
| 88 | GCA_001044495.1 | 1628279 | 1628279 | Nitrospina sp. SCGC_AAA799_C22 | | Nitrospinae | JZKJ01000047.1 | I | 3 |
| 89 | GCA_000225995.2 | 1003237 | 28077 | Nitrospirillum amazonense Y2 | Y2 | Proteobacteria | AFBX01000767.1 | I | 3 |
| 90 | GCA_000442555.1 | 1117108 | 44250 | Paenibacillus alvei TS-15 | TS-15 | Firmicutes | ATMT01000002.1 | I | 4 |
| 91 | GCA_000024685.1 | 481743 | 481743 | Paenibacillus sp. Y412MC10 | Y412MC10 | Firmicutes | CP001793.1 | I | 4 |
| 92 | GCA_000803315.1 | 1507808 | 554 | Pectobacterium carotovorum subsp. actinidiae | KKH3 | Proteobacteria | JRMH01000001.1 | I | 5 |
| 93 | GCA_000754765.1 | 78398 | 554 | Pectobacterium carotovorum subsp. odoriferum | NCPPB 3839 | Proteobacteria | JQOG01000013.1 | I | 3 |
| 94 | GCA_000271665.2 | 1192197 | 365349 | Pelosinus fermentans JBW45 | JBW45 | Firmicutes | CP010978.1 | I | 4 |
| 95 | GCA_001298735.1 | 1677858 | 1677858 | Propionispora sp. Iso2/2 | | Firmicutes | CYSP01000005.1 | I | 4 |
| 96 | GCA_001450755.1 | 287 | 287 | Pseudomonas aeruginosa | WH-SGI-V-07239 | Proteobacteria | LLNK01000035.1 | I | 4 |
| 97 | GCA_001451905.1 | 287 | 287 | Pseudomonas aeruginosa | WH-SGI-V-07508 | Proteobacteria | LLQO01000185.1 | I | 3 |
| 98 | GCA_001452525.1 | 287 | 287 | Pseudomonas aeruginosa | WH-SGI-V-07690 | Proteobacteria | LLSK01000268.1 | I | 4 |
| 99 | GCA_001548135.1 | 287 | 287 | Pseudomonas aeruginosa | 8380 | Proteobacteria | AP014839.2 | I | 5 |
| 100 | GCA_000647595.1 | 1339263 | 287 | Pseudomonas aeruginosa 148 | 148 | Proteobacteria | ATAJ01000067.1 | I | 4 |
| 101 | GCA_000359505.1 | 1280938 | 287 | Pseudomonas aeruginosa B136-33 | B136-33 | Proteobacteria | CP004061.1 | I | 3 |
| 102 | GCA_000480905.1 | 1402553 | 287 | Pseudomonas aeruginosa BL12 | BL12 | Proteobacteria | KI518868.1 | I | 5 |
| 103 | GCA_000629605.1 | 1418235 | 287 | Pseudomonas aeruginosa BWH049 | BWH049 | Proteobacteria | KK213281.1 | I | 5 |
| 104 | GCA_000481145.1 | 1402528 | 287 | Pseudomonas aeruginosa BWHPSA028 | BWHPSA028 | Proteobacteria | KI518960.1 | I | 5 |
| 105 | GCA_000455705.1 | 1333855 | 287 | Pseudomonas aeruginosa WC55 | WC55 | Proteobacteria | ATAQ01000308.1 | I | 4 |
| 106 | GCA_000934565.1 | 294 | 294 | Pseudomonas fluorescens | PCL1751 | Proteobacteria | CP010896.1 | I | 5 |
| 107 | GCA_000497385.1 | 1399145 | 303 | Pseudomonas putida S610 | S610 | Proteobacteria | AYJQ01000058.1 | I | 5 |
| 108 | GCA_000367825.1 | 1227924 | 303 | Pseudomonas putida TRO1 | TRO1 | Proteobacteria | APBQ01000198.1 | I | 5 |
| 109 | GCA_000812405.1 | 1582493 | 1582493 | Pseudomonas sp. PI1 | PI1 | Proteobacteria | JWMC01000074.1 | I | 3 |
| 110 | GCA_000737225.1 | 317 | 317 | Pseudomonas syringae | UB0390 | Proteobacteria | JPQV01000021.1 | I | 5 |
| 111 | GCA_001587135.1 | 305 | 305 | Ralstonia solanacearum | UW163 | Proteobacteria | CP012941.1 | I | 5 |
| 112 | GCA_001423045.1 | 1736327 | 1736327 | Rathayibacter sp. Leaf296 | Leaf296 | Actinobacteria | LMNR01000001.1 | I | 3 |
| 113 | GCA_001425345.1 | 1736357 | 1736357 | Rhizobium sp. Leaf383 | Leaf383 | Proteobacteria | LMQD01000012.1 | I | 3 |
| 114 | GCA_001424065.1 | 1736358 | 1736358 | Rhizobium sp. Leaf384 | Leaf384 | Proteobacteria | LMQE01000005.1 | I | 3 |
| 115 | GCA_000982715.1 | 191292 | 191292 | Rhodococcus aetherivorans | IcdP1 | Actinobacteria | CP011341.1 | I | 3 |
| 116 | GCA_000341815.1 | 1278077 | 334542 | Rhodococcus qingshengii BKS 20-40 | BKS 20-40 | Actinobacteria | AODN01000014.1 | I | 3 |
| 117 | GCA_000824945.1 | 1830 | 1830 | Rhodococcus ruber | | Actinobacteria | CCSD01000049.1 | I | 4 |
| 118 | GCA_000508185.1 | 1207055 | 1207055 | Sphingobium sp. C100 | C100 | Proteobacteria | AYOY01000167.1 | I | 3 |
| 119 | GCA_000158915.1 | 457427 | 998084 | Streptomyces himastatinicus ATCC 53653 | ATCC 53653 | Actinobacteria | GG657754.1 | I | 3 |
| 120 | GCA_000227705.3 | 717605 | 377615 | Thermobacillus composti KWC4 | KWC4 | Firmicutes | CP003255.1 | I | 3 |
| 121 | GCA_000176455.1 | 675809 | 666 | Vibrio cholerae CT 5369-93 | CT 5369-93 | Proteobacteria | ADAL01000217.1 | I | 5 |
| 122 | GCA_000746665.1 | 672 | 672 | Vibrio vulnificus | 93U204 | Proteobacteria | CP009261.1 | I | 5 |
| 123 | GCA_001116865.1 | 631 | 631 | Yersinia intermedia | 58735 | Proteobacteria | CQER01000007.1 | I | 5 |
| 124 | GCA_001299035.1 | 1806494 | 1806494 | Achromobacter sp. 2789STDY5608612 | 2789STDY5608612 | Proteobacteria | CYTE01000002.1 | II | 4 |
| 125 | GCA_001509495.1 | 135947 | 135946 | Actinoplanes awajinensis subsp. mycoplanecinus | NRRL B-16712 | Actinobacteria | LLZH01000223.1 | II | 3 |
| 126 | GCA_000389965.1 | 649831 | 649831 | Actinoplanes sp. N902-109 | N902-109 | Actinobacteria | CP005929.1 | II | 3 |
| 127 | GCA_000219665.2 | 1050720 | 358 | Agrobacterium tumefaciens F2 | F2 | Proteobacteria | AFSD01000008.1 | II | 4 |
| 128 | GCA_000018325.1 | 350688 | 461876 | Alkaliphilus oremlandii OhILAs | OhILAs | Firmicutes | CP000853.1 | II | 3 |
| 129 | GCA_001443605.1 | 1307839 | 1307839 | bacterium L21-Spi-D4 | L21-Spi-D4 | Bacteroidetes | CP013118.1 | II | 3 |
| 130 | GCA_000244935.1 | 319003 | 319003 | Bradyrhizobium sp. WSM1253 | WSM1253 | Proteobacteria | JH600073.1 | II | 4 |
| 131 | GCA_000144605.1 | 633149 | 74313 | Brevundimonas subvibrioides ATCC 15264 | ATCC 15264 | Proteobacteria | CP002102.1 | II | 4 |
| 132 | GCA_000182255.1 | 513051 | 87883 | Burkholderia multivorans CGD1 | CGD1 | Proteobacteria | ACFB01000002.1 | II | 3 |
| 133 | GCA_001532035.1 | 1207504 | 1207504 | Burkholderia pseudomultivorans | MSMB368WGS | Proteobacteria | LPJR01000034.1 | II | 4 |
| 134 | GCA_001424345.1 | 1736287 | 1736287 | Burkholderia sp. Leaf177 | Leaf177 | Proteobacteria | LMPF01000022.1 | II | 4 |
| 135 | GCA_001526735.1 | 101571 | 101571 | Burkholderia ubonensis | MSMB1601WGS | Proteobacteria | LPAL01000127.1 | II | 3 |
| 136 | GCA_001526945.1 | 101571 | 101571 | Burkholderia ubonensis | MSMB1791WGS | Proteobacteria | LPAY01000146.1 | II | 3 |
| 137 | GCA_001529895.1 | 101571 | 101571 | Burkholderia ubonensis | MSMB1216WGS | Proteobacteria | LPEG01000082.1 | II | 4 |
| 138 | GCA_001531945.1 | 101571 | 101571 | Burkholderia ubonensis | MSMB609WGS | Proteobacteria | LPKF01000002.1 | II | 4 |
| 139 | GCA_001534345.1 | 101571 | 101571 | Burkholderia ubonensis | MSMB1466WGS | Proteobacteria | LPMV01000059.1 | II | 3 |
| 140 | GCA_001426725.1 | 1736459 | 1736459 | Cellulomonas sp. Root137 | Root137 | Actinobacteria | LMFG01000005.1 | II | 3 |
| 141 | GCA_000016085.1 | 290318 | 1094 | Chlorobium phaeovibrioides DSM 265 | DSM 265 | Chlorobi | CP000607.1 | II | 3 |
| 142 | GCA_001563495.1 | 267125 | 267125 | Chryseobacterium kwangjuense | KJ1R5 | Bacteroidetes | LPUR01000001.1 | II | 3 |
| 143 | GCA_001281005.1 | 546 | 546 | Citrobacter freundii | P10159 | Proteobacteria | CP012554.1 | II | 4 |
| 144 | GCA_000158355.2 | 469595 | 469595 | Citrobacter sp. 30_2 | 30_2 | Proteobacteria | KI391991.1 | II | 4 |
| 145 | GCA_000759755.1 | 1114921 | 67827 | Citrobacter werkmanii NBRC 105721 | NBRC 105721 | Proteobacteria | BBMW01000007.1 | II | 4 |
| 146 | GCA_001515955.1 | 1734399 | 1734399 | Clostridia bacterium BRH_c25 | | Firmicutes | LOES01000090.1 | II | 3 |
| 147 | GCA_001584185.1 | 279113 | 279113 | Collimonas pratensis | Ter91 | Proteobacteria | CP013234.1 | II | 4 |
| 148 | GCA_000725405.1 | 1274 | 1274 | Dermacoccus nishinomiyaensis | M25 | Actinobacteria | CP008889.1 | II | 3 |
| 149 | GCA_000023565.1 | 561229 | 556 | Dickeya chrysanthemi Ech1591 | Ech1591 | Proteobacteria | CP001655.1 | II | 4 |
| 150 | GCA_001011625.1 | 548 | 548 | Enterobacter aerogenes | GN02761 | Proteobacteria | LDBO01000027.1 | II | 4 |
| 151 | GCA_001518055.1 | 548 | 548 | Enterobacter aerogenes | GN02761 | Proteobacteria | LRCC01000127.1 | II | 4 |
| 152 | GCA_001518435.1 | 548 | 548 | Enterobacter aerogenes | GN05782 | Proteobacteria | LRCY01000101.1 | II | 4 |
| 153 | GCA_001011955.1 | 61645 | 61645 | Enterobacter asburiae | GN02208 | Proteobacteria | LDCK01000014.1 | II | 3 |
| 154 | GCA_000958325.1 | 550 | 550 | Enterobacter cloacae | 44517 | Proteobacteria | JZXX01000013.1 | II | 4 |
| 155 | GCA_000958345.1 | 550 | 550 | Enterobacter cloacae | 44524 | Proteobacteria | JZXW01000013.1 | II | 4 |
| 156 | GCA_000958385.1 | 550 | 550 | Enterobacter cloacae | 44541 | Proteobacteria | JZXU01000010.1 | II | 4 |
| 157 | GCA_000965895.1 | 550 | 550 | Enterobacter cloacae | CIDEIMsCOL13 | Proteobacteria | JZKX01000010.1 | II | 4 |
| 158 | GCA_000965925.1 | 550 | 550 | Enterobacter cloacae | CIDEIMsCOL16 | Proteobacteria | JZLA01000009.1 | II | 4 |
| 159 | GCA_000965975.1 | 550 | 550 | Enterobacter cloacae | CIDEIMsCOL18 | Proteobacteria | JZLC01000004.1 | II | 4 |
| 160 | GCA_000965985.1 | 550 | 550 | Enterobacter cloacae | CIDEIMsCOL19 | Proteobacteria | JZLD01000016.1 | II | 4 |
| 161 | GCA_000966045.1 | 550 | 550 | Enterobacter cloacae | CIDEIMsCOL6 | Proteobacteria | JZKQ01000011.1 | II | 4 |
| 162 | GCA_000966055.1 | 550 | 550 | Enterobacter cloacae | CIDEIMsCOL7 | Proteobacteria | JZKR01000007.1 | II | 4 |
| 163 | GCA_000966085.1 | 550 | 550 | Enterobacter cloacae | CIDEIMsCOL8 | Proteobacteria | JZKS01000009.1 | II | 4 |
| 164 | GCA_000966125.1 | 550 | 550 | Enterobacter cloacae | CIDEIMsCOL11 | Proteobacteria | JZKV01000018.1 | II | 4 |
| 165 | GCA_000968675.1 | 550 | 550 | Enterobacter cloacae | CIDEIMsCOL15 | Proteobacteria | JZKZ01000021.1 | II | 4 |
| 166 | GCA_000235765.3 | 1104326 | 550 | Enterobacter cloacae subsp. dissolvens SDM | SDM | Proteobacteria | CP003678.1 | II | 4 |
| 167 | GCA_001472385.1 | 299766 | 158836 | Enterobacter hormaechei subsp. steigerwaltii | SMART_539 | Proteobacteria | LPPV01000001.1 | II | 4 |
| 168 | GCA_001473115.1 | 299766 | 158836 | Enterobacter hormaechei subsp. steigerwaltii | SMART_1078 | Proteobacteria | LPOL01000074.1 | II | 4 |
| 169 | GCA_000568075.1 | 314330 | 314330 | Enterobacter sp. DC1 | DC1 | Proteobacteria | AZUA01000002.1 | II | 4 |
| 170 | GCA_000010305.1 | 379066 | 173480 | Gemmatimonas aurantiaca T-27 | T-27 | Gemmatimonadetes | AP009153.1 | II | 4 |
| 171 | GCA_000298195.1 | 1108045 | 83341 | Gordonia rhizosphera NBRC 16068 | NBRC 16068 | Actinobacteria | BAHC01000188.1 | II | 3 |
| 172 | GCA_001275395.1 | 1704290 | 1704290 | Hapalosiphon sp. MRB220 | MRB220 | Cyanobacteria | LIRN01000101.1 | II | 3 |
| 173 | GCA_000567145.1 | 1400164 | 573 | Klebsiella pneumoniae BIDMC 46b | BIDMC 46b | Proteobacteria | KK036716.1 | II | 4 |
| 174 | GCA_000529775.1 | 1379689 | 573 | Klebsiella pneumoniae subsp. pneumoniae T69 | T69 | Proteobacteria | HG518478.1 | II | 4 |
| 175 | GCA_000169115.1 | 247639 | 247639 | marine gamma proteobacterium HTCC2080 | HTCC2080 | Proteobacteria | AAVV01000004.1 | II | 3 |
| 176 | GCA_001424165.1 | 1736272 | 1736272 | Massilia sp. Leaf139 | Leaf139 | Proteobacteria | LMOJ01000003.1 | II | 4 |
| 177 | GCA_000970225.1 | 1434114 | 2209 | Methanosarcina mazei LYC | LYC | Euryarchaeota | CP009513.1 | II | 3 |
| 178 | GCA_000757795.1 | 693986 | 334852 | Methylobacterium oryzae CBMB2C | CBMB20 | Proteobacteria | CP003811.1 | II | 4 |
| 179 | GCA_001542815.1 | 925818 | 925818 | Methylobacterium sp. AMS5 | AMS5 | Proteobacteria | CP006992.1 | II | 4 |
| 180 | GCA_000834175.1 | 1587523 | 1587523 | Microbacterium sp. MEJ108Y | MEJ108Y | Actinobacteria | JXQX01000022.1 | II | 3 |
| 181 | GCA_000568915.1 | 457406 | 457406 | Micromonospora sp. M42 | M42 | Actinobacteria | KK037233.1 | II | 3 |
| 182 | GCA_000306785.1 | 477641 | 477641 | Modestobacter marinus | BC501 | Actinobacteria | FO203431.1 | II | 3 |
| 183 | GCA_000307755.2 | 1239989 | 582 | Morganella morganii SC01 | SC01 | Proteobacteria | AMWL02000021.1 | II | 4 |
| 184 | GCA_001570445.1 | 228230 | 228230 | Mycobacterium canariasense | JCM15298 | Actinobacteria | BCSY01000069.1 | II | 3 |
| 185 | GCA_001307545.1 | 1766 | 1766 | Mycobacterium fortuitum | CT6 | Actinobacteria | CP011269.1 | II | 3 |
| 186 | GCA_001187505.1 | 134601 | 134601 | Mycobacterium goodii | X7B | Actinobacteria | CP012150.1 | II | 3 |
| 187 | GCA_001570485.1 | 59813 | 59813 | Mycobacterium novocastrense | JCM18114 | Actinobacteria | BCTA01000023.1 | II | 3 |
| 188 | GCA_000024365.1 | 479431 | 53461 | Nakamurella multipartita DSM 44233 | DSM 44233 | Actinobacteria | CP001737.1 | II | 3 |
| 189 | GCA_000963985.1 | 1628190 | 1628190 | Pantoea sp. BL1 | BL1 | Proteobacteria | JZRH01000052.1 | II | 4 |
| 190 | GCA_001447385.1 | 1745182 | 1745182 | Paracoccussp. MKU1 | MKU1 | Proteobacteria | LLWQ01000019.1 | II | 3 |
| 191 | GCA_000808515.1 | 555 | 554 | Pectobacterium carotovorum subsp. carotovorum | BC T5 | Proteobacteria | JUJS01000001.1 | II | 4 |
| 192 | GCA_000294535.1 | 1218933 | 554 | Pectobacterium carotovorum subsp. carotovorum PCC21 | PCC21 | Proteobacteria | CP003776.1 | II | 4 |
| 193 | GCA_001026985.1 | 82985 | 82985 | Pragia fontium | 24613 | Proteobacteria | CP010423.1 | II | 4 |
| 194 | GCA_000829255.1 | 287 | 287 | Pseudomonas aeruginosa | NCGM 1984 | Proteobacteria | AP014646.1 | II | 3 |
| 195 | GCA_000829275.1 | 287 | 287 | Pseudomonas aeruginosa | NCGM 1900 | Proteobacteria | AP014622.1 | II | 3 |
| 196 | GCA_001449645.1 | 287 | 287 | Pseudomonas aeruginosa | WH-SGI-V-07177 | Proteobacteria | LLMG01000101.1 | II | 3 |
| 197 | GCA_001449765.1 | 287 | 287 | Pseudomonas aeruginosa | WH-SGI-V-07186 | Proteobacteria | LLMQ01000093.1 | II | 3 |
| 198 | GCA_001450265.1 | 287 | 287 | Pseudomonas aeruginosa | WH-SGI-V-07378 | Proteobacteria | LLOC01000126.1 | II | 4 |
| 199 | GCA_001450505.1 | 287 | 287 | Pseudomonas aeruginosa | WH-SGI-V-07170 | Proteobacteria | LLLZ01000038.1 | II | 4 |
| 200 | GCA_001450545.1 | 287 | 287 | Pseudomonas aeruginosa | WH-SGI-V-07176 | Proteobacteria | LLMF01000085.1 | II | 3 |
| 201 | GCA_001450995.1 | 287 | 287 | Pseudomonas aeruginosa | WH-SGI-V-07387 | Proteobacteria | LLOL01000018.1 | II | 4 |
| 202 | GCA_001451125.1 | 287 | 287 | Pseudomonas aeruginosa | WH-SGI-V-07406 | Proteobacteria | LLOT01000015.1 | II | 4 |
| 203 | GCA_001451485.1 | 287 | 287 | Pseudomonas aeruginosa | WH-SGI-V-07425 | Proteobacteria | LLPM01000023.1 | II | 4 |
| 204 | GCA_001451605.1 | 287 | 287 | Pseudomonas aeruginosa | WH-SGI-V-07486 | Proteobacteria | LLPSO1000097.1 | II | 4 |
| 205 | GCA_001451625.1 | 287 | 287 | Pseudomonas aeruginosa | WH-SGI-V-07487 | Proteobacteria | LLPTO1000056.1 | II | 4 |
| 206 | GCA_001451815.1 | 287 | 287 | Pseudomonas aeruginosa | WH-SGI-V-07498 | Proteobacteria | LLQE01000017.1 | II | 4 |
| 207 | GCA_001451885.1 | 287 | 287 | Pseudomonas aeruginosa | WH-SGI-V-07504 | Proteobacteria | LLQK01000005.1 | II | 4 |
| 208 | GCA_001451985.1 | 287 | 287 | Pseudomonas aeruginosa | WH-SGI-V-07622 | Proteobacteria | LLQT01000086.1 | II | 4 |
| 209 | GCA_001452025.1 | 287 | 287 | Pseudomonas aeruginosa | WH-SGI-V-07626 | Proteobacteria | LLQX01000033.1 | II | 4 |
| 210 | GCA_001452045.1 | 287 | 287 | Pseudomonas aeruginosa | WH-SGI-V-07627 | Proteobacteria | LLQY01000018.1 | II | 4 |
| 211 | GCA_001452305.1 | 287 | 287 | Pseudomonas aeruginosa | WH-SGI-V-07645 | Proteobacteria | LLRQ01000036.1 | II | 4 |
| 212 | GCA_001452325.1 | 287 | 287 | Pseudomonas aeruginosa | WH-SGI-V-07647 | Proteobacteria | LLRS01000111.1 | II | 3 |
| 213 | GCA_001452575.1 | 287 | 287 | Pseudomonas aeruginosa | WH-SGI-V-07694 | Proteobacteria | LLSO01000025.1 | II | 4 |
| 214 | GCA_001452675.1 | 287 | 287 | Pseudomonas aeruginosa | WH-SGI-V-07703 | Proteobacteria | LLSX01000034.1 | II | 4 |
| 215 | GCA_001453345.1 | 287 | 287 | Pseudomonas aeruginosa | WH-SGI-V-07624 | Proteobacteria | LLQV01000015.1 | II | 4 |
| 216 | GCA_001453365.1 | 287 | 287 | Pseudomonas aeruginosa | WH-SGI-V-07625 | Proteobacteria | LLQW01000076.1 | II | 4 |
| 217 | GCA_001453415.1 | 287 | 287 | Pseudomonas aeruginosa | WH-SGI-V-07632 | Proteobacteria | LLRD01000075.1 | II | 3 |
| 218 | GCA_001453485.1 | 287 | 287 | Pseudomonas aeruginosa | WH-SGI-V-07646 | Proteobacteria | LLRR01000027.1 | II | 4 |
| 219 | GCA_001453565.1 | 287 | 287 | Pseudomonas aeruginosa | WH-SGI-V-07679 | Proteobacteria | LLRZ01000123.1 | II | 4 |
| 220 | GCA_001453595.1 | 287 | 287 | Pseudomonas aeruginosa | WH-SGI-V-07683 | Proteobacteria | LLSD01000091.1 | II | 4 |
| 221 | GCA_001454045.1 | 287 | 287 | Pseudomonas aeruginosa | WH-SGI-V-07276 | Proteobacteria | LLUCO1000021.1 | II | 4 |
| 222 | GCA_001454305.1 | 287 | 287 | Pseudomonas aeruginosa | WH-SGI-V-07309 | Proteobacteria | LLUY01000055.1 | II | 4 |
| 223 | GCA_001454595.1 | 287 | 287 | Pseudomonas aeruginosa | WH-SGI-V-07268 | Proteobacteria | LLTZ01000033.1 | II | 4 |
| 224 | GCA_000148745.1 | 798130 | 287 | Pseudomonas aeruginosa 39016 | 39016 | Proteobacteria | CM001020.1 | II | 3 |
| 225 | GCA_000481745.1 | 1402498 | 287 | Pseudomonas aeruginosa 6077 | 6077 | Proteobacteria | KI519216.1 | II | 4 |
| 226 | GCA_000480985.1 | 1402549 | 287 | Pseudomonas aeruginosa BL08 | BL08 | Proteobacteria | KI518899.1 | II | 4 |
| 227 | GCA_000480865.1 | 1402555 | 287 | Pseudomonas aeruginosa BL14 | BL14 | Proteobacteria | KI518844.1 | II | 4 |
| 228 | GCA_000480805.1 | 1402558 | 287 | Pseudomonas aeruginosa BL17 | BL17 | Proteobacteria | KI518822.1 | II | 4 |
| 229 | GCA_000629125.1 | 1447538 | 287 | Pseudomonas aeruginosa BWH030 | BWH030 | Proteobacteria | KK212308.1 | II | 4 |
| 230 | GCA_000629585.1 | 1418236 | 287 | Pseudomonas aeruginosa BWH050 | BWH050 | Proteobacteria | KK213277.1 | II | 4 |
| 231 | GCA_000481585.1 | 1402506 | 287 | Pseudomonas aeruginosa BWHPSA006 | BWHPSA006 | Proteobacteria | KI519145.1 | II | 4 |
| 232 | GCA_000480435.1 | 1402576 | 287 | Pseudomonas aeruginosa C48 | C48 | Proteobacteria | KI518703.1 | II | 4 |
| 233 | GCA_000481805.1 | 1402495 | 287 | Pseudomonas aeruginosa JJ692 | JJ692 | Proteobacteria | KI519252.1 | II | 4 |
| 234 | GCA_000513235.1 | 1306165 | 287 | Pseudomonas aeruginosa MH27 | MH27 | Proteobacteria | CBTR010000015.1 | II | 3 |
| 235 | GCA_000284555.1 | 1089456 | 287 | Pseudomonas aeruginosa NCGM2.S1 | NCGM2.S1 | Proteobacteria | AP012280.1 | II | 3 |
| 236 | GCA_000481785.1 | 1402496 | 287 | Pseudomonas aeruginosa U2504 | U2504 | Proteobacteria | KI519240.1 | II | 4 |
| 237 | GCA_000786485.1 | 1341645 | 287 | Pseudomonas aeruginosa WS394 | WS394 | Proteobacteria | CBYA010000116.1 | II | 4 |
| 238 | GCA_000012265.1 | 220664 | 380021 | Pseudomonas protegens Pf-5 | Pf-5 | Proteobacteria | CP000076.1 | II | 4 |
| 239 | GCA_000334035.1 | 1204471 | 317 | Pseudomonas syringae BRIP34876 | BRIP34876 | Proteobacteria | KB316468.1 | II | 4 |
| 240 | GCA_000334055.1 | 1205751 | 317 | Pseudomonas syringae BRIP34881 | BRIP34881 | Proteobacteria | KB316535.1 | II | 4 |
| 241 | GCA_000765305.1 | 323 | 251701 | Pseudomonas syringae pv. tomato | NYS-T1 | Proteobacteria | KN265560.1 | II | 4 |
| 242 | GCA_001518465.1 | 323 | 251701 | Pseudomonas syringae pv. tomato | A9 | Proteobacteria | LNKY01000101.1 | II | 4 |
| 243 | GCA_001518695.1 | 323 | 251701 | Pseudomonas syringae pv. tomato | 407 | Proteobacteria | LNKZ01000069.1 | II | 4 |
| 244 | GCA_000172895.1 | 546231 | 251701 | Pseudomonas syringae pv. tomato T1 | T1 | Proteobacteria | ABSM01000016.1 | II | 4 |
| 245 | GCA_000471625.1 | 1354303 | 248452 | Psychrobacter aquaticus CMS 56 | CMS 56 | Proteobacteria | AUSW01000035.1 | II | 3 |
| 246 | GCA_001297245.1 | 1538158 | 1538158 | Rhizobium acidisoli | FH23 | Proteobacteria | LJSR01000033.1 | II | 4 |
| 247 | GCA_001425345.1 | 1736357 | 1736357 | Rhizobium sp. Leaf383 | Leaf383 | Proteobacteria | LMQD01000026.1 | II | 3 |
| 248 | GCA_001507595.1 | 1685379 | 1685379 | Ruegeria sp. ZGT118 | ZGT118 | Proteobacteria | LQBQ01000001.1 | II | 3 |
| 249 | GCA_001474275.1 | 28901 | 28901 | Salmonella enterica | CVM 43767 | Proteobacteria | JYQK01000006.1 | II | 4 |
| 250 | GCA_001569645.1 | 28901 | 28901 | Salmonella enterica | NGUA06 | Proteobacteria | BCOE01000051.1 | II | 4 |
| 251 | GCA_001569685.1 | 28901 | 28901 | Salmonella enterica | NGUA08 | Proteobacteria | BCOG01000098.1 | II | 4 |
| 252 | GCA_001569765.1 | 28901 | 28901 | Salmonella enterica | NGUA12 | Proteobacteria | BCOK01000075.1 | II | 4 |
| 253 | GCA_001569785.1 | 28901 | 28901 | Salmonella enterica | NGUA13 | Proteobacteria | BCOL01000051.1 | II | 4 |
| 254 | GCA_001569865.1 | 28901 | 28901 | Salmonella enterica | NGUA17 | Proteobacteria | BCOP01000026.1 | II | 4 |
| 255 | GCA_001569905.1 | 28901 | 28901 | Salmonella enterica | NGUA19 | Proteobacteria | BCOR01000051.1 | II | 4 |
| 256 | GCA_001570025.1 | 28901 | 28901 | Salmonella enterica | NGUA25 | Proteobacteria | BCOX01000056.1 | II | 4 |
| 257 | GCA_001570065.1 | 28901 | 28901 | Salmonella enterica | NGUA27 | Proteobacteria | BCOZ01000088.1 | II | 4 |
| 258 | GCA_001570105.1 | 28901 | 28901 | Salmonella enterica | NGUA29 | Proteobacteria | BCPB01000051.1 | II | 4 |
| 259 | GCA_001570145.1 | 28901 | 28901 | Salmonella enterica | NGUA31 | Proteobacteria | BCPD01000090.1 | II | 4 |
| 260 | GCA_001570205.1 | 28901 | 28901 | Salmonella enterica | NGUA34 | Proteobacteria | BCPG01000042.1 | II | 4 |
| 261 | GCA_001448925.1 | 1245396 | 28901 | Salmonella enterica subsp. arizonae serovar 62:z36:- str. 5335/86 | 5335/86 | Proteobacteria | LHTK01000001.1 | II | 4 |
| 262 | GCA_000756465.1 | 1386967 | 28901 | Salmonella enterica subsp. arizonae serovar 62:z36:- str. | RKS2983 | Proteobacteria | CP006693.1 | II | 4 |
| | | | | RKS2983 | | | | | |
| 263 | GCA_000748945.1 | 1173471 | 28901 | Salmonella enterica subsp.enterica serovar Bareilly str. | CFSAN000235 | Proteobacteria | JRCT01000004.1 | II | 4 |
| | | | | CFSAN000235 | | | | | |
| 264 | GCA_000748965.1 | 1173472 | 28901 | Salmonella enterica subsp. enterica serovar Bareilly str. | CFSAN000236 | Proteobacteria | JRCS01000009.1 | II | 3 |
| | | | | CFSAN000236 | | | | | |
| 265 | GCA_000749105.1 | 1182179 | 28901 | Salmonella enterica subsp. enterica serovar Bareilly str. | CFSAN000754 | Proteobacteria | JRCL01000011.1 | II | 4 |
| | | | | CFSAN000754 | | | | | |
| 266 | GCA_000504705.2 | 1192560 | 28901 | Salmonella enterica subsp. enterica serovar Cubana str. 76814 | 76814 | Proteobacteria | KI635640.1 | II | 4 |
| 267 | GCA_000430125.1 | 1271863 | 28901 | Salmonella enterica subsp. enterica serovar Cubana str. | CFSAN002050 | Proteobacteria | CP006055.1 | II | 4 |
| | | | | CFSAN002050 | | | | | |
| 268 | GCA_000500025.1 | 1314885 | 28901 | Salmonella enterica subsp. enterica serovar Cubana str. | CVM42234 | Proteobacteria | ATEU01000012.1 | II | 4 |
| | | | | CVM42234 | | | | | |
| 269 | GCA_000487835.1 | 1194151 | 28901 | Salmonella enterica subsp. enterica serovar Norwich str. | CFSAN001077 | Proteobacteria | APAM01000054.1 | II | 4 |
| | | | | CFSAN001077 | | | | | |
| 270 | GCA_000486285.1 | 984254 | 28901 | Salmonella enterica subsp. enterica serovar Virchow str. ATCC | ATCC 51955 | Proteobacteria | AOXL01000118.1 | II | 4 |
| | | | | 51955 | | | | | |
| 271 | GCA_000171535.2 | 465517 | 28901 | Salmonella enterica subsp. enterica serovar Virchow str. SL491 | SL491 | Proteobacteria | ABFH02000001.1 | II | 3 |
| 272 | GCA_000516855.1 | 1249525 | 28901 | Salmonella enterica subsp. enterica serovar Virchow str. SVQ1 | SVQ1 | Proteobacteria | KI911915.1 | II | 4 |
| 273 | GCA_001409135.1 | 57743 | 28901 | Salmonella enterica subsp. enterica serovar Weltevreden | 2511STDY5462388 | Proteobacteria | LN890518.1 | II | 4 |
| 274 | GCA_001409155.1 | 57743 | 28901 | Salmonella enterica subsp. enterica serovar Weltevreden | 2511STDY5712384 | Proteobacteria | LN890522.1 | II | 4 |
| 275 | GCA_001409175.1 | 57743 | 28901 | Salmonella enterica subsp. enterica serovar Weltevreden | 2511STDY5712385 | Proteobacteria | LN890524.1 | II | 4 |
| 276 | GCA_001409195.1 | 57743 | 28901 | Salmonella enterica subsp. enterica serovar Weltevreden | 2511STDY5462413 | Proteobacteria | LN890520.1 | II | 4 |
| 277 | GCA_000230505.1 | 936157 | 28901 | Salmonella enterica subsp. enterica serovar Weltevreden str. | 2007-60-3289-1 | Proteobacteria | FR775246.1 | II | 4 |
| | | | | 2007-60-3289-1 | | | | | |
| 278 | GCA_000171495.1 | 465518 | 28901 | Salmonella enterica subsp. enterica serovar Weltevreden str. | HI_N05-537 | Proteobacteria | ABFF01000011.1 | II | 4 |
| | | | | HI_N05-537 | | | | | |
| 279 | GCA_001188155.1 | 59205 | 28901 | Salmonella enterica subsp. houtenae | 01-0133 | Proteobacteria | JWSP01000004.1 | II | 4 |
| 280 | GCA_000486245.1 | 1173948 | 28901 | Salmonella enterica subsp. houtenae serovar 50:g, z51:- str. 01- | 01-0133 | Proteobacteria | AOXJ01000080.1 | II | 3 |
| | | | | 0133 | | | | | |
| 281 | GCA_000521925.1 | 1400186 | 615 | Serratia marcescens BIDMC 44 | BIDMC 44 | Proteobacteria | KI929263.1 | II | 4 |
| 282 | GCA_000633695.1 | 1445865 | 615 | Serratia marcescens BIDMC 81 | BIDMC 81 | Proteobacteria | KK214290.1 | II | 4 |
| 283 | GCA_000006965.1 | 266834 | 382 | Sinorhizobium meliloti 1021 | 1021 | Proteobacteria | AL591688.1 | II | 3 |
| 284 | GCA_000346065.1 | 1286640 | 382 | Sinorhizobium meliloti 2011 | 2011 | Proteobacteria | CP004140.1 | II | 3 |
| 285 | GCA_001461685.1 | 1358418 | 1358418 | Sinorhizobium sp. GL28 | GL28 | Proteobacteria | AUSZ01000302.1 | II | 4 |
| 286 | GCA_000280865.1 | 1160718 | 114687 | Streptomyces auratus AGR0001 | AGR0001 | Actinobacteria | JH725387.1 | II | 3 |
| 287 | GCA_001188955.1 | 1894 | 1894 | Streptomyces aureofaciens | ATCC 10762 | Actinobacteria | KQ257755.1 | II | 3 |
| 288 | GCA_000222625.2 | 1051645 | 29497 | Vibrio splendidus ATCC 33789 | ATCC 33789 | Proteobacteria | AFWG01000006.1 | II | 3 |
| 289 | GCA_001139945.1 | 29483 | 29483 | Yersinia aldovae | IP08791 | Proteobacteria | CQEH01000010.1 | II | 4 |
| 290 | GCA_001104645.1 | 631 | 631 | Yersinia intermedia | FCF335 | Proteobacteria | CQCT01000008.1 | II | 4 |
| 291 | GCA_001144105.1 | 633 | 633 | Yersinia pseudotuberculosis | N912 | Proteobacteria | CQDI01000025.1 | II | 4 |
| 292 | GCA_001166025.1 | 633 | 633 | Yersinia pseudotuberculosis | OK5586 | Proteobacteria | CQEB01000011.1 | II | 4 |
| 293 | GCA_001319685.1 | 633 | 633 | Yersinia pseudotuberculosis | IP32921 | Proteobacteria | CIFM01000002.1 | II | 4 |
| 294 | GCA_000834455.1 | 29485 | 29485 | Yersinia rohdei | YRA | Proteobacteria | CP009787.1 | II | 4 |
| 295 | GCA_000173775.1 | 527004 | 29485 | Yersinia rohdei ATCC 43380 | ATCC 43380 | Proteobacteria | ACCD01000010.1 | II | 4 |
| 296 | GCA_001581075.1 | 178900 | 178900 | Acetobacter cerevisiae | LMG 1608 | Proteobacteria | LHZY01000057.1 | III | 2 |
| 297 | GCA_001077655.1 | 470 | 470 | Acinetobacter baumannii | Ab04-mff | Proteobacteria | CP012006.1 | III | 2 |
| 298 | GCA_001276085.1 | 470 | 470 | Acinetobacter baumannii | 5021_13 | Proteobacteria | LGYV01000089.1 | III | 2 |
| 299 | GCA_001441545.1 | 470 | 470 | Acinetobacter baumannii | MRSN15038 | Proteobacteria | LMZX01000006.1 | III | 2 |
| 300 | GCA_001441555.1 | 470 | 470 | Acinetobacter baumannii | MRSN20315 | Proteobacteria | LMZV01000012.1 | III | 2 |
| 301 | GCA_001441565.1 | 470 | 470 | Acinetobacter baumannii | MRSN15084 | Proteobacteria | LMZW01000004.1 | III | 2 |
| 302 | GCA_001441625.1 | 470 | 470 | Acinetobacter baumannii | MRSN20755 | Proteobacteria | LMYO01000010.1 | III | 2 |
| 303 | GCA_001441645.1 | 470 | 470 | Acinetobacter baumannii | MRSN7081 | Proteobacteria | LMZY01000005.1 | III | 2 |
| 304 | GCA_000581835.1 | 1310681 | 470 | Acinetobacter baumannii 1542444 | 1542444 | Proteobacteria | JEYA01000001.1 | III | 2 |
| 305 | GCA_000581295.1 | 1310630 | 470 | Acinetobacter baumannii 99063 | 99063 | Proteobacteria | JEXJ01000065.1 | III | 2 |
| 306 | GCA_000335595.1 | 903937 | 470 | Acinetobacter baumannii AA-014 | AA-014 | Proteobacteria | AMGA01000013.1 | III | 2 |
| 307 | GCA_000369165.1 | 1217630 | 470 | Acinetobacter baumannii NIPH 201 | NIPH 201 | Proteobacteria | KB849843.1 | III | 2 |
| 308 | GCA_000369205.1 | 1217633 | 470 | Acinetobacter baumannii NIPH 335 | NIPH 335 | Proteobacteria | KB849885.1 | III | 2 |
| 309 | GCA_000369265.1 | 1217627 | 470 | Acinetobacter baumannii NIPH 67 | NIPH 67 | Proteobacteria | KB849903.1 | III | 2 |
| 310 | GCA_000309235.1 | 903926 | 470 | Acinetobacter baumannii OIFC035 | OIFC035 | Proteobacteria | AMTB01000008.1 | III | 2 |
| 311 | GCA_000305235.1 | 903902 | 470 | Acinetobacter baumannii OIFC098 | OIFC098 | Proteobacteria | AMDF01000045.1 | III | 2 |
| 312 | GCA_000368485.1 | 1217656 | 106649 | Acinetobacter guillouiae NIPH 991 | NIPH 991 | Proteobacteria | KB849456.1 | III | 2 |
| 313 | GCA_000369685.1 | 1144665 | 1144665 | Acinetobacter sp. CIP 102136 | CIP 102136 | Proteobacteria | KB850142.1 | III | 2 |
| 314 | GCA_000368425.1 | 1144669 | 1144669 | Acinetobacter sp. CIP 102637 | CIP 102637 | Proteobacteria | KB849435.1 | III | 2 |
| 315 | GCA_000154465.1 | 445970 | 28117 | Alistipes putredinis DSM 17216 | DSM 17216 | Bacteroidetes | DS499580.1 | III | 2 |
| 316 | GCA_001578515.1 | 28108 | 28108 | Alteromonas macleodii | HOT1A3 | Proteobacteria | CP012202.1 | III | 2 |
| 317 | GCA_000300175.1 | 1004787 | 28108 | Alteromonas macleodii str. ‘Balearic Sea AD45’ | Balearic Sea AD45 | Proteobacteria | CP003873.1 | III | 2 |
| 318 | GCA_000204015.1 | 715226 | 76891 | Asticcacaulis biprosthecum C19 | C19 | Proteobacteria | GL883078.1 | III | 2 |
| 319 | GCA_000495835.1 | 1282361 | 1282361 | Asticcacaulis sp. AC402 | AC402 | Proteobacteria | AWGC01000023.1 | III | 2 |
| 320 | GCA_000061505.1 | 62928 | 62928 | Azoarcus sp. BH72 | BH72 | Proteobacteria | AM406670.1 | III | 2 |
| 321 | GCA_000817975.1 | 1328314 | 353 | Azotobacter chroococcum NCIMB 8003 | NCIMB 8003 | Proteobacteria | CP010421.1 | III | 2 |
| 322 | GCA_001286525.1 | 817 | 817 | Bacteroides fragilis | BE1 | Bacteroidetes | LN877293.1 | III | 2 |
| 323 | GCA_000210835.1 | 862962 | 817 | Bacteroides fragilis 638R | 638R | Bacteroidetes | FQ312004.1 | III | 2 |
| 324 | GCA_000598705.1 | 1339297 | 817 | Bacteroides fragilis str. 1009-4-F #10 | 1009-4-F #10 | Bacteroidetes | JGED01000021.1 | III | 2 |
| 325 | GCA_000599285.2 | 1339296 | 817 | Bacteroides fragilis str. 1009-4-F #7 | 1009-4-F #7 | Bacteroidetes | JGEE01000031.1 | III | 2 |
| 326 | GCA_000598325.1 | 1339309 | 817 | Bacteroides fragilis str. 3783N1-2 | 3783N1-2 | Bacteroidetes | JGCS01000280.1 | III | 2 |
| 327 | GCA_000599065.2 | 1339310 | 817 | Bacteroides fragilis str. 3783N1-6 | 3783N1-6 | Bacteroidetes | JGEU01000034.1 | III | 2 |
| 328 | GCA_000598605.1 | 1339311 | 817 | Bacteroides fragilis str. 3783N1-8 | 3783N1-8 | Bacteroidetes | JGDR01000052.1 | III | 2 |
| 329 | GCA_000598345.1 | 1339312 | 817 | Bacteroides fragilis str. 3783N2-1 | 3783N2-1 | Bacteroidetes | JGCT01000263.1 | III | 2 |
| 330 | GCA_000598165.1 | 1339313 | 817 | Bacteroides fragilis str. 3976T7 | 3976T7 | Bacteroidetes | JGCU01000310.1 | III | 2 |
| 331 | GCA_000154525.1 | 449673 | 46506 | Bacteroides stercoris ATCC 43183 | ATCC 43183 | Bacteroidetes | DS499662.1 | III | 2 |
| 332 | GCA_001578555.1 | 820 | 820 | Bacteroides uniformis | KLE1607 | Bacteroidetes | KQ968311.1 | III | 2 |
| 333 | GCA_000224655.1 | 693988 | 693988 | Bilophila sp. 4_1_30 | 4_1_30 | Proteobacteria | JH114233.1 | III | 2 |
| 334 | GCA_000173575.1 | 516466 | 516466 | Burkholderia sp. H160 | H160 | Proteobacteria | ABYL01000008.1 | III | 2 |
| 335 | GCA_001527325.1 | 101571 | 101571 | Burkholderia ubonensis | MSMB2054 | Proteobacteria | LOZC01000078.1 | III | 2 |
| 336 | GCA_001527345.1 | 101571 | 101571 | Burkholderia ubonensis | MSMB2055 | Proteobacteria | LOZD01000059.1 | III | 2 |
| 337 | GCA_001527425.1 | 101571 | 101571 | Burkholderia ubonensis | MSMB2061 | Proteobacteria | LOZH01000090.1 | III | 2 |
| 338 | GCA_001529135.1 | 101571 | 101571 | Burkholderia ubonensis | MSMB1212WGS | Proteobacteria | LPED01000119.1 | III | 2 |
| 339 | GCA_001531435.1 | 101571 | 101571 | Burkholderia ubonensis | MSMB1508WGS | Proteobacteria | LPFT01000065.1 | III | 2 |
| 340 | GCA_000531125.1 | 1400861 | 1400860 | Candidatus Contendobacter odensis Run_B_J11 | Run_B_J11 | Proteobacteria | CBTK010000022.1 | III | 2 |
| 341 | GCA_001292585.1 | 1509431 | 1509431 | Candidatus Magnetomorum sp. HK-1 | | Proteobacteria | JPDT01000292.1 | III | 2 |
| 342 | GCA_000477035.2 | 1348585 | 76594 | Cellulophaga baltica NN016038 | NN016038 | Bacteroidetes | CP009887.1 | III | 2 |
| 343 | GCA_000601485.1 | 1192034 | 51 | Chondromyces apiculatus DSM 436 | DSM 436 | Proteobacteria | ASRX01000002.1 | III | 2 |
| 344 | GCA_001421435.1 | 1735672 | 1735672 | Chryseobacterium sp. Leaf201 | Leaf201 | Bacteroidetes | LMKA01000095.1 | III | 2 |
| 345 | GCA_001281005.1 | 546 | 546 | Citrobacter freundii | P10159 | Proteobacteria | CP012554.1 | III | 2 |
| 346 | GCA_001316675.1 | 546 | 546 | Citrobacter freundii | ST62:944112508 | Proteobacteria | LJEB01000070.1 | III | 2 |
| 347 | GCA_001034465.1 | 1686377 | 1686377 | Citrobacter sp. MGH100 | MGH100 | Proteobacteria | KQ089800.1 | III | 2 |
| 348 | GCA_001037515.1 | 1686383 | 1686383 | Citrobacter sp. MGH110 | MGH110 | Proteobacteria | KQ089830.1 | III | 2 |
| 349 | GCA_000828895.1 | 1458425 | 1458425 | Comamonadaceae bacterium A1 | A1 | Proteobacteria | AP014568.1 | III | 2 |
| 350 | GCA_001277275.1 | 28141 | 28141 | Cronobacter sakazakii | NCTC 8155 | Proteobacteria | CP012253.1 | III | 2 |
| 351 | GCA_000339015.1 | 956149 | 28141 | Cronobacter sakazakii SP291 | Sp291 | Proteobacteria | CP004091.1 | III | 2 |
| 352 | GCA_000961725.1 | 1629713 | 1629713 | Desulfobulbaceae bacterium BRH_c16a | | Proteobacteria | LADS01000053.1 | III | 2 |
| 353 | GCA_001011305.1 | 548 | 548 | Enterobacter aerogenes | GN02420 | Proteobacteria | LDBI01000017.1 | III | 2 |
| 354 | GCA_001011595.1 | 548 | 548 | Enterobacter aerogenes | GN03959 | Proteobacteria | LDBV01000046.1 | III | 2 |
| 355 | GCA_001030055.1 | 548 | 548 | Enterobacter aerogenes | UCI98 | Proteobacteria | LESY01000010.1 | III | 2 |
| 356 | GCA_001030185.1 | 548 | 548 | Enterobacter aerogenes | UCI97 | Proteobacteria | KQ087587.1 | III | 2 |
| 357 | GCA_001022755.1 | 61645 | 61645 | Enterobacter asburiae | GN02692 | Proteobacteria | LEDI01000011.1 | III | 2 |
| 358 | GCA_000952375.1 | 550 | 550 | Enterobacter cloacae | MNCRE12 | Proteobacteria | JYME01000006.1 | III | 2 |
| 359 | GCA_001022875.1 | 550 | 550 | Enterobacter cloacae | GN02773 | Proteobacteria | LEDE01000006.1 | III | 2 |
| 360 | GCA_001030145.1 | 550 | 550 | Enterobacter cloacae | UCI86 | Proteobacteria | KQ087579.1 | III | 2 |
| 361 | GCA_001030195.1 | 550 | 550 | Enterobacter cloacae | UCI85 | Proteobacteria | KQ087593.1 | III | 2 |
| 362 | GCA_001518245.1 | 550 | 550 | Enterobacter cloacae | GN03848 | Proteobacteria | LRCM01000015.1 | III | 2 |
| 363 | GCA_001518625.1 | 550 | 550 | Enterobacter cloacae | GN04311 | Proteobacteria | LRCQ01000112.1 | III | 2 |
| 364 | GCA_001317055.1 | 336306 | 550 | Enterobacter cloacae subsp. cloacae | ST433:953102574 | Proteobacteria | LJE001000030.1 | III | 2 |
| 365 | GCA_000492435.1 | 1329856 | 550 | Enterobacter cloacae UCICRE 12 | UCICRE 12 | Proteobacteria | KI535461.1 | III | 2 |
| 366 | GCA_001037885.1 | 1686400 | 1686400 | Enterobacter sp. BIDMC109 | BIDMC109 | Proteobacteria | KQ090002.1 | III | 2 |
| 367 | GCA_000735105.1 | 421072 | 421072 | Epilithonimonas lactis | LMG 24401 | Bacteroidetes | JPLY01000004.1 | III | 2 |
| 368 | GCA_001077815.1 | 1648404 | 1648404 | Erythrobacter sp. s21-N3 | s21-N3 | Proteobacteria | CP011310.1 | III | 2 |
| 369 | GCA_000181515.1 | 161528 | 161528 | Erythrobacter sp. SD-21 | SD-21 | Proteobacteria | ABCG01000002.1 | III | 2 |
| 370 | GCA_000695175.1 | 562 | 562 | Escherichia coli | MI10-01 | Proteobacteria | JHEZ01000002.1 | III | 2 |
| 371 | GCA_000731455.1 | 562 | 562 | Escherichia coli | D6-117_07.11 | Proteobacteria | HG976958.1 | III | 2 |
| 372 | GCA_000797755.1 | 562 | 562 | Escherichia coli | CVM N33443PS | Proteobacteria | JUDP01000006.1 | III | 2 |
| 373 | GCA_000797775.1 | 562 | 562 | Escherichia coli | CVM N34322PS | Proteobacteria | JUCY01000038.1 | III | 2 |
| 374 | GCA_000797995.1 | 562 | 562 | Escherichia coli | CVM N36613PS | Proteobacteria | JUCH01000028.1 | III | 2 |
| 375 | GCA_000798215.1 | 562 | 562 | Escherichia coli | CVM N36620PS | Proteobacteria | JUCG01000047.1 | III | 2 |
| 376 | GCA_000798415.1 | 562 | 562 | Escherichia coli | CVM N34557PS | Proteobacteria | JUCU01000037.1 | III | 2 |
| 377 | GCA_000798575.1 | 562 | 562 | Escherichia coli | CVM N36404PS | Proteobacteria | JUCJ01000011.1 | III | 2 |
| 378 | GCA_000819265.1 | 562 | 562 | Escherichia coli | CVM N38428PS | Proteobacteria | JWYX01000074.1 | III | 2 |
| 379 | GCA_000819645.1 | 562 | 562 | Escherichia coli | | Proteobacteria | CP010315.1 | III | 2 |
| 380 | GCA_000934865.1 | 562 | 562 | Escherichia coli | ATCC 35150 | Proteobacteria | JXUS01000117.1 | III | 2 |
| 381 | GCA_000935075.1 | 562 | 562 | Escherichia coli | ATCC 35150 NalR | Proteobacteria | JYIO01000082.1 | III | 2 |
| 382 | GCA_000953765.1 | 562 | 562 | Escherichia coli | MCI_507 | Proteobacteria | JZSD01000085.1 | III | 2 |
| 383 | GCA_000965565.1 | 562 | 562 | Escherichia coli | St. Olav172 | Proteobacteria | JZDY01000017.1 | III | 2 |
| 384 | GCA_000965655.1 | 562 | 562 | Escherichia coli | St. Olav173 | Proteobacteria | JZDZ01000061.1 | III | 2 |
| 385 | GCA_001012075.1 | 562 | 562 | Escherichia coli | CFSAN026805 | Proteobacteria | LDCU01000029.1 | III | 2 |
| 386 | GCA_001030405.1 | 562 | 562 | Escherichia coli | MGH108 | Proteobacteria | KQ087687.1 | III | 2 |
| 387 | GCA_001191125.1 | 562 | 562 | Escherichia coli | CFSAN026804 | Proteobacteria | LGZD01000035.1 | III | 2 |
| 388 | GCA_001191185.1 | 562 | 562 | Escherichia coli | CFSAN026847 | Proteobacteria | LGZE01000020.1 | III | 2 |
| 389 | GCA_001191195.1 | 562 | 562 | Escherichia coli | CFSAN026846 | Proteobacteria | LGZI01000146.1 | III | 2 |
| 390 | GCA_001191525.1 | 562 | 562 | Escherichia coli | CFSAN026848 | Proteobacteria | LHAB01000019.1 | III | 2 |
| 391 | GCA_001263735.1 | 562 | 562 | Escherichia coli | INSLA289 | Proteobacteria | LHAT01000022.1 | III | 2 |
| 392 | GCA_001281685.1 | 562 | 562 | Escherichia coli | STEC 771 | Proteobacteria | LGAZ01000005.1 | III | 2 |
| 393 | GCA_001281725.1 | 562 | 562 | Escherichia coli | STEC 2868 | Proteobacteria | LGBJ01000009.1 | III | 2 |
| 394 | GCA_001281755.1 | 562 | 562 | Escherichia coli | E09/224 | Proteobacteria | LGBP01000024.1 | III | 2 |
| 395 | GCA_001281775.1 | 562 | 562 | Escherichia coli | STEC 989 | Proteobacteria | LGBA01000013.1 | III | 2 |
| 396 | GCA_001281795.1 | 562 | 562 | Escherichia coli | STEC 994 | Proteobacteria | LGBB01000045.1 | III | 2 |
| 397 | GCA_001281815.1 | 562 | 562 | Escherichia coli | STEC 1109 | Proteobacteria | LGBC01000012.1 | III | 2 |
| 398 | GCA_001281845.1 | 562 | 562 | Escherichia coli | STEC 2075 | Proteobacteria | LGBD01000011.1 | III | 2 |
| 399 | GCA_001281855.1 | 562 | 562 | Escherichia coli | STEC 2112 | Proteobacteria | LGBE01000001.1 | III | 2 |
| 400 | GCA_001281885.1 | 562 | 562 | Escherichia coli | STEC 2257 | Proteobacteria | LGBF01000023.1 | III | 2 |
| 401 | GCA_001281905.1 | 562 | 562 | Escherichia coli | STEC 2410 | Proteobacteria | LGBG01000006.1 | III | 2 |
| 402 | GCA_001281915.1 | 562 | 562 | Escherichia coli | STEC 2821 | Proteobacteria | LGBI01000140.1 | III | 2 |
| 403 | GCA_001281925.1 | 562 | 562 | Escherichia coli | STEC 2667 | Proteobacteria | LGBH01000007.1 | III | 2 |
| 404 | GCA_001281965.1 | 562 | 562 | Escherichia coli | E09/10 | Proteobacteria | LGBK01000008.1 | III | 2 |
| 405 | GCA_001281985.1 | 562 | 562 | Escherichia coli | EPEC 287 | Proteobacteria | LGBL01000025.1 | III | 2 |
| 406 | GCA_001281995.1 | 562 | 562 | Escherichia coli | EPEC 393 | Proteobacteria | LGBM01000019.1 | III | 2 |
| 407 | GCA_001282025.1 | 562 | 562 | Escherichia coli | EPEC 1572 | Proteobacteria | LGBN01000001.1 | III | 2 |
| 408 | GCA_001282035.1 | 562 | 562 | Escherichia coli | EPEC 1669 | Proteobacteria | LGBO01000067.1 | III | 2 |
| 409 | GCA_001282065.1 | 562 | 562 | Escherichia coli | STEC 2820 | Proteobacteria | LGBQ01000003.1 | III | 2 |
| 410 | GCA_001284665.1 | 562 | 562 | Escherichia coli | 503459_aEPEC | Proteobacteria | CXZO01000020.1 | III | 2 |
| 411 | GCA_001297965.1 | 562 | 562 | Escherichia coli | STEC 915 | Proteobacteria | LFUH01000101.1 | III | 2 |
| 412 | GCA_001297975.1 | 562 | 562 | Escherichia coli | STEC 343 | Proteobacteria | LDOZ01000007.1 | III | 2 |
| 413 | GCA_001297985.1 | 562 | 562 | Escherichia coli | STEC 623 | Proteobacteria | LFUB01000011.1 | III | 2 |
| 414 | GCA_001297995.1 | 562 | 562 | Escherichia coli | STEC 605 | Proteobacteria | LFUA01000020.1 | III | 2 |
| 415 | GCA_001309715.1 | 562 | 562 | Escherichia coli | PARC447 | Proteobacteria | LECJ01000192.1 | III | 2 |
| 416 | GCA_001309815.1 | 562 | 562 | Escherichia coli | 03-6430 | Proteobacteria | LEAB01000117.1 | III | 2 |
| 417 | GCA_001309835.1 | 562 | 562 | Escherichia coli | PARC449 | Proteobacteria | LEAC01000125.1 | III | 2 |
| 418 | GCA_001309885.1 | 562 | 562 | Escherichia coli | CO6CE900 | Proteobacteria | LEAE01000148.1 | III | 2 |
| 419 | GCA_001309895.1 | 562 | 562 | Escherichia coli | CO6CE1353 | Proteobacteria | LEAF01000141.1 | III | 2 |
| 420 | GCA_001309905.1 | 562 | 562 | Escherichia coli | CO6CE1943 | Proteobacteria | LEAG01000046.1 | III | 2 |
| 421 | GCA_001309925.1 | 562 | 562 | Escherichia coli | CO6CE2940 | Proteobacteria | LEAH01000084.1 | III | 2 |
| 422 | GCA_001309965.1 | 562 | 562 | Escherichia coli | CO283 | Proteobacteria | LEAI01000013.1 | III | 2 |
| 423 | GCA_001309985.1 | 562 | 562 | Escherichia coli | 1935 | Proteobacteria | LEAD01000163.1 | III | 2 |
| 424 | GCA_001309995.1 | 562 | 562 | Escherichia coli | E0122 | Proteobacteria | LEAJ01000145.1 | III | 2 |
| 425 | GCA_001310005.1 | 562 | 562 | Escherichia coli | LCDC7236 | Proteobacteria | LEAK01000079.1 | III | 2 |
| 426 | GCA_001484355.1 | 562 | 562 | Escherichia coli | AY71 | Proteobacteria | LLYJ01000063.1 | III | 2 |
| 427 | GCA_001484485.1 | 562 | 562 | Escherichia coli | AZ74 | Proteobacteria | LLYM01000074.1 | III | 2 |
| 428 | GCA_001518365.1 | 562 | 562 | Escherichia coli | GN02740 | Proteobacteria | LQZU01000211.1 | III | 2 |
| 429 | GCA_001518955.1 | 562 | 562 | Escherichia coli | SEC470 | Proteobacteria | CP013962.1 | III | 2 |
| 430 | GCA_001519395.1 | 562 | 562 | Escherichia coli | GN02270 | Proteobacteria | LQST01000002.1 | III | 2 |
| 431 | GCA_001519635.1 | 562 | 562 | Escherichia coli | GN02354 | Proteobacteria | LQTF01000057.1 | III | 2 |
| 432 | GCA_001519685.1 | 562 | 562 | Escherichia coli | GN02094 | Proteobacteria | LQSC01000049.1 | III | 2 |
| 433 | GCA_001519775.1 | 562 | 562 | Escherichia coli | GN02140 | Proteobacteria | LQSF01000099.1 | III | 2 |
| 434 | GCA_001519815.1 | 562 | 562 | Escherichia coli | GN02298 | Proteobacteria | LQSX01000125.1 | III | 2 |
| 435 | GCA_001519835.1 | 562 | 562 | Escherichia coli | GN02290 | Proteobacteria | LQSW01000149.1 | III | 2 |
| 436 | GCA_001519975.1 | 562 | 562 | Escherichia coli | GN02415 | Proteobacteria | LQTQ01000061.1 | III | 2 |
| 437 | GCA_001520115.1 | 562 | 562 | Escherichia coli | GN02343 | Proteobacteria | LQTC01000029.1 | III | 2 |
| 438 | GCA_001520255.1 | 562 | 562 | Escherichia coli | GN03578 | Proteobacteria | LQVZ01000203.1 | III | 2 |
| 439 | GCA_001520375.1 | 562 | 562 | Escherichia coli | GN02460 | Proteobacteria | LQTZ01000058.1 | III | 2 |
| 440 | GCA_001520435.1 | 562 | 562 | Escherichia coli | GN02430 | Proteobacteria | LQTU01000172.1 | III | 2 |
| 441 | GCA_001520495.1 | 562 | 562 | Escherichia coli | GN02426 | Proteobacteria | LQTS01000163.1 | III | 2 |
| 442 | GCA_001520575.1 | 562 | 562 | Escherichia coli | GN02674 | Proteobacteria | LQVA01000248.1 | III | 2 |
| 443 | GCA_001520835.1 | 562 | 562 | Escherichia coli | GN02707 | Proteobacteria | LQVE01000001.1 | III | 2 |
| 444 | GCA_001520935.1 | 562 | 562 | Escherichia coli | GN03218 | Proteobacteria | LQVQ01000300.1 | III | 2 |
| 445 | GCA_001520995.1 | 562 | 562 | Escherichia coli | GN02953 | Proteobacteria | LQVM01000164.1 | III | 2 |
| 446 | GCA_001521225.1 | 562 | 562 | Escherichia coli | GN02350 | Proteobacteria | LQTE01000128.1 | III | 2 |
| 447 | GCA_001521635.1 | 562 | 562 | Escherichia coli | GN04153 | Proteobacteria | LQWI01000295.1 | III | 2 |
| 448 | GCA_001521695.1 | 562 | 562 | Escherichia coli | GN03624 | Proteobacteria | LQWB01000001.1 | III | 2 |
| 449 | GCA_001558995.1 | 562 | 562 | Escherichia coli | JEONG-1266 | Proteobacteria | CP014314.1 | III | 2 |
| 450 | GCA_001562855.1 | 562 | 562 | Escherichia coli | JPH493 | Proteobacteria | KQ961400.1 | III | 2 |
| 451 | GCA_001571675.1 | 562 | 562 | Escherichia coli | UC5 | Proteobacteria | LRXT01000038.1 | III | 2 |
| 452 | GCA_001575305.1 | 562 | 562 | Escherichia coli | G19 | Proteobacteria | LONY01000024.1 | III | 2 |
| 453 | GCA_001575755.1 | 562 | 562 | Escherichia coli | G111 | Proteobacteria | LONJ01000019.1 | III | 2 |
| 454 | GCA_001575775.1 | 562 | 562 | Escherichia coli | G114 | Proteobacteria | LONK01000063.1 | III | 2 |
| 455 | GCA_001575885.1 | 562 | 562 | Escherichia coli | G169 | Proteobacteria | LONQ01000006.1 | III | 2 |
| 456 | GCA_001576035.1 | 562 | 562 | Escherichia coli | G27 | Proteobacteria | LOOY01000022.1 | III | 2 |
| 457 | GCA_001576105.1 | 562 | 562 | Escherichia coli | G314 | Proteobacteria | LOPH01000016.1 | III | 2 |
| 458 | GCA_001576135.1 | 562 | 562 | Escherichia coli | G313 | Proteobacteria | LOPG01000001.1 | III | 2 |
| 459 | GCA_001576325.1 | 562 | 562 | Escherichia coli | G28 | Proteobacteria | LOOZ010000011.1 | III | 2 |
| 460 | GCA_001576375.1 | 562 | 562 | Escherichia coli | G26 | Proteobacteria | LOOX01000037.1 | III | 2 |
| 461 | GCA_001576385.1 | 562 | 562 | Escherichia coli | G35 | Proteobacteria | LOPL01000002.1 | III | 2 |
| 462 | GCA_000303235.2 | 1005441 | 562 | Escherichia coli 0.1304 | 0.1304 | Proteobacteria | JH943332.1 | III | 2 |
| 463 | GCA_000462305.2 | 1081888 | 562 | Escherichia coli 08BKT055439 | 08BKT055439 | Proteobacteria | AVRI01000134.1 | III | 2 |
| 464 | GCA_000462325.2 | 1081895 | 562 | Escherichia coli 08BKT77219 | 08BKT77219 | Proteobacteria | AVRJ01000125.1 | III | 2 |
| 465 | GCA_000462345.2 | 1081894 | 562 | Escherichia coli 09BKT024447 | 09BKT024447 | Proteobacteria | AVRK01000010.1 | III | 2 |
| 466 | GCA_000461935.2 | 1081889 | 562 | Escherichia coli 09BKT076207 | 09BKT076207 | Proteobacteria | AVQR01000067.1 | III | 2 |
| 467 | GCA_000340455.2 | 1081887 | 562 | Escherichia coli 09BKT078844 | 09BKT078844 | Proteobacteria | KB453231.1 | III | 2 |
| 468 | GCA_000304855.2 | 1005469 | 562 | Escherichia coli 10.0821 | 10.0821 | Proteobacteria | AMTO01000004.1 | III | 2 |
| 469 | GCA_000305415.2 | 1005466 | 562 | Escherichia coli 10.0833 | 10.0833 | Proteobacteria | JH969098.1 | III | 2 |
| 470 | GCA_000305435.2 | 1005467 | 562 | Escherichia coli 10.0869 | 10.0869 | Proteobacteria | JH968727.1 | III | 2 |
| 471 | GCA_000601155.1 | 1444132 | 562 | Escherichia coli 1-110-08_S3_C1 | 1-110-08_S3_C1 | Proteobacteria | JHDN01000003.1 | III | 2 |
| 472 | GCA_000601175.1 | 1444160 | 562 | Escherichia coli 1-110-08_S3_C2 | 1-110-08_S3_C2 | Proteobacteria | JHDM01000091.1 | III | 2 |
| 473 | GCA_000601335.1 | 1444190 | 562 | Escherichia coli 1-110-08_S3_C3 | 1-110-08_S3_C3 | Proteobacteria | JHDL01000001.1 | III | 2 |
| 474 | GCA_000485635.1 | 1268976 | 562 | Escherichia coli 113290 | 113290 | Proteobacteria | KI521766.1 | III | 2 |
| 475 | GCA_000627435.1 | 1444135 | 562 | Escherichia coli 1-250-04_S3_C1 | 1-250-04_S3_C1 | Proteobacteria | JJLU01000053.1 | III | 2 |
| 476 | GCA_000713815.1 | 1444163 | 562 | Escherichia coli 1-250-04_S3_C2 | 1-250-04_S3_C2 | Proteobacteria | JOSR01000197.1 | III | 2 |
| 477 | GCA_000687105.1 | 1444147 | 562 | Escherichia coli 2-005-03_S3_C2 | 2-005-03_S3_C2 | Proteobacteria | JMGT01000075.1 | III | 2 |
| 478 | GCA_000700165.1 | 1444093 | 562 | Escherichia coli 2-011-08_S1_C3 | 2-011-08_S1_C3 | Proteobacteria | JNNA01000159.1 | III | 2 |
| 479 | GCA_000700605.1 | 1444119 | 562 | Escherichia coli 2-052-05_S3_C1 | 2-052-05_S3_C1 | Proteobacteria | JNNF01000074.1 | III | 2 |
| 480 | GCA_000713655.1 | 1444149 | 562 | Escherichia coli 2-052-05_S3_C2 | 2-052-05_S3_C2 | Proteobacteria | JOSJ01000098.1 | III | 2 |
| 481 | GCA_000703605.1 | 1444177 | 562 | Escherichia coli 2-052-05_S3_C3 | 2-052-05_S3_C3 | Proteobacteria | JNOZ01000070.1 | III | 2 |
| 482 | GCA_000703725.1 | 1444150 | 562 | Escherichia coli 2-156-04_S3_C2 | 2-156-04_S3_C2 | Proteobacteria | JNPK01000053.1 | III | 2 |
| 483 | GCA_000713695.1 | 1444123 | 562 | Escherichia coli 2-222-05_S3_C1 | 2-222-05_S3_C1 | Proteobacteria | JOSM01000267.1 | III | 2 |
| 484 | GCA_000713735.1 | 1444153 | 562 | Escherichia coli 2-222-05_S3_C2 | 2-222-05_S3_C2 | Proteobacteria | JOSN01000002.1 | III | 2 |
| 485 | GCA_000704145.1 | 1444181 | 562 | Escherichia coli 2-222-05_S3_C3 | 2-222-05_S3_C3 | Proteobacteria | JNQN01000045.1 | III | 2 |
| 486 | GCA_000711475.1 | 1444042 | 562 | Escherichia coli 2-316-03_S1_C1 | 2-316-03_S1_C1 | Proteobacteria | JOMW01000194.1 | III | 2 |
| 487 | GCA_000711415.1 | 1444071 | 562 | Escherichia coli 2-316-03_S1_C2 | 2-316-03_S1_C2 | Proteobacteria | JOMX01000159.1 | III | 2 |
| 488 | GCA_000355155.2 | 1116119 | 562 | Escherichia coli 2719100 | 2719100 | Proteobacteria | AQFG01000015.1 | III | 2 |
| 489 | GCA_000354775.2 | 1116010 | 562 | Escherichia coli 2747800 | 2747800 | Proteobacteria | AQEA01000085.1 | III | 2 |
| 490 | GCA_000354875.1 | 1116011 | 562 | Escherichia coli 2749250 | 2749250 | Proteobacteria | AQDZ01000107.1 | III | 2 |
| 491 | GCA_000355615.2 | 1116014 | 562 | Escherichia coli 2770900 | 2770900 | Proteobacteria | AQDW01000088.1 | III | 2 |
| 492 | GCA_000354995.2 | 1116021 | 562 | Escherichia coli 2860050 | 2860050 | Proteobacteria | AQDL01000093.1 | III | 2 |
| 493 | GCA_000356445.2 | 1116022 | 562 | Escherichia coli 2860650 | 2860650 | Proteobacteria | APXG01000173.1 | III | 2 |
| 494 | GCA_000356505.2 | 1116027 | 562 | Escherichia coli 2866350 | 2866350 | Proteobacteria | APXJ01000134.1 | III | 2 |
| 495 | GCA_000462245.2 | 1207038 | 562 | Escherichia coli 2886-75 | 2886-75 | Proteobacteria | AVRR01000001.1 | III | 2 |
| 496 | GCA_000304815.2 | 1005450 | 562 | Escherichia coli 3.4870 | 3.4870 | Proteobacteria | JH970627.1 | III | 2 |
| 497 | GCA_000335195.2 | 1051347 | 562 | Escherichia coli 3.4880 | 3.4880 | Proteobacteria | AOET01000122.1 | III | 2 |
| 498 | GCA_000700285.1 | 1444059 | 562 | Escherichia coli 3-475-03_S1_C1 | 3-475-03_S1_C1 | Proteobacteria | JNMJ01000048.1 | III | 2 |
| 499 | GCA_000713905.1 | 1444087 | 562 | Escherichia coli 3-475-03_S1_C2 | 3-475-03_S1_C2 | Proteobacteria | JOQC01000025.1 | III | 2 |
| 500 | GCA_000714055.1 | 1444171 | 562 | Escherichia coli 4-203-08_S3_C2 | 4-203-08_S3_C2 | Proteobacteria | JOQK01000042.1 | III | 2 |
| 501 | GCA_000713985.1 | 1444196 | 562 | Escherichia coli 4-203-08_S3_C3 | 4-203-08_S3_C3 | Proteobacteria | JOQH01000040.1 | III | 2 |
| 502 | GCA_000304875.2 | 1005452 | 562 | Escherichia coli 5.2239 | 5.2239 | Proteobacteria | JH970990.1 | III | 2 |
| 503 | GCA_000304055.2 | 1005561 | 562 | Escherichia coli 5412 | 5412 | Proteobacteria | JH954949.1 | III | 2 |
| 504 | GCA_000264135.1 | 752787 | 562 | Escherichia coli 576-1 | 576-1 | Proteobacteria | AJWS01000293.1 | III | 2 |
| 505 | GCA_000303995.2 | 1005558 | 562 | Escherichia coli 5905 | 5905 | Proteobacteria | JH958373.1 | III | 2 |
| 506 | GCA_000714385.1 | 1444226 | 562 | Escherichia coli 6-175-07_S4_C1 | 6-175-07_S4_C1 | Proteobacteria | JORB01000108.1 | III | 2 |
| 507 | GCA_000714415.1 | 1444255 | 562 | Escherichia coli 6-175-07_S4_C2 | 6-175-07_S4_C2 | Proteobacteria | JORC01000054.1 | III | 2 |
| 508 | GCA_000713175.1 | 1444281 | 562 | Escherichia coli 6-175-07_S4_C3 | 6-175-07_S4_C3 | Proteobacteria | JORK01000060.1 | III | 2 |
| 509 | GCA_000713335.1 | 1444062 | 562 | Escherichia coli 6-319-05_S1_C1 | 6-319-05_S1_C1 | Proteobacteria | JORT01000068.1 | III | 2 |
| 510 | GCA_000713025.1 | 1444090 | 562 | Escherichia coli 6-319-05_S1_C2 | 6-319-05_S1_C2 | Proteobacteria | JORD01000183.1 | III | 2 |
| 511 | GCA_000713015.1 | 1444115 | 562 | Escherichia coli 6-319-05_S1_C3 | 6-319-05_S1_C3 | Proteobacteria | JORE01000064.1 | III | 2 |
| 512 | GCA_000713255.1 | 1444227 | 562 | Escherichia coli 6-537-08_S4_C1 | 6-537-08_S4_C1 | Proteobacteria | JORS01000112.1 | III | 2 |
| 513 | GCA_000713605.1 | 1444257 | 562 | Escherichia coli 6-537-08_S4_C2 | 6-537-08_S4_C2 | Proteobacteria | JOSG01000027.1 | III | 2 |
| 514 | GCA_000335115.1 | 1051348 | 562 | Escherichia coli 7.1982 | 7.1982 | Proteobacteria | AOEP01000011.1 | III | 2 |
| 515 | GCA_000304835.2 | 1005463 | 562 | Escherichia coli 8.0416 | 8.0416 | Proteobacteria | AMTN01000133.1 | III | 2 |
| 516 | GCA_000305375.2 | 1005461 | 562 | Escherichia coli 8.0586 | 8.0586 | Proteobacteria | JH969648.1 | III | 2 |
| 517 | GCA_000305395.2 | 1005460 | 562 | Escherichia coli 8.2524 | 8.2524 | Proteobacteria | JH969044.1 | III | 2 |
| 518 | GCA_000305455.2 | 1005397 | 562 | Escherichia coli 88.0221 | 88.0221 | Proteobacteria | JH968005.1 | III | 2 |
| 519 | GCA_000316345.2 | 1005398 | 562 | Escherichia coli 88.1042 | 88.1042 | Proteobacteria | KB006081.1 | III | 2 |
| 520 | GCA_000316365.2 | 1005399 | 562 | Escherichia coli 89.0511 | 89.0511 | Proteobacteria | KB007266.1 | III | 2 |
| 521 | GCA_000316385.2 | 1005400 | 562 | Escherichia coli 90.0091 | 90.0091 | Proteobacteria | KB007294.1 | III | 2 |
| 522 | GCA_000316425.2 | 1005402 | 562 | Escherichia coli 90.2281 | 90.2281 | Proteobacteria | KB005715.1 | III | 2 |
| 523 | GCA_000488355.1 | 1268982 | 562 | Escherichia coli 907672 | 907672 | Proteobacteria | KI531258.1 | III | 2 |
| 524 | GCA_000485695.1 | 1268986 | 562 | Escherichia coli 907713 | 907713 | Proteobacteria | KI522246.1 | III | 2 |
| 525 | GCA_000488435.1 | 1268987 | 562 | Escherichia coli 907715 | 907715 | Proteobacteria | KI531882.1 | III | 2 |
| 526 | GCA_000488515.1 | 1268992 | 562 | Escherichia coli 908521 | 908521 | Proteobacteria | KI532686.1 | III | 2 |
| 527 | GCA_000488535.1 | 1268993 | 562 | Escherichia coli 908522 | 908522 | Proteobacteria | KI532821.1 | III | 2 |
| 528 | GCA_000488575.1 | 1268995 | 562 | Escherichia coli 908525 | 908525 | Proteobacteria | KI533062.1 | III | 2 |
| 529 | GCA_000488655.1 | 1268999 | 562 | Escherichia coli 908585 | 908585 | Proteobacteria | KI533791.1 | III | 2 |
| 530 | GCA_000488675.1 | 1269000 | 562 | Escherichia coli 908616 | 908616 | Proteobacteria | KI533940.1 | III | 2 |
| 531 | GCA_000316445.2 | 1005403 | 562 | Escherichia coli 93.0055 | 93.0055 | Proteobacteria | KB004131.1 | III | 2 |
| 532 | GCA_000316465.1 | 1005404 | 562 | Escherichia coli 93.0056 | 93.0056 | Proteobacteria | KB004997.1 | III | 2 |
| 533 | GCA_000267945.2 | 1005481 | 562 | Escherichia coli 93-001 | 93-001 | Proteobacteria | JH710997.1 | III | 2 |
| 534 | GCA_000316485.1 | 1005405 | 562 | Escherichia coli 94.0618 | 94.0618 | Proteobacteria | KB005707.1 | III | 2 |
| 535 | GCA_000335375.2 | 1051346 | 562 | Escherichia coli 95.0083 | 95.0083 | Proteobacteria | AOEU01000192.1 | III | 2 |
| 536 | GCA_000316865.2 | 1005407 | 562 | Escherichia coli 95.1288 | 95.1288 | Proteobacteria | KB001712.1 | III | 2 |
| 537 | GCA_000316765.2 | 1005415 | 562 | Escherichia coli 96.0107 | 96.0107 | Proteobacteria | KB003449.1 | III | 2 |
| 538 | GCA_000318425.2 | 1005414 | 562 | Escherichia coli 96.0109 | 96.0109 | Proteobacteria | KB009454.1 | III | 2 |
| 539 | GCA_000316825.2 | 1005411 | 562 | Escherichia coli 96.0427 | 96.0427 | Proteobacteria | KB002687.1 | III | 2 |
| 540 | GCA_000316905.2 | 1005410 | 562 | Escherichia coli 96.0428 | 96.0428 | Proteobacteria | KB000504.1 | III | 2 |
| 541 | GCA_000316805.2 | 1005413 | 562 | Escherichia coli 96.0932 | 96.0932 | Proteobacteria | KB003092.1 | III | 2 |
| 542 | GCA_000316745.2 | 1005416 | 562 | Escherichia coli 97.0003 | 97.0003 | Proteobacteria | JH999738.1 | III | 2 |
| 543 | GCA_000316505.2 | 1005420 | 562 | Escherichia coli 97.0007 | 97.0007 | Proteobacteria | ANMC01000275.1 | III | 2 |
| 544 | GCA_000318445.2 | 1005419 | 562 | Escherichia coli 97.0010 | 97.0010 | Proteobacteria | KB008878.1 | III | 2 |
| 545 | GCA_000316725.2 | 1005418 | 562 | Escherichia coli 97.1742 | 97.1742 | Proteobacteria | KB004341.1 | III | 2 |
| 546 | GCA_000335215.2 | 1005423 | 562 | Escherichia coli 99.0670 | 99.0670 | Proteobacteria | AOEV01000013.1 | III | 2 |
| 547 | GCA_000316545.2 | 1005422 | 562 | Escherichia coli 99.0678 | 99.0678 | Proteobacteria | ANME01000013.1 | III | 2 |
| 548 | GCA_000316565.2 | 1005424 | 562 | Escherichia coli 99.0713 | 99.0713 | Proteobacteria | ANMF01000001.1 | III | 2 |
| 549 | GCA_000335255.2 | 1005432 | 562 | Escherichia coli 99.0839 | 99.0839 | Proteobacteria | AOEB01000180.1 | III | 2 |
| 550 | GCA_000335275.2 | 1005431 | 562 | Escherichia coli 99.0848 | 99.0848 | Proteobacteria | AOEC01000227.1 | III | 2 |
| 551 | GCA_000335295.2 | 1005440 | 562 | Escherichia coli 99.1753 | 99.1753 | Proteobacteria | AOED01000248.1 | III | 2 |
| 552 | GCA_000335155.2 | 1005435 | 562 | Escherichia coli 99.1762 | 99.1762 | Proteobacteria | AOER01000006.1 | III | 2 |
| 553 | GCA_000335315.2 | 1005438 | 562 | Escherichia coli 99.1775 | 99.1775 | Proteobacteria | AOEE01000251.1 | III | 2 |
| 554 | GCA_000335135.1 | 1005439 | 562 | Escherichia coli 99.1781 | 99.1781 | Proteobacteria | AOEQ01000012.1 | III | 2 |
| 555 | GCA_000335015.2 | 1005437 | 562 | Escherichia coli 99.1793 | 99.1793 | Proteobacteria | AOEF01000014.1 | III | 2 |
| 556 | GCA_000473725.2 | 1389955 | 562 | Escherichia coli ATCC 35150 | ATCC 35150 | Proteobacteria | AWXM02000035.1 | III | 2 |
| 557 | GCA_000335055.2 | 1051353 | 562 | Escherichia coli ATCC 700728 | ATCC 700728 | Proteobacteria | AOEH01000126.1 | III | 2 |
| 558 | GCA_000019385.1 | 481805 | 562 | Escherichia coli ATCC 8739 | ATCC 8739 | Proteobacteria | CP000946.1 | III | 2 |
| 559 | GCA_000496345.2 | 1404261 | 562 | Escherichia coli ATCC BAA-2192 | ATCC BAA-2192 | Proteobacteria | AYGW02000190.1 | III | 2 |
| 560 | GCA_000461955.2 | 1151213 | 562 | Escherichia coli B102 | B102 | Proteobacteria | AVQS01000008.1 | III | 2 |
| 561 | GCA_000462485.2 | 1151234 | 562 | Escherichia coli B103 | B103 | Proteobacteria | AVRS01000001.1 | III | 2 |
| 562 | GCA_000462505.2 | 1151243 | 562 | Escherichia coli B104 | B104 | Proteobacteria | AVRT01000005.1 | III | 2 |
| 563 | GCA_000462525.2 | 1151247 | 562 | Escherichia coli B105 | B105 | Proteobacteria | AVRU01000005.1 | III | 2 |
| 564 | GCA_000462545.2 | 1151248 | 562 | Escherichia coli B106 | B106 | Proteobacteria | AVRV01000001.1 | III | 2 |
| 565 | GCA_000461995.2 | 1151214 | 562 | Escherichia coli B107 | B107 | Proteobacteria | AVQT01000005.1 | III | 2 |
| 566 | GCA_000462565.2 | 550673 | 562 | Escherichia coli B108 | B108 | Proteobacteria | AVRW01000007.1 | III | 2 |
| 567 | GCA_000462585.2 | 1151244 | 562 | Escherichia coli B109 | B109 | Proteobacteria | AVRX01000001.1 | III | 2 |
| 568 | GCA_000462605.2 | 1151249 | 562 | Escherichia coli B112 | B112 | Proteobacteria | AVRY01000010.1 | III | 2 |
| 569 | GCA_000462625.2 | 1151250 | 562 | Escherichia coli B113 | B113 | Proteobacteria | AVRZ01000133.1 | III | 2 |
| 570 | GCA_000462645.2 | 1151251 | 562 | Escherichia coli B114 | B114 | Proteobacteria | AVSA01000001.1 | III | 2 |
| 571 | GCA_000462185.2 | 1151237 | 562 | Escherichia coli B15 | B15 | Proteobacteria | AVSB01000112.1 | III | 2 |
| 572 | GCA_000462665.2 | 1151238 | 562 | Escherichia coli B17 | B17 | Proteobacteria | AVSC01000121.1 | III | 2 |
| 573 | GCA_000462025.2 | 1151225 | 562 | Escherichia coli B26-1 | B26-1 | Proteobacteria | AVQU01000001.1 | III | 2 |
| 574 | GCA_000461915.2 | 1151226 | 562 | Escherichia coli B26-2 | B26-2 | Proteobacteria | AVQV01000001.1 | III | 2 |
| 575 | GCA_000462045.2 | 1151217 | 562 | Escherichia coli B28-1 | B28-1 | Proteobacteria | AVQW01000010.1 | III | 2 |
| 576 | GCA_000477495.2 | 1151218 | 562 | Escherichia coli B28-2 | B28-2 | Proteobacteria | AVQX01000012.1 | III | 2 |
| 577 | GCA_000461975.2 | 1151219 | 562 | Escherichia coli B29-1 | B29-1 | Proteobacteria | AVQY01000001.1 | III | 2 |
| 578 | GCA_000462105.2 | 1151220 | 562 | Escherichia coli B29-2 | B29-2 | Proteobacteria | AVQZ01000006.1 | III | 2 |
| 579 | GCA_000462125.2 | 1151221 | 562 | Escherichia coli B36-1 | B36-1 | Proteobacteria | AVRA01000107.1 | III | 2 |
| 580 | GCA_000462065.2 | 1151222 | 562 | Escherichia coli B36-2 | B36-2 | Proteobacteria | AVRB01000001.1 | III | 2 |
| 581 | GCA_000462685.2 | 1151227 | 562 | Escherichia coli B40-1 | B40-1 | Proteobacteria | AVSD01000010.1 | III | 2 |
| 582 | GCA_000462705.2 | 1151228 | 562 | Escherichia coli B40-2 | B40-2 | Proteobacteria | AVSE01000003.1 | III | 2 |
| 583 | GCA_000462725.2 | 1151246 | 562 | Escherichia coli B49-2 | B49-2 | Proteobacteria | AVSF01000006.1 | III | 2 |
| 584 | GCA_000462745.2 | 1151224 | 562 | Escherichia coli B5-2 | B5-2 | Proteobacteria | AVSG01000001.1 | III | 2 |
| 585 | GCA_000462085.2 | 1151215 | 562 | Escherichia coli B7-1 | B7-1 | Proteobacteria | AVRC01000049.1 | III | 2 |
| 586 | GCA_000462405.2 | 1151216 | 562 | Escherichia coli B7-2 | B7-2 | Proteobacteria | AVRD01000050.1 | III | 2 |
| 587 | GCA_000462765.2 | 1151239 | 562 | Escherichia coli B83 | B83 | Proteobacteria | AVSH01000001.1 | III | 2 |
| 588 | GCA_000462785.2 | 1151240 | 562 | Escherichia coli B84 | B84 | Proteobacteria | AVSI01000012.1 | III | 2 |
| 589 | GCA_000462805.2 | 1151241 | 562 | Escherichia coli B85 | B85 | Proteobacteria | AVSJ01000007.1 | III | 2 |
| 590 | GCA_000462825.2 | 1151242 | 562 | Escherichia coli B86 | B86 | Proteobacteria | AVSK01000136.1 | III | 2 |
| 591 | GCA_000462845.2 | 1151235 | 562 | Escherichia coli B89 | B89 | Proteobacteria | AVSL01000001.1 | III | 2 |
| 592 | GCA_000462865.2 | 1151236 | 562 | Escherichia coli B90 | B90 | Proteobacteria | AVSM01000129.1 | III | 2 |
| 593 | GCA_000462425.2 | 1151231 | 562 | Escherichia coli B93 | B93 | Proteobacteria | AVRE01000046.1 | III | 2 |
| 594 | GCA_000462445.2 | 1151232 | 562 | Escherichia coli B94 | B94 | Proteobacteria | AVRF01000052.1 | III | 2 |
| 595 | GCA_000462465.2 | 1151233 | 562 | Escherichia coli B95 | B95 | Proteobacteria | AVRG01000053.1 | III | 2 |
| 596 | GCA_000522245.1 | 1328440 | 562 | Escherichia coli BIDMC 15 | BIDMC 15 | Proteobacteria | KI929736.1 | III | 2 |
| 597 | GCA_000522225.1 | 1328441 | 562 | Escherichia coli BIDMC 17A | BIDMC 17A | Proteobacteria | KI929720.1 | III | 2 |
| 598 | GCA_000522205.1 | 1328442 | 562 | Escherichia coli BIDMC 17B | BIDMC 17B | Proteobacteria | KI929706.1 | III | 2 |
| 599 | GCA_000522185.1 | 1328443 | 562 | Escherichia coli BIDMC 19A | BIDMC 19A | Proteobacteria | KI929698.1 | III | 2 |
| 600 | GCA_000522165.1 | 1328444 | 562 | Escherichia coli BIDMC 19B | BIDMC 19B | Proteobacteria | KI929691.1 | III | 2 |
| 601 | GCA_000474825.1 | 1328445 | 562 | Escherichia coli BIDMC 19C | BIDMC 19C | Proteobacteria | AXLI01000001.1 | III | 2 |
| 602 | GCA_000522305.1 | 1328436 | 562 | Escherichia coli BIDMC 2B | BIDMC 2B | Proteobacteria | KI929775.1 | III | 2 |
| 603 | GCA_000522285.1 | 1328437 | 562 | Escherichia coli BIDMC 3 | BIDMC 3 | Proteobacteria | KI929768.1 | III | 2 |
| 604 | GCA_000492235.1 | 1328450 | 562 | Escherichia coli BIDMC 39 | BIDMC 39 | Proteobacteria | KI535383.1 | III | 2 |
| 605 | GCA_000522105.1 | 1400156 | 562 | Escherichia coli BIDMC 43a | BIDMC 43a | Proteobacteria | KI929669.1 | III | 2 |
| 606 | GCA_000522085.1 | 1400157 | 562 | Escherichia coli BIDMC 43b | BIDMC 43b | Proteobacteria | KI929660.1 | III | 2 |
| 607 | GCA_000522405.1 | 1328438 | 562 | Escherichia coli BIDMC 6 | BIDMC 6 | Proteobacteria | KI929808.1 | III | 2 |
| 608 | GCA_000633675.1 | 1445862 | 562 | Escherichia coli BIDMC 82 | BIDMC 82 | Proteobacteria | KK214161.1 | III | 2 |
| 609 | GCA_000522265.1 | 1328439 | 562 | Escherichia coli BIDMC 9 | BIDMC 9 | Proteobacteria | KI929754.1 | III | 2 |
| 610 | GCA_000304015.2 | 1005559 | 562 | Escherichia coli CB7326 | CB7326 | Proteobacteria | JH956766.1 | III | 2 |
| 611 | GCA_000731355.1 | 1400022 | 562 | Escherichia coli D6-113.11 | D6-113.11 | Proteobacteria | HG977177.1 | III | 2 |
| 612 | GCA_000249495.2 | 868155 | 562 | Escherichia coli DEC5A | DEC5A | Proteobacteria | AIFQ01000037.1 | III | 2 |
| 613 | GCA_000267045.1 | 1005536 | 562 | Escherichia coli EC1734 | EC1734 | Proteobacteria | AKMO01000001.1 | III | 2 |
| 614 | GCA_000303615.2 | 1005537 | 562 | Escherichia coli EC1735 | EC1735 | Proteobacteria | JH958312.1 | III | 2 |
| 615 | GCA_000303595.2 | 1005538 | 562 | Escherichia coli EC1736 | EC1736 | Proteobacteria | JH965238.1 | III | 2 |
| 616 | GCA_000303575.2 | 1005539 | 562 | Escherichia coli EC1737 | EC1737 | Proteobacteria | JH963529.1 | III | 2 |
| 617 | GCA_000267025.1 | 1005535 | 562 | Escherichia coli EC1738 | EC1738 | Proteobacteria | AKMN01000003.1 | III | 2 |
| 618 | GCA_000267225.2 | 1005540 | 562 | Escherichia coli EC1845 | EC1845 | Proteobacteria | JH693448.1 | III | 2 |
| 619 | GCA_000303555.2 | 1005541 | 562 | Escherichia coli EC1846 | EC1846 | Proteobacteria | JH956315.1 | III | 2 |
| 620 | GCA_000303535.2 | 1005542 | 562 | Escherichia coli EC1847 | EC1847 | Proteobacteria | JH963080.1 | III | 2 |
| 621 | GCA_000303515.2 | 1005543 | 562 | Escherichia coli EC1848 | EC1848 | Proteobacteria | JH955442.1 | III | 2 |
| 622 | GCA_000303495.2 | 1005544 | 562 | Escherichia coli EC1849 | EC1849 | Proteobacteria | JH953696.1 | III | 2 |
| 623 | GCA_000303475.2 | 1005545 | 562 | Escherichia coli EC1850 | EC1850 | Proteobacteria | JH952886.1 | III | 2 |
| 624 | GCA_000303455.2 | 1005546 | 562 | Escherichia coli EC1856 | EC1856 | Proteobacteria | JH952880.1 | III | 2 |
| 625 | GCA_000303435.2 | 1005547 | 562 | Escherichia coli EC1862 | EC1862 | Proteobacteria | JH952466.1 | III | 2 |
| 626 | GCA_000267205.2 | 1005548 | 562 | Escherichia coli EC1863 | EC1863 | Proteobacteria | JH692972.1 | III | 2 |
| 627 | GCA_000303415.2 | 1005549 | 562 | Escherichia coli EC1864 | EC1864 | Proteobacteria | JH945870.1 | III | 2 |
| 628 | GCA_000303375.2 | 1005551 | 562 | Escherichia coli EC1866 | EC1866 | Proteobacteria | JH944315.1 | III | 2 |
| 629 | GCA_000303355.2 | 1005552 | 562 | Escherichia coli EC1868 | EC1868 | Proteobacteria | JH944350.1 | III | 2 |
| 630 | GCA_000303335.2 | 1005553 | 562 | Escherichia coli EC1869 | EC1869 | Proteobacteria | JH946714.1 | III | 2 |
| 631 | GCA_000303315.2 | 1005554 | 562 | Escherichia coli EC1870 | EC1870 | Proteobacteria | JH945214.1 | III | 2 |
| 632 | GCA_000267345.2 | 1005529 | 562 | Escherichia coli EC4013 | EC4013 | Proteobacteria | JH698305.1 | III | 2 |
| 633 | GCA_000267445.2 | 1005524 | 562 | Escherichia coli EC4196 | EC4196 | Proteobacteria | JH699193.1 | III | 2 |
| 634 | GCA_000267465.2 | 1005523 | 562 | Escherichia coli EC4203 | EC4203 | Proteobacteria | JH699677.1 | III | 2 |
| 635 | GCA_000267325.1 | 1005530 | 562 | Escherichia coli EC4402 | EC4402 | Proteobacteria | JH697728.1 | III | 2 |
| 636 | GCA_000267385.2 | 1005527 | 562 | Escherichia coli EC4421 | EC4421 | Proteobacteria | JH696600.1 | III | 2 |
| 637 | GCA_000267365.2 | 1005528 | 562 | Escherichia coli EC4422 | EC4422 | Proteobacteria | JH695870.1 | III | 2 |
| 638 | GCA_000267285.2 | 1005532 | 562 | Escherichia coli EC4436 | EC4436 | Proteobacteria | JH694746.1 | III | 2 |
| 639 | GCA_000267265.2 | 1005533 | 562 | Escherichia coli EC4437 | EC4437 | Proteobacteria | JH694340.1 | III | 2 |
| 640 | GCA_000267305.2 | 1005531 | 562 | Escherichia coli EC4439 | EC4439 | Proteobacteria | JH697080.1 | III | 2 |
| 641 | GCA_000267245.2 | 1005534 | 562 | Escherichia coli EC4448 | EC4448 | Proteobacteria | JH693935.1 | III | 2 |
| 642 | GCA_000304035.2 | 1005560 | 562 | Escherichia coli EC96038 | EC96038 | Proteobacteria | JH955436.1 | III | 2 |
| 643 | GCA_000498235.1 | 758832 | 562 | Escherichia coli ECC-Z | ECC-Z | Proteobacteria | AHHN01000002.1 | III | 2 |
| 644 | GCA_000355195.2 | 1115998 | 562 | Escherichia coli Envira 10/1 | Envira 10/1 | Proteobacteria | AQFD01000020.1 | III | 2 |
| 645 | GCA_000355215.2 | 1115997 | 562 | Escherichia coli Envira 8/11 | Envira 8/11 | Proteobacteria | AQFC01000021.1 | III | 2 |
| 646 | GCA_000303755.2 | 1005470 | 562 | Escherichia coli FDA504 | FDA504 | Proteobacteria | JH961871.1 | III | 2 |
| 647 | GCA_000267005.2 | 1005471 | 562 | Escherichia coli FDA505 | FDA505 | Proteobacteria | JH692596.1 | III | 2 |
| 648 | GCA_000303715.2 | 1005474 | 562 | Escherichia coli FDA506 | FDA506 | Proteobacteria | JH964536.1 | III | 2 |
| 649 | GCA_000303735.2 | 1005472 | 562 | Escherichia coli FDA507 | FDA507 | Proteobacteria | JH963945.1 | III | 2 |
| 650 | GCA_000267485.2 | 1005473 | 562 | Escherichia coli FDA517 | FDA517 | Proteobacteria | JH701995.1 | III | 2 |
| 651 | GCA_000267525.2 | 1005476 | 562 | Escherichia coli FRIK1985 | FRIK1985 | Proteobacteria | JH701533.1 | III | 2 |
| 652 | GCA_000303795.2 | 1005480 | 562 | Escherichia coli FRIK1997 | FRIK1997 | Proteobacteria | JH961362.1 | III | 2 |
| 653 | GCA_000303275.2 | 1005482 | 562 | Escherichia coli FRIK523 | FRIK523 | Proteobacteria | JH943936.1 | III | 2 |
| 654 | GCA_000163215.1 | 656379 | 562 | Escherichia coli FVEC1302 | FVEC1302 | Proteobacteria | GG774899.1 | III | 2 |
| 655 | GCA_000163235.1 | 656380 | 562 | Escherichia coli FVEC1412 | FVEC1412 | Proteobacteria | GG749206.1 | III | 2 |
| 656 | GCA_000456165.1 | 1280964 | 562 | Escherichia coli HVH 10 (4-6832164) | HVH 10 (4-6832164) | Proteobacteria | KE698889.1 | III | 2 |
| 657 | GCA_000457475.1 | 1281042 | 562 | Escherichia coli HVH 106 (4-6881831) | HVH 106 (4-6881831) | Proteobacteria | KE699746.1 | III | 2 |
| 658 | GCA_000457535.1 | 1281046 | 562 | Escherichia coli HVH 110 (4-6978754) | HVH 110 (4-6978754) | Proteobacteria | KE699792.1 | III | 2 |
| 659 | GCA_000457595.1 | 1281049 | 562 | Escherichia coli HVH 113 (4-7535473) | HVH 113 (4-7535473) | Proteobacteria | KE699840.1 | III | 2 |
| 660 | GCA_000457735.1 | 1281056 | 562 | Escherichia coli HVH 119 (4-6879578) | HVH 119 (4-6879578) | Proteobacteria | KE699940.1 | III | 2 |
| 661 | GCA_000457795.1 | 1281059 | 562 | Escherichia coli HVH 122 (4-6851606) | HVH 122 (4-6851606) | Proteobacteria | KE699976.1 | III | 2 |
| 662 | GCA_000457895.1 | 1281064 | 562 | Escherichia coli HVH 130 (4-7036876) | HVH 130 (4-7036876) | Proteobacteria | KE700051.1 | III | 2 |
| 663 | GCA_000457955.1 | 1281067 | 562 | Escherichia coli HVH 134 (4-6073441) | HVH 134 (4-6073441) | Proteobacteria | KE700096.1 | III | 2 |
| 664 | GCA_000457975.1 | 1281068 | 562 | Escherichia coli HVH 135 (4-4449320) | HVH 135 (4-4449320) | Proteobacteria | KE700100.1 | III | 2 |
| 665 | GCA_000494995.1 | 1281069 | 562 | Escherichia coli HVH 136 (4-5970458) | HVH 136 (4-5970458) | Proteobacteria | KI538714.1 | III | 2 |
| 666 | GCA_000458055.1 | 1281073 | 562 | Escherichia coli HVH 140 (4-5894387) | HVH 140 (4-5894387) | Proteobacteria | KE700176.1 | III | 2 |
| 667 | GCA_000458155.1 | 1281078 | 562 | Escherichia coli HVH 145 (4-5672112) | HVH 145 (4-5672112) | Proteobacteria | KE700231.1 | III | 2 |
| 668 | GCA_000458235.1 | 1281083 | 562 | Escherichia coli HVH 150 (4-3258106) | HVH 150 (4-3258106) | Proteobacteria | KE700264.1 | III | 2 |
| 669 | GCA_000458255.1 | 1281084 | 562 | Escherichia coli HVH 151 (4-5755573) | HVH 151 (4-5755573) | Proteobacteria | KE700275.1 | III | 2 |
| 670 | GCA_000458315.1 | 1281088 | 562 | Escherichia coli HVH 155 (4-4509048) | HVH 155 (4-4509048) | Proteobacteria | KE700348.1 | III | 2 |
| 671 | GCA_000458475.1 | 1281096 | 562 | Escherichia coli HVH 163 (4-4697553) | HVH 163 (4-4697553) | Proteobacteria | KE700462.1 | III | 2 |
| 672 | GCA_000458515.1 | 1281098 | 562 | Escherichia coli HVH 167 (4-6073565) | HVH 167 (4-6073565) | Proteobacteria | KE700479.1 | III | 2 |
| 673 | GCA_000458625.1 | 1281103 | 562 | Escherichia coli HVH 173 (3-9175482) | HVH 173 (3-9175482) | Proteobacteria | KE700542.1 | III | 2 |
| 674 | GCA_000458705.1 | 1281109 | 562 | Escherichia coli HVH 182 (4-0985554) | HVH 182 (4-0985554) | Proteobacteria | KE700608.1 | III | 2 |
| 675 | GCA_000458725.1 | 1281110 | 562 | Escherichia coli HVH 183 (4-3205932) | HVH 183 (4-3205932) | Proteobacteria | KE700619.1 | III | 2 |
| 676 | GCA_000458915.1 | 1281120 | 562 | Escherichia coli HVH 193 (4-3331423) | HVH 193 (4-3331423) | Proteobacteria | KE700785.1 | III | 2 |
| 677 | GCA_000458995.1 | 1281124 | 562 | Escherichia coli HVH 197 (4-4466217) | HVH 197 (4-4466217) | Proteobacteria | KE700814.1 | III | 2 |
| 678 | GCA_000459175.1 | 1281133 | 562 | Escherichia coli HVH 206 (4-3128229) | HVH 206 (4-3128229) | Proteobacteria | KE700892.1 | III | 2 |
| 679 | GCA_000459215.1 | 1281135 | 562 | Escherichia coli HVH 208 (4-3112292) | HVH 208 (4-3112292) | Proteobacteria | KE700918.1 | III | 2 |
| 680 | GCA_000459335.1 | 1281142 | 562 | Escherichia coli HVH 215 (4-3008371) | HVH 215 (4-3008371) | Proteobacteria | KE700987.1 | III | 2 |
| 681 | GCA_000456325.1 | 1280973 | 562 | Escherichia coli HVH 22 (4-2258986) | HVH 22 (4-2258986) | Proteobacteria | KE699031.1 | III | 2 |
| 682 | GCA_000459475.1 | 1281149 | 562 | Escherichia coli HVH 223 (4-2976528) | HVH 223 (4-2976528) | Proteobacteria | KE701095.1 | III | 2 |
| 683 | GCA_000456445.1 | 1280980 | 562 | Escherichia coli HVH 29 (4-3418073) | HVH 29 (4-3418073) | Proteobacteria | KE699106.1 | III | 2 |
| 684 | GCA_000456685.1 | 1280993 | 562 | Escherichia coli HVH 43 (4-2173468) | HVH 43 (4-2173468) | Proteobacteria | KE699249.1 | III | 2 |
| 685 | GCA_000456705.1 | 1280994 | 562 | Escherichia coli HVH 44 (4-2298570) | HVH 44 (4-2298570) | Proteobacteria | KE699258.1 | III | 2 |
| 686 | GCA_000456725.1 | 1280995 | 562 | Escherichia coli HVH 45 (4-3129918) | HVH 45 (4-3129918) | Proteobacteria | KE699267.1 | III | 2 |
| 687 | GCA_000456925.1 | 1281007 | 562 | Escherichia coli HVH 63 (4-2542528) | HVH 63 (4-2542528) | Proteobacteria | KE699373.1 | III | 2 |
| 688 | GCA_000456985.1 | 1281010 | 562 | Escherichia coli HVH 69 (4-2837072) | HVH 69 (4-2837072) | Proteobacteria | KE699403.1 | III | 2 |
| 689 | GCA_000457205.1 | 1281022 | 562 | Escherichia coli HVH 85 (4-0792144) | HVH 85 (4-0792144) | Proteobacteria | KE699590.1 | III | 2 |
| 690 | GCA_000459655.1 | 1281158 | 562 | Escherichia coli KOEGE 33 (68a) | KOEGE 33 (68a) | Proteobacteria | KE701249.1 | III | 2 |
| 691 | GCA_000459795.1 | 1281165 | 562 | Escherichia coli KOEGE 62 (175a) | KOEGE 62 (175a) | Proteobacteria | KE701351.1 | III | 2 |
| 692 | GCA_000459815.1 | 1281166 | 562 | Escherichia coli KOEGE 68 (182a) | KOEGE 68 (182a) | Proteobacteria | KE701357.1 | III | 2 |
| 693 | GCA_000459875.1 | 1281169 | 562 | Escherichia coli KOEGE 73 (195a) | KOEGE 73 (195a) | Proteobacteria | KE701395.1 | III | 2 |
| 694 | GCA_000407665.1 | 1169315 | 562 | Escherichia coli KTE1 | KTE1 | Proteobacteria | KE136571.1 | III | 2 |
| 695 | GCA_000408585.1 | 1182701 | 562 | Escherichia coli KTE102 | KTE102 | Proteobacteria | KE137162.1 | III | 2 |
| 696 | GCA_000351885.1 | 1182708 | 562 | Escherichia coli KTE116 | KTE116 | Proteobacteria | KB732889.1 | III | 2 |
| 697 | GCA_000326945.1 | 1169380 | 562 | Escherichia coli KTE122 | KTE122 | Proteobacteria | KB731963.1 | III | 2 |
| 698 | GCA_000326965.1 | 1169382 | 562 | Escherichia coli KTE125 | KTE125 | Proteobacteria | KB732191.1 | III | 2 |
| 699 | GCA_000408705.1 | 1182714 | 562 | Escherichia coli KTE127 | KTE127 | Proteobacteria | KE137233.1 | III | 2 |
| 700 | GCA_000326245.1 | 1169383 | 562 | Escherichia coli KTE128 | KTE128 | Proteobacteria | ANXW01000117.1 | III | 2 |
| 701 | GCA_000408725.1 | 1182715 | 562 | Escherichia coli KTE130 | KTE130 | Proteobacteria | KE137242.1 | III | 2 |
| 702 | GCA_000408745.1 | 1182716 | 562 | Escherichia coli KTE132 | KTE132 | Proteobacteria | KE137261.1 | III | 2 |
| 703 | GCA_000408765.1 | 1182717 | 562 | Escherichia coli KTE134 | KTE134 | Proteobacteria | KE137276.1 | III | 2 |
| 704 | GCA_000352725.1 | 1182728 | 562 | Escherichia coli KTE154 | KTE154 | Proteobacteria | KB733130.1 | III | 2 |
| 705 | GCA_000352745.1 | 1182731 | 562 | Escherichia coli KTE158 | KTE158 | Proteobacteria | KB733136.1 | III | 2 |
| 706 | GCA_000351985.1 | 1182733 | 562 | Escherichia coli KTE161 | KTE161 | Proteobacteria | KB732934.1 | III | 2 |
| 707 | GCA_000326765.1 | 1169397 | 562 | Escherichia coli KTE166 | KTE166 | Proteobacteria | ANYK01000003.1 | III | 2 |
| 708 | GCA_000408825.1 | 1182737 | 562 | Escherichia coli KTE170 | KTE170 | Proteobacteria | KE137303.1 | III | 2 |
| 709 | GCA_000350925.1 | 1181727 | 562 | Escherichia coli KTE181 | KTE181 | Proteobacteria | KB732408.1 | III | 2 |
| 710 | GCA_000350625.1 | 1169324 | 562 | Escherichia coli KTE2 | KTE2 | Proteobacteria | KB732209.1 | III | 2 |
| 711 | GCA_000408185.1 | 1181746 | 562 | Escherichia coli KTE200 | KTE200 | Proteobacteria | KE136942.1 | III | 2 |
| 712 | GCA_000352965.1 | 1181748 | 562 | Escherichia coli KTE202 | KTE202 | Proteobacteria | KB733186.1 | III | 2 |
| 713 | GCA_000351065.1 | 1181750 | 562 | Escherichia coli KTE204 | KTE204 | Proteobacteria | KB732469.1 | III | 2 |
| 714 | GCA_000351125.1 | 1181754 | 562 | Escherichia coli KTE208 | KTE208 | Proteobacteria | KB732511.1 | III | 2 |
| 715 | GCA_000408245.1 | 1181768 | 562 | Escherichia coli KTE222 | KTE222 | Proteobacteria | KE136972.1 | III | 2 |
| 716 | GCA_000408265.1 | 1181771 | 562 | Escherichia coli KTE225 | KTE225 | Proteobacteria | KE136980.1 | III | 2 |
| 717 | GCA_000351365.1 | 1181779 | 562 | Escherichia coli KTE235 | KTE235 | Proteobacteria | KB732610.1 | III | 2 |
| 718 | GCA_000350825.1 | 1169345 | 562 | Escherichia coli KTE26 | KTE26 | Proteobacteria | KB732334.1 | III | 2 |
| 719 | GCA_000350885.1 | 1169361 | 562 | Escherichia coli KTE44 | KTE44 | Proteobacteria | KB732364.1 | III | 2 |
| 720 | GCA_000352325.1 | 1182657 | 562 | Escherichia coli KTE50 | KTE50 | Proteobacteria | KB733431.1 | III | 2 |
| 721 | GCA_000351465.1 | 1182658 | 562 | Escherichia coli KTE51 | KTE51 | Proteobacteria | KB732658.1 | III | 2 |
| 722 | GCA_000351525.1 | 1182663 | 562 | Escherichia coli KTE56 | KTE56 | Proteobacteria | KB732702.1 | III | 2 |
| 723 | GCA_000408385.1 | 1182675 | 562 | Escherichia coli KTE68 | KTE68 | Proteobacteria | KE137040.1 | III | 2 |
| 724 | GCA_000351765.1 | 1182688 | 562 | Escherichia coli KTE81 | KTE81 | Proteobacteria | KB732854.1 | III | 2 |
| 725 | GCA_000326505.1 | 1169363 | 562 | Escherichia coli KTE82 | KTE82 | Proteobacteria | ANYT01000130.1 | III | 2 |
| 726 | GCA_000351785.1 | 1182689 | 562 | Escherichia coli KTE83 | KTE83 | Proteobacteria | KB733405.1 | III | 2 |
| 727 | GCA_000176575.2 | 656419 | 562 | Escherichia coli M718 | M718 | Proteobacteria | GL884102.1 | III | 2 |
| 728 | GCA_000261145.1 | 656421 | 562 | Escherichia coli M919 | M919 | Proteobacteria | JH659569.1 | III | 2 |
| 729 | GCA_000692775.1 | 1438688 | 562 | Escherichia coli MGH 58 | MGH 58 | Proteobacteria | KK736506.1 | III | 2 |
| 730 | GCA_000164275.1 | 749540 | 562 | Escherichia coli MS 146-1 | MS 146-1 | Proteobacteria | GG772126.1 | III | 2 |
| 731 | GCA_000164335.1 | 749547 | 562 | Escherichia coli MS 187-1 | MS 187-1 | Proteobacteria | GG772497.1 | III | 2 |
| 732 | GCA_000164555.1 | 749548 | 562 | Escherichia coli MS 196-1 | MS 196-1 | Proteobacteria | GG773987.1 | III | 2 |
| 733 | GCA_000164195.1 | 749549 | 562 | Escherichia coli MS 198-1 | MS 198-1 | Proteobacteria | GG771459.1 | III | 2 |
| 734 | GCA_000303835.2 | 1005484 | 562 | Escherichia coli NE037 | NE037 | Proteobacteria | JH960043.1 | III | 2 |
| 735 | GCA_000303295.2 | 1005486 | 562 | Escherichia coli NE098 | NE098 | Proteobacteria | JH946265.1 | III | 2 |
| 736 | GCA_000350045.2 | 1090929 | 562 | Escherichia coli O127:H27 str. C43/90 | C43/90 | Proteobacteria | AHAW01000071.1 | III | 2 |
| 737 | GCA_000695155.1 | 1078035 | 562 | Escherichia coli O145:H28 str. 4865/96 | 4865/96 | Proteobacteria | JHEY01000012.1 | III | 2 |
| 738 | GCA_000671295.1 | 1248823 | 562 | Escherichia coli O145:H28 str. RM12581 | RM12581 | Proteobacteria | CP007136.1 | III | 2 |
| 739 | GCA_000520035.1 | 1248902 | 562 | Escherichia coli O145:H28 str. RM13514 | RM13514 | Proteobacteria | CP006027.1 | III | 2 |
| 740 | GCA_000617345.1 | 1446585 | 562 | Escherichia coli O145:NM str. 06-3484 | 06-3484 | Proteobacteria | JHNN01000002.1 | III | 2 |
| 741 | GCA_000616665.2 | 1446586 | 562 | Escherichia coli O145:NM str. 08-4270 | 08-4270 | Proteobacteria | JHKV01000030.1 | III | 2 |
| 742 | GCA_000615085.1 | 1446587 | 562 | Escherichia coli O145:NM str. 2010C-3507 | 2010C-3507 | Proteobacteria | JHFW01000006.1 | III | 2 |
| 743 | GCA_000619185.1 | 1446588 | 562 | Escherichia coli O145:NM str. 2010C-3508 | 2010C-3508 | Proteobacteria | JHFV01000110.1 | III | 2 |
| 744 | GCA_000615175.1 | 1446590 | 562 | Escherichia coli O145:NM str. 2010C-3510 | 2010C-3510 | Proteobacteria | JHFT01000001.1 | III | 2 |
| 745 | GCA_000615225.2 | 1446591 | 562 | Escherichia coli O145:NM str. 2010C-3511 | 2010C-3511 | Proteobacteria | JHFS01000035.1 | III | 2 |
| 746 | GCA_000615265.1 | 1446592 | 562 | Escherichia coli O145:NM str. 2010C-3516 | 2010C-3516 | Proteobacteria | JHFR01000094.1 | III | 2 |
| 747 | GCA_000615305.1 | 1446593 | 562 | Escherichia coli O145:NM str. 2010C-3517 | 2010C-3517 | Proteobacteria | JHFQ01000117.1 | III | 2 |
| 748 | GCA_000615345.1 | 1446594 | 562 | Escherichia coli O145:NM str. 2010C-3518 | 2010C-3518 | Proteobacteria | JHFP01000105.1 | III | 2 |
| 749 | GCA_000615385.1 | 1446595 | 562 | Escherichia coli O145:NM str. 2010C-3521 | 2010C-3521 | Proteobacteria | JHF001000022.1 | III | 2 |
| 750 | GCA_000615415.2 | 1446596 | 562 | Escherichia coli O145:NM str. 2010C-3526 | 2010C-3526 | Proteobacteria | JHFN01000018.1 | III | 2 |
| 751 | GCA_000617765.2 | 1446597 | 562 | Escherichia coli O145:NM str. 2010C-4557C2 | 2010C-4557C2 | Proteobacteria | JHNA01000067.1 | III | 2 |
| 752 | GCA_000632555.1 | 1446606 | 562 | Escherichia coli O157: str. 2010EL-2044 | 2010EL-2044 | Proteobacteria | JHME01000103.1 | III | 2 |
| 753 | GCA_000632655.1 | 1446607 | 562 | Escherichia coli O157: str. 2010EL-2045 | 2010EL-2045 | Proteobacteria | JHMD01000001.1 | III | 2 |
| 754 | GCA_000187305.2 | 926027 | 562 | Escherichia coli O157:H- str. 493-89 | 493-89 | Proteobacteria | AETY01000104.1 | III | 2 |
| 755 | GCA_000187325.2 | 926028 | 562 | Escherichia coli O157:H- str. H 2687 | H 2687 | Proteobacteria | AETZ01000110.1 | III | 2 |
| 756 | GCA_000978815.1 | 83334 | 562 | Escherichia coli O157:H7 | 7.1_Anguil | Proteobacteria | LAZD01000130.1 | III | 2 |
| 757 | GCA_000978845.1 | 83334 | 562 | Escherichia coli O157:H7 | Rafaela_II | Proteobacteria | LAYW01000314.1 | III | 2 |
| 758 | GCA_001006425.1 | 83334 | 562 | Escherichia coli O157:H7 | HB74 | Proteobacteria | LCWU01000234.1 | III | 2 |
| 759 | GCA_001307215.1 | 83334 | 562 | Escherichia coli O157:H7 | WS4202 | Proteobacteria | CP012802.1 | III | 2 |
| 760 | GCA_001440045.1 | 83334 | 562 | Escherichia coli O157:H7 | G10 | Proteobacteria | LMXL01000097.1 | III | 2 |
| 761 | GCA_000617445.2 | 1446609 | 562 | Escherichia coli O157:H7 str. 06-3745 | 06-3745 | Proteobacteria | JHNI01000020.1 | III | 2 |
| 762 | GCA_000617705.2 | 1446610 | 562 | Escherichia coli O157:H7 str. 06-4039 | 06-4039 | Proteobacteria | JHNG01000005.1 | III | 2 |
| 763 | GCA_000617665.2 | 1446611 | 562 | Escherichia coli O157:H7 str. 07-3091 | 07-3091 | Proteobacteria | JHNF01000007.1 | III | 2 |
| 764 | GCA_000617725.2 | 1446612 | 562 | Escherichia coli O157:H7 str. 07-3391 | 07-3391 | Proteobacteria | JHNE01000001.1 | III | 2 |
| 765 | GCA_000616585.2 | 1446613 | 562 | Escherichia coli O157:H7 str. 08-3037 | 08-3037 | Proteobacteria | JHKZ01000011.1 | III | 2 |
| 766 | GCA_000616605.2 | 1446614 | 562 | Escherichia coli O157:H7 str. 08-3527 | 08-3527 | Proteobacteria | JHKY01000032.1 | III | 2 |
| 767 | GCA_000616645.2 | 1446615 | 562 | Escherichia coli O157:H7 str. 08-4169 | 08-4169 | Proteobacteria | JHKW01000004.1 | III | 2 |
| 768 | GCA_000619665.1 | 1446616 | 562 | Escherichia coli O157:H7 str. 08-4529 | 08-4529 | Proteobacteria | JHHI01000009.1 | III | 2 |
| 769 | GCA_000619145.1 | 1446618 | 562 | Escherichia coli O157:H7 str. 2009EL1449 | 2009EL1449 | Proteobacteria | JHGF01000005.1 | III | 2 |
| 770 | GCA_000614965.1 | 1446619 | 562 | Escherichia coli O157:H7 str. 2009EL1705 | 2009EL1705 | Proteobacteria | JHGE01000007.1 | III | 2 |
| 771 | GCA_000619165.1 | 1446620 | 562 | Escherichia coli O157:H7 str. 2009EL1913 | 2009EL1913 | Proteobacteria | JHGD01000001.1 | III | 2 |
| 772 | GCA_000615015.1 | 1446621 | 562 | Escherichia coli O157:H7 str. 2009EL2109 | 2009EL2109 | Proteobacteria | JHGC01000001.1 | III | 2 |
| 773 | GCA_000616365.1 | 1446623 | 562 | Escherichia coli O157:H7 str. 2011EL-1107 | 2011EL-1107 | Proteobacteria | JHLK01000001.1 | III | 2 |
| 774 | GCA_000616405.2 | 1446624 | 562 | Escherichia coli O157:H7 str. 2011EL-2090 | 2011EL-2090 | Proteobacteria | JHLI01000033.1 | III | 2 |
| 775 | GCA_000616425.2 | 1446625 | 562 | Escherichia coli O157:H7 str. 2011EL-2091 | 2011EL-2091 | Proteobacteria | JHLH01000026.1 | III | 2 |
| 776 | GCA_000616445.2 | 1446626 | 562 | Escherichia coli O157:H7 str. 2011EL-2092 | 2011EL-2092 | Proteobacteria | JHLG01000030.1 | III | 2 |
| 777 | GCA_000616465.2 | 1446627 | 562 | Escherichia coli O157:H7 str. 2011EL-2093 | 2011EL-2093 | Proteobacteria | JHLF01000012.1 | III | 2 |
| 778 | GCA_000616485.2 | 1446628 | 562 | Escherichia coli O157:H7 str. 2011EL-2094 | 2011EL-2094 | Proteobacteria | JHLE01000001.1 | III | 2 |
| 779 | GCA_000616505.2 | 1446629 | 562 | Escherichia coli O157:H7 str. 2011EL-2096 | 2011EL-2096 | Proteobacteria | JHLD01000033.1 | III | 2 |
| 780 | GCA_000616525.2 | 1446630 | 562 | Escherichia coli O157:H7 str. 2011EL-2097 | 2011EL-2097 | Proteobacteria | JHLC01000005.1 | III | 2 |
| 781 | GCA_000616545.2 | 1446631 | 562 | Escherichia coli O157:H7 str. 2011EL-2098 | 2011EL-2098 | Proteobacteria | JHLB01000003.1 | III | 2 |
| 782 | GCA_000616705.2 | 1446632 | 562 | Escherichia coli O157:H7 str. 2011EL-2099 | 2011EL-2099 | Proteobacteria | JHKT01000015.1 | III | 2 |
| 783 | GCA_000615695.1 | 1446633 | 562 | Escherichia coli O157:H7 str. 2011EL-2101 | 2011EL-2101 | Proteobacteria | JHKS01000001.1 | III | 2 |
| 784 | GCA_000615745.2 | 1446634 | 562 | Escherichia coli O157:H7 str. 2011EL-2103 | 2011EL-2103 | Proteobacteria | JHKR01000031.1 | III | 2 |
| 785 | GCA_000615785.2 | 1446635 | 562 | Escherichia coli O157:H7 str. 2011EL-2104 | 2011EL-2104 | Proteobacteria | JHKQ01000016.1 | III | 2 |
| 786 | GCA_000615815.2 | 1446636 | 562 | Escherichia coli O157:H7 str. 2011EL-2105 | 2011EL-2105 | Proteobacteria | JHKP01000014.1 | III | 2 |
| 787 | GCA_000615865.2 | 1446637 | 562 | Escherichia coli O157:H7 str. 2011EL-2106 | 2011EL-2106 | Proteobacteria | JHKO01000009.1 | III | 2 |
| 788 | GCA_000615925.2 | 1446638 | 562 | Escherichia coli O157:H7 str. 2011EL-2107 | 2011EL-2107 | Proteobacteria | JHKN01000006.1 | III | 2 |
| 789 | GCA_000615965.2 | 1446639 | 562 | Escherichia coli O157:H7 str. 2011EL-2108 | 2011EL-2108 | Proteobacteria | JHKM01000031.1 | III | 2 |
| 790 | GCA_000616005.2 | 1446640 | 562 | Escherichia coli O157:H7 str. 2011EL-2109 | 2011EL-2109 | Proteobacteria | JHKL01000015.1 | III | 2 |
| 791 | GCA_000616035.2 | 1446641 | 562 | Escherichia coli O157:H7 str. 2011EL-2111 | 2011EL-2111 | Proteobacteria | JHKK01000003.1 | III | 2 |
| 792 | GCA_000616075.2 | 1446642 | 562 | Escherichia coli O157:H7 str. 2011EL-2112 | 2011EL-2112 | Proteobacteria | JHKJ01000005.1 | III | 2 |
| 793 | GCA_000614645.2 | 1446643 | 562 | Escherichia coli O157:H7 str. 2011EL-2113 | 2011EL-2113 | Proteobacteria | JHKI01000015.1 | III | 2 |
| 794 | GCA_000614255.1 | 1446644 | 562 | Escherichia coli O157:H7 str. 2011EL-2114 | 2011EL-2114 | Proteobacteria | JHKH01000002.1 | III | 2 |
| 795 | GCA_000614305.2 | 1446645 | 562 | Escherichia coli O157:H7 str. 2011EL-2286 | 2011EL-2286 | Proteobacteria | JHKG01000013.1 | III | 2 |
| 796 | GCA_000614405.2 | 1446646 | 562 | Escherichia coli O157:H7 str. 2011EL-2287 | 2011EL-2287 | Proteobacteria | JHKF01000001.1 | III | 2 |
| 797 | GCA_000614085.2 | 1446647 | 562 | Escherichia coli O157:H7 str. 2011EL-2288 | 2011EL-2288 | Proteobacteria | JHKE01000007.1 | III | 2 |
| 798 | GCA_000614685.2 | 1446648 | 562 | Escherichia coli O157:H7 str. 2011EL-2289 | 2011EL-2289 | Proteobacteria | JHKD01000001.1 | III | 2 |
| 799 | GCA_000618945.2 | 1446649 | 562 | Escherichia coli O157:H7 str. 2011EL-2290 | 2011EL-2290 | Proteobacteria | JHKC01000008.1 | III | 2 |
| 800 | GCA_000614345.2 | 1446650 | 562 | Escherichia coli O157:H7 str. 2011EL-2312 | 2011EL-2312 | Proteobacteria | JHKB01000003.1 | III | 2 |
| 801 | GCA_000618985.2 | 1446651 | 562 | Escherichia coli O157:H7 str. 2011EL-2313 | 2011EL-2313 | Proteobacteria | JHKA01000028.1 | III | 2 |
| 802 | GCA_000181775.1 | 444449 | 562 | Escherichia coli O157:H7 str. EC4042 | EC4042 | Proteobacteria | ABHM02000001.1 | III | 2 |
| 803 | GCA_000181755.1 | 444448 | 562 | Escherichia coli O157:H7 str. EC4045 | EC4045 | Proteobacteria | ABHL02000001.1 | III | 2 |
| 804 | GCA_000171955.1 | 444453 | 562 | Escherichia coli O157:H7 str. EC4076 | EC4076 | Proteobacteria | ABHQ01000017.1 | III | 2 |
| 805 | GCA_000171935.1 | 444452 | 562 | Escherichia coli O157:H7 str. EC4113 | EC4113 | Proteobacteria | ABHP01000015.1 | III | 2 |
| 806 | GCA_000021125.1 | 444450 | 562 | Escherichia coli O157:H7 str. EC4115 | EC4115 | Proteobacteria | CP001164.1 | III | 2 |
| 807 | GCA_000171915.1 | 444451 | 562 | Escherichia coli O157:H7 str. EC4196 | EC4196 | Proteobacteria | ABHO01000006.1 | III | 2 |
| 808 | GCA_000181735.1 | 444447 | 562 | Escherichia coli O157:H7 str. EC4206 | EC4206 | Proteobacteria | ABHK02000001.1 | III | 2 |
| 809 | GCA_000171975.1 | 478004 | 562 | Escherichia coli O157:H7 str. EC4401 | EC4401 | Proteobacteria | ABHR01000005.1 | III | 2 |
| 810 | GCA_000171995.1 | 478005 | 562 | Escherichia coli O157:H7 str. EC4486 | EC4486 | Proteobacteria | ABHS01000002.1 | III | 2 |
| 811 | GCA_000172015.1 | 478006 | 562 | Escherichia coli O157:H7 str. EC4501 | EC4501 | Proteobacteria | ABHT01000004.1 | III | 2 |
| 812 | GCA_000172055.1 | 478007 | 562 | Escherichia coli O157:H7 str. EC508 | EC508 | Proteobacteria | ABHW01000003.1 | III | 2 |
| 813 | GCA_000006665.1 | 155864 | 562 | Escherichia coli O157:H7 str. EDL933 | EDL933 | Proteobacteria | AE005174.2 | III | 2 |
| 814 | GCA_000732965.1 | 155864 | 562 | Escherichia coli O157:H7 str. EDL933 | EDL933 | Proteobacteria | CP008957.1 | III | 2 |
| 815 | GCA_000618105.2 | 1446652 | 562 | Escherichia coli O157:H7 str. F6142 | F6142 | Proteobacteria | JHJT01000009.1 | III | 2 |
| 816 | GCA_000618045.1 | 1446653 | 562 | Escherichia coli O157:H7 str. F6749 | F6749 | Proteobacteria | JHJQ01000001.1 | III | 2 |
| 817 | GCA_000618305.2 | 1446654 | 562 | Escherichia coli O157:H7 str. F6750 | F6750 | Proteobacteria | JHJP01000010.1 | III | 2 |
| 818 | GCA_000618265.2 | 1446655 | 562 | Escherichia coli O157:H7 str. F6751 | F6751 | Proteobacteria | JHJO01000004.1 | III | 2 |
| 819 | GCA_000614805.2 | 1446656 | 562 | Escherichia coli O157:H7 str. F7350 | F7350 | Proteobacteria | JHJN01000036.1 | III | 2 |
| 820 | GCA_000618225.2 | 1446657 | 562 | Escherichia coli O157:H7 str. F7377 | F7377 | Proteobacteria | JHJM01000002.1 | III | 2 |
| 821 | GCA_000618065.2 | 1446658 | 562 | Escherichia coli O157:H7 str. F7384 | F7384 | Proteobacteria | JHJL01000002.1 | III | 2 |
| 822 | GCA_000618145.2 | 1446659 | 562 | Escherichia coli O157:H7 str. F7410 | F7410 | Proteobacteria | JHJK01000004.1 | III | 2 |
| 823 | GCA_000187285.4 | 926026 | 562 | Escherichia coli O157:H7 str. G5101 | G5101 | Proteobacteria | AETX01000114.1 | III | 2 |
| 824 | GCA_000618185.1 | 1446660 | 562 | Escherichia coli O157:H7 str. G5303 | G5303 | Proteobacteria | JHJI01000027.1 | III | 2 |
| 825 | GCA_000618245.1 | 1446661 | 562 | Escherichia coli O157:H7 str. H2495 | H2495 | Proteobacteria | JHJH01000020.1 | III | 2 |
| 826 | GCA_000618285.2 | 1446662 | 562 | Escherichia coli O157:H7 str. H2498 | H2498 | Proteobacteria | JHJG01000003.1 | III | 2 |
| 827 | GCA_000618025.1 | 1446663 | 562 | Escherichia coli O157:H7 str. K1420 | K1420 | Proteobacteria | JHJF01000008.1 | III | 2 |
| 828 | GCA_000618425.1 | 1446664 | 562 | Escherichia coli O157:H7 str. K1792 | K1792 | Proteobacteria | JHJD01000136.1 | III | 2 |
| 829 | GCA_000618365.1 | 1446665 | 562 | Escherichia coli O157:H7 str. K1793 | K1793 | Proteobacteria | JHJC01000041.1 | III | 2 |
| 830 | GCA_000618325.1 | 1446667 | 562 | Escherichia coli O157:H7 str. K1796 | K1796 | Proteobacteria | JHJA01000003.1 | III | 2 |
| 831 | GCA_000618345.1 | 1446668 | 562 | Escherichia coli O157:H7 str. K1845 | K1845 | Proteobacteria | JHIZ01000038.1 | III | 2 |
| 832 | GCA_000618445.1 | 1446669 | 562 | Escherichia coli O157:H7 str. K1921 | K1921 | Proteobacteria | JHIY01000012.1 | III | 2 |
| 833 | GCA_000618465.1 | 1446670 | 562 | Escherichia coli O157:H7 str. K1927 | K1927 | Proteobacteria | JHIX01000108.1 | III | 2 |
| 834 | GCA_000618485.1 | 1446671 | 562 | Escherichia coli O157:H7 str. K2188 | K2188 | Proteobacteria | JHIW01000103.1 | III | 2 |
| 835 | GCA_000618665.1 | 1446674 | 562 | Escherichia coli O157:H7 str. K2324 | K2324 | Proteobacteria | JHIT01000105.1 | III | 2 |
| 836 | GCA_000618525.1 | 1446675 | 562 | Escherichia coli O157:H7 str. K2581 | K2581 | Proteobacteria | JHIS01000002.1 | III | 2 |
| 837 | GCA_000618605.1 | 1446679 | 562 | Escherichia coli O157:H7 str. K4396 | K4396 | Proteobacteria | JHI001000002.1 | III | 2 |
| 838 | GCA_000617965.1 | 1446680 | 562 | Escherichia coli O157:H7 str. K4405 | K4405 | Proteobacteria | JHIN01000100.1 | III | 2 |
| 839 | GCA_000618625.1 | 1446681 | 562 | Escherichia coli O157:H7 str. K4406 | K4406 | Proteobacteria | JHIM01000001.1 | III | 2 |
| 840 | GCA_000618685.1 | 1446682 | 562 | Escherichia coli O157:H7 str. K4527 | K4527 | Proteobacteria | JHIL01000001.1 | III | 2 |
| 841 | GCA_000618745.1 | 1446683 | 562 | Escherichia coli O157:H7 str. K5418 | K5418 | Proteobacteria | JHII01000001.1 | III | 2 |
| 842 | GCA_000618765.1 | 1446684 | 562 | Escherichia coli O157:H7 str. K5448 | K5448 | Proteobacteria | JHIH01000007.1 | III | 2 |
| 843 | GCA_000618785.1 | 1446685 | 562 | Escherichia coli O157:H7 str. K5449 | K5449 | Proteobacteria | JHIG01000002.1 | III | 2 |
| 844 | GCA_000618805.1 | 1446686 | 562 | Escherichia coli O157:H7 str. K5453 | K5453 | Proteobacteria | JHIF01000066.1 | III | 2 |
| 845 | GCA_000618885.1 | 1446687 | 562 | Escherichia coli O157:H7 str. K5460 | K5460 | Proteobacteria | JHIE01000002.1 | III | 2 |
| 846 | GCA_000618825.1 | 1446688 | 562 | Escherichia coli O157:H7 str. K5467 | K5467 | Proteobacteria | JHID01000001.1 | III | 2 |
| 847 | GCA_000618845.1 | 1446689 | 562 | Escherichia coli O157:H7 str. K5602 | K5602 | Proteobacteria | JHIC01000015.1 | III | 2 |
| 848 | GCA_000618865.1 | 1446690 | 562 | Escherichia coli O157:H7 str. K5607 | K5607 | Proteobacteria | JHIB01000088.1 | III | 2 |
| 849 | GCA_000619445.1 | 1446691 | 562 | Escherichia coli O157:H7 str. K5609 | K5609 | Proteobacteria | JHIA01000021.1 | III | 2 |
| 850 | GCA_000616745.1 | 1446692 | 562 | Escherichia coli O157:H7 str. K5806 | K5806 | Proteobacteria | JHHZ01000001.1 | III | 2 |
| 851 | GCA_000619365.1 | 1446693 | 562 | Escherichia coli O157:H7 str. K5852 | K5852 | Proteobacteria | JHHY01000003.1 | III | 2 |
| 852 | GCA_000619385.1 | 1446694 | 562 | Escherichia coli O157:H7 str. K6590 | K6590 | Proteobacteria | JHHX01000004.1 | III | 2 |
| 853 | GCA_000619405.1 | 1446695 | 562 | Escherichia coli O157:H7 str. K6676 | K6676 | Proteobacteria | JHHW01000001.1 | III | 2 |
| 854 | GCA_000619425.1 | 1446696 | 562 | Escherichia coli O157:H7 str. K6687 | K6687 | Proteobacteria | JHHV01000121.1 | III | 2 |
| 855 | GCA_000618925.2 | 1446697 | 562 | Escherichia coli O157:H7 str. k7140 | K7140 | Proteobacteria | JHHK01000016.1 | III | 2 |
| 856 | GCA_000008865.1 | 386585 | 562 | Escherichia coli O157:H7 str. Sakai | Sakai substr. RIMD | Proteobacteria | BA000007.2 | III | 2 |
| | | | | | 0509952 | | | | |
| 857 | GCA_000730345.1 | 1328859 | 562 | Escherichia coli O157:H7 str. SS17 | SS17 | Proteobacteria | CP008805.1 | III | 2 |
| 858 | GCA_000803705.1 | 1330457 | 562 | Escherichia coli O157:H7 str. SS52 | SS52 | Proteobacteria | CP010304.1 | III | 2 |
| 859 | GCA_000022225.1 | 544404 | 562 | Escherichia coli O157:H7 str. TW14359 | TW14359 | Proteobacteria | CP001368.1 | III | 2 |
| 860 | GCA_000155125.1 | 502346 | 562 | Escherichia coli O157:H7 str. TW14588 | TW14588 | Proteobacteria | CM000662.1 | III | 2 |
| 861 | GCA_000617385.1 | 1446745 | 562 | Escherichia coli O55:H7 str. 06-3555 | 06-3555 | Proteobacteria | JHNL01000009.1 | III | 2 |
| 862 | GCA_000187345.2 | 926029 | 562 | Escherichia coli O55:H7 str. 3256-97 | 3256-97 TW 07815 | Proteobacteria | AEUA01000088.1 | III | 2 |
| 863 | GCA_000025165.1 | 701177 | 562 | Escherichia coli O55:H7 str. CB9615 | CB9615 | Proteobacteria | CP001846.1 | III | 2 |
| 864 | GCA_000357145.2 | 1116131 | 562 | Escherichia coli P02997067.6 | P02997067.6 | Proteobacteria | APYJ01000201.1 | III | 2 |
| 865 | GCA_000356665.2 | 1116047 | 562 | Escherichia coli P0299917.1 | P0299917.1 | Proteobacteria | AQER01000001.1 | III | 2 |
| 866 | GCA_000356605.2 | 1116089 | 562 | Escherichia coli p0305293.1 | p0305293.1 | Proteobacteria | AQEK01000045.1 | III | 2 |
| 867 | GCA_000358555.1 | 1116098 | 562 | Escherichia coli p0305293.10 | p0305293.10 | Proteobacteria | AQBT01000187.1 | III | 2 |
| 868 | GCA_000358575.2 | 1116099 | 562 | Escherichia coli p0305293.11 | p0305293.11 | Proteobacteria | AQBU01000292.1 | III | 2 |
| 869 | GCA_000358595.2 | 1116100 | 562 | Escherichia coli p0305293.12 | p0305293.12 | Proteobacteria | AQBV01000163.1 | III | 2 |
| 870 | GCA_000356865.2 | 1116101 | 562 | Escherichia coli p0305293.13 | p0305293.13 | Proteobacteria | APZI01000451.1 | III | 2 |
| 871 | GCA_000357485.2 | 1125646 | 562 | Escherichia coli p0305293.14 | p0305293.14 | Proteobacteria | APZZ01000159.1 | III | 2 |
| 872 | GCA_000358615.2 | 1116102 | 562 | Escherichia coli p0305293.15 | p0305293.15 | Proteobacteria | AQBW01000104.1 | III | 2 |
| 873 | GCA_000358635.2 | 1116090 | 562 | Escherichia coli p0305293.2 | p0305293.2 | Proteobacteria | AQBX01000150.1 | III | 2 |
| 874 | GCA_000358655.2 | 1116091 | 562 | Escherichia coli p0305293.3 | p0305293.3 | Proteobacteria | AQBY01000159.1 | III | 2 |
| 875 | GCA_000358675.2 | 1116092 | 562 | Escherichia coli p0305293.4 | p0305293.4 | Proteobacteria | AQBZ01000242.1 | III | 2 |
| 876 | GCA_000359055.2 | 1116093 | 562 | Escherichia coli p0305293.5 | p0305293.5 | Proteobacteria | AQCA01000251.1 | III | 2 |
| 877 | GCA_000358695.2 | 1116096 | 562 | Escherichia coli p0305293.8 | p0305293.8 | Proteobacteria | AQCD01000162.1 | III | 2 |
| 878 | GCA_000358715.2 | 1116097 | 562 | Escherichia coli p0305293.9 | p0305293.9 | Proteobacteria | AQCE01000149.1 | III | 2 |
| 879 | GCA_000498255.1 | 1097579 | 562 | Escherichia coli P4-96 | P4-96 | Proteobacteria | AHH001000034.1 | III | 2 |
| 880 | GCA_000498275.1 | 1117111 | 562 | Escherichia coli P4-NR | P4-NR | Proteobacteria | AHHP01000046.1 | III | 2 |
| 881 | GCA_000267865.2 | 1005494 | 562 | Escherichia coli PA10 | PA10 | Proteobacteria | JH709066.1 | III | 2 |
| 882 | GCA_000335415.2 | 1051349 | 562 | Escherichia coli PA11 | PA11 | Proteobacteria | AOEI01000002.1 | III | 2 |
| 883 | GCA_000335435.2 | 1051350 | 562 | Escherichia coli PA13 | PA13 | Proteobacteria | AOEK01000001.1 | III | 2 |
| 884 | GCA_000267845.2 | 1005495 | 562 | Escherichia coli PA14 | PA14 | Proteobacteria | JH708600.1 | III | 2 |
| 885 | GCA_000267825.2 | 1005496 | 562 | Escherichia coli PA15 | PA15 | Proteobacteria | JH707559.1 | III | 2 |
| 886 | GCA_000335335.2 | 1051351 | 562 | Escherichia coli PA19 | PA19 | Proteobacteria | AOEJ01000133.1 | III | 2 |
| 887 | GCA_000335355.2 | 1005487 | 562 | Escherichia coli PA2 | PA2 | Proteobacteria | AOEL01000002.1 | III | 2 |
| 888 | GCA_000267085.1 | 1005497 | 562 | Escherichia coli PA22 | PA22 | Proteobacteria | AKLI01000001.1 | III | 2 |
| 889 | GCA_000303895.2 | 1005498 | 562 | Escherichia coli PA23 | PA23 | Proteobacteria | JH959990.1 | III | 2 |
| 890 | GCA_000267805.2 | 1005499 | 562 | Escherichia coli PA24 | PA24 | Proteobacteria | JH707528.1 | III | 2 |
| 891 | GCA_000267785.2 | 1005500 | 562 | Escherichia coli PA25 | PA25 | Proteobacteria | JH706538.1 | III | 2 |
| 892 | GCA_000267765.2 | 1005501 | 562 | Escherichia coli PA28 | PA28 | Proteobacteria | JH705685.1 | III | 2 |
| 893 | GCA_000267925.2 | 1005488 | 562 | Escherichia coli PA3 | PA3 | Proteobacteria | JH711390.1 | III | 2 |
| 894 | GCA_000267745.2 | 1005502 | 562 | Escherichia coli PA31 | PA31 | Proteobacteria | JH707077.1 | III | 2 |
| 895 | GCA_000267725.2 | 1005503 | 562 | Escherichia coli PA32 | PA32 | Proteobacteria | JH705678.1 | III | 2 |
| 896 | GCA_000267705.2 | 1005504 | 562 | Escherichia coli PA33 | PA33 | Proteobacteria | JH705112.1 | III | 2 |
| 897 | GCA_000303695.2 | 1005505 | 562 | Escherichia coli PA34 | PA34 | Proteobacteria | JH963946.1 | III | 2 |
| 898 | GCA_000335175.2 | 1051352 | 562 | Escherichia coli PA35 | PA35 | Proteobacteria | AOES01000151.1 | III | 2 |
| 899 | GCA_000303675.2 | 1005506 | 562 | Escherichia coli PA38 | PA38 | Proteobacteria | JH966118.1 | III | 2 |
| 900 | GCA_000267685.2 | 1005507 | 562 | Escherichia coli PA39 | PA39 | Proteobacteria | JH704564.1 | III | 2 |
| 901 | GCA_000303875.2 | 1005489 | 562 | Escherichia coli PA4 | PA4 | Proteobacteria | JH960549.1 | III | 2 |
| 902 | GCA_000267645.2 | 1005510 | 562 | Escherichia coli PA42 | PA42 | Proteobacteria | JH702836.1 | III | 2 |
| 903 | GCA_000303935.2 | 1005511 | 562 | Escherichia coli PA45 | PA45 | Proteobacteria | JH958691.1 | III | 2 |
| 904 | GCA_000335075.2 | 1005512 | 562 | Escherichia coli PA47 | PA47 | Proteobacteria | AOEM01000157.1 | III | 2 |
| 905 | GCA_000335095.2 | 1005513 | 562 | Escherichia coli PA48 | PA48 | Proteobacteria | AOEN01000122.1 | III | 2 |
| 906 | GCA_000303915.2 | 1005514 | 562 | Escherichia coli PA49 | PA49 | Proteobacteria | JH959133.1 | III | 2 |
| 907 | GCA_000267905.2 | 1005490 | 562 | Escherichia coli PA5 | PA5 | Proteobacteria | JH709975.1 | III | 2 |
| 908 | GCA_000302735.1 | 1005491 | 562 | Escherichia coli PA7 | PA7 | Proteobacteria | AMTQ01000008.1 | III | 2 |
| 909 | GCA_000335455.2 | 1005492 | 562 | Escherichia coli PA8 | PA8 | Proteobacteria | AOEO01000008.1 | III | 2 |
| 910 | GCA_000267885.2 | 1005493 | 562 | Escherichia coli PA9 | PA9 | Proteobacteria | JH709102.1 | III | 2 |
| 911 | GCA_000019645.1 | 439855 | 562 | Escherichia coli SMS-3-5 | SMS-3-5 | Proteobacteria | CP000970.1 | III | 2 |
| 912 | GCA_000462145.2 | 1081891 | 562 | Escherichia coli T1282_01 | T1282_01 | Proteobacteria | AVRM01000132.1 | III | 2 |
| 913 | GCA_000462265.2 | 1081896 | 562 | Escherichia coli T1840_97 | T1840_97 | Proteobacteria | AVRN01000121.1 | III | 2 |
| 914 | GCA_000462385.2 | 1081892 | 562 | Escherichia coli T234_00 | T234_00 | Proteobacteria | AVRO01000124.1 | III | 2 |
| 915 | GCA_000462165.2 | 1081893 | 562 | Escherichia coli T924_01 | T924_01 | Proteobacteria | AVRP01000002.1 | III | 2 |
| 916 | GCA_000176615.2 | 656437 | 562 | Escherichia coli TA143 | TA143 | Proteobacteria | GL884236.1 | III | 2 |
| 917 | GCA_000303955.2 | 1005555 | 562 | Escherichia coli TT12B | TT12B | Proteobacteria | JH957216.1 | III | 2 |
| 918 | GCA_000267125.1 | 1005515 | 562 | Escherichia coli TW06591 | TW06591 | Proteobacteria | AKLT01000044.1 | III | 2 |
| 919 | GCA_000267625.2 | 1005516 | 562 | Escherichia coli TW07945 | TW07945 | Proteobacteria | JH702467.1 | III | 2 |
| 920 | GCA_000267605.2 | 1005519 | 562 | Escherichia coli TW09098 | TW09098 | Proteobacteria | JH702452.1 | III | 2 |
| 921 | GCA_000267065.1 | 1005520 | 562 | Escherichia coli TW09109 | TW09109 | Proteobacteria | AKLY01000005.1 | III | 2 |
| 922 | GCA_000267145.1 | 1005517 | 562 | Escherichia coli TW10246 | TW10246 | Proteobacteria | AKLV01000003.1 | III | 2 |
| 923 | GCA_000267165.1 | 1005518 | 562 | Escherichia coli TW11039 | TW11039 | Proteobacteria | AKLW01000006.1 | III | 2 |
| 924 | GCA_000267405.2 | 1005526 | 562 | Escherichia coli TW14301 | TW14301 | Proteobacteria | JH695863.1 | III | 2 |
| 925 | GCA_000267425.2 | 1005525 | 562 | Escherichia coli TW14313 | TW14313 | Proteobacteria | JH695401.1 | III | 2 |
| 926 | GCA_000462885.2 | 1207037 | 562 | Escherichia coli Tx1686 | Tx1686 | Proteobacteria | AVSN01000001.1 | III | 2 |
| 927 | GCA_000462905.2 | 1207036 | 562 | Escherichia coli Tx3800 | Tx3800 | Proteobacteria | AVS001000014.1 | III | 2 |
| 928 | GCA_000692835.1 | 1438693 | 562 | Escherichia coli UCI 57 | UCI 57 | Proteobacteria | KK736542.1 | III | 2 |
| 929 | GCA_000692855.1 | 1438694 | 562 | Escherichia coli UCI 58 | UCI 58 | Proteobacteria | KK736552.1 | III | 2 |
| 930 | GCA_000460315.1 | 1281191 | 562 | Escherichia coli UMEA 3144-1 | UMEA 3144-1 | Proteobacteria | KE701670.1 | III | 2 |
| 931 | GCA_000460355.1 | 1281194 | 562 | Escherichia coli UMEA 3151-1 | UMEA 3151-1 | Proteobacteria | KE701689.1 | III | 2 |
| 932 | GCA_000460755.1 | 1281214 | 562 | Escherichia coli UMEA 3201-1 | UMEA 3201-1 | Proteobacteria | KE701998.1 | III | 2 |
| 933 | GCA_000461015.1 | 1281227 | 562 | Escherichia coli UMEA 3240-1 | UMEA 3240-1 | Proteobacteria | KE702179.1 | III | 2 |
| 934 | GCA_000461115.1 | 1281233 | 562 | Escherichia coli UMEA 3271-1 | UMEA 3271-1 | Proteobacteria | KE702260.1 | III | 2 |
| 935 | GCA_000461255.1 | 1281242 | 562 | Escherichia coli UMEA 3329-1 | UMEA 3329-1 | Proteobacteria | KE702361.1 | III | 2 |
| 936 | GCA_000461315.1 | 1281247 | 562 | Escherichia coli UMEA 3355-1 | UMEA 3355-1 | Proteobacteria | KE702386.1 | III | 2 |
| 937 | GCA_000461675.1 | 1281269 | 562 | Escherichia coli UMEA 3718-1 | UMEA 3718-1 | Proteobacteria | KE702585.1 | III | 2 |
| 938 | GCA_000461855.1 | 1281278 | 562 | Escherichia coli UMEA 4076-1 | UMEA 4076-1 | Proteobacteria | KE702725.1 | III | 2 |
| 939 | GCA_000026325.1 | 585056 | 562 | Escherichia coli UMN026 | UMN026 | Proteobacteria | CU928163.2 | III | 2 |
| 940 | GCA_000262125.1 | 741093 | 562 | Escherichia coli Xuzhou21 | Xuzhou21 | Proteobacteria | CP001925.1 | III | 2 |
| 941 | GCA_000968905.2 | 564 | 564 | Escherichia fergusonii | GTA-EF02 | Proteobacteria | JZWQ02000016.1 | III | 2 |
| 942 | GCA_000026225.1 | 585054 | 564 | Escherichia fergusonii ATCC 35469 | | Proteobacteria | CU928158.2 | III | 2 |
| 943 | GCA_000190495.1 | 550694 | 564 | Escherichia fergusonii B253 | B253 | Proteobacteria | GL870856.1 | III | 2 |
| 944 | GCA_000408845.1 | 1279005 | 1279005 | Escherichia sp. KTE172 | KTE172 | Proteobacteria | KE137316.1 | III | 2 |
| 945 | GCA_000961035.1 | 35554 | 35554 | Geobacter sulfurreducens | AM-1 | Proteobacteria | CP010430.1 | III | 2 |
| 946 | GCA_000181475.1 | 344747 | 122 | Gimesia maris DSM 8797 | DSM 8797 | Planctomycetes | ABCE01000001.1 | III | 2 |
| 947 | GCA_000333895.2 | 1056512 | 1056512 | Grimontia indica | AK16 | Proteobacteria | ANFM02000056.1 | III | 2 |
| 948 | GCA_000961635.1 | 1629712 | 1629712 | Hoeflea sp. BRH_c9 | | Proteobacteria | LADQ01000154.1 | III | 2 |
| 949 | GCA_000152885.1 | 314276 | 190892 | Idiomarina baltica OS145 | OS145 | Proteobacteria | CH672405.1 | III | 2 |
| 950 | GCA_001577655.1 | 1794809 | 1794809 | Idiomarina sp. T82-3 | | Proteobacteria | LSBQ01000017.1 | III | 2 |
| 951 | GCA_000723165.1 | 1349767 | 55508 | Janthinobacterium agaricidamnosum NBRC 102515 = DSM 9628 | DSM 9628 | Proteobacteria | HG322949.1 | III | 2 |
| 952 | GCA_001038305.1 | 571 | 571 | Klebsiella oxytoca | GY84G39 | Proteobacteria | LDZM01000006.1 | III | 2 |
| 953 | GCA_001078255.1 | 883124 | 571 | Klebsiella oxytoca 10-5249 | 10-5249 | Proteobacteria | KQ235791.1 | III | 2 |
| 954 | GCA_000607265.1 | 1409787 | 571 | Klebsiella oxytoca G54 | G54 | Proteobacteria | KK097710.1 | III | 2 |
| 955 | GCA_000764635.1 | 573 | 573 | Klebsiella pneumoniae | BAMC 07-18 | Proteobacteria | JRQE01000009.1 | III | 2 |
| 956 | GCA_000786375.1 | 573 | 573 | Klebsiella pneumoniae | 223/14 | Proteobacteria | JRTV01000011.1 | III | 2 |
| 957 | GCA_000788005.1 | 573 | 573 | Klebsiella pneumoniae | 101712 | Proteobacteria | JSZJ01000008.1 | III | 2 |
| 958 | GCA_000807515.2 | 573 | 573 | Klebsiella pneumoniae | 6234 | Proteobacteria | JWRK01000001.1 | III | 2 |
| 959 | GCA_001031325.1 | 573 | 573 | Klebsiella pneumoniae | CHS112 | Proteobacteria | KQ088280.1 | III | 2 |
| 960 | GCA_001031795.1 | 573 | 573 | Klebsiella pneumoniae | CHS140 | Proteobacteria | KQ088469.1 | III | 2 |
| 961 | GCA_001033505.1 | 573 | 573 | Klebsiella pneumoniae | MGH84 | Proteobacteria | KQ089360.1 | III | 2 |
| 962 | GCA_001033525.1 | 573 | 573 | Klebsiella pneumoniae | MGH89 | Proteobacteria | KQ089366.1 | III | 2 |
| 963 | GCA_001033725.1 | 573 | 573 | Klebsiella pneumoniae | MGH101 | Proteobacteria | KQ089465.1 | III | 2 |
| 964 | GCA_001033925.1 | 573 | 573 | Klebsiella pneumoniae | MGH124 | Proteobacteria | KQ089571.1 | III | 2 |
| 965 | GCA_001185865.1 | 573 | 573 | Klebsiella pneumoniae | CHS175 | Proteobacteria | KQ236856.1 | III | 2 |
| 966 | GCA_001307175.1 | 573 | 573 | Klebsiella pneumoniae | KP617 | Proteobacteria | CP012753.1 | III | 2 |
| 967 | GCA_001441285.1 | 573 | 573 | Klebsiella pneumoniae | B86 | Proteobacteria | UCD01000021.1 | III | 2 |
| 968 | GCA_001456055.1 | 573 | 573 | Klebsiella pneumoniae | KpN01 | Proteobacteria | CP012987.1 | III | 2 |
| 969 | GCA_001456095.1 | 573 | 573 | Klebsiella pneumoniae | KpN06 | Proteobacteria | CP012992.1 | III | 2 |
| 970 | GCA_001462825.1 | 573 | 573 | Klebsiella pneumoniae | K68-18 | Proteobacteria | LNHE01000086.1 | III | 2 |
| 971 | GCA_001462845.1 | 573 | 573 | Klebsiella pneumoniae | K68-73 | Proteobacteria | LNHF01000070.1 | III | 2 |
| 972 | GCA_001463085.1 | 573 | 573 | Klebsiella pneumoniae | 50580255 | Proteobacteria | LNHK01000055.1 | III | 2 |
| 973 | GCA_001463165.1 | 573 | 573 | Klebsiella pneumoniae | U25 | Proteobacteria | CP012043.1 | III | 2 |
| 974 | GCA_001463475.1 | 573 | 573 | Klebsiella pneumoniae | 50884375 | Proteobacteria | LNIS01000067.1 | III | 2 |
| 975 | GCA_001483055.1 | 573 | 573 | Klebsiella pneumoniae | K1 | Proteobacteria | LOEJ01000055.1 | III | 2 |
| 976 | GCA_001483725.1 | 573 | 573 | Klebsiella pneumoniae | K45-67 | Proteobacteria | LLWB01000171.1 | III | 2 |
| 977 | GCA_001574505.1 | 573 | 573 | Klebsiella pneumoniae | U41 | Proteobacteria | LSTN01000011.1 | III | 2 |
| 978 | GCA_001597015.1 | 573 | 573 | Klebsiella pneumoniae | KP-33P | Proteobacteria | JXJG01000034.1 | III | 2 |
| 979 | GCA_000474635.1 | 1381121 | 573 | Klebsiella pneumoniae 303K | 303K | Proteobacteria | AVAN01000039.1 | III | 2 |
| 980 | GCA_000567405.1 | 1328405 | 573 | Klebsiella pneumoniae BIDMC 11 | BIDMC 11 | Proteobacteria | KK036859.1 | III | 2 |
| 981 | GCA_000492295.1 | 1328425 | 573 | Klebsiella pneumoniae BIDMC 36 | BIDMC 36 | Proteobacteria | KI535412.1 | III | 2 |
| 982 | GCA_000694235.1 | 1438772 | 573 | Klebsiella pneumoniae CHS 66 | CHS 66 | Proteobacteria | KK737378.1 | III | 2 |
| 983 | GCA_000530055.1 | 1432547 | 573 | Klebsiella pneumoniae IS22 | IS22 | Proteobacteria | CBWF010000048.1 | III | 2 |
| 984 | GCA_000316265.2 | 1236101 | 573 | Klebsiella pneumoniae JHCK1 | JHCK1 | Proteobacteria | ANGH02000162.1 | III | 2 |
| 985 | GCA_000406505.1 | 1284834 | 573 | Klebsiella pneumoniae KP-11 | KP-11 | Proteobacteria | APWE01000228.1 | III | 2 |
| 986 | GCA_000406385.1 | 1284833 | 573 | Klebsiella pneumoniae KP-7 | KP-7 | Proteobacteria | AQQD01000021.1 | III | 2 |
| 987 | GCA_000493135.1 | 1328363 | 573 | Klebsiella pneumoniae MGH 18 | MGH 18 | Proteobacteria | KI535680.1 | III | 2 |
| 988 | GCA_000567745.1 | 1328371 | 573 | Klebsiella pneumoniae MGH 35 | MGH 35 | Proteobacteria | KK036965.1 | III | 2 |
| 989 | GCA_000492775.1 | 1328378 | 573 | Klebsiella pneumoniae MGH 46 | MGH 46 | Proteobacteria | KI535587.1 | III | 2 |
| 990 | GCA_000694715.1 | 1438797 | 573 | Klebsiella pneumoniae MGH 74 | MGH 74 | Proteobacteria | KK737643.1 | III | 2 |
| 991 | GCA_000785005.1 | 72407 | 573 | Klebsiella pneumoniae subsp. pneumoniae | KPNIH31 | Proteobacteria | CP009876.1 | III | 2 |
| 992 | GCA_000733255.1 | 1406314 | 573 | Klebsiella pneumoniae subsp. pneumoniae PittNDM01 | PittNDM01 | Proteobacteria | CP006798.1 | III | 2 |
| 993 | GCA_000300675.1 | 1203545 | 573 | Klebsiella pneumoniae subsp. pneumoniae WGLW2 | WGLW2 | Proteobacteria | JH930419.1 | III | 2 |
| 994 | GCA_000492595.1 | 1328391 | 573 | Klebsiella pneumoniae UCICRE 4 | UCICRE 4 | Proteobacteria | KI535510.1 | III | 2 |
| 995 | GCA_000417465.1 | 1284818 | 573 | Klebsiella pneumoniae UHKPC179 | UHKPC179 | Proteobacteria | ARSM01000005.1 | III | 2 |
| 996 | GCA_000409125.1 | 1284817 | 573 | Klebsiella pneumoniae UHKPC57 | UHKPC57 | Proteobacteria | ARPR01000126.1 | III | 2 |
| 997 | GCA_000280495.1 | 1177180 | 283686 | Kosakonia radicincitans DSM 16656 | DSM 16656 | Proteobacteria | JH725436.1 | III | 2 |
| 998 | GCA_000691205.1 | 1455607 | 283686 | Kosakonia radicincitans UMEnt01/12 | UMEnt01/12 | Proteobacteria | JDYJ01000004.1 | III | 2 |
| 999 | GCA_000048665.1 | 297245 | 446 | Legionella pneumophila str. Lens | Lens | Proteobacteria | CR628337.1 | III | 2 |
| 1000 | GCA_001468025.1 | 1122169 | 45075 | Legionella shakespearei DSM 23087 | ATCC 49655 | Proteobacteria | LNYW01000016.1 | III | 2 |
| 1001 | GCA_000521805.1 | 1122207 | 263818 | Marinomonas ushuaiensis DSM 15871 | DSM 15871 | Proteobacteria | JAMB01000003.1 | III | 2 |
| 1002 | GCA_000502395.1 | 1287232 | 1287232 | Mesorhizobium sp. LNHC220B00 | LNHC220B00 | Proteobacteria | AYWS01000016.1 | III | 2 |
| 1003 | GCA_000502435.1 | 1287243 | 1287243 | Mesorhizobium sp. LNHC232B00 | LNHC232B00 | Proteobacteria | AYWP01000014.1 | III | 2 |
| 1004 | GCA_000502975.1 | 1287268 | 1287268 | Mesorhizobium sp. LNJC384A00 | LNJC384A00 | Proteobacteria | AYWK01000002.1 | III | 2 |
| 1005 | GCA_001425625.1 | 1736422 | 1736422 | Mesorhizobium sp. Root102 | Root102 | Proteobacteria | LMCP01000044.1 | III | 2 |
| 1006 | GCA_000364445.1 | 908290 | 39956 | Methylobacterium mesophilicum SR1.6/6 | SR1.6/6 | Proteobacteria | ANPA01000017.1 | III | 2 |
| 1007 | GCA_000364445.1 | 908290 | 39956 | Methylobacterium mesophilicum SR1.6/6 | SR1.6/6 | Proteobacteria | ANPA01000017.1 | III | 2 |
| 1008 | GCA_001423385.1 | 1736262 | 1736262 | Methylobacterium sp. Leaf121 | Leaf121 | Proteobacteria | LMNP01000003.1 | III | 2 |
| 1009 | GCA_001422165.1 | 1736242 | 1736242 | Methylobacterium sp. Leaf86 | Leaf86 | Proteobacteria | LMMG01000005.1 | III | 2 |
| 1010 | GCA_001422265.1 | 1736246 | 1736246 | Methylobacterium sp. Leaf90 | Leaf90 | Proteobacteria | LMMN01000010.1 | III | 2 |
| 1011 | GCA_000186165.1 | 435832 | 488 | Neisseria mucosa C102 | C102 | Proteobacteria | GL635793.1 | III | 2 |
| 1012 | GCA_000235975.2 | 1088721 | 205844 | Novosphingobium pentaromativorans US6-1 | US6-1 | Proteobacteria | AGFM01000037.1 | III | 2 |
| 1013 | GCA_000767465.1 | 1088721 | 205844 | Novosphingobium pentaromativorans US6-1 | US6-1 | Proteobacteria | CP009291.1 | III | 2 |
| 1014 | GCA_000253255.1 | 702113 | 702113 | Novosphingobium sp. PP1Y | PP1Y | Proteobacteria | FR856862.1 | III | 2 |
| 1015 | GCA_001476715.1 | 59814 | 59814 | Pantoea dispersa | NS215 | Proteobacteria | LDRY01000017.1 | III | 2 |
| 1016 | GCA_001477165.1 | 59814 | 59814 | Pantoea dispersa | RSA31 | Proteobacteria | LDSC01000016.1 | III | 2 |
| 1017 | GCA_000179655.1 | 517433 | 517433 | Pantoea sp. aB | aB | Proteobacteria | AEDL01000002.1 | III | 2 |
| 1018 | GCA_000754715.1 | 78398 | 554 | Pectobacterium carotovorum subsp. odoriferum | NCPPB3841 | Proteobacteria | JQOF01000009.1 | III | 2 |
| 1019 | GCA_000024645.1 | 561231 | 55208 | Pectobacterium wasabiae WPP163 | WPP163 | Proteobacteria | CP001790.1 | III | 2 |
| 1020 | GCA_000153725.1 | 314265 | 344736 | Pelagibaca bermudensis HTCC2601 | HTCC2601 | Proteobacteria | DS022276.1 | III | 2 |
| 1021 | GCA_000153425.1 | 314280 | 74109 | Photobacterium profundum 3TCK | 3TCK | Proteobacteria | CH724134.1 | III | 2 |
| 1022 | GCA_000957245.1 | 61647 | 61647 | Pluralibacter gergoviae | 40874 | Proteobacteria | JZYL01000003.1 | III | 2 |
| 1023 | GCA_001038225.1 | 61647 | 61647 | Pluralibacter gergoviae | JS81F13 | Proteobacteria | LDZF01000024.1 | III | 2 |
| 1024 | GCA_001038285.1 | 61647 | 61647 | Pluralibacter gergoviae | SS84A28 | Proteobacteria | LDZJ01000006.1 | III | 2 |
| 1025 | GCA_001546565.2 | 28125 | 28125 | Prevotella bivia | GED7760C | Bacteroidetes | KQ971199.1 | III | 2 |
| 1026 | GCA_000224595.1 | 563031 | 563031 | Prevotella sp. C561 | C561 | Bacteroidetes | JH114144.1 | III | 2 |
| 1027 | GCA_001463025.1 | 584 | 584 | Proteus mirabilis | 50664164 | Proteobacteria | LNHT01000079.1 | III | 2 |
| 1028 | GCA_001469205.1 | 1761893 | 1761893 | Pseudoalteromonas sp. H103 | H103 | Proteobacteria | LOFG01000015.1 | III | 2 |
| 1029 | GCA_000756575.1 | 287 | 287 | Pseudomonas aeruginosa | ATCC 33988 | Proteobacteria | JPQQ01000086.1 | III | 2 |
| 1030 | GCA_000786565.1 | 287 | 287 | Pseudomonas aeruginosa | PS3 | Proteobacteria | JRGP01000061.1 | III | 2 |
| 1031 | GCA_001420245.1 | 287 | 287 | Pseudomonas aeruginosa | ATCC 33351 | Proteobacteria | LJNX01000028.1 | III | 2 |
| 1032 | GCA_001444915.1 | 287 | 287 | Pseudomonas aeruginosa | ATCC 33364 | Proteobacteria | LJZK01000128.1 | III | 2 |
| 1033 | GCA_001449395.1 | 287 | 287 | Pseudomonas aeruginosa | WH-SGI-V-07066 | Proteobacteria | LLLQ01000001.1 | III | 2 |
| 1034 | GCA_001449485.1 | 287 | 287 | Pseudomonas aeruginosa | WH-SGI-V-07166 | Proteobacteria | LLLV01000015.1 | III | 2 |
| 1035 | GCA_001450095.1 | 287 | 287 | Pseudomonas aeruginosa | WH-SGI-V-07245 | Proteobacteria | LLNQ01000041.1 | III | 2 |
| 1036 | GCA_001450195.1 | 287 | 287 | Pseudomonas aeruginosa | WH-SGI-V-07374 | Proteobacteria | LLNY01000068.1 | III | 2 |
| 1037 | GCA_001450665.1 | 287 | 287 | Pseudomonas aeruginosa | WH-SGI-V-07224 | Proteobacteria | LLMV01000078.1 | III | 2 |
| 1038 | GCA_001450705.1 | 287 | 287 | Pseudomonas aeruginosa | WH-SGI-V-07230 | Proteobacteria | LLNB01000014.1 | III | 2 |
| 1039 | GCA_001450785.1 | 287 | 287 | Pseudomonas aeruginosa | WH-SGI-V-07242 | Proteobacteria | LLNN01000029.1 | III | 2 |
| 1040 | GCA_001450795.1 | 287 | 287 | Pseudomonas aeruginosa | WH-SGI-V-07246 | Proteobacteria | LLNR01000113.1 | III | 2 |
| 1041 | GCA_001450825.1 | 287 | 287 | Pseudomonas aeruginosa | WH-SGI-V-07371 | Proteobacteria | LLNV01000083.1 | III | 2 |
| 1042 | GCA_001450875.1 | 287 | 287 | Pseudomonas aeruginosa | WH-SGI-V-07382 | Proteobacteria | LLOG01000021.1 | III | 2 |
| 1043 | GCA_001451255.1 | 287 | 287 | Pseudomonas aeruginosa | WH-SGI-V-07388 | Proteobacteria | LLOM01000115.1 | III | 2 |
| 1044 | GCA_001451265.1 | 287 | 287 | Pseudomonas aeruginosa | WH-SGI-V-07404 | Proteobacteria | LLOR01000110.1 | III | 2 |
| 1045 | GCA_001451335.1 | 287 | 287 | Pseudomonas aeruginosa | WH-SGI-V-07409 | Proteobacteria | LLOW01000068.1 | III | 2 |
| 1046 | GCA_001451445.1 | 287 | 287 | Pseudomonas aeruginosa | WH-SGI-V-07422 | Proteobacteria | LLPJ01000077.1 | III | 2 |
| 1047 | GCA_001451455.1 | 287 | 287 | Pseudomonas aeruginosa | WH-SGI-V-07424 | Proteobacteria | LLPL01000049.1 | III | 2 |
| 1048 | GCA_001451505.1 | 287 | 287 | Pseudomonas aeruginosa | WH-SGI-V-07426 | Proteobacteria | LLPN01000082.1 | III | 2 |
| 1049 | GCA_001451865.1 | 287 | 287 | Pseudomonas aeruginosa | WH-SGI-V-07502 | Proteobacteria | LLQI01000034.1 | III | 2 |
| 1050 | GCA_001451975.1 | 287 | 287 | Pseudomonas aeruginosa | WH-SGI-V-07621 | Proteobacteria | LLQS01000023.1 | III | 2 |
| 1051 | GCA_001452235.1 | 287 | 287 | Pseudomonas aeruginosa | WH-SGI-V-07642 | Proteobacteria | LLRN01000045.1 | III | 2 |
| 1052 | GCA_001452325.1 | 287 | 287 | Pseudomonas aeruginosa | WH-SGI-V-07647 | Proteobacteria | LLRS01000097.1 | III | 2 |
| 1053 | GCA_001452495.1 | 287 | 287 | Pseudomonas aeruginosa | WH-SGI-V-07689 | Proteobacteria | LLSJ01000050.1 | III | 2 |
| 1054 | GCA_001452565.1 | 287 | 287 | Pseudomonas aeruginosa | WH-SGI-V-07693 | Proteobacteria | LLSN01000128.1 | III | 2 |
| 1055 | GCA_001453025.1 | 287 | 287 | Pseudomonas aeruginosa | WH-SGI-V-07267 | Proteobacteria | LLTY01000116.1 | III | 2 |
| 1056 | GCA_001453065.1 | 287 | 287 | Pseudomonas aeruginosa | WH-SGI-V-07272 | Proteobacteria | LLUA01000034.1 | III | 2 |
| 1057 | GCA_001453235.1 | 287 | 287 | Pseudomonas aeruginosa | WH-SGI-V-07503 | Proteobacteria | LLQJ01000004.1 | III | 2 |
| 1058 | GCA_001453385.1 | 287 | 287 | Pseudomonas aeruginosa | WH-SGI-V-07629 | Proteobacteria | LLRA01000034.1 | III | 2 |
| 1059 | GCA_001453415.1 | 287 | 287 | Pseudomonas aeruginosa | WH-SGI-V-07632 | Proteobacteria | LLRD01000060.1 | III | 2 |
| 1060 | GCA_001453435.1 | 287 | 287 | Pseudomonas aeruginosa | WH-SGI-V-07638 | Proteobacteria | LLRJ01000019.1 | III | 2 |
| 1061 | GCA_001453545.1 | 287 | 287 | Pseudomonas aeruginosa | WH-SGI-V-07678 | Proteobacteria | LLRY01000012.1 | III | 2 |
| 1062 | GCA_001453585.1 | 287 | 287 | Pseudomonas aeruginosa | WH-SGI-V-07682 | Proteobacteria | LLSC01000012.1 | III | 2 |
| 1063 | GCA_001453645.1 | 287 | 287 | Pseudomonas aeruginosa | WH-SGI-V-07686 | Proteobacteria | LLSG01000023.1 | III | 2 |
| 1064 | GCA_001453665.1 | 287 | 287 | Pseudomonas aeruginosa | WH-SGI-V-07691 | Proteobacteria | LLSL01000020.1 | III | 2 |
| 1065 | GCA_001453735.1 | 287 | 287 | Pseudomonas aeruginosa | WH-SGI-V-07701 | Proteobacteria | LLSV01000117.1 | III | 2 |
| 1066 | GCA_001453775.1 | 287 | 287 | Pseudomonas aeruginosa | WH-SGI-V-07710 | Proteobacteria | LLTE01000056.1 | III | 2 |
| 1067 | GCA_001453905.1 | 287 | 287 | Pseudomonas aeruginosa | WH-SGI-V-07273 | Proteobacteria | LLUB01000034.1 | III | 2 |
| 1068 | GCA_001454085.1 | 287 | 287 | Pseudomonas aeruginosa | WH-SGI-V-07284 | Proteobacteria | LLUK01000105.1 | III | 2 |
| 1069 | GCA_001454145.1 | 287 | 287 | Pseudomonas aeruginosa | WH-SGI-V-07291 | Proteobacteria | LLUO01000065.1 | III | 2 |
| 1070 | GCA_001454325.1 | 287 | 287 | Pseudomonas aeruginosa | WH-SGI-V-07310 | Proteobacteria | LLUZ01000067.1 | III | 2 |
| 1071 | GCA_001454415.1 | 287 | 287 | Pseudomonas aeruginosa | WH-SGI-V-07317 | Proteobacteria | LLVF01000026.1 | III | 2 |
| 1072 | GCA_001454725.1 | 287 | 287 | Pseudomonas aeruginosa | WH-SGI-V-07305 | Proteobacteria | LLUW01000034.1 | III | 2 |
| 1073 | GCA_001454745.1 | 287 | 287 | Pseudomonas aeruginosa | WH-SGI-V-07311 | Proteobacteria | LLVA01000045.1 | III | 2 |
| 1074 | GCA_001516245.1 | 287 | 287 | Pseudomonas aeruginosa | F23197 | Proteobacteria | CP008856.1 | III | 2 |
| 1075 | GCA_001516325.1 | 287 | 287 | Pseudomonas aeruginosa | H27930 | Proteobacteria | CP008860.1 | III | 2 |
| 1076 | GCA_001554535.1 | 287 | 287 | Pseudomonas aeruginosa | AU12175 | Proteobacteria | LRYP01000010.1 | III | 2 |
| 1077 | GCA_001554545.1 | 287 | 287 | Pseudomonas aeruginosa | AU13212 | Proteobacteria | LRYQ01000033.1 | III | 2 |
| 1078 | GCA_001554585.1 | 287 | 287 | Pseudomonas aeruginosa | AU15431 | Proteobacteria | LRYV01000009.1 | III | 2 |
| 1079 | GCA_001554615.1 | 287 | 287 | Pseudomonas aeruginosa | AU13213 | Proteobacteria | LRYS01000006.1 | III | 2 |
| 1080 | GCA_001554625.1 | 287 | 287 | Pseudomonas aeruginosa | AU16960 | Proteobacteria | LRYT01000005.1 | III | 2 |
| 1081 | GCA_001555135.1 | 287 | 287 | Pseudomonas aeruginosa | AU7032 | Proteobacteria | LRYU01000008.1 | III | 2 |
| 1082 | GCA_001555145.1 | 287 | 287 | Pseudomonas aeruginosa | AU6923 | Proteobacteria | LRYO01000006.1 | III | 2 |
| 1083 | GCA_001555415.1 | 287 | 287 | Pseudomonas aeruginosa | AU14820 | Proteobacteria | LSAG01000007.1 | III | 2 |
| 1084 | GCA_001555425.1 | 287 | 287 | Pseudomonas aeruginosa | AU23529 | Proteobacteria | LSAI01000005.1 | III | 2 |
| 1085 | GCA_001555455.1 | 287 | 287 | Pseudomonas aeruginosa | AU17965 | Proteobacteria | LSAH01000005.1 | III | 2 |
| 1086 | GCA_001601595.1 | 287 | 287 | Pseudomonas aeruginosa | 105738 | Proteobacteria | LOHK01000062.1 | III | 2 |
| 1087 | GCA_000647595.1 | 1339263 | 287 | Pseudomonas aeruginosa 148 | 148 | Proteobacteria | ATAJ01000107.1 | III | 2 |
| 1088 | GCA_000481105.1 | 1402543 | 287 | Pseudomonas aeruginosa BL02 | BL02 | Proteobacteria | KI518950.1 | III | 2 |
| 1089 | GCA_000481085.1 | 1402544 | 287 | Pseudomonas aeruginosa BL03 | BL03 | Proteobacteria | KI518942.1 | III | 2 |
| 1090 | GCA_000480965.1 | 1402550 | 287 | Pseudomonas aeruginosa BL09 | BL09 | Proteobacteria | KI518886.1 | III | 2 |
| 1091 | GCA_000480905.1 | 1402553 | 287 | Pseudomonas aeruginosa BL12 | BL12 | Proteobacteria | KI518869.1 | III | 2 |
| 1092 | GCA_000480885.1 | 1402554 | 287 | Pseudomonas aeruginosa BL13 | BL13 | Proteobacteria | KI518852.1 | III | 2 |
| 1093 | GCA_000480745.1 | 1402561 | 287 | Pseudomonas aeruginosa BL20 | BL20 | Proteobacteria | KI518796.1 | III | 2 |
| 1094 | GCA_000481485.1 | 1402511 | 287 | Pseudomonas aeruginosa BWHPSA011 | BWHPSA011 | Proteobacteria | KI519089.1 | III | 2 |
| 1095 | GCA_000481245.1 | 1402523 | 287 | Pseudomonas aeruginosa BWHPSA023 | BWHPSA023 | Proteobacteria | KI519011.1 | III | 2 |
| 1096 | GCA_000481145.1 | 1402528 | 287 | Pseudomonas aeruginosa BWHPSA028 | BWHPSA028 | Proteobacteria | KI518967.1 | III | 2 |
| 1097 | GCA_000520415.1 | 1402531 | 287 | Pseudomonas aeruginosa BWHPSA039 | BWHPSA039 | Proteobacteria | KI914530.1 | III | 2 |
| 1098 | GCA_000480515.1 | 1402572 | 287 | Pseudomonas aeruginosa C20 | C20 | Proteobacteria | KI518719.1 | III | 2 |
| 1099 | GCA_000480495.1 | 1402573 | 287 | Pseudomonas aeruginosa C23 | C23 | Proteobacteria | KI518716.1 | III | 2 |
| 1100 | GCA_000705175.1 | 1441459 | 287 | Pseudomonas aeruginosa C2773C | C2773C | Proteobacteria | JGZW01000193.1 | III | 2 |
| 1101 | GCA_000481945.1 | 1402488 | 287 | Pseudomonas aeruginosa CF127 | CF127 | Proteobacteria | KI519290.1 | III | 2 |
| 1102 | GCA_000291745.1 | 1078464 | 287 | Pseudomonas aeruginosa NCMG1179 | NCGM1179 | Proteobacteria | DF126593.1 | III | 2 |
| 1103 | GCA_000342145.1 | 1285581 | 287 | Pseudomonas aeruginosa PA21_ST175 | PA21_ST175 | Proteobacteria | AOIH01000011.1 | III | 2 |
| 1104 | GCA_000611995.2 | 1437873 | 287 | Pseudomonas aeruginosa PA99 | PA99 | Proteobacteria | KK111942.1 | III | 2 |
| 1105 | GCA_000408865.1 | 1009714 | 287 | Pseudomonas aeruginosa PAK | PAK | Proteobacteria | KE137323.1 | III | 2 |
| 1106 | GCA_000520195.1 | 1402581 | 287 | Pseudomonas aeruginosa PS42 | PS42 | Proteobacteria | KI914450.1 | III | 2 |
| 1107 | GCA_000481725.1 | 1402499 | 287 | Pseudomonas aeruginosa S35004 | S35004 | Proteobacteria | KI519208.1 | III | 2 |
| 1108 | GCA_000568215.1 | 1443105 | 287 | Pseudomonas aeruginosa SG17M | SG17M | Proteobacteria | JALF01000002.1 | III | 2 |
| 1109 | GCA_000467105.1 | 1215092 | 43263 | Pseudomonas alcaligenes NBRC 14159 | NBRC 14159 | Proteobacteria | BATI01000047.1 | III | 2 |
| 1110 | GCA_000467105.1 | 1215092 | 43263 | Pseudomonas alcaligenes NBRC 14159 | NBRC 14159 | Proteobacteria | BATI01000005.1 | III | 2 |
| 1111 | GCA_000632535.1 | 653930 | 653930 | Pseudomonas bauzanensis | W13Z2 | Proteobacteria | JFHS01000003.1 | III | 2 |
| 1112 | GCA_001586155.1 | 53408 | 53408 | Pseudomonas citronellolis | P3B5 | Proteobacteria | CP014158.1 | III | 2 |
| 1113 | GCA_001400695.1 | 129135 | 53409 | Pseudomonas coronafaciens pv. atropurpurea | ICMP4457 | Proteobacteria | LJPS01000041.1 | III | 2 |
| 1114 | GCA_001411475.1 | 1563157 | 1563157 | Pseudomonas endophytica | BSTT44 | Proteobacteria | LLWH01000162.1 | III | 2 |
| 1115 | GCA_000242115.2 | 1117958 | 359110 | Pseudomonas extremaustralis 14-3 substr. 14-3b | 14-3 substr. 14-3b | Proteobacteria | AHIP01000001.1 | III | 2 |
| 1116 | GCA_000876155.1 | 294 | 294 | Pseudomonas fluorescens | 2-79 | Proteobacteria | JXCQ01000014.1 | III | 2 |
| 1117 | GCA_000952735.1 | 294 | 294 | Pseudomonas fluorescens | NT0133 | Proteobacteria | JYHW01000034.1 | III | 2 |
| 1118 | GCA_001542725.1 | 294 | 294 | Pseudomonas fluorescens | Ps_40 | Proteobacteria | LCYC01000002.1 | III | 2 |
| 1119 | GCA_000166515.1 | 746360 | 294 | Pseudomonas fluorescens WH6 | WH6 | Proteobacteria | CM001025.1 | III | 2 |
| 1120 | GCA_001043005.1 | 122355 | 122355 | Pseudomonas psychrophila | DSM 17535 | Proteobacteria | JYKZ01000009.1 | III | 2 |
| 1121 | GCA_000367825.1 | 1227924 | 303 | Pseudomonas putida TRO1 | TRO1 | Proteobacteria | APBQ01000056.1 | III | 2 |
| 1122 | GCA_000478505.2 | 1203578 | 1203578 | Pseudomonas sp. HPB0071 | HPB0071 | Proteobacteria | KI517369.1 | III | 2 |
| 1123 | GCA_000307775.2 | 1218352 | 316 | Pseudomonas stutzeri KOS6 | KOS6 | Proteobacteria | KK020676.1 | III | 2 |
| 1124 | GCA_000341615.1 | 1212548 | 316 | Pseudomonas stutzeri NF13 | NF13 | Proteobacteria | AOBS01000069.1 | III | 2 |
| 1125 | GCA_001293855.1 | 59511 | 251701 | Pseudomonas syringae pv. maculicola | 90_32 | Proteobacteria | LGLH01000088.1 | III | 2 |
| 1126 | GCA_000735435.1 | 1005996 | 575 | Raoultella planticola ATCC 33531 | ATCC 33531 | Proteobacteria | JMPP01000005.1 | III | 2 |
| 1127 | GCA_000020265.1 | 491916 | 29449 | Rhizobium etli CIAT 652 | CIAT 652 | Proteobacteria | CP001074.1 | III | 2 |
| 1128 | GCA_000268285.2 | 1128399 | 396 | Rhizobium phaseoli Ch24-10 | Ch24-10 | Proteobacteria | AHJU02000014.1 | III | 2 |
| 1129 | GCA_001425605.1 | 1736380 | 1736380 | Rhizobium sp. Leaf453 | Leaf453 | Proteobacteria | LMRG01000007.1 | III | 2 |
| 1130 | GCA_000967425.1 | 1125847 | 1125847 | Rhizobium sp. NT-26 | NT-26 | Proteobacteria | FO082820.1 | III | 2 |
| 1131 | GCA_001427345.1 | 1736473 | 1736473 | Rhizobium sp. Root149 | Root149 | Proteobacteria | LMGD01000001.1 | III | 2 |
| 1132 | GCA_000931365.1 | 1604021 | 1604021 | Rhizobium sp. UR51a | UR51a | Proteobacteria | JYFU01000014.1 | III | 2 |
| 1133 | GCA_001402715.1 | 1061 | 1061 | Rhodobacter capsulatus | B41 | Proteobacteria | LLVU01000015.1 | III | 2 |
| 1134 | GCA_001402725.1 | 1061 | 1061 | Rhodobacter capsulatus | A52 | Proteobacteria | LLVV01000015.1 | III | 2 |
| 1135 | GCA_000521785.1 | 1449350 | 93683 | Roseivivax halodurans JCM 10272 | JCM 10272 | Proteobacteria | JALZ01000004.1 | III | 2 |
| 1136 | GCA_000961715.1 | 1629709 | 1629709 | Roseovarius sp. BRH_c41 | | Proteobacteria | LADY01000060.1 | III | 2 |
| 1137 | GCA_000442315.1 | 1123069 | 295419 | Rubellimicrobium thermophilum DSM 16684 | DSM 16684 | Proteobacteria | KE557322.1 | III | 2 |
| 1138 | GCA_001570325.1 | 28901 | 28901 | Salmonella enterica | NGUA40 | Proteobacteria | BCPM01000156.1 | III | 2 |
| 1139 | GCA_001570345.1 | 28901 | 28901 | Salmonella enterica | NGUA41 | Proteobacteria | BCPN01000199.1 | III | 2 |
| 1140 | GCA_000806705.1 | 59201 | 28901 | Salmonella enterica subsp. enterica | CFSAN024770 | Proteobacteria | JWQJ01000002.1 | III | 2 |
| 1141 | GCA_000806725.1 | 59201 | 28901 | Salmonella enterica subsp. enterica | CFSAN024771 | Proteobacteria | JWQI01000002.1 | III | 2 |
| 1142 | GCA_000487735.1 | 1194156 | 28901 | Salmonella enterica subsp. enterica serovar Havana str. | CFSAN001082 | Proteobacteria | APAH01000409.1 | III | 2 |
| | | | | CFSAN001082 | | | | | |
| 1143 | GCA_001187365.1 | 595 | 28901 | Salmonella enterica subsp. enterica serovar Infantis | Sal280 | Proteobacteria | LFGW01000205.1 | III | 2 |
| 1144 | GCA_000818075.1 | 54388 | 28901 | Salmonella enterica subsp. enterica serovar Paratyphi A | CMCC 50973 | Proteobacteria | CP009049.1 | III | 2 |
| 1145 | GCA_000818115.1 | 54388 | 28901 | Salmonella enterica subsp. enterica serovar Paratyphi A | CMCC 50503 | Proteobacteria | CP009559.1 | III | 2 |
| 1146 | GCA_000983135.1 | 54388 | 28901 | Salmonella enterica subsp. enterica serovar Paratyphi A | | Proteobacteria | CCTC01000001.1 | III | 2 |
| 1147 | GCA_000983155.1 | 54388 | 28901 | Salmonella enterica subsp. enterica serovar Paratyphi A | | Proteobacteria | CCTP01000001.1 | III | 2 |
| 1148 | GCA_000983175.1 | 54388 | 28901 | Salmonella enterica subsp. enterica serovar Paratyphi A | | Proteobacteria | CCLD01000002.1 | III | 2 |
| 1149 | GCA_000983195.1 | 54388 | 28901 | Salmonella enterica subsp. enterica serovar Paratyphi A | | Proteobacteria | CCTT01000001.1 | III | 2 |
| 1150 | GCA_000983215.1 | 54388 | 28901 | Salmonella enterica subsp. enterica serovar Paratyphi A | | Proteobacteria | CCVA01000001.1 | III | 2 |
| 1151 | GCA_000983235.1 | 54388 | 28901 | Salmonella enterica subsp. enterica serovar Paratyphi A | | Proteobacteria | CCUS01000001.1 | III | 2 |
| 1152 | GCA_000983255.1 | 54388 | 28901 | Salmonella enterica subsp. enterica serovar Paratyphi A | | Proteobacteria | CCNZ01000001.1 | III | 2 |
| 1153 | GCA_000983275.1 | 54388 | 28901 | Salmonella enterica subsp. enterica serovar Paratyphi A | | Proteobacteria | CCVV01000001.1 | III | 2 |
| 1154 | GCA_000983295.1 | 54388 | 28901 | Salmonella enterica subsp. enterica serovar Paratyphi A | | Proteobacteria | CCLR01000001.1 | III | 2 |
| 1155 | GCA_000983315.1 | 54388 | 28901 | Salmonella enterica subsp. enterica serovar Paratyphi A | | Proteobacteria | CGIE01000004.1 | III | 2 |
| 1156 | GCA_000983335.1 | 54388 | 28901 | Salmonella enterica subsp. enterica serovar Paratyphi A | | Proteobacteria | CCNY01000001.1 | III | 2 |
| 1157 | GCA_000983355.1 | 54388 | 28901 | Salmonella enterica subsp. enterica serovar Paratyphi A | | Proteobacteria | CCUY01000004.1 | III | 2 |
| 1158 | GCA_000983375.1 | 54388 | 28901 | Salmonella enterica subsp. enterica serovar Paratyphi A | | Proteobacteria | CCLN01000001.1 | III | 2 |
| 1159 | GCA_000983395.1 | 54388 | 28901 | Salmonella enterica subsp. enterica serovar Paratyphi A | | Proteobacteria | CCTO01000001.1 | III | 2 |
| 1160 | GCA_000983415.1 | 54388 | 28901 | Salmonella enterica subsp. enterica serovar Paratyphi A | | Proteobacteria | CCUE01000001.1 | III | 2 |
| 1161 | GCA_000983435.1 | 54388 | 28901 | Salmonella enterica subsp. enterica serovar Paratyphi A | | Proteobacteria | CCSP01000001.1 | III | 2 |
| 1162 | GCA_000983485.1 | 54388 | 28901 | Salmonella enterica subsp. enterica serovar Paratyphi A | | Proteobacteria | CCLS01000001.1 | III | 2 |
| 1163 | GCA_000983505.1 | 54388 | 28901 | Salmonella enterica subsp. enterica serovar Paratyphi A | | Proteobacteria | CCSN01000001.1 | III | 2 |
| 1164 | GCA_000983535.1 | 54388 | 28901 | Salmonella enterica subsp. enterica serovar Paratyphi A | | Proteobacteria | CCVL01000001.1 | III | 2 |
| 1165 | GCA_000983565.1 | 54388 | 28901 | Salmonella enterica subsp. enterica serovar Paratyphi A | | Proteobacteria | CCUC01000004.1 | III | 2 |
| 1166 | GCA_000983595.1 | 54388 | 28901 | Salmonella enterica subsp. enterica serovar Paratyphi A | | Proteobacteria | CCNT01000003.1 | III | 2 |
| 1167 | GCA_000983625.1 | 54388 | 28901 | Salmonella enterica subsp. enterica serovar Paratyphi A | | Proteobacteria | CCUP01000001.1 | III | 2 |
| 1168 | GCA_000983645.1 | 54388 | 28901 | Salmonella enterica subsp. enterica serovar Paratyphi A | | Proteobacteria | CCLA01000004.1 | III | 2 |
| 1169 | GCA_000983685.1 | 54388 | 28901 | Salmonella enterica subsp. enterica serovar Paratyphi A | | Proteobacteria | CCLI01000001.1 | III | 2 |
| 1170 | GCA_000983705.1 | 54388 | 28901 | Salmonella enterica subsp. enterica serovar Paratyphi A | | Proteobacteria | CCKR01000004.1 | III | 2 |
| 1171 | GCA_000983735.1 | 54388 | 28901 | Salmonella enterica subsp. enterica serovar Paratyphi A | | Proteobacteria | CCTA01000001.1 | III | 2 |
| 1172 | GCA_000983755.1 | 54388 | 28901 | Salmonella enterica subsp. enterica serovar Paratyphi A | | Proteobacteria | CCLQ01000001.1 | III | 2 |
| 1173 | GCA_000983775.1 | 54388 | 28901 | Salmonella enterica subsp. enterica serovar Paratyphi A | | Proteobacteria | CCSR01000004.1 | III | 2 |
| 1174 | GCA_000983795.1 | 54388 | 28901 | Salmonella enterica subsp. enterica serovar Paratyphi A | | Proteobacteria | CCKX01000001.1 | III | 2 |
| 1175 | GCA_000983835.1 | 54388 | 28901 | Salmonella enterica subsp. enterica serovar Paratyphi A | | Proteobacteria | CCLZ01000001.1 | III | 2 |
| 1176 | GCA_000983855.1 | 54388 | 28901 | Salmonella enterica subsp. enterica serovar Paratyphi A | | Proteobacteria | CCUI01000001.1 | III | 2 |
| 1177 | GCA_000983875.1 | 54388 | 28901 | Salmonella enterica subsp. enterica serovar Paratyphi A | | Proteobacteria | CCTL01000001.1 | III | 2 |
| 1178 | GCA_000983895.1 | 54388 | 28901 | Salmonella enterica subsp. enterica serovar Paratyphi A | | Proteobacteria | CCUH01000001.1 | III | 2 |
| 1179 | GCA_000983915.1 | 54388 | 28901 | Salmonella enterica subsp. enterica serovar Paratyphi A | | Proteobacteria | CCUJ01000001.1 | III | 2 |
| 1180 | GCA_000983935.1 | 54388 | 28901 | Salmonella enterica subsp. enterica serovar Paratyphi A | | Proteobacteria | CCUV01000001.1 | III | 2 |
| 1181 | GCA_000983955.1 | 54388 | 28901 | Salmonella enterica subsp. enterica serovar Paratyphi A | | Proteobacteria | CCUM01000001.1 | III | 2 |
| 1182 | GCA_000983975.1 | 54388 | 28901 | Salmonella enterica subsp. enterica serovar Paratyphi A | | Proteobacteria | CCLM01000001.1 | III | 2 |
| 1183 | GCA_000983995.1 | 54388 | 28901 | Salmonella enterica subsp. enterica serovar Paratyphi A | | Proteobacteria | CCMD01000001.1 | III | 2 |
| 1184 | GCA_000984025.1 | 54388 | 28901 | Salmonella enterica subsp. enterica serovar Paratyphi A | | Proteobacteria | CCTI01000001.1 | III | 2 |
| 1185 | GCA_000984045.1 | 54388 | 28901 | Salmonella enterica subsp. enterica serovar Paratyphi A | | Proteobacteria | CCVG01000001.1 | III | 2 |
| 1186 | GCA_000984075.1 | 54388 | 28901 | Salmonella enterica subsp. enterica serovar Paratyphi A | | Proteobacteria | CCSV01000001.1 | III | 2 |
| 1187 | GCA_000984095.1 | 54388 | 28901 | Salmonella enterica subsp. enterica serovar Paratyphi A | | Proteobacteria | CCLX01000001.1 | III | 2 |
| 1188 | GCA_000984115.1 | 54388 | 28901 | Salmonella enterica subsp. enterica serovar Paratyphi A | | Proteobacteria | CCUD01000001.1 | III | 2 |
| 1189 | GCA_000984135.1 | 54388 | 28901 | Salmonella enterica subsp. enterica serovar Paratyphi A | | Proteobacteria | CCUX01000001.1 | III | 2 |
| 1190 | GCA_000984175.1 | 54388 | 28901 | Salmonella enterica subsp. enterica serovar Paratyphi A | | Proteobacteria | CCTZ01000003.1 | III | 2 |
| 1191 | GCA_000984195.1 | 54388 | 28901 | Salmonella enterica subsp. enterica serovar Paratyphi A | | Proteobacteria | CCML01000001.1 | III | 2 |
| 1192 | GCA_000984215.1 | 54388 | 28901 | Salmonella enterica subsp. enterica serovar Paratyphi A | | Proteobacteria | CCTN01000001.1 | III | 2 |
| 1193 | GCA_000984235.1 | 54388 | 28901 | Salmonella enterica subsp. enterica serovar Paratyphi A | | Proteobacteria | CCUB01000001.1 | III | 2 |
| 1194 | GCA_000984255.1 | 54388 | 28901 | Salmonella enterica subsp. enterica serovar Paratyphi A | | Proteobacteria | CCUR01000001.1 | III | 2 |
| 1195 | GCA_000984275.1 | 54388 | 28901 | Salmonella enterica subsp. enterica serovar Paratyphi A | | Proteobacteria | CCVD01000005.1 | III | 2 |
| 1196 | GCA_000984295.1 | 54388 | 28901 | Salmonella enterica subsp. enterica serovar Paratyphi A | | Proteobacteria | CCKT01000001.1 | III | 2 |
| 1197 | GCA_000984315.1 | 54388 | 28901 | Salmonella enterica subsp. enterica serovar Paratyphi A | | Proteobacteria | CCUO01000002.1 | III | 2 |
| 1198 | GCA_000984335.1 | 54388 | 28901 | Salmonella enterica subsp. enterica serovar Paratyphi A | | Proteobacteria | CCME01000001.1 | III | 2 |
| 1199 | GCA_000984355.1 | 54388 | 28901 | Salmonella enterica subsp. enterica serovar Paratyphi A | | Proteobacteria | CCVJ01000005.1 | III | 2 |
| 1200 | GCA_000984375.1 | 54388 | 28901 | Salmonella enterica subsp. enterica serovar Paratyphi A | | Proteobacteria | CCSY01000004.1 | III | 2 |
| 1201 | GCA_000984395.1 | 54388 | 28901 | Salmonella enterica subsp. enterica serovar Paratyphi A | | Proteobacteria | CCUU01000001.1 | III | 2 |
| 1202 | GCA_000984415.1 | 54388 | 28901 | Salmonella enterica subsp. enterica serovar Paratyphi A | | Proteobacteria | CCMA01000001.1 | III | 2 |
| 1203 | GCA_000984435.1 | 54388 | 28901 | Salmonella enterica subsp. enterica serovar Paratyphi A | | Proteobacteria | CCSU01000001.1 | III | 2 |
| 1204 | GCA_000984455.1 | 54388 | 28901 | Salmonella enterica subsp. enterica serovar Paratyphi A | | Proteobacteria | CCKS01000001.1 | III | 2 |
| 1205 | GCA_000984475.1 | 54388 | 28901 | Salmonella enterica subsp. enterica serovar Paratyphi A | | Proteobacteria | CCVF01000001.1 | III | 2 |
| 1206 | GCA_000984495.1 | 54388 | 28901 | Salmonella enterica subsp. enterica serovar Paratyphi A | | Proteobacteria | CCST01000001.1 | III | 2 |
| 1207 | GCA_000984515.1 | 54388 | 28901 | Salmonella enterica subsp. enterica serovar Paratyphi A | | Proteobacteria | CCKU01000001.1 | III | 2 |
| 1208 | GCA_000984535.1 | 54388 | 28901 | Salmonella enterica subsp. enterica serovar Paratyphi A | | Proteobacteria | CCUL01000001.1 | III | 2 |
| 1209 | GCA_000984555.1 | 54388 | 28901 | Salmonella enterica subsp. enterica serovar Paratyphi A | | Proteobacteria | CCKY01000002.1 | III | 2 |
| 1210 | GCA_000984575.1 | 54388 | 28901 | Salmonella enterica subsp. enterica serovar Paratyphi A | | Proteobacteria | CCUG01000001.1 | III | 2 |
| 1211 | GCA_000984595.1 | 54388 | 28901 | Salmonella enterica subsp. enterica serovar Paratyphi A | | Proteobacteria | CCLG01000001.1 | III | 2 |
| 1212 | GCA_000984615.1 | 54388 | 28901 | Salmonella enterica subsp. enterica serovar Paratyphi A | | Proteobacteria | CCLO01000005.1 | III | 2 |
| 1213 | GCA_000984635.1 | 54388 | 28901 | Salmonella enterica subsp. enterica serovar Paratyphi A | | Proteobacteria | CCTM01000001.1 | III | 2 |
| 1214 | GCA_000984655.1 | 54388 | 28901 | Salmonella enterica subsp. enterica serovar Paratyphi A | | Proteobacteria | CCKZ01000001.1 | III | 2 |
| 1215 | GCA_000984675.1 | 54388 | 28901 | Salmonella enterica subsp. enterica serovar Paratyphi A | | Proteobacteria | CCTJ01000001.1 | III | 2 |
| 1216 | GCA_000984695.1 | 54388 | 28901 | Salmonella enterica subsp. enterica serovar Paratyphi A | | Proteobacteria | CCSW01000001.1 | III | 2 |
| 1217 | GCA_000984715.1 | 54388 | 28901 | Salmonella enterica subsp. enterica serovar Paratyphi A | | Proteobacteria | CCVH01000001.1 | III | 2 |
| 1218 | GCA_000984735.1 | 54388 | 28901 | Salmonella enterica subsp. enterica serovar Paratyphi A | | Proteobacteria | CCKW01000001.1 | III | 2 |
| 1219 | GCA_000984755.1 | 54388 | 28901 | Salmonella enterica subsp. enterica serovar Paratyphi A | | Proteobacteria | CCTE01000001.1 | III | 2 |
| 1220 | GCA_000984795.1 | 54388 | 28901 | Salmonella enterica subsp. enterica serovar Paratyphi A | | Proteobacteria | CCLJ01000001.1 | III | 2 |
| 1221 | GCA_000984815.1 | 54388 | 28901 | Salmonella enterica subsp. enterica serovar Paratyphi A | | Proteobacteria | CCSX01000002.1 | III | 2 |
| 1222 | GCA_000984835.1 | 54388 | 28901 | Salmonella enterica subsp. enterica serovar Paratyphi A | | Proteobacteria | CCTW01000001.1 | III | 2 |
| 1223 | GCA_000984855.1 | 54388 | 28901 | Salmonella enterica subsp. enterica serovar Paratyphi A | | Proteobacteria | CCLU01000001.1 | III | 2 |
| 1224 | GCA_000984875.1 | 54388 | 28901 | Salmonella enterica subsp. enterica serovar Paratyphi A | | Proteobacteria | CCTK01000001.1 | III | 2 |
| 1225 | GCA_000984895.1 | 54388 | 28901 | Salmonella enterica subsp. enterica serovar Paratyphi A | | Proteobacteria | CCNU01000001.1 | III | 2 |
| 1226 | GCA_000984915.1 | 54388 | 28901 | Salmonella enterica subsp. enterica serovar Paratyphi A | | Proteobacteria | CCNV01000001.1 | III | 2 |
| 1227 | GCA_000984935.1 | 54388 | 28901 | Salmonella enterica subsp. enterica serovar Paratyphi A | | Proteobacteria | CCLW01000001.1 | III | 2 |
| 1228 | GCA_000984955.1 | 54388 | 28901 | Salmonella enterica subsp. enterica serovar Paratyphi A | | Proteobacteria | CCLY01000001.1 | III | 2 |
| 1229 | GCA_000984975.1 | 54388 | 28901 | Salmonella enterica subsp. enterica serovar Paratyphi A | | Proteobacteria | CCLL01000004.1 | III | 2 |
| 1230 | GCA_000984995.1 | 54388 | 28901 | Salmonella enterica subsp. enterica serovar Paratyphi A | | Proteobacteria | CCSM01000001.1 | III | 2 |
| 1231 | GCA_000985015.1 | 54388 | 28901 | Salmonella enterica subsp. enterica serovar Paratyphi A | | Proteobacteria | CCUF01000001.1 | III | 2 |
| 1232 | GCA_000985035.1 | 54388 | 28901 | Salmonella enterica subsp. enterica serovar Paratyphi A | | Proteobacteria | CCLT01000001.1 | III | 2 |
| 1233 | GCA_000985055.1 | 54388 | 28901 | Salmonella enterica subsp. enterica serovar Paratyphi A | | Proteobacteria | CCMC01000001.1 | III | 2 |
| 1234 | GCA_000985075.1 | 54388 | 28901 | Salmonella enterica subsp. enterica serovar Paratyphi A | | Proteobacteria | CCUZ01000001.1 | III | 2 |
| 1235 | GCA_000985095.1 | 54388 | 28901 | Salmonella enterica subsp. enterica serovar Paratyphi A | | Proteobacteria | CCLF01000001.1 | III | 2 |
| 1236 | GCA_000985115.1 | 54388 | 28901 | Salmonella enterica subsp. enterica serovar Paratyphi A | | Proteobacteria | CCTU01000001.1 | III | 2 |
| 1237 | GCA_000985135.1 | 54388 | 28901 | Salmonella enterica subsp. enterica serovar Paratyphi A | | Proteobacteria | CCUN01000001.1 | III | 2 |
| 1238 | GCA_000985155.1 | 54388 | 28901 | Salmonella enterica subsp. enterica serovar Paratyphi A | | Proteobacteria | CCLE01000001.1 | III | 2 |
| 1239 | GCA_000985175.1 | 54388 | 28901 | Salmonella enterica subsp. enterica serovar Paratyphi A | | Proteobacteria | CCTR01000001.1 | III | 2 |
| 1240 | GCA_000985195.1 | 54388 | 28901 | Salmonella enterica subsp. enterica serovar Paratyphi A | | Proteobacteria | CCUW01000001.1 | III | 2 |
| 1241 | GCA_000985215.1 | 54388 | 28901 | Salmonella enterica subsp. enterica serovar Paratyphi A | | Proteobacteria | CCLP01000001.1 | III | 2 |
| 1242 | GCA_000985235.1 | 54388 | 28901 | Salmonella enterica subsp. enterica serovar Paratyphi A | | Proteobacteria | CCLK01000001.1 | III | 2 |
| 1243 | GCA_000985255.1 | 54388 | 28901 | Salmonella enterica subsp. enterica serovar Paratyphi A | | Proteobacteria | CCSS01000001.1 | III | 2 |
| 1244 | GCA_000985275.1 | 54388 | 28901 | Salmonella enterica subsp. enterica serovar Paratyphi A | | Proteobacteria | CCSO01000001.1 | III | 2 |
| 1245 | GCA_000985295.1 | 54388 | 28901 | Salmonella enterica subsp. enterica serovar Paratyphi A | | Proteobacteria | CCUT01000001.1 | III | 2 |
| 1246 | GCA_000985315.1 | 54388 | 28901 | Salmonella enterica subsp. enterica serovar Paratyphi A | | Proteobacteria | CCTQ01000001.1 | III | 2 |
| 1247 | GCA_000985335.1 | 54388 | 28901 | Salmonella enterica subsp. enterica serovar Paratyphi A | | Proteobacteria | CCVC01000001.1 | III | 2 |
| 1248 | GCA_000985355.1 | 54388 | 28901 | Salmonella enterica subsp. enterica serovar Paratyphi A | | Proteobacteria | CCVE01000001.1 | III | 2 |
| 1249 | GCA_000985375.1 | 54388 | 28901 | Salmonella enterica subsp. enterica serovar Paratyphi A | | Proteobacteria | CCTG01000001.1 | III | 2 |
| 1250 | GCA_000985395.1 | 54388 | 28901 | Salmonella enterica subsp. enterica serovar Paratyphi A | | Proteobacteria | CCSL01000001.1 | III | 2 |
| 1251 | GCA_000985415.1 | 54388 | 28901 | Salmonella enterica subsp. enterica serovar Paratyphi A | | Proteobacteria | CCVB01000003.1 | III | 2 |
| 1252 | GCA_000985435.1 | 54388 | 28901 | Salmonella enterica subsp. enterica serovar Paratyphi A | | Proteobacteria | CCUA01000001.1 | III | 2 |
| 1253 | GCA_000985455.1 | 54388 | 28901 | Salmonella enterica subsp. enterica serovar Paratyphi A | | Proteobacteria | CCNX01000001.1 | III | 2 |
| 1254 | GCA_000985475.1 | 54388 | 28901 | Salmonella enterica subsp. enterica serovar Paratyphi A | | Proteobacteria | CCSZ01000004.1 | III | 2 |
| 1255 | GCA_000985495.1 | 54388 | 28901 | Salmonella enterica subsp. enterica serovar Paratyphi A | | Proteobacteria | CCTD01000002.1 | III | 2 |
| 1256 | GCA_000985515.1 | 54388 | 28901 | Salmonella enterica subsp. enterica serovar Paratyphi A | | Proteobacteria | CCVI01000001.1 | III | 2 |
| 1257 | GCA_000985535.1 | 54388 | 28901 | Salmonella enterica subsp. enterica serovar Paratyphi A | | Proteobacteria | CCUK01000001.1 | III | 2 |
| 1258 | GCA_000985555.1 | 54388 | 28901 | Salmonella enterica subsp. enterica serovar Paratyphi A | | Proteobacteria | CCTX01000003.1 | III | 2 |
| 1259 | GCA_000985575.1 | 54388 | 28901 | Salmonella enterica subsp. enterica serovar Paratyphi A | | Proteobacteria | CCTF01000001.1 | III | 2 |
| 1260 | GCA_000985595.1 | 54388 | 28901 | Salmonella enterica subsp. enterica serovar Paratyphi A | | Proteobacteria | CCUQ01000001.1 | III | 2 |
| 1261 | GCA_000985615.1 | 54388 | 28901 | Salmonella enterica subsp. enterica serovar Paratyphi A | | Proteobacteria | CCMF01000001.1 | III | 2 |
| 1262 | GCA_000985655.1 | 54388 | 28901 | Salmonella enterica subsp. enterica serovar Paratyphi A | | Proteobacteria | CCTY01000001.1 | III | 2 |
| 1263 | GCA_000985675.1 | 54388 | 28901 | Salmonella enterica subsp. enterica serovar Paratyphi A | | Proteobacteria | CCKV01000001.1 | III | 2 |
| 1264 | GCA_000985695.1 | 54388 | 28901 | Salmonella enterica subsp. enterica serovar Paratyphi A | | Proteobacteria | CCTV01000001.1 | III | 2 |
| 1265 | GCA_000985715.1 | 54388 | 28901 | Salmonella enterica subsp. enterica serovar Paratyphi A | | Proteobacteria | CCVK01000001.1 | III | 2 |
| 1266 | GCA_000985735.1 | 54388 | 28901 | Salmonella enterica subsp. enterica serovar Paratyphi A | | Proteobacteria | CCMB01000001.1 | III | 2 |
| 1267 | GCA_000985755.1 | 54388 | 28901 | Salmonella enterica subsp. enterica serovar Paratyphi A | | Proteobacteria | CCLH01000001.1 | III | 2 |
| 1268 | GCA_000985775.1 | 54388 | 28901 | Salmonella enterica subsp. enterica serovar Paratyphi A | | Proteobacteria | CCSQ01000001.1 | III | 2 |
| 1269 | GCA_000985795.1 | 54388 | 28901 | Salmonella enterica subsp. enterica serovar Paratyphi A | | Proteobacteria | CCTH01000001.1 | III | 2 |
| 1270 | GCA_000985815.1 | 54388 | 28901 | Salmonella enterica subsp. enterica serovar Paratyphi A | | Proteobacteria | CCSK01000001.1 | III | 2 |
| 1271 | GCA_000985835.1 | 54388 | 28901 | Salmonella enterica subsp. enterica serovar Paratyphi A | | Proteobacteria | CCNW01000001.1 | III | 2 |
| 1272 | GCA_000985855.1 | 54388 | 28901 | Salmonella enterica subsp. enterica serovar Paratyphi A | | Proteobacteria | CCTB01000001.1 | III | 2 |
| 1273 | GCA_001045395.1 | 54388 | 28901 | Salmonella enterica subsp. enterica serovar Paratyphi A | CMCC50093 | Proteobacteria | CP011967.1 | III | 2 |
| 1274 | GCA_000026565.1 | 554290 | 28901 | Salmonella enterica subsp. enterica serovar Paratyphi A str. | AKU12601 | Proteobacteria | FM200053.1 | III | 2 |
| | | | | AKU_12601 | | | | | |
| 1275 | GCA_000486725.1 | 941189 | 28901 | Salmonella enterica subsp. enterica serovar Paratyphi A str. | ATCC 11511 | Proteobacteria | AOYH01000034.1 | III | 2 |
| | | | | ATCC 11511 | | | | | |
| 1276 | GCA_000011885.1 | 295319 | 28901 | Salmonella enterica subsp. enterica serovar Paratyphi A str. | ATCC 9150 | Proteobacteria | CP000026.1 | III | 2 |
| | | | | ATCC 9150 | | | | | |
| 1277 | GCA_000411815.1 | 1072568 | 28901 | Salmonella enterica subsp. enterica serovar Paratyphi A str. | GXS2268 | Proteobacteria | AFYX01000025.1 | III | 2 |
| | | | | GXS2268 | | | | | |
| 1278 | GCA_000411795.1 | 1072569 | 28901 | Salmonella enterica subsp. enterica serovar Paratyphi A str. | GZ9A00052 | Proteobacteria | AFYW01000030.1 | III | 2 |
| | | | | GZ9A00052 | | | | | |
| 1279 | GCA_000411835.1 | 1072570 | 28901 | Salmonella enterica subsp. enterica serovar Paratyphi A str. JX05- | JX05-19 | Proteobacteria | AFYY01000027.1 | III | 2 |
| | | | | 19 | | | | | |
| 1280 | GCA_001448825.1 | 1243588 | 28901 | Salmonella enterica subsp. enterica serovar Paratyphi A str. | SA19950809 | Proteobacteria | LHTE01000005.1 | III | 2 |
| | | | | SA19950809 | | | | | |
| 1281 | GCA_000335835.1 | 687914 | 28901 | Salmonella enterica subsp. enterica serovar Rissen str. 150 | 150 | Proteobacteria | AHUI01000053.1 | III | 2 |
| 1282 | GCA_000231685.2 | 913082 | 28901 | Salmonella enterica subsp. enterica serovar Senftenberg str. A4- | A4-543 | Proteobacteria | AFCU01002067.1 | III | 2 |
| | | | | 543 | | | | | |
| 1283 | GCA_000486525.1 | 930772 | 28901 | Salmonella enterica subsp. enterica serovar Senftenberg str. | ATCC 43845 | Proteobacteria | AOXX01000100.1 | III | 2 |
| | | | | ATCC 43845 | | | | | |
| 1284 | GCA_001409135.1 | 57743 | 28901 | Salmonella enterica subsp. enterica serovar Weltevreden | 2511STDY5462388 | Proteobacteria | LN890518.1 | III | 2 |
| 1285 | GCA_001409155.1 | 57743 | 28901 | Salmonella enterica subsp. enterica serovar Weltevreden | 2511STDY5712384 | Proteobacteria | LN890522.1 | III | 2 |
| 1286 | GCA_001409175.1 | 57743 | 28901 | Salmonella enterica subsp. enterica serovar Weltevreden | 2511STDY5712385 | Proteobacteria | LN890524.1 | III | 2 |
| 1287 | GCA_001409195.1 | 57743 | 28901 | Salmonella enterica subsp. enterica serovar Weltevreden | 2511STDY5462413 | Proteobacteria | LN890520.1 | III | 2 |
| 1288 | GCA_000230505.1 | 936157 | 28901 | Salmonella enterica subsp. enterica serovar Weltevreden str. | 2007-60-3289-1 | Proteobacteria | FR775224.1 | III | 2 |
| | | | | 2007-60-3289-1 | | | | | |
| 1289 | GCA_000171495.1 | 465518 | 28901 | Salmonella enterica subsp. enterica serovar Weltevreden str. | HI_N05-537 | Proteobacteria | ABFF01000010.1 | III | 2 |
| | | | | HI_N05-537 | | | | | |
| 1290 | GCA_001241965.1 | 1160769 | 28901 | Salmonella enterica subsp. enterica serovar Worthingtor | CVM N45406 | Proteobacteria | LHGK01000019.1 | III | 2 |
| 1291 | GCA_001242245.1 | 1160769 | 28901 | Salmonella enterica subsp. enterica serovar Worthingtor | CVM N45931 | Proteobacteria | LHGV01000001.1 | III | 2 |
| 1292 | GCA_001243275.1 | 1160769 | 28901 | Salmonella enterica subsp. enterica serovar Worthingtor | CVM N46835 | Proteobacteria | LHIL01000018.1 | III | 2 |
| 1293 | GCA_001247285.1 | 1160769 | 28901 | Salmonella enterica subsp. enterica serovar Worthingtor | CVM N51304 | Proteobacteria | LHOK01000001.1 | III | 2 |
| 1294 | GCA_001479505.1 | 1160769 | 28901 | Salmonella enterica subsp. enterica serovar Worthingtor | CVM N32773 | Proteobacteria | JYWH01000045.1 | III | 2 |
| 1295 | GCA_001480165.1 | 1160769 | 28901 | Salmonella enterica subsp. enterica serovar Worthingtor | CVM N40374 | Proteobacteria | JYYI01000001.1 | III | 2 |
| 1296 | GCA_000486265.1 | 1173940 | 28901 | Salmonella enterica subsp. enterica serovar Worthington str. | ATCC 9607 | Proteobacteria | AOXK01000084.1 | III | 2 |
| | | | | ATCC 9607 | | | | | |
| 1297 | GCA_001034405.1 | 615 | 615 | Serratia marcescens | UCI88 | Proteobacteria | KQ089789.1 | III | 2 |
| 1298 | GCA_001537045.1 | 615 | 615 | Serratia marcescens | 2880STDY5682914 | Proteobacteria | FCMH01000002.1 | III | 2 |
| 1299 | GCA_001537345.1 | 615 | 615 | Serratia marcescens | 2880STDY5682872 | Proteobacteria | FCHZ01000003.1 | III | 2 |
| 1300 | GCA_000633715.1 | 1445864 | 615 | Serratia marcescens BIDMC 80 | BIDMC 80 | Proteobacteria | KK214321.1 | III | 2 |
| 1301 | GCA_000163595.1 | 667129 | 618 | Serratia odorifera DSM 4582 | DSM 4582 | Proteobacteria | GG753567.1 | III | 2 |
| 1302 | GCA_000743355.1 | 1524467 | 1524467 | Serratia sp. Ag1 | Ag1 | Proteobacteria | JQEI01000016.1 | III | 2 |
| 1303 | GCA_000743365.1 | 1532556 | 1532556 | Serratia sp. Ag2 | Ag2 | Proteobacteria | JQEJ01000056.1 | III | 2 |
| 1304 | GCA_000203935.1 | 94122 | 94122 | Shewanella sp. ANA-3 | ANA-3 | Proteobacteria | CP000469.1 | III | 2 |
| 1305 | GCA_000262305.1 | 630626 | 563 | Shimwellia blattae DSM 4481 = NBRC 105725 | DSM 4481 | Proteobacteria | CP001560.1 | III | 2 |
| 1306 | GCA_000327265.1 | 630626 | 563 | Shimwellia blattae DSM 4481 = NBRC 105725 | NBRC 105725 | Proteobacteria | BAHA01000013.1 | III | 2 |
| 1307 | GCA_000018545.1 | 394 | 380 | Sinorhizobium fredii NGR234 | NGR234 | Proteobacteria | CP001389.1 | III | 2 |
| 1308 | GCA_000067165.1 | 448385 | 56 | Sorangium cellulosum So ce56 | So ce 56 | Proteobacteria | AM746676.1 | III | 2 |
| 1309 | GCA_000421925.1 | 1346790 | 420233 | Sphingobium chinhatense IP26 | IP26 | Proteobacteria | AUDA01000025.1 | III | 2 |
| 1310 | GCA_001005725.1 | 56193 | 56193 | Sphingobium chungbukense | DJ77 | Proteobacteria | LBIC01000001.1 | III | 2 |
| 1311 | GCA_000382885.1 | 1301087 | 332056 | Sphingobium japonicum BiD32 | BiD32 | Proteobacteria | CAVK010000098.1 | III | 2 |
| 1312 | GCA_000633575.2 | 1450518 | 440518 | Sphingobium lucknowense F2 | F2 | Proteobacteria | JANF02000056.1 | III | 2 |
| 1313 | GCA_001421635.1 | 1735692 | 1735692 | Sphingomonas sp. Leaf25 | Leaf25 | Proteobacteria | LMKU01000030.1 | III | 2 |
| 1314 | GCA_001399755.1 | 381306 | 381306 | Thiohalorhabdus denitrificans | HL 19 | Proteobacteria | LJCP01000010.1 | III | 2 |
| 1315 | GCA_001425205.1 | 1736530 | 1736530 | Variovorax sp. Root411 | Root411 | Proteobacteria | LMDW01000005.1 | III | 2 |
| 1316 | GCA_001010935.1 | 663 | 663 | Vibrio alginolyticus | V2 | Proteobacteria | LCSG01000013.1 | III | 2 |
| 1317 | GCA_000154025.1 | 410291 | 680 | Vibrio campbellii HY01 | HY01 | Proteobacteria | DS179487.1 | III | 2 |
| 1318 | GCA_000785575.1 | 701175 | 701175 | Vibrio caribbeanicus | T14 | Proteobacteria | JRWR01000004.1 | III | 2 |
| 1319 | GCA_000736945.1 | 666 | 666 | Vibrio cholerae | 571-88 | Proteobacteria | JIDO01000026.1 | III | 2 |
| 1320 | GCA_000737005.1 | 666 | 666 | Vibrio cholerae | 234-93 | Proteobacteria | JMBO01000023.1 | III | 2 |
| 1321 | GCA_000279285.1 | 991946 | 666 | Vibrio cholerae HE-45 | HE-45 | Proteobacteria | ALED01000027.1 | III | 2 |
| 1322 | GCA_000348345.2 | 1095649 | 666 | Vibrio cholerae O1 str. EM-1676A | EM-1676A | Proteobacteria | KB662755.1 | III | 2 |
| 1323 | GCA_000152465.2 | 345075 | 666 | Vibrio cholerae V51 | V51 | Proteobacteria | KQ257379.1 | III | 2 |
| 1324 | GCA_000467185.1 | 1219080 | 252583 | Vibrio ezurae NBRC 102218 | NBRC 102218 | Proteobacteria | BATM01000020.1 | III | 2 |
| 1325 | GCA_001262735.1 | 669 | 669 | Vibrio harveyi | VH2 | Proteobacteria | LGYS01000041.1 | III | 2 |
| 1326 | GCA_000786865.1 | 670 | 670 | Vibrio parahaemolyticus | 09.5357 | Proteobacteria | JTGT01000603.1 | III | 2 |
| 1327 | GCA_001270155.1 | 670 | 670 | Vibrio parahaemolyticus | S439-9 | Proteobacteria | LFZA01000109.1 | III | 2 |
| 1328 | GCA_000808535.1 | 379097 | 379097 | Vibrio sinaloensis | AD048 | Proteobacteria | JWLV01000045.1 | III | 2 |
| 1329 | GCA_001597935.1 | 1763885 | 1763885 | Vibrio sp. 2538-88 | 2538-88 | Proteobacteria | LOBR01000072.1 | III | 2 |
| 1330 | GCA_000305755.2 | 992012 | 992012 | Vibrio sp. HENC-03 | HENC-03 | Proteobacteria | JH976122.1 | III | 2 |
| 1331 | GCA_001048635.1 | 1507980 | 1507980 | Vibrio sp. J2-31 | J2-31 | Proteobacteria | CCKO01000056.1 | III | 2 |
| 1332 | GCA_000091465.1 | 575788 | 212663 | Vibrio tasmaniensis LGP32 | LGP32 | Proteobacteria | FM954972.2 | III | 2 |
| 1333 | GCA_001541335.1 | 1194427 | 1194427 | Vibrio toranzoniae | Vb 10.8 | Proteobacteria | LMXU01000013.1 | III | 2 |
| 1334 | GCA_001274855.1 | 170661 | 170661 | Vibrio xuii | DSM 17185 | Proteobacteria | LHPK01000025.1 | III | 2 |
| 1335 | GCA_001131685.1 | 634 | 634 | Yersinia bercovieri | 127/84 | Proteobacteria | CQBU01000002.1 | III | 2 |
| 1336 | GCA_001219605.1 | 630 | 630 | Yersinia enterocolitica | YE04/02 | Proteobacteria | CTKX01000003.1 | III | 2 |
| 1337 | GCA_001220145.1 | 630 | 630 | Yersinia enterocolitica | YE38/03 | Proteobacteria | CTKL01000007.1 | III | 2 |
| 1338 | GCA_001319585.1 | 29484 | 29484 | Yersinia frederiksenii | 38/83 | Proteobacteria | CGCC01000006.1 | III | 2 |
| 1339 | GCA_001142305.1 | 419257 | 419257 | Yersinia massiliensis | 24070 | Proteobacteria | CQBH01000001.1 | III | 2 |
| 1340 | GCA_001319885.1 | 633 | 633 | Yersinia pseudotuberculosis | OK6088 | Proteobacteria | CGGM01000007.1 | III | 2 |
| 1341 | GCA_000737165.1 | 29486 | 29486 | Yersinia ruckeri | 37551 | Proteobacteria | JPF001000008.1 | III | 2 |
| 1342 | GCA_000964565.1 | 29486 | 29486 | Yersinia ruckeri | Big Creek 74 | Proteobacteria | CP011078.1 | III | 2 |
| 1343 | GCA_000239335.1 | 1002368 | 158877 | Yokenella regensburgei ATCC 43003 | ATCC 43003 | Proteobacteria | JH417862.1 | III | 2 |

(Part B)

| | | | | M | | | | Q | | | | U | | | |
|---|---|---|---|---|---|---|---|---|---|---|---|---|---|---|---|
| | | | | DruA | | | | DruB | | | | DruC | | | |
| | J | K | L | protein | N | O | P | protein | R | S | T | protein | V | W | X |
| | DruA | PRT SEQ | DNA SEQ | length | DruB | PRT SEQ | DNA SEQ | length | DruC | PRT SEQ | DNA SEQ | length | DruD | PRT SEQ | DNA SEQ |
| 1 | protein_accession | ID NO: | ID NO: | (aa) | protein_accession | ID NO: | ID NO: | (aa) | protein_accession | ID NO: | ID NO: | (aa) | protein_accession | ID NO: | ID NO: |
| 2 | | | | | CEP95570.1 | 23934 | 27163 | 531 | CEP95571.1 | 23935 | 27164 | 669 | CEP95572.1 | 23936 | 27165 |
| 3 | KUO96130.1 | 23938 | 27167 | 411 | KUO96131.1 | 23939 | 27168 | 468 | KUO96132.1 | 23940 | 27169 | 604 | KUO96133.1 | 23941 | 27170 |
| 4 | | | | | GAC90451.1 | 23943 | 27172 | 504 | GAC90452.1 | 23944 | 27173 | 659 | GAC90453.1 | 23945 | 27174 |
| 5 | KQT61309.1 | 23947 | 27176 | 678 | | | | | | | | | KQT61312.1 | 23948 | 27177 |
| 6 | KQT62611.1 | 23950 | 27179 | 678 | | | | | | | | | KQT62614.1 | 23951 | 27180 |
| 7 | | | | | KMN72587.1 | 23953 | 27182 | 502 | KMN72586.1 | 23954 | 27183 | 662 | KMN72585.1 | 23955 | 27184 |
| 8 | | | | | EJQ91443.1 | 23957 | 27186 | 502 | EJQ91444.1 | 23958 | 27187 | 662 | EJQ91445.1 | 23959 | 27188 |
| 9 | | | | | CRK83009.1 | 23961 | 27190 | 481 | CRK83010.1 | 23962 | 27191 | 640 | CRK83011.1 | 23963 | 27192 |
| 10 | | | | | KEF29420.1 | 23965 | 27194 | 519 | | | | | KEF29418.1 | 23966 | 27195 |
| 11 | | | | | ETO96271.1 | 23968 | 27197 | 513 | | | | | ETO96375.1 | 23969 | 27198 |
| 12 | ALK08980.1 | 23971 | 27200 | 418 | | | | | | | | | ALK08978.1 | 23972 | 27201 |
| 13 | CUU41641.1 | 23974 | 27203 | 418 | | | | | | | | | CUU41639.1 | 23975 | 27204 |
| 14 | KGC93367.1 | 23977 | 27206 | 400 | KGC93228.1 | 23978 | 27207 | 505 | KGC93290.1 | 23979 | 27208 | 854 | KGC93264.1 | 23980 | 27209 |
| 15 | KGV74617.1 | 23982 | 27211 | 405 | | | | | | | | | KGV74230.1 | 23983 | 27212 |
| 16 | EDO89776.1 | 23985 | 27214 | 400 | EDO89775.1 | 23986 | 27215 | 523 | EDO89774.1 | 23987 | 27216 | 858 | | | |
| 17 | AJX60919.1 | 23989 | 27218 | 400 | AJX61068.1 | 23990 | 27219 | 457 | AJX59269.1 | 23991 | 27220 | 858 | AJX59244.1 | 23992 | 27221 |
| 18 | AIP62558.1 | 23994 | 27223 | 400 | AJT48645.1 | 23995 | 27224 | 211 | | | | | | | |
| 19 | KVO65551.1 | 23997 | 27226 | 400 | KVO65550.1 | 23998 | 27227 | 211 | KVO65549.1 | 23999 | 27228 | 841 | | | |
| 20 | KVO87083.1 | 24001 | 27230 | 400 | KVO87084.1 | 24002 | 27231 | 211 | | | | | | | |
| 21 | CDI04329.1 | 24004 | 27233 | 401 | | | | | | | | | CDI04327.1 | 24005 | 27234 |
| 22 | | | | | KPA09471.1 | 24007 | 27236 | 522 | KPA09470.1 | 24008 | 27237 | 594 | KPA09469.1 | 24009 | 27238 |
| 23 | | | | | | | | | KHD06506.1 | 24011 | 27240 | 632 | KHD06507.1 | 24012 | 27241 |
| 24 | KJH65670.1 | 24014 | 27243 | 409 | KJH65671.1 | 24015 | 27244 | 555 | KJH65672.1 | 24016 | 27245 | 623 | KJH65673.1 | 24017 | 27246 |
| 25 | | | | | CDM70052.1 | 24019 | 27248 | 531 | CDM70054.1 | 24020 | 27249 | 299 | CDM70055.1 | 24021 | 27250 |
| 26 | | | | | | | | | KEI16341.1 | 24023 | 27252 | 674 | KEI16342.1 | 24024 | 27253 |
| 27 | | | | | EGB92907.1 | 24026 | 27255 | 478 | EGB92908.1 | 24027 | 27256 | 483 | EGB92909.1 | 24028 | 27257 |
| 28 | | | | | ACL18694.1 | 24030 | 27259 | 479 | | | | | ACL18696.1 | 24031 | 27260 |
| 29 | | | | | ACV64027.1 | 24033 | 27262 | 480 | | | | | ACV64029.1 | 24034 | 27263 |
| 30 | | | | | AMC93642.1 | 24036 | 27265 | 481 | | | | | AMC93640.1 | 24037 | 27266 |
| 31 | KHG78165.1 | 24039 | 27268 | 404 | KHG78164.1 | 24040 | 27269 | 548 | KHG78163.1 | 24041 | 27270 | 627 | KHG78162.1 | 24042 | 27271 |
| 32 | KHI73843.1 | 24044 | 27273 | 404 | KHI73842.1 | 24045 | 27274 | 548 | KHI73841.1 | 24046 | 27275 | 627 | KHI73840.1 | 24047 | 27276 |
| 33 | | | | | | | | | KHI66626.1 | 24049 | 27278 | 398 | KHI66627.1 | 24050 | 27279 |
| 34 | KHI48864.1 | 24052 | 27281 | 404 | KHI48865.1 | 24053 | 27282 | 548 | KHI48866.1 | 24054 | 27283 | 627 | KHI48867.1 | 24055 | 27284 |
| 35 | KHI24189.1 | 24057 | 27286 | 404 | | | | | KHI24188.1 | 24058 | 27287 | 627 | KHI24187.1 | 24059 | 27288 |
| 36 | KMV42884.1 | 24061 | 27290 | 404 | KMV42883.1 | 24062 | 27291 | 548 | KMV42882.1 | 24063 | 27292 | 627 | KMV42881.1 | 24064 | 27293 |
| 37 | KQJ50747.1 | 24066 | 27295 | 404 | KQJ50746.1 | 24067 | 27296 | 548 | KQJ50745.1 | 24068 | 27297 | 627 | KQJ50744.1 | 24069 | 27298 |
| 38 | ALN47010.1 | 24071 | 27300 | 404 | ALN47011.1 | 24072 | 27301 | 548 | ALN47012.1 | 24073 | 27302 | 627 | ALN47013.1 | 24074 | 27303 |
| 39 | KSY14484.1 | 24076 | 27305 | 404 | KSY14483.1 | 24077 | 27306 | 548 | KSY14482.1 | 24078 | 27307 | 627 | KSY14481.1 | 24079 | 27308 |
| 40 | KXR68579.1 | 24081 | 27310 | 404 | KXR68578.1 | 24082 | 27311 | 548 | KXR68577.1 | 24083 | 27312 | 627 | KXR68576.1 | 24084 | 27313 |
| 41 | KIO85517.1 | 24086 | 27315 | 404 | KIO85917.1 | 24087 | 27316 | 548 | KIO85687.1 | 24088 | 27317 | 627 | KIO84333.1 | 24089 | 27318 |
| 42 | EQS48043.1 | 24091 | 27320 | 404 | EQS48044.1 | 24092 | 27321 | 548 | EQS48045.1 | 24093 | 27322 | 627 | EQS48046.1 | 24094 | 27323 |
| 43 | EQO85266.1 | 24096 | 27325 | 404 | EQO85267.1 | 24097 | 27326 | 548 | EQO85268.1 | 24098 | 27327 | 627 | EQO85269.1 | 24099 | 27328 |
| 44 | EQO74905.1 | 24101 | 27330 | 404 | EQO74906.1 | 24102 | 27331 | 548 | EQO74907.1 | 24103 | 27332 | 627 | EQO74908.1 | 24104 | 27333 |
| 45 | EYT06138.1 | 24106 | 27335 | 404 | EYT06139.1 | 24107 | 27336 | 548 | EYT06140.1 | 24108 | 27337 | 627 | EYT06141.1 | 24109 | 27338 |
| 46 | EQV41654.1 | 24111 | 27340 | 404 | EQV41653.1 | 24112 | 27341 | 548 | EQV41652.1 | 24113 | 27342 | 627 | EQV41651.1 | 24114 | 27343 |
| 47 | ELC24068.1 | 24116 | 27345 | 404 | ELC24069.1 | 24117 | 27346 | 548 | ELC24070.1 | 24118 | 27347 | 627 | ELC24071.1 | 24119 | 27348 |
| 48 | ELH39084.1 | 24121 | 27350 | 404 | ELH39085.1 | 24122 | 27351 | 548 | ELH39086.1 | 24123 | 27352 | 627 | ELH39087.1 | 24124 | 27353 |
| 49 | EOV00819.1 | 24126 | 27355 | 404 | EOV00818.1 | 24127 | 27356 | 548 | EOV00817.1 | 24128 | 27357 | 627 | EOV00816.1 | 24129 | 27358 |
| 50 | EOU57734.1 | 24131 | 27360 | 404 | EOU57733.1 | 24132 | 27361 | 548 | EOU57732.1 | 24133 | 27362 | 627 | EOU57731.1 | 24134 | 27363 |
| 51 | ELE47058.1 | 24136 | 27365 | 404 | ELE47059.1 | 24137 | 27366 | 548 | ELE47060.1 | 24138 | 27367 | 627 | ELE47061.1 | 24139 | 27368 |
| 52 | ELE76866.1 | 24141 | 27370 | 404 | ELE76867.1 | 24142 | 27371 | 548 | ELE76868.1 | 24143 | 27372 | 627 | ELE76869.1 | 24144 | 27373 |
| 53 | EU64783.1 | 24146 | 27375 | 404 | ELJ64784.1 | 24147 | 27376 | 548 | ELJ64785.1 | 24148 | 27377 | 627 | ELJ64786.1 | 24149 | 27378 |
| 54 | EOV85617.1 | 24151 | 27380 | 404 | EOV85618.1 | 24152 | 27381 | 548 | EOV85619.1 | 24153 | 27382 | 627 | EOV85620.1 | 24154 | 27383 |
| 55 | ELE86430.1 | 24156 | 27385 | 404 | ELE86431.1 | 24157 | 27386 | 548 | ELE86432.1 | 24158 | 27387 | 627 | ELE86433.1 | 24159 | 27388 |
| 56 | EWY52046.1 | 24161 | 27390 | 404 | EWY52045.1 | 24162 | 27391 | 548 | EWY52044.1 | 24163 | 27392 | 627 | EWY52043.1 | 24164 | 27393 |
| 57 | EFK51863.1 | 24166 | 27395 | 404 | EFK51864.1 | 24167 | 27396 | 251 | EFK51865.1 | 24168 | 27397 | 627 | EFK51866.1 | 24169 | 27398 |
| 58 | | | | | | | | | EGU96601.1 | 24171 | 27400 | 530 | EGU96602.1 | 24172 | 27401 |
| 59 | EMZ39757.1 | 24174 | 27403 | 404 | EMZ39756.1 | 24175 | 27404 | 548 | EMZ39755.1 | 24176 | 27405 | 627 | EMZ39754.1 | 24177 | 27406 |
| 60 | | | | | EGI33548.1 | 24179 | 27408 | 548 | EGI33546.1 | 24180 | 27409 | 403 | EGI33545.1 | 24181 | 27410 |
| 61 | EQX30244.1 | 24183 | 27412 | 404 | EQX30245.1 | 24184 | 27413 | 548 | EQX30246.1 | 24185 | 27414 | 627 | EQX30247.1 | 24186 | 27415 |
| 62 | EQZ12277.1 | 24188 | 27417 | 404 | EQZ12278.1 | 24189 | 27418 | 548 | EQZ12279.1 | 24190 | 27419 | 627 | EQZ12280.1 | 24191 | 27420 |
| 63 | ERA40829.1 | 24193 | 27422 | 404 | ERA40830.1 | 24194 | 27423 | 548 | ERA40831.1 | 24195 | 27424 | 627 | ERA40832.1 | 24196 | 27425 |
| 64 | | | | | CDA97617.1 | 24198 | 27427 | 479 | CDA97616.1 | 24199 | 27428 | 635 | CDA97615.1 | 24200 | 27429 |
| 65 | | | | | KFX30971.1 | 24202 | 27431 | 432 | KFX30970.1 | 24203 | 27432 | 660 | KFX30969.1 | 24204 | 27433 |
| 66 | | | | | KYD25149.1 | 24206 | 27435 | 506 | KYD25148.1 | 24207 | 27436 | 660 | KYD25147.1 | 24208 | 27437 |
| 67 | | | | | KLR73615.1 | 24210 | 27439 | 182 | | | | | KLR73616.1 | 24211 | 27440 |
| 68 | | | | | ADU94762.1 | 24213 | 27442 | 432 | ADU94761.1 | 24214 | 27443 | 660 | ADU94760.1 | 24215 | 27444 |
| 69 | | | | | ACX76983.1 | 24217 | 27446 | 432 | ACX76984.1 | 24218 | 27447 | 660 | ACX76985.1 | 24219 | 27448 |
| 70 | | | | | KFL17490.1 | 24221 | 27450 | 253 | KFL17491.1 | 24222 | 27451 | 660 | KFL17492.1 | 24223 | 27452 |
| 71 | | | | | KFX35838.1 | 24225 | 27454 | 432 | KFX35839.1 | 24226 | 27455 | 660 | KFX35840.1 | 24227 | 27456 |
| 72 | EDQ34548.2 | 24229 | 27458 | 406 | | | | | | | | | EDQ34544.2 | 24230 | 27459 |
| 73 | KRB96408.1 | 24232 | 27461 | 398 | | | | | | | | | KRB96406.1 | 24233 | 27462 |
| 74 | AGK57206.1 | 24235 | 27464 | 419 | | | | | | | | | AGK57208.1 | 24236 | 27465 |
| 75 | KMV96850.1 | 24238 | 27467 | 404 | KMV96849.1 | 24239 | 27468 | 549 | KMV96848.1 | 24240 | 27469 | 627 | KMV96847.1 | 24241 | 27470 |
| 76 | ESN04444.1 | 24243 | 27472 | 406 | | | | | ESN04438.1 | 24244 | 27473 | 903 | ESN04442.1 | 24245 | 27474 |
| 77 | | | | | | | | | ABX40973.1 | 24247 | 27476 | 648 | ABX40974.1 | 24248 | 27477 |
| 78 | | | | | EOS72131.1 | 24250 | 27479 | 479 | EOS72130.1 | 24251 | 27480 | 636 | EOS72129.1 | 24252 | 27481 |
| 79 | | | | | EDM25760.1 | 24254 | 27483 | 513 | EDM25761.1 | 24255 | 27484 | 674 | | | |
| 80 | ESY17003.1 | 24257 | 27486 | 676 | | | | | | | | | ESY17069.1 | 24258 | 27487 |
| 81 | | | | | KUK70368.1 | 24260 | 27489 | 537 | KUK70367.1 | 24261 | 27490 | 831 | KUK70366.1 | 24262 | 27491 |
| 82 | | | | | EHQ36502.1 | 24264 | 27493 | 540 | EHQ36503.1 | 24265 | 27494 | 721 | EHQ36504.1 | 24266 | 27495 |
| 83 | | | | | KKG83063.1 | 24268 | 27497 | 529 | KKG83062.1 | 24269 | 27498 | 719 | KKG83061.1 | 24270 | 27499 |
| 84 | EQM86812.1 | 24272 | 27501 | 662 | | | | | | | | | EQM86809.1 | 24273 | 27502 |
| 85 | AU18572.1 | 24275 | 27504 | 661 | | | | | | | | | ALJ18569.1 | 24276 | 27505 |
| 86 | GAD34403.1 | 24278 | 27507 | 661 | | | | | | | | | GAD34407.1 | 24279 | 27508 |
| 87 | ADJ29888.1 | 24281 | 27510 | 432 | | | | | | | | | ADJ29890.1 | 24282 | 27511 |
| 88 | KMP10704.1 | 24284 | 27513 | 402 | | | | | | | | | KMP10706.1 | 24285 | 27514 |
| 89 | EGY00299.1 | 24287 | 27516 | 677 | | | | | | | | | EGY00302.1 | 24288 | 27517 |
| 90 | | | | | EPY09175.1 | 24290 | 27519 | 473 | EPY09174.1 | 24291 | 27520 | 646 | EPY09173.1 | 24292 | 27521 |
| 91 | | | | | ACX63337.1 | 24294 | 27523 | 545 | ACX63338.1 | 24295 | 27524 | 656 | ACX63339.1 | 24296 | 27525 |
| 92 | KHN90278.1 | 24298 | 27527 | 404 | KHN90279.1 | 24299 | 27528 | 537 | KHN90280.1 | 24300 | 27529 | 627 | KHN90281.1 | 24301 | 27530 |
| 93 | KGA32599.1 | 24303 | 27532 | 406 | | | | | | | | | KGA32597.1 | 24304 | 27533 |
| 94 | | | | | AJQ25677.1 | 24306 | 27535 | 477 | AJQ25678.1 | 24307 | 27536 | 527 | AJQ25679.1 | 24308 | 27537 |
| 95 | | | | | CUH95392.1 | 24310 | 27539 | 476 | CUH95393.1 | 24311 | 27540 | 527 | CUH95394.1 | 24312 | 27541 |
| 96 | KSF97359.1 | 24314 | 27543 | 406 | KSF97360.1 | 24315 | 27544 | 425 | KSF97361.1 | 24316 | 27545 | 630 | | | |
| 97 | | | | | | | | | KSL25396.1 | 24318 | 27547 | 116 | KSL25395.1 | 24319 | 27548 |
| 98 | KSO15708.1 | 24321 | 27550 | 406 | KSO15707.1 | 24322 | 27551 | 425 | KSO15706.1 | 24323 | 27552 | 630 | | | |
| 99 | BAR67377.1 | 24325 | 27554 | 409 | BAR67378.1 | 24326 | 27555 | 556 | BAR67379.1 | 24327 | 27556 | 625 | BAR67380.1 | 24328 | 27557 |
| 100 | KAJ21868.1 | 24330 | 27559 | 343 | | | | | KAJ21867.1 | 24331 | 27560 | 630 | KAJ21866.1 | 24332 | 27561 |
| 101 | AGI81181.1 | 24334 | 27563 | 409 | | | | | AGI81182.1 | 24335 | 27564 | 464 | | | |
| 102 | ERY34412.1 | 24337 | 27566 | 411 | ERY34411.1 | 24338 | 27567 | 555 | ERY34410.1 | 24339 | 27568 | 630 | ERY34409.1 | 24340 | 27569 |
| 103 | EZP23709.1 | 24342 | 27571 | 409 | EZP23710.1 | 24343 | 27572 | 476 | EZP23711.1 | 24344 | 27573 | 625 | EZP23712.1 | 24345 | 27574 |
| 104 | ERV69455.1 | 24347 | 27576 | 406 | ERV69456.1 | 24348 | 27577 | 548 | ERV69457.1 | 24349 | 27578 | 611 | ERV69458.1 | 24350 | 27579 |
| 105 | EQM83903.1 | 24352 | 27581 | 268 | EQM83904.1 | 24353 | 27582 | 425 | EQM83905.1 | 24354 | 27583 | 630 | | | |
| 106 | AJP52372.1 | 24356 | 27585 | 409 | AJP52373.1 | 24357 | 27586 | 555 | AJP52374.1 | 24358 | 27587 | 629 | AJP52375.1 | 24359 | 27588 |
| 107 | EST14444.1 | 24361 | 27590 | 409 | EST14388.1 | 24362 | 27591 | 555 | EST14448.1 | 24363 | 27592 | 629 | EST14478.1 | 24364 | 27593 |
| 108 | ENY74498.1 | 24366 | 27595 | 411 | ENY74499.1 | 24367 | 27596 | 479 | ENY74500.1 | 24368 | 27597 | 630 | ENY74501.1 | 24369 | 27598 |
| 109 | KWR75280.1 | 24371 | 27600 | 409 | | | | | | | | | KWR75281.1 | 24372 | 27601 |
| 110 | KFE46436.1 | 24374 | 27603 | 409 | KFE46437.1 | 24375 | 27604 | 554 | KFE46438.1 | 24376 | 27605 | 630 | KFE46439.1 | 24377 | 27606 |
| 111 | AMP72541.1 | 24379 | 27608 | 413 | AMP72542.1 | 24380 | 27609 | 477 | AMP72543.1 | 24381 | 27610 | 623 | AMP72544.1 | 24382 | 27611 |
| 112 | KQQ11279.1 | 24384 | 27613 | 652 | | | | | | | | | KQQ11277.1 | 24385 | 27614 |
| 113 | KQS82596.1 | 24387 | 27616 | 679 | | | | | | | | | KQS82593.1 | 24388 | 27617 |
| 114 | KQS78959.1 | 24390 | 27619 | 679 | | | | | | | | | KQS78956.1 | 24391 | 27620 |
| 115 | | | | | | | | | AKE89966.1 | 24393 | 27622 | 712 | AKE89965.1 | 24394 | 27623 |
| 116 | | | | | | | | | EME23883.1 | 24396 | 27625 | 608 | EME23884.1 | 24397 | 27626 |
| 117 | | | | | CDZ88170.1 | 24399 | 27628 | 515 | CDZ88169.1 | 24400 | 27629 | 713 | CDZ88168.1 | 24401 | 27630 |
| 118 | ETI62660.1 | 24403 | 27632 | 661 | | | | | | | | | ETI62671.1 | 24404 | 27633 |
| 119 | EFL24973.1 | 24406 | 27635 | 677 | | | | | | | | | EFL24976.1 | 24407 | 27636 |
| 120 | | | | | AGA58895.1 | 24409 | 27638 | 486 | | | | | AGA58893.1 | 24410 | 27639 |
| 121 | EEY51338.1 | 24412 | 27641 | 397 | EEY51339.1 | 24413 | 27642 | 556 | EEY51340.1 | 24414 | 27643 | 629 | EEY51341.1 | 24415 | 27644 |
| 122 | AIL69849.1 | 24417 | 27646 | 397 | AIL69850.1 | 24418 | 27647 | 556 | AIL69851.1 | 24419 | 27648 | 629 | AIL69852.1 | 24420 | 27649 |
| 123 | CNL41774.1 | 24422 | 27651 | 404 | CNL41795.1 | 24423 | 27652 | 465 | CNL41824.1 | 24424 | 27653 | 627 | CNL41849.1 | 24425 | 27654 |
| 124 | | | | | | | | | | | | | | | |
| 125 | | | | | | | | | | | | | | | |
| 126 | | | | | | | | | | | | | | | |
| 127 | | | | | | | | | | | | | | | |
| 128 | | | | | | | | | | | | | | | |
| 129 | | | | | | | | | | | | | | | |
| 130 | | | | | | | | | | | | | | | |
| 131 | | | | | | | | | | | | | | | |
| 132 | | | | | | | | | | | | | | | |
| 133 | | | | | | | | | | | | | | | |
| 134 | | | | | | | | | | | | | | | |
| 135 | | | | | | | | | | | | | | | |
| 136 | | | | | | | | | | | | | | | |
| 137 | | | | | | | | | | | | | | | |
| 138 | | | | | | | | | | | | | | | |
| 139 | | | | | | | | | | | | | | | |
| 140 | | | | | | | | | | | | | | | |
| 141 | | | | | | | | | | | | | | | |
| 142 | | | | | | | | | | | | | | | |
| 143 | | | | | | | | | | | | | | | |
| 144 | | | | | | | | | | | | | | | |
| 145 | | | | | | | | | | | | | | | |
| 146 | | | | | | | | | | | | | | | |
| 147 | | | | | | | | | | | | | | | |
| 148 | | | | | | | | | | | | | | | |
| 149 | | | | | | | | | | | | | | | |
| 150 | | | | | | | | | | | | | | | |
| 151 | | | | | | | | | | | | | | | |
| 152 | | | | | | | | | | | | | | | |
| 153 | | | | | | | | | | | | | | | |
| 154 | | | | | | | | | | | | | | | |
| 155 | | | | | | | | | | | | | | | |
| 156 | | | | | | | | | | | | | | | |
| 157 | | | | | | | | | | | | | | | |
| 158 | | | | | | | | | | | | | | | |
| 159 | | | | | | | | | | | | | | | |
| 160 | | | | | | | | | | | | | | | |
| 161 | | | | | | | | | | | | | | | |
| 162 | | | | | | | | | | | | | | | |
| 163 | | | | | | | | | | | | | | | |
| 164 | | | | | | | | | | | | | | | |
| 165 | | | | | | | | | | | | | | | |
| 166 | | | | | | | | | | | | | | | |
| 167 | | | | | | | | | | | | | | | |
| 168 | | | | | | | | | | | | | | | |
| 169 | | | | | | | | | | | | | | | |
| 170 | | | | | | | | | | | | | | | |
| 171 | | | | | | | | | | | | | | | |
| 172 | | | | | | | | | | | | | | | |
| 173 | | | | | | | | | | | | | | | |
| 174 | | | | | | | | | | | | | | | |
| 175 | | | | | | | | | | | | | | | |
| 176 | | | | | | | | | | | | | | | |
| 177 | | | | | | | | | | | | | | | |
| 178 | | | | | | | | | | | | | | | |
| 179 | | | | | | | | | | | | | | | |
| 180 | | | | | | | | | | | | | | | |
| 181 | | | | | | | | | | | | | | | |
| 182 | | | | | | | | | | | | | | | |
| 183 | | | | | | | | | | | | | | | |
| 184 | | | | | | | | | | | | | | | |
| 185 | | | | | | | | | | | | | | | |
| 186 | | | | | | | | | | | | | | | |
| 187 | | | | | | | | | | | | | | | |
| 188 | | | | | | | | | | | | | | | |
| 189 | | | | | | | | | | | | | | | |
| 190 | | | | | | | | | | | | | | | |
| 191 | | | | | | | | | | | | | | | |
| 192 | | | | | | | | | | | | | | | |
| 193 | | | | | | | | | | | | | | | |
| 194 | | | | | | | | | | | | | | | |
| 195 | | | | | | | | | | | | | | | |
| 196 | | | | | | | | | | | | | | | |
| 197 | | | | | | | | | | | | | | | |
| 198 | | | | | | | | | | | | | | | |
| 199 | | | | | | | | | | | | | | | |
| 200 | | | | | | | | | | | | | | | |
| 201 | | | | | | | | | | | | | | | |
| 202 | | | | | | | | | | | | | | | |
| 203 | | | | | | | | | | | | | | | |
| 204 | | | | | | | | | | | | | | | |
| 205 | | | | | | | | | | | | | | | |
| 206 | | | | | | | | | | | | | | | |
| 207 | | | | | | | | | | | | | | | |
| 208 | | | | | | | | | | | | | | | |
| 209 | | | | | | | | | | | | | | | |
| 210 | | | | | | | | | | | | | | | |
| 211 | | | | | | | | | | | | | | | |
| 212 | | | | | | | | | | | | | | | |
| 213 | | | | | | | | | | | | | | | |
| 214 | | | | | | | | | | | | | | | |
| 215 | | | | | | | | | | | | | | | |
| 216 | | | | | | | | | | | | | | | |
| 217 | | | | | | | | | | | | | | | |
| 218 | | | | | | | | | | | | | | | |
| 219 | | | | | | | | | | | | | | | |
| 220 | | | | | | | | | | | | | | | |
| 221 | | | | | | | | | | | | | | | |
| 222 | | | | | | | | | | | | | | | |
| 223 | | | | | | | | | | | | | | | |
| 224 | | | | | | | | | | | | | | | |
| 225 | | | | | | | | | | | | | | | |
| 226 | | | | | | | | | | | | | | | |
| 227 | | | | | | | | | | | | | | | |
| 228 | | | | | | | | | | | | | | | |
| 229 | | | | | | | | | | | | | | | |
| 230 | | | | | | | | | | | | | | | |
| 231 | | | | | | | | | | | | | | | |
| 232 | | | | | | | | | | | | | | | |
| 233 | | | | | | | | | | | | | | | |
| 234 | | | | | | | | | | | | | | | |
| 235 | | | | | | | | | | | | | | | |
| 236 | | | | | | | | | | | | | | | |
| 237 | | | | | | | | | | | | | | | |
| 238 | | | | | | | | | | | | | | | |
| 239 | | | | | | | | | | | | | | | |
| 240 | | | | | | | | | | | | | | | |
| 241 | | | | | | | | | | | | | | | |
| 242 | | | | | | | | | | | | | | | |
| 243 | | | | | | | | | | | | | | | |
| 244 | | | | | | | | | | | | | | | |
| 245 | | | | | | | | | | | | | | | |
| 246 | | | | | | | | | | | | | | | |
| 247 | | | | | | | | | | | | | | | |
| 248 | | | | | | | | | | | | | | | |
| 249 | | | | | | | | | | | | | | | |
| 250 | | | | | | | | | | | | | | | |
| 251 | | | | | | | | | | | | | | | |
| 252 | | | | | | | | | | | | | | | |
| 253 | | | | | | | | | | | | | | | |
| 254 | | | | | | | | | | | | | | | |
| 255 | | | | | | | | | | | | | | | |
| 256 | | | | | | | | | | | | | | | |
| 257 | | | | | | | | | | | | | | | |
| 258 | | | | | | | | | | | | | | | |
| 259 | | | | | | | | | | | | | | | |
| 260 | | | | | | | | | | | | | | | |
| 261 | | | | | | | | | | | | | | | |
| 262 | | | | | | | | | | | | | | | |
| 263 | | | | | | | | | | | | | | | |
| 264 | | | | | | | | | | | | | | | |
| 265 | | | | | | | | | | | | | | | |
| 266 | | | | | | | | | | | | | | | |
| 267 | | | | | | | | | | | | | | | |
| 268 | | | | | | | | | | | | | | | |
| 269 | | | | | | | | | | | | | | | |
| 270 | | | | | | | | | | | | | | | |
| 271 | | | | | | | | | | | | | | | |
| 272 | | | | | | | | | | | | | | | |
| 273 | | | | | | | | | | | | | | | |
| 274 | | | | | | | | | | | | | | | |
| 275 | | | | | | | | | | | | | | | |
| 276 | | | | | | | | | | | | | | | |
| 277 | | | | | | | | | | | | | | | |
| 278 | | | | | | | | | | | | | | | |
| 279 | | | | | | | | | | | | | | | |
| 280 | | | | | | | | | | | | | | | |
| 281 | | | | | | | | | | | | | | | |
| 282 | | | | | | | | | | | | | | | |
| 283 | | | | | | | | | | | | | | | |
| 284 | | | | | | | | | | | | | | | |
| 285 | | | | | | | | | | | | | | | |
| 286 | | | | | | | | | | | | | | | |
| 287 | | | | | | | | | | | | | | | |
| 288 | | | | | | | | | | | | | | | |
| 289 | | | | | | | | | | | | | | | |
| 290 | | | | | | | | | | | | | | | |
| 291 | | | | | | | | | | | | | | | |
| 292 | | | | | | | | | | | | | | | |
| 293 | | | | | | | | | | | | | | | |
| 294 | | | | | | | | | | | | | | | |
| 295 | | | | | | | | | | | | | | | |
| 296 | | | | | | | | | | | | | | | |
| 297 | | | | | | | | | | | | | | | |
| 298 | | | | | | | | | | | | | | | |
| 299 | | | | | | | | | | | | | | | |
| 300 | | | | | | | | | | | | | | | |
| 301 | | | | | | | | | | | | | | | |
| 302 | | | | | | | | | | | | | | | |
| 303 | | | | | | | | | | | | | | | |
| 304 | | | | | | | | | | | | | | | |
| 305 | | | | | | | | | | | | | | | |
| 306 | | | | | | | | | | | | | | | |
| 307 | | | | | | | | | | | | | | | |
| 308 | | | | | | | | | | | | | | | |
| 309 | | | | | | | | | | | | | | | |
| 310 | | | | | | | | | | | | | | | |
| 311 | | | | | | | | | | | | | | | |
| 312 | | | | | | | | | | | | | | | |
| 313 | | | | | | | | | | | | | | | |
| 314 | | | | | | | | | | | | | | | |
| 315 | | | | | | | | | | | | | | | |
| 316 | | | | | | | | | | | | | | | |
| 317 | | | | | | | | | | | | | | | |
| 318 | | | | | | | | | | | | | | | |
| 319 | | | | | | | | | | | | | | | |
| 320 | | | | | | | | | | | | | | | |
| 321 | | | | | | | | | | | | | | | |
| 322 | | | | | | | | | | | | | | | |
| 323 | | | | | | | | | | | | | | | |
| 324 | | | | | | | | | | | | | | | |
| 325 | | | | | | | | | | | | | | | |
| 326 | | | | | | | | | | | | | | | |
| 327 | | | | | | | | | | | | | | | |
| 328 | | | | | | | | | | | | | | | |
| 329 | | | | | | | | | | | | | | | |
| 330 | | | | | | | | | | | | | | | |
| 331 | | | | | | | | | | | | | | | |
| 332 | | | | | | | | | | | | | | | |
| 333 | | | | | | | | | | | | | | | |
| 334 | | | | | | | | | | | | | | | |
| 335 | | | | | | | | | | | | | | | |
| 336 | | | | | | | | | | | | | | | |
| 337 | | | | | | | | | | | | | | | |
| 338 | | | | | | | | | | | | | | | |
| 339 | | | | | | | | | | | | | | | |
| 340 | | | | | | | | | | | | | | | |
| 341 | | | | | | | | | | | | | | | |
| 342 | | | | | | | | | | | | | | | |
| 343 | | | | | | | | | | | | | | | |
| 344 | | | | | | | | | | | | | | | |
| 345 | | | | | | | | | | | | | | | |
| 346 | | | | | | | | | | | | | | | |
| 347 | | | | | | | | | | | | | | | |
| 348 | | | | | | | | | | | | | | | |
| 349 | | | | | | | | | | | | | | | |
| 350 | | | | | | | | | | | | | | | |
| 351 | | | | | | | | | | | | | | | |
| 352 | | | | | | | | | | | | | | | |
| 353 | | | | | | | | | | | | | | | |
| 354 | | | | | | | | | | | | | | | |
| 355 | | | | | | | | | | | | | | | |
| 356 | | | | | | | | | | | | | | | |
| 357 | | | | | | | | | | | | | | | |
| 358 | | | | | | | | | | | | | | | |
| 359 | | | | | | | | | | | | | | | |
| 360 | | | | | | | | | | | | | | | |
| 361 | | | | | | | | | | | | | | | |
| 362 | | | | | | | | | | | | | | | |
| 363 | | | | | | | | | | | | | | | |
| 364 | | | | | | | | | | | | | | | |
| 365 | | | | | | | | | | | | | | | |
| 366 | | | | | | | | | | | | | | | |
| 367 | | | | | | | | | | | | | | | |
| 368 | | | | | | | | | | | | | | | |
| 369 | | | | | | | | | | | | | | | |
| 370 | | | | | | | | | | | | | | | |
| 371 | | | | | | | | | | | | | | | |
| 372 | | | | | | | | | | | | | | | |
| 373 | | | | | | | | | | | | | | | |
| 374 | | | | | | | | | | | | | | | |
| 375 | | | | | | | | | | | | | | | |
| 376 | | | | | | | | | | | | | | | |
| 377 | | | | | | | | | | | | | | | |
| 378 | | | | | | | | | | | | | | | |
| 379 | | | | | | | | | | | | | | | |
| 380 | | | | | | | | | | | | | | | |
| 381 | | | | | | | | | | | | | | | |
| 382 | | | | | | | | | | | | | | | |
| 383 | | | | | | | | | | | | | | | |
| 384 | | | | | | | | | | | | | | | |
| 385 | | | | | | | | | | | | | | | |
| 386 | | | | | | | | | | | | | | | |
| 387 | | | | | | | | | | | | | | | |
| 388 | | | | | | | | | | | | | | | |
| 389 | | | | | | | | | | | | | | | |
| 390 | | | | | | | | | | | | | | | |
| 391 | | | | | | | | | | | | | | | |
| 392 | | | | | | | | | | | | | | | |
| 393 | | | | | | | | | | | | | | | |
| 394 | | | | | | | | | | | | | | | |
| 395 | | | | | | | | | | | | | | | |
| 396 | | | | | | | | | | | | | | | |
| 397 | | | | | | | | | | | | | | | |
| 398 | | | | | | | | | | | | | | | |
| 399 | | | | | | | | | | | | | | | |
| 400 | | | | | | | | | | | | | | | |
| 401 | | | | | | | | | | | | | | | |
| 402 | | | | | | | | | | | | | | | |
| 403 | | | | | | | | | | | | | | | |
| 404 | | | | | | | | | | | | | | | |
| 405 | | | | | | | | | | | | | | | |
| 406 | | | | | | | | | | | | | | | |
| 407 | | | | | | | | | | | | | | | |
| 408 | | | | | | | | | | | | | | | |
| 409 | | | | | | | | | | | | | | | |
| 410 | | | | | | | | | | | | | | | |
| 411 | | | | | | | | | | | | | | | |
| 412 | | | | | | | | | | | | | | | |
| 413 | | | | | | | | | | | | | | | |
| 414 | | | | | | | | | | | | | | | |
| 415 | | | | | | | | | | | | | | | |
| 416 | | | | | | | | | | | | | | | |
| 417 | | | | | | | | | | | | | | | |
| 418 | | | | | | | | | | | | | | | |
| 419 | | | | | | | | | | | | | | | |
| 420 | | | | | | | | | | | | | | | |
| 421 | | | | | | | | | | | | | | | |
| 422 | | | | | | | | | | | | | | | |
| 423 | | | | | | | | | | | | | | | |
| 424 | | | | | | | | | | | | | | | |
| 425 | | | | | | | | | | | | | | | |
| 426 | | | | | | | | | | | | | | | |
| 427 | | | | | | | | | | | | | | | |
| 428 | | | | | | | | | | | | | | | |
| 429 | | | | | | | | | | | | | | | |
| 430 | | | | | | | | | | | | | | | |
| 431 | | | | | | | | | | | | | | | |
| 432 | | | | | | | | | | | | | | | |
| 433 | | | | | | | | | | | | | | | |
| 434 | | | | | | | | | | | | | | | |
| 435 | | | | | | | | | | | | | | | |
| 436 | | | | | | | | | | | | | | | |
| 437 | | | | | | | | | | | | | | | |
| 438 | | | | | | | | | | | | | | | |
| 439 | | | | | | | | | | | | | | | |
| 440 | | | | | | | | | | | | | | | |
| 441 | | | | | | | | | | | | | | | |
| 442 | | | | | | | | | | | | | | | |
| 443 | | | | | | | | | | | | | | | |
| 444 | | | | | | | | | | | | | | | |
| 445 | | | | | | | | | | | | | | | |
| 446 | | | | | | | | | | | | | | | |
| 447 | | | | | | | | | | | | | | | |
| 448 | | | | | | | | | | | | | | | |
| 449 | | | | | | | | | | | | | | | |
| 450 | | | | | | | | | | | | | | | |
| 451 | | | | | | | | | | | | | | | |
| 452 | | | | | | | | | | | | | | | |
| 453 | | | | | | | | | | | | | | | |
| 454 | | | | | | | | | | | | | | | |
| 455 | | | | | | | | | | | | | | | |
| 456 | | | | | | | | | | | | | | | |
| 457 | | | | | | | | | | | | | | | |
| 458 | | | | | | | | | | | | | | | |
| 459 | | | | | | | | | | | | | | | |
| 460 | | | | | | | | | | | | | | | |
| 461 | | | | | | | | | | | | | | | |
| 462 | | | | | | | | | | | | | | | |
| 463 | | | | | | | | | | | | | | | |
| 464 | | | | | | | | | | | | | | | |
| 465 | | | | | | | | | | | | | | | |
| 466 | | | | | | | | | | | | | | | |
| 467 | | | | | | | | | | | | | | | |
| 468 | | | | | | | | | | | | | | | |
| 469 | | | | | | | | | | | | | | | |
| 470 | | | | | | | | | | | | | | | |
| 471 | | | | | | | | | | | | | | | |
| 472 | | | | | | | | | | | | | | | |
| 473 | | | | | | | | | | | | | | | |
| 474 | | | | | | | | | | | | | | | |
| 475 | | | | | | | | | | | | | | | |
| 476 | | | | | | | | | | | | | | | |
| 477 | | | | | | | | | | | | | | | |
| 478 | | | | | | | | | | | | | | | |
| 479 | | | | | | | | | | | | | | | |
| 480 | | | | | | | | | | | | | | | |
| 481 | | | | | | | | | | | | | | | |
| 482 | | | | | | | | | | | | | | | |
| 483 | | | | | | | | | | | | | | | |
| 484 | | | | | | | | | | | | | | | |
| 485 | | | | | | | | | | | | | | | |
| 486 | | | | | | | | | | | | | | | |
| 487 | | | | | | | | | | | | | | | |
| 488 | | | | | | | | | | | | | | | |
| 489 | | | | | | | | | | | | | | | |
| 490 | | | | | | | | | | | | | | | |
| 491 | | | | | | | | | | | | | | | |
| 492 | | | | | | | | | | | | | | | |
| 493 | | | | | | | | | | | | | | | |
| 494 | | | | | | | | | | | | | | | |
| 495 | | | | | | | | | | | | | | | |
| 496 | | | | | | | | | | | | | | | |
| 497 | | | | | | | | | | | | | | | |
| 498 | | | | | | | | | | | | | | | |
| 499 | | | | | | | | | | | | | | | |
| 500 | | | | | | | | | | | | | | | |
| 501 | | | | | | | | | | | | | | | |
| 502 | | | | | | | | | | | | | | | |
| 503 | | | | | | | | | | | | | | | |
| 504 | | | | | | | | | | | | | | | |
| 505 | | | | | | | | | | | | | | | |
| 506 | | | | | | | | | | | | | | | |
| 507 | | | | | | | | | | | | | | | |
| 508 | | | | | | | | | | | | | | | |
| 509 | | | | | | | | | | | | | | | |
| 510 | | | | | | | | | | | | | | | |
| 511 | | | | | | | | | | | | | | | |
| 512 | | | | | | | | | | | | | | | |
| 513 | | | | | | | | | | | | | | | |
| 514 | | | | | | | | | | | | | | | |
| 515 | | | | | | | | | | | | | | | |
| 516 | | | | | | | | | | | | | | | |
| 517 | | | | | | | | | | | | | | | |
| 518 | | | | | | | | | | | | | | | |
| 519 | | | | | | | | | | | | | | | |
| 520 | | | | | | | | | | | | | | | |
| 521 | | | | | | | | | | | | | | | |
| 522 | | | | | | | | | | | | | | | |
| 523 | | | | | | | | | | | | | | | |
| 524 | | | | | | | | | | | | | | | |
| 525 | | | | | | | | | | | | | | | |
| 526 | | | | | | | | | | | | | | | |
| 527 | | | | | | | | | | | | | | | |
| 528 | | | | | | | | | | | | | | | |
| 529 | | | | | | | | | | | | | | | |
| 530 | | | | | | | | | | | | | | | |
| 531 | | | | | | | | | | | | | | | |
| 532 | | | | | | | | | | | | | | | |
| 533 | | | | | | | | | | | | | | | |
| 534 | | | | | | | | | | | | | | | |
| 535 | | | | | | | | | | | | | | | |
| 536 | | | | | | | | | | | | | | | |
| 537 | | | | | | | | | | | | | | | |
| 538 | | | | | | | | | | | | | | | |
| 539 | | | | | | | | | | | | | | | |
| 540 | | | | | | | | | | | | | | | |
| 541 | | | | | | | | | | | | | | | |
| 542 | | | | | | | | | | | | | | | |
| 543 | | | | | | | | | | | | | | | |
| 544 | | | | | | | | | | | | | | | |
| 545 | | | | | | | | | | | | | | | |
| 546 | | | | | | | | | | | | | | | |
| 547 | | | | | | | | | | | | | | | |
| 548 | | | | | | | | | | | | | | | |
| 549 | | | | | | | | | | | | | | | |
| 550 | | | | | | | | | | | | | | | |
| 551 | | | | | | | | | | | | | | | |
| 552 | | | | | | | | | | | | | | | |
| 553 | | | | | | | | | | | | | | | |
| 554 | | | | | | | | | | | | | | | |
| 555 | | | | | | | | | | | | | | | |
| 556 | | | | | | | | | | | | | | | |
| 557 | | | | | | | | | | | | | | | |
| 558 | | | | | | | | | | | | | | | |
| 559 | | | | | | | | | | | | | | | |
| 560 | | | | | | | | | | | | | | | |
| 561 | | | | | | | | | | | | | | | |
| 562 | | | | | | | | | | | | | | | |
| 563 | | | | | | | | | | | | | | | |
| 564 | | | | | | | | | | | | | | | |
| 565 | | | | | | | | | | | | | | | |
| 566 | | | | | | | | | | | | | | | |
| 567 | | | | | | | | | | | | | | | |
| 568 | | | | | | | | | | | | | | | |
| 569 | | | | | | | | | | | | | | | |
| 570 | | | | | | | | | | | | | | | |
| 571 | | | | | | | | | | | | | | | |
| 572 | | | | | | | | | | | | | | | |
| 573 | | | | | | | | | | | | | | | |
| 574 | | | | | | | | | | | | | | | |
| 575 | | | | | | | | | | | | | | | |
| 576 | | | | | | | | | | | | | | | |
| 577 | | | | | | | | | | | | | | | |
| 578 | | | | | | | | | | | | | | | |
| 579 | | | | | | | | | | | | | | | |
| 580 | | | | | | | | | | | | | | | |
| 581 | | | | | | | | | | | | | | | |
| 582 | | | | | | | | | | | | | | | |
| 583 | | | | | | | | | | | | | | | |
| 584 | | | | | | | | | | | | | | | |
| 585 | | | | | | | | | | | | | | | |
| 586 | | | | | | | | | | | | | | | |
| 587 | | | | | | | | | | | | | | | |
| 588 | | | | | | | | | | | | | | | |
| 589 | | | | | | | | | | | | | | | |
| 590 | | | | | | | | | | | | | | | |
| 591 | | | | | | | | | | | | | | | |
| 592 | | | | | | | | | | | | | | | |
| 593 | | | | | | | | | | | | | | | |
| 594 | | | | | | | | | | | | | | | |
| 595 | | | | | | | | | | | | | | | |
| 596 | | | | | | | | | | | | | | | |
| 597 | | | | | | | | | | | | | | | |
| 598 | | | | | | | | | | | | | | | |
| 599 | | | | | | | | | | | | | | | |
| 600 | | | | | | | | | | | | | | | |
| 601 | | | | | | | | | | | | | | | |
| 602 | | | | | | | | | | | | | | | |
| 603 | | | | | | | | | | | | | | | |
| 604 | | | | | | | | | | | | | | | |
| 605 | | | | | | | | | | | | | | | |
| 606 | | | | | | | | | | | | | | | |
| 607 | | | | | | | | | | | | | | | |
| 608 | | | | | | | | | | | | | | | |
| 609 | | | | | | | | | | | | | | | |
| 610 | | | | | | | | | | | | | | | |
| 611 | | | | | | | | | | | | | | | |
| 612 | | | | | | | | | | | | | | | |
| 613 | | | | | | | | | | | | | | | |
| 614 | | | | | | | | | | | | | | | |
| 615 | | | | | | | | | | | | | | | |
| 616 | | | | | | | | | | | | | | | |
| 617 | | | | | | | | | | | | | | | |
| 618 | | | | | | | | | | | | | | | |
| 619 | | | | | | | | | | | | | | | |
| 620 | | | | | | | | | | | | | | | |
| 621 | | | | | | | | | | | | | | | |
| 622 | | | | | | | | | | | | | | | |
| 623 | | | | | | | | | | | | | | | |
| 624 | | | | | | | | | | | | | | | |
| 625 | | | | | | | | | | | | | | | |
| 626 | | | | | | | | | | | | | | | |
| 627 | | | | | | | | | | | | | | | |
| 628 | | | | | | | | | | | | | | | |
| 629 | | | | | | | | | | | | | | | |
| 630 | | | | | | | | | | | | | | | |
| 631 | | | | | | | | | | | | | | | |
| 632 | | | | | | | | | | | | | | | |
| 633 | | | | | | | | | | | | | | | |
| 634 | | | | | | | | | | | | | | | |
| 635 | | | | | | | | | | | | | | | |
| 636 | | | | | | | | | | | | | | | |
| 637 | | | | | | | | | | | | | | | |
| 638 | | | | | | | | | | | | | | | |
| 639 | | | | | | | | | | | | | | | |
| 640 | | | | | | | | | | | | | | | |
| 641 | | | | | | | | | | | | | | | |
| 642 | | | | | | | | | | | | | | | |
| 643 | | | | | | | | | | | | | | | |
| 644 | | | | | | | | | | | | | | | |
| 645 | | | | | | | | | | | | | | | |
| 646 | | | | | | | | | | | | | | | |
| 647 | | | | | | | | | | | | | | | |
| 648 | | | | | | | | | | | | | | | |
| 649 | | | | | | | | | | | | | | | |
| 650 | | | | | | | | | | | | | | | |
| 651 | | | | | | | | | | | | | | | |
| 652 | | | | | | | | | | | | | | | |
| 653 | | | | | | | | | | | | | | | |
| 654 | | | | | | | | | | | | | | | |
| 655 | | | | | | | | | | | | | | | |
| 656 | | | | | | | | | | | | | | | |
| 657 | | | | | | | | | | | | | | | |
| 658 | | | | | | | | | | | | | | | |
| 659 | | | | | | | | | | | | | | | |
| 660 | | | | | | | | | | | | | | | |
| 661 | | | | | | | | | | | | | | | |
| 662 | | | | | | | | | | | | | | | |
| 663 | | | | | | | | | | | | | | | |
| 664 | | | | | | | | | | | | | | | |
| 665 | | | | | | | | | | | | | | | |
| 666 | | | | | | | | | | | | | | | |
| 667 | | | | | | | | | | | | | | | |
| 668 | | | | | | | | | | | | | | | |
| 669 | | | | | | | | | | | | | | | |
| 670 | | | | | | | | | | | | | | | |
| 671 | | | | | | | | | | | | | | | |
| 672 | | | | | | | | | | | | | | | |
| 673 | | | | | | | | | | | | | | | |
| 674 | | | | | | | | | | | | | | | |
| 675 | | | | | | | | | | | | | | | |
| 676 | | | | | | | | | | | | | | | |
| 677 | | | | | | | | | | | | | | | |
| 678 | | | | | | | | | | | | | | | |
| 679 | | | | | | | | | | | | | | | |
| 680 | | | | | | | | | | | | | | | |
| 681 | | | | | | | | | | | | | | | |
| 682 | | | | | | | | | | | | | | | |
| 683 | | | | | | | | | | | | | | | |
| 684 | | | | | | | | | | | | | | | |
| 685 | | | | | | | | | | | | | | | |
| 686 | | | | | | | | | | | | | | | |
| 687 | | | | | | | | | | | | | | | |
| 688 | | | | | | | | | | | | | | | |
| 689 | | | | | | | | | | | | | | | |
| 690 | | | | | | | | | | | | | | | |
| 691 | | | | | | | | | | | | | | | |
| 692 | | | | | | | | | | | | | | | |
| 693 | | | | | | | | | | | | | | | |
| 694 | | | | | | | | | | | | | | | |
| 695 | | | | | | | | | | | | | | | |
| 696 | | | | | | | | | | | | | | | |
| 697 | | | | | | | | | | | | | | | |
| 698 | | | | | | | | | | | | | | | |
| 699 | | | | | | | | | | | | | | | |
| 700 | | | | | | | | | | | | | | | |
| 701 | | | | | | | | | | | | | | | |
| 702 | | | | | | | | | | | | | | | |
| 703 | | | | | | | | | | | | | | | |
| 704 | | | | | | | | | | | | | | | |
| 705 | | | | | | | | | | | | | | | |
| 706 | | | | | | | | | | | | | | | |
| 707 | | | | | | | | | | | | | | | |
| 708 | | | | | | | | | | | | | | | |
| 709 | | | | | | | | | | | | | | | |
| 710 | | | | | | | | | | | | | | | |
| 711 | | | | | | | | | | | | | | | |
| 712 | | | | | | | | | | | | | | | |
| 713 | | | | | | | | | | | | | | | |
| 714 | | | | | | | | | | | | | | | |
| 715 | | | | | | | | | | | | | | | |
| 716 | | | | | | | | | | | | | | | |
| 717 | | | | | | | | | | | | | | | |
| 718 | | | | | | | | | | | | | | | |
| 719 | | | | | | | | | | | | | | | |
| 720 | | | | | | | | | | | | | | | |
| 721 | | | | | | | | | | | | | | | |
| 722 | | | | | | | | | | | | | | | |
| 723 | | | | | | | | | | | | | | | |
| 724 | | | | | | | | | | | | | | | |
| 725 | | | | | | | | | | | | | | | |
| 726 | | | | | | | | | | | | | | | |
| 727 | | | | | | | | | | | | | | | |
| 728 | | | | | | | | | | | | | | | |
| 729 | | | | | | | | | | | | | | | |
| 730 | | | | | | | | | | | | | | | |
| 731 | | | | | | | | | | | | | | | |
| 732 | | | | | | | | | | | | | | | |
| 733 | | | | | | | | | | | | | | | |
| 734 | | | | | | | | | | | | | | | |
| 735 | | | | | | | | | | | | | | | |
| 736 | | | | | | | | | | | | | | | |
| 737 | | | | | | | | | | | | | | | |
| 738 | | | | | | | | | | | | | | | |
| 739 | | | | | | | | | | | | | | | |
| 740 | | | | | | | | | | | | | | | |
| 741 | | | | | | | | | | | | | | | |
| 742 | | | | | | | | | | | | | | | |
| 743 | | | | | | | | | | | | | | | |
| 744 | | | | | | | | | | | | | | | |
| 745 | | | | | | | | | | | | | | | |
| 746 | | | | | | | | | | | | | | | |
| 747 | | | | | | | | | | | | | | | |
| 748 | | | | | | | | | | | | | | | |
| 749 | | | | | | | | | | | | | | | |
| 750 | | | | | | | | | | | | | | | |
| 751 | | | | | | | | | | | | | | | |
| 752 | | | | | | | | | | | | | | | |
| 753 | | | | | | | | | | | | | | | |
| 754 | | | | | | | | | | | | | | | |
| 755 | | | | | | | | | | | | | | | |
| 756 | | | | | | | | | | | | | | | |
| 757 | | | | | | | | | | | | | | | |
| 758 | | | | | | | | | | | | | | | |
| 759 | | | | | | | | | | | | | | | |
| 760 | | | | | | | | | | | | | | | |
| 761 | | | | | | | | | | | | | | | |
| 762 | | | | | | | | | | | | | | | |
| 763 | | | | | | | | | | | | | | | |
| 764 | | | | | | | | | | | | | | | |
| 765 | | | | | | | | | | | | | | | |
| 766 | | | | | | | | | | | | | | | |
| 767 | | | | | | | | | | | | | | | |
| 768 | | | | | | | | | | | | | | | |
| 769 | | | | | | | | | | | | | | | |
| 770 | | | | | | | | | | | | | | | |
| 771 | | | | | | | | | | | | | | | |
| 772 | | | | | | | | | | | | | | | |
| 773 | | | | | | | | | | | | | | | |
| 774 | | | | | | | | | | | | | | | |
| 775 | | | | | | | | | | | | | | | |
| 776 | | | | | | | | | | | | | | | |
| 777 | | | | | | | | | | | | | | | |
| 778 | | | | | | | | | | | | | | | |
| 779 | | | | | | | | | | | | | | | |
| 780 | | | | | | | | | | | | | | | |
| 781 | | | | | | | | | | | | | | | |
| 782 | | | | | | | | | | | | | | | |
| 783 | | | | | | | | | | | | | | | |
| 784 | | | | | | | | | | | | | | | |
| 785 | | | | | | | | | | | | | | | |
| 786 | | | | | | | | | | | | | | | |
| 787 | | | | | | | | | | | | | | | |
| 788 | | | | | | | | | | | | | | | |
| 789 | | | | | | | | | | | | | | | |
| 790 | | | | | | | | | | | | | | | |
| 791 | | | | | | | | | | | | | | | |
| 792 | | | | | | | | | | | | | | | |
| 793 | | | | | | | | | | | | | | | |
| 794 | | | | | | | | | | | | | | | |
| 795 | | | | | | | | | | | | | | | |
| 796 | | | | | | | | | | | | | | | |
| 797 | | | | | | | | | | | | | | | |
| 798 | | | | | | | | | | | | | | | |
| 799 | | | | | | | | | | | | | | | |
| 800 | | | | | | | | | | | | | | | |
| 801 | | | | | | | | | | | | | | | |
| 802 | | | | | | | | | | | | | | | |
| 803 | | | | | | | | | | | | | | | |
| 804 | | | | | | | | | | | | | | | |
| 805 | | | | | | | | | | | | | | | |
| 806 | | | | | | | | | | | | | | | |
| 807 | | | | | | | | | | | | | | | |
| 808 | | | | | | | | | | | | | | | |
| 809 | | | | | | | | | | | | | | | |
| 810 | | | | | | | | | | | | | | | |
| 811 | | | | | | | | | | | | | | | |
| 812 | | | | | | | | | | | | | | | |
| 813 | | | | | | | | | | | | | | | |
| 814 | | | | | | | | | | | | | | | |
| 815 | | | | | | | | | | | | | | | |
| 816 | | | | | | | | | | | | | | | |
| 817 | | | | | | | | | | | | | | | |
| 818 | | | | | | | | | | | | | | | |
| 819 | | | | | | | | | | | | | | | |
| 820 | | | | | | | | | | | | | | | |
| 821 | | | | | | | | | | | | | | | |
| 822 | | | | | | | | | | | | | | | |
| 823 | | | | | | | | | | | | | | | |
| 824 | | | | | | | | | | | | | | | |
| 825 | | | | | | | | | | | | | | | |
| 826 | | | | | | | | | | | | | | | |
| 827 | | | | | | | | | | | | | | | |
| 828 | | | | | | | | | | | | | | | |
| 829 | | | | | | | | | | | | | | | |
| 830 | | | | | | | | | | | | | | | |
| 831 | | | | | | | | | | | | | | | |
| 832 | | | | | | | | | | | | | | | |
| 833 | | | | | | | | | | | | | | | |
| 834 | | | | | | | | | | | | | | | |
| 835 | | | | | | | | | | | | | | | |
| 836 | | | | | | | | | | | | | | | |
| 837 | | | | | | | | | | | | | | | |
| 838 | | | | | | | | | | | | | | | |
| 839 | | | | | | | | | | | | | | | |
| 840 | | | | | | | | | | | | | | | |
| 841 | | | | | | | | | | | | | | | |
| 842 | | | | | | | | | | | | | | | |
| 843 | | | | | | | | | | | | | | | |
| 844 | | | | | | | | | | | | | | | |
| 845 | | | | | | | | | | | | | | | |
| 846 | | | | | | | | | | | | | | | |
| 847 | | | | | | | | | | | | | | | |
| 848 | | | | | | | | | | | | | | | |
| 849 | | | | | | | | | | | | | | | |
| 850 | | | | | | | | | | | | | | | |
| 851 | | | | | | | | | | | | | | | |
| 852 | | | | | | | | | | | | | | | |
| 853 | | | | | | | | | | | | | | | |
| 854 | | | | | | | | | | | | | | | |
| 855 | | | | | | | | | | | | | | | |
| 856 | | | | | | | | | | | | | | | |
| 857 | | | | | | | | | | | | | | | |
| 858 | | | | | | | | | | | | | | | |
| 859 | | | | | | | | | | | | | | | |
| 860 | | | | | | | | | | | | | | | |
| 861 | | | | | | | | | | | | | | | |
| 862 | | | | | | | | | | | | | | | |
| 863 | | | | | | | | | | | | | | | |
| 864 | | | | | | | | | | | | | | | |
| 865 | | | | | | | | | | | | | | | |
| 866 | | | | | | | | | | | | | | | |
| 867 | | | | | | | | | | | | | | | |
| 868 | | | | | | | | | | | | | | | |
| 869 | | | | | | | | | | | | | | | |
| 870 | | | | | | | | | | | | | | | |
| 871 | | | | | | | | | | | | | | | |
| 872 | | | | | | | | | | | | | | | |
| 873 | | | | | | | | | | | | | | | |
| 874 | | | | | | | | | | | | | | | |
| 875 | | | | | | | | | | | | | | | |
| 876 | | | | | | | | | | | | | | | |
| 877 | | | | | | | | | | | | | | | |
| 878 | | | | | | | | | | | | | | | |
| 879 | | | | | | | | | | | | | | | |
| 880 | | | | | | | | | | | | | | | |
| 881 | | | | | | | | | | | | | | | |
| 882 | | | | | | | | | | | | | | | |
| 883 | | | | | | | | | | | | | | | |
| 884 | | | | | | | | | | | | | | | |
| 885 | | | | | | | | | | | | | | | |
| 886 | | | | | | | | | | | | | | | |
| 887 | | | | | | | | | | | | | | | |
| 888 | | | | | | | | | | | | | | | |
| 889 | | | | | | | | | | | | | | | |
| 890 | | | | | | | | | | | | | | | |
| 891 | | | | | | | | | | | | | | | |
| 892 | | | | | | | | | | | | | | | |
| 893 | | | | | | | | | | | | | | | |
| 894 | | | | | | | | | | | | | | | |
| 895 | | | | | | | | | | | | | | | |
| 896 | | | | | | | | | | | | | | | |
| 897 | | | | | | | | | | | | | | | |
| 898 | | | | | | | | | | | | | | | |
| 899 | | | | | | | | | | | | | | | |
| 900 | | | | | | | | | | | | | | | |
| 901 | | | | | | | | | | | | | | | |
| 902 | | | | | | | | | | | | | | | |
| 903 | | | | | | | | | | | | | | | |
| 904 | | | | | | | | | | | | | | | |
| 905 | | | | | | | | | | | | | | | |
| 906 | | | | | | | | | | | | | | | |
| 907 | | | | | | | | | | | | | | | |
| 908 | | | | | | | | | | | | | | | |
| 909 | | | | | | | | | | | | | | | |
| 910 | | | | | | | | | | | | | | | |
| 911 | | | | | | | | | | | | | | | |
| 912 | | | | | | | | | | | | | | | |
| 913 | | | | | | | | | | | | | | | |
| 914 | | | | | | | | | | | | | | | |
| 915 | | | | | | | | | | | | | | | |
| 916 | | | | | | | | | | | | | | | |
| 917 | | | | | | | | | | | | | | | |
| 918 | | | | | | | | | | | | | | | |
| 919 | | | | | | | | | | | | | | | |
| 920 | | | | | | | | | | | | | | | |
| 921 | | | | | | | | | | | | | | | |
| 922 | | | | | | | | | | | | | | | |
| 923 | | | | | | | | | | | | | | | |
| 924 | | | | | | | | | | | | | | | |
| 925 | | | | | | | | | | | | | | | |
| 926 | | | | | | | | | | | | | | | |
| 927 | | | | | | | | | | | | | | | |
| 928 | | | | | | | | | | | | | | | |
| 929 | | | | | | | | | | | | | | | |
| 930 | | | | | | | | | | | | | | | |
| 931 | | | | | | | | | | | | | | | |
| 932 | | | | | | | | | | | | | | | |
| 933 | | | | | | | | | | | | | | | |
| 934 | | | | | | | | | | | | | | | |
| 935 | | | | | | | | | | | | | | | |
| 936 | | | | | | | | | | | | | | | |
| 937 | | | | | | | | | | | | | | | |
| 938 | | | | | | | | | | | | | | | |
| 939 | | | | | | | | | | | | | | | |
| 940 | | | | | | | | | | | | | | | |
| 941 | | | | | | | | | | | | | | | |
| 942 | | | | | | | | | | | | | | | |
| 943 | | | | | | | | | | | | | | | |
| 944 | | | | | | | | | | | | | | | |
| 945 | | | | | | | | | | | | | | | |
| 946 | | | | | | | | | | | | | | | |
| 947 | | | | | | | | | | | | | | | |
| 948 | | | | | | | | | | | | | | | |
| 949 | | | | | | | | | | | | | | | |
| 950 | | | | | | | | | | | | | | | |
| 951 | | | | | | | | | | | | | | | |
| 952 | | | | | | | | | | | | | | | |
| 953 | | | | | | | | | | | | | | | |
| 954 | | | | | | | | | | | | | | | |
| 955 | | | | | | | | | | | | | | | |
| 956 | | | | | | | | | | | | | | | |
| 957 | | | | | | | | | | | | | | | |
| 958 | | | | | | | | | | | | | | | |
| 959 | | | | | | | | | | | | | | | |
| 960 | | | | | | | | | | | | | | | |
| 961 | | | | | | | | | | | | | | | |
| 962 | | | | | | | | | | | | | | | |
| 963 | | | | | | | | | | | | | | | |
| 964 | | | | | | | | | | | | | | | |
| 965 | | | | | | | | | | | | | | | |
| 966 | | | | | | | | | | | | | | | |
| 967 | | | | | | | | | | | | | | | |
| 968 | | | | | | | | | | | | | | | |
| 969 | | | | | | | | | | | | | | | |
| 970 | | | | | | | | | | | | | | | |
| 971 | | | | | | | | | | | | | | | |
| 972 | | | | | | | | | | | | | | | |
| 973 | | | | | | | | | | | | | | | |
| 974 | | | | | | | | | | | | | | | |
| 975 | | | | | | | | | | | | | | | |
| 976 | | | | | | | | | | | | | | | |
| 977 | | | | | | | | | | | | | | | |
| 978 | | | | | | | | | | | | | | | |
| 979 | | | | | | | | | | | | | | | |
| 980 | | | | | | | | | | | | | | | |
| 981 | | | | | | | | | | | | | | | |
| 982 | | | | | | | | | | | | | | | |
| 983 | | | | | | | | | | | | | | | |
| 984 | | | | | | | | | | | | | | | |
| 985 | | | | | | | | | | | | | | | |
| 986 | | | | | | | | | | | | | | | |
| 987 | | | | | | | | | | | | | | | |
| 988 | | | | | | | | | | | | | | | |
| 989 | | | | | | | | | | | | | | | |
| 990 | | | | | | | | | | | | | | | |
| 991 | | | | | | | | | | | | | | | |
| 992 | | | | | | | | | | | | | | | |
| 993 | | | | | | | | | | | | | | | |
| 994 | | | | | | | | | | | | | | | |
| 995 | | | | | | | | | | | | | | | |
| 996 | | | | | | | | | | | | | | | |
| 997 | | | | | | | | | | | | | | | |
| 998 | | | | | | | | | | | | | | | |
| 999 | | | | | | | | | | | | | | | |
| 1000 | | | | | | | | | | | | | | | |
| 1001 | | | | | | | | | | | | | | | |
| 1002 | | | | | | | | | | | | | | | |
| 1003 | | | | | | | | | | | | | | | |
| 1004 | | | | | | | | | | | | | | | |
| 1005 | | | | | | | | | | | | | | | |
| 1006 | | | | | | | | | | | | | | | |
| 1007 | | | | | | | | | | | | | | | |
| 1008 | | | | | | | | | | | | | | | |
| 1009 | | | | | | | | | | | | | | | |
| 1010 | | | | | | | | | | | | | | | |
| 1011 | | | | | | | | | | | | | | | |
| 1012 | | | | | | | | | | | | | | | |
| 1013 | | | | | | | | | | | | | | | |
| 1014 | | | | | | | | | | | | | | | |
| 1015 | | | | | | | | | | | | | | | |
| 1016 | | | | | | | | | | | | | | | |
| 1017 | | | | | | | | | | | | | | | |
| 1018 | | | | | | | | | | | | | | | |
| 1019 | | | | | | | | | | | | | | | |
| 1020 | | | | | | | | | | | | | | | |
| 1021 | | | | | | | | | | | | | | | |
| 1022 | | | | | | | | | | | | | | | |
| 1023 | | | | | | | | | | | | | | | |
| 1024 | | | | | | | | | | | | | | | |
| 1025 | | | | | | | | | | | | | | | |
| 1026 | | | | | | | | | | | | | | | |
| 1027 | | | | | | | | | | | | | | | |
| 1028 | | | | | | | | | | | | | | | |
| 1029 | | | | | | | | | | | | | | | |
| 1030 | | | | | | | | | | | | | | | |
| 1031 | | | | | | | | | | | | | | | |
| 1032 | | | | | | | | | | | | | | | |
| 1033 | | | | | | | | | | | | | | | |
| 1034 | | | | | | | | | | | | | | | |
| 1035 | | | | | | | | | | | | | | | |
| 1036 | | | | | | | | | | | | | | | |
| 1037 | | | | | | | | | | | | | | | |
| 1038 | | | | | | | | | | | | | | | |
| 1039 | | | | | | | | | | | | | | | |
| 1040 | | | | | | | | | | | | | | | |
| 1041 | | | | | | | | | | | | | | | |
| 1042 | | | | | | | | | | | | | | | |
| 1043 | | | | | | | | | | | | | | | |
| 1044 | | | | | | | | | | | | | | | |
| 1045 | | | | | | | | | | | | | | | |
| 1046 | | | | | | | | | | | | | | | |
| 1047 | | | | | | | | | | | | | | | |
| 1048 | | | | | | | | | | | | | | | |
| 1049 | | | | | | | | | | | | | | | |
| 1050 | | | | | | | | | | | | | | | |
| 1051 | | | | | | | | | | | | | | | |
| 1052 | | | | | | | | | | | | | | | |
| 1053 | | | | | | | | | | | | | | | |
| 1054 | | | | | | | | | | | | | | | |
| 1055 | | | | | | | | | | | | | | | |
| 1056 | | | | | | | | | | | | | | | |
| 1057 | | | | | | | | | | | | | | | |
| 1058 | | | | | | | | | | | | | | | |
| 1059 | | | | | | | | | | | | | | | |
| 1060 | | | | | | | | | | | | | | | |
| 1061 | | | | | | | | | | | | | | | |
| 1062 | | | | | | | | | | | | | | | |
| 1063 | | | | | | | | | | | | | | | |
| 1064 | | | | | | | | | | | | | | | |
| 1065 | | | | | | | | | | | | | | | |
| 1066 | | | | | | | | | | | | | | | |
| 1067 | | | | | | | | | | | | | | | |
| 1068 | | | | | | | | | | | | | | | |
| 1069 | | | | | | | | | | | | | | | |
| 1070 | | | | | | | | | | | | | | | |
| 1071 | | | | | | | | | | | | | | | |
| 1072 | | | | | | | | | | | | | | | |
| 1073 | | | | | | | | | | | | | | | |
| 1074 | | | | | | | | | | | | | | | |
| 1075 | | | | | | | | | | | | | | | |
| 1076 | | | | | | | | | | | | | | | |
| 1077 | | | | | | | | | | | | | | | |
| 1078 | | | | | | | | | | | | | | | |
| 1079 | | | | | | | | | | | | | | | |
| 1080 | | | | | | | | | | | | | | | |
| 1081 | | | | | | | | | | | | | | | |
| 1082 | | | | | | | | | | | | | | | |
| 1083 | | | | | | | | | | | | | | | |
| 1084 | | | | | | | | | | | | | | | |
| 1085 | | | | | | | | | | | | | | | |
| 1086 | | | | | | | | | | | | | | | |
| 1087 | | | | | | | | | | | | | | | |
| 1088 | | | | | | | | | | | | | | | |
| 1089 | | | | | | | | | | | | | | | |
| 1090 | | | | | | | | | | | | | | | |
| 1091 | | | | | | | | | | | | | | | |
| 1092 | | | | | | | | | | | | | | | |
| 1093 | | | | | | | | | | | | | | | |
| 1094 | | | | | | | | | | | | | | | |
| 1095 | | | | | | | | | | | | | | | |
| 1096 | | | | | | | | | | | | | | | |
| 1097 | | | | | | | | | | | | | | | |
| 1098 | | | | | | | | | | | | | | | |
| 1099 | | | | | | | | | | | | | | | |
| 1100 | | | | | | | | | | | | | | | |
| 1101 | | | | | | | | | | | | | | | |
| 1102 | | | | | | | | | | | | | | | |
| 1103 | | | | | | | | | | | | | | | |
| 1104 | | | | | | | | | | | | | | | |
| 1105 | | | | | | | | | | | | | | | |
| 1106 | | | | | | | | | | | | | | | |
| 1107 | | | | | | | | | | | | | | | |
| 1108 | | | | | | | | | | | | | | | |
| 1109 | | | | | | | | | | | | | | | |
| 1110 | | | | | | | | | | | | | | | |
| 1111 | | | | | | | | | | | | | | | |
| 1112 | | | | | | | | | | | | | | | |
| 1113 | | | | | | | | | | | | | | | |
| 1114 | | | | | | | | | | | | | | | |
| 1115 | | | | | | | | | | | | | | | |
| 1116 | | | | | | | | | | | | | | | |
| 1117 | | | | | | | | | | | | | | | |
| 1118 | | | | | | | | | | | | | | | |
| 1119 | | | | | | | | | | | | | | | |
| 1120 | | | | | | | | | | | | | | | |
| 1121 | | | | | | | | | | | | | | | |
| 1122 | | | | | | | | | | | | | | | |
| 1123 | | | | | | | | | | | | | | | |
| 1124 | | | | | | | | | | | | | | | |
| 1125 | | | | | | | | | | | | | | | |
| 1126 | | | | | | | | | | | | | | | |
| 1127 | | | | | | | | | | | | | | | |
| 1128 | | | | | | | | | | | | | | | |
| 1129 | | | | | | | | | | | | | | | |
| 1130 | | | | | | | | | | | | | | | |
| 1131 | | | | | | | | | | | | | | | |
| 1132 | | | | | | | | | | | | | | | |
| 1133 | | | | | | | | | | | | | | | |
| 1134 | | | | | | | | | | | | | | | |
| 1135 | | | | | | | | | | | | | | | |
| 1136 | | | | | | | | | | | | | | | |
| 1137 | | | | | | | | | | | | | | | |
| 1138 | | | | | | | | | | | | | | | |
| 1139 | | | | | | | | | | | | | | | |
| 1140 | | | | | | | | | | | | | | | |
| 1141 | | | | | | | | | | | | | | | |
| 1142 | | | | | | | | | | | | | | | |
| 1143 | | | | | | | | | | | | | | | |
| 1144 | | | | | | | | | | | | | | | |
| 1145 | | | | | | | | | | | | | | | |
| 1146 | | | | | | | | | | | | | | | |
| 1147 | | | | | | | | | | | | | | | |
| 1148 | | | | | | | | | | | | | | | |
| 1149 | | | | | | | | | | | | | | | |
| 1150 | | | | | | | | | | | | | | | |
| 1151 | | | | | | | | | | | | | | | |
| 1152 | | | | | | | | | | | | | | | |
| 1153 | | | | | | | | | | | | | | | |
| 1154 | | | | | | | | | | | | | | | |
| 1155 | | | | | | | | | | | | | | | |
| 1156 | | | | | | | | | | | | | | | |
| 1157 | | | | | | | | | | | | | | | |
| 1158 | | | | | | | | | | | | | | | |
| 1159 | | | | | | | | | | | | | | | |
| 1160 | | | | | | | | | | | | | | | |
| 1161 | | | | | | | | | | | | | | | |
| 1162 | | | | | | | | | | | | | | | |
| 1163 | | | | | | | | | | | | | | | |
| 1164 | | | | | | | | | | | | | | | |
| 1165 | | | | | | | | | | | | | | | |
| 1166 | | | | | | | | | | | | | | | |
| 1167 | | | | | | | | | | | | | | | |
| 1168 | | | | | | | | | | | | | | | |
| 1169 | | | | | | | | | | | | | | | |
| 1170 | | | | | | | | | | | | | | | |
| 1171 | | | | | | | | | | | | | | | |
| 1172 | | | | | | | | | | | | | | | |
| 1173 | | | | | | | | | | | | | | | |
| 1174 | | | | | | | | | | | | | | | |
| 1175 | | | | | | | | | | | | | | | |
| 1176 | | | | | | | | | | | | | | | |
| 1177 | | | | | | | | | | | | | | | |
| 1178 | | | | | | | | | | | | | | | |
| 1179 | | | | | | | | | | | | | | | |
| 1180 | | | | | | | | | | | | | | | |
| 1181 | | | | | | | | | | | | | | | |
| 1182 | | | | | | | | | | | | | | | |
| 1183 | | | | | | | | | | | | | | | |
| 1184 | | | | | | | | | | | | | | | |
| 1185 | | | | | | | | | | | | | | | |
| 1186 | | | | | | | | | | | | | | | |
| 1187 | | | | | | | | | | | | | | | |
| 1188 | | | | | | | | | | | | | | | |
| 1189 | | | | | | | | | | | | | | | |
| 1190 | | | | | | | | | | | | | | | |
| 1191 | | | | | | | | | | | | | | | |
| 1192 | | | | | | | | | | | | | | | |
| 1193 | | | | | | | | | | | | | | | |
| 1194 | | | | | | | | | | | | | | | |
| 1195 | | | | | | | | | | | | | | | |
| 1196 | | | | | | | | | | | | | | | |
| 1197 | | | | | | | | | | | | | | | |
| 1198 | | | | | | | | | | | | | | | |
| 1199 | | | | | | | | | | | | | | | |
| 1200 | | | | | | | | | | | | | | | |
| 1201 | | | | | | | | | | | | | | | |
| 1202 | | | | | | | | | | | | | | | |
| 1203 | | | | | | | | | | | | | | | |
| 1204 | | | | | | | | | | | | | | | |
| 1205 | | | | | | | | | | | | | | | |
| 1206 | | | | | | | | | | | | | | | |
| 1207 | | | | | | | | | | | | | | | |
| 1208 | | | | | | | | | | | | | | | |
| 1209 | | | | | | | | | | | | | | | |
| 1210 | | | | | | | | | | | | | | | |
| 1211 | | | | | | | | | | | | | | | |
| 1212 | | | | | | | | | | | | | | | |
| 1213 | | | | | | | | | | | | | | | |
| 1214 | | | | | | | | | | | | | | | |
| 1215 | | | | | | | | | | | | | | | |
| 1216 | | | | | | | | | | | | | | | |
| 1217 | | | | | | | | | | | | | | | |
| 1218 | | | | | | | | | | | | | | | |
| 1219 | | | | | | | | | | | | | | | |
| 1220 | | | | | | | | | | | | | | | |
| 1221 | | | | | | | | | | | | | | | |
| 1222 | | | | | | | | | | | | | | | |
| 1223 | | | | | | | | | | | | | | | |
| 1224 | | | | | | | | | | | | | | | |
| 1225 | | | | | | | | | | | | | | | |
| 1226 | | | | | | | | | | | | | | | |
| 1227 | | | | | | | | | | | | | | | |
| 1228 | | | | | | | | | | | | | | | |
| 1229 | | | | | | | | | | | | | | | |
| 1230 | | | | | | | | | | | | | | | |
| 1231 | | | | | | | | | | | | | | | |
| 1232 | | | | | | | | | | | | | | | |
| 1233 | | | | | | | | | | | | | | | |
| 1234 | | | | | | | | | | | | | | | |
| 1235 | | | | | | | | | | | | | | | |
| 1236 | | | | | | | | | | | | | | | |
| 1237 | | | | | | | | | | | | | | | |
| 1238 | | | | | | | | | | | | | | | |
| 1239 | | | | | | | | | | | | | | | |
| 1240 | | | | | | | | | | | | | | | |
| 1241 | | | | | | | | | | | | | | | |
| 1242 | | | | | | | | | | | | | | | |
| 1243 | | | | | | | | | | | | | | | |
| 1244 | | | | | | | | | | | | | | | |
| 1245 | | | | | | | | | | | | | | | |
| 1246 | | | | | | | | | | | | | | | |
| 1247 | | | | | | | | | | | | | | | |
| 1248 | | | | | | | | | | | | | | | |
| 1249 | | | | | | | | | | | | | | | |
| 1250 | | | | | | | | | | | | | | | |
| 1251 | | | | | | | | | | | | | | | |
| 1252 | | | | | | | | | | | | | | | |
| 1253 | | | | | | | | | | | | | | | |
| 1254 | | | | | | | | | | | | | | | |
| 1255 | | | | | | | | | | | | | | | |
| 1256 | | | | | | | | | | | | | | | |
| 1257 | | | | | | | | | | | | | | | |
| 1258 | | | | | | | | | | | | | | | |
| 1259 | | | | | | | | | | | | | | | |
| 1260 | | | | | | | | | | | | | | | |
| 1261 | | | | | | | | | | | | | | | |
| 1262 | | | | | | | | | | | | | | | |
| 1263 | | | | | | | | | | | | | | | |
| 1264 | | | | | | | | | | | | | | | |
| 1265 | | | | | | | | | | | | | | | |
| 1266 | | | | | | | | | | | | | | | |
| 1267 | | | | | | | | | | | | | | | |
| 1268 | | | | | | | | | | | | | | | |
| 1269 | | | | | | | | | | | | | | | |
| 1270 | | | | | | | | | | | | | | | |
| 1271 | | | | | | | | | | | | | | | |
| 1272 | | | | | | | | | | | | | | | |
| 1273 | | | | | | | | | | | | | | | |
| 1274 | | | | | | | | | | | | | | | |
| 1275 | | | | | | | | | | | | | | | |
| 1276 | | | | | | | | | | | | | | | |
| 1277 | | | | | | | | | | | | | | | |
| 1278 | | | | | | | | | | | | | | | |
| 1279 | | | | | | | | | | | | | | | |
| 1280 | | | | | | | | | | | | | | | |
| 1281 | | | | | | | | | | | | | | | |
| 1282 | | | | | | | | | | | | | | | |
| 1283 | | | | | | | | | | | | | | | |
| 1284 | | | | | | | | | | | | | | | |
| 1285 | | | | | | | | | | | | | | | |
| 1286 | | | | | | | | | | | | | | | |
| 1287 | | | | | | | | | | | | | | | |
| 1288 | | | | | | | | | | | | | | | |
| 1289 | | | | | | | | | | | | | | | |
| 1290 | | | | | | | | | | | | | | | |
| 1291 | | | | | | | | | | | | | | | |
| 1292 | | | | | | | | | | | | | | | |
| 1293 | | | | | | | | | | | | | | | |
| 1294 | | | | | | | | | | | | | | | |
| 1295 | | | | | | | | | | | | | | | |
| 1296 | | | | | | | | | | | | | | | |
| 1297 | | | | | | | | | | | | | | | |
| 1298 | | | | | | | | | | | | | | | |
| 1299 | | | | | | | | | | | | | | | |
| 1300 | | | | | | | | | | | | | | | |
| 1301 | | | | | | | | | | | | | | | |
| 1302 | | | | | | | | | | | | | | | |
| 1303 | | | | | | | | | | | | | | | |
| 1304 | | | | | | | | | | | | | | | |
| 1305 | | | | | | | | | | | | | | | |
| 1306 | | | | | | | | | | | | | | | |
| 1307 | | | | | | | | | | | | | | | |
| 1308 | | | | | | | | | | | | | | | |
| 1309 | | | | | | | | | | | | | | | |
| 1310 | | | | | | | | | | | | | | | |
| 1311 | | | | | | | | | | | | | | | |
| 1312 | | | | | | | | | | | | | | | |
| 1313 | | | | | | | | | | | | | | | |
| 1314 | | | | | | | | | | | | | | | |
| 1315 | | | | | | | | | | | | | | | |
| 1316 | | | | | | | | | | | | | | | |
| 1317 | | | | | | | | | | | | | | | |
| 1318 | | | | | | | | | | | | | | | |
| 1319 | | | | | | | | | | | | | | | |
| 1320 | | | | | | | | | | | | | | | |
| 1321 | | | | | | | | | | | | | | | |
| 1322 | | | | | | | | | | | | | | | |
| 1323 | | | | | | | | | | | | | | | |
| 1324 | | | | | | | | | | | | | | | |
| 1325 | | | | | | | | | | | | | | | |
| 1326 | | | | | | | | | | | | | | | |
| 1327 | | | | | | | | | | | | | | | |
| 1328 | | | | | | | | | | | | | | | |
| 1329 | | | | | | | | | | | | | | | |
| 1330 | | | | | | | | | | | | | | | |
| 1331 | | | | | | | | | | | | | | | |
| 1332 | | | | | | | | | | | | | | | |
| 1333 | | | | | | | | | | | | | | | |
| 1334 | | | | | | | | | | | | | | | |
| 1335 | | | | | | | | | | | | | | | |
| 1336 | | | | | | | | | | | | | | | |
| 1337 | | | | | | | | | | | | | | | |
| 1338 | | | | | | | | | | | | | | | |
| 1339 | | | | | | | | | | | | | | | |
| 1340 | | | | | | | | | | | | | | | |
| 1341 | | | | | | | | | | | | | | | |
| 1342 | | | | | | | | | | | | | | | |
| 1343 | | | | | | | | | | | | | | | |

(Part C)

| | Y | | | | AC | | | | AG | | | | AK | | |
|---|---|---|---|---|---|---|---|---|---|---|---|---|---|---|---|
| | DruD | | | | DruE | | | | DruM | | | | DruF | | |
| | protein | Z | AA | AB | protein | AD | AE | AF | protein | AH | AI | AJ | protein | AL | AM |
| | length | DruE | PRT SEQ | DNA SEQ | length | DruM | PRT SEQ | DNA SEQ | length | DruF | PRT SEQ | DNA SEQ | length | DruG | PRT SEQ |
| 1 | (aa) | protein_accession | ID NO: | ID NO: | (aa) | protein_accession | ID NO: | ID NO: | (aa) | protein_accession | ID NO: | ID NO: | (aa) | protein_accession | ID NO: |
| 2 | | CEP95573.1 | 23937 | 27166 | 1753 | | | | | | | | | | |
| 3 | 363 | KUO96134.1 | 23942 | 27171 | 1851 | | | | | | | | | | |
| 4 | 312 | GAC90454.1 | 23946 | 27175 | 1784 | | | | | | | | | | |
| 5 | 358 | KQT61311.1 | 23949 | 27178 | 1847 | | | | | | | | | | |
| 6 | 358 | KQT62613.1 | 23952 | 27181 | 1847 | | | | | | | | | | |
| 7 | 316 | KMN72584.1 | 23956 | 27185 | 1775 | | | | | | | | | | |
| 8 | 316 | EJQ91446.1 | 23960 | 27189 | 1777 | | | | | | | | | | |
| 9 | 292 | CRK83012.1 | 23964 | 27193 | 1752 | | | | | | | | | | |
| 10 | 333 | KEF29417.1 | 23967 | 27196 | 1743 | | | | | | | | | | |
| 11 | 330 | ETO96255.1 | 23970 | 27199 | 1747 | | | | | | | | | | |
| 12 | 360 | ALK08977.1 | 23973 | 27202 | 1854 | | | | | | | | | | |
| 13 | 360 | CUU41638.1 | 23976 | 27205 | 1854 | | | | | | | | | | |
| 14 | 260 | KGC93324.1 | 23981 | 27210 | 1752 | | | | | | | | | | |
| 15 | 359 | KGV75903.1 | 23984 | 27213 | 1856 | | | | | | | | | | |
| 16 | | EDO89777.1 | 23988 | 27217 | 1787 | | | | | | | | | | |
| 17 | 260 | AJX60137.1 | 23993 | 27222 | 1752 | | | | | | | | | | |
| 18 | | AIP62511.1 | 23996 | 27225 | 1752 | | | | | | | | | | |
| 19 | | KVO65552.1 | 24000 | 27229 | 1752 | | | | | | | | | | |
| 20 | | KVO87082.1 | 24003 | 27232 | 1753 | | | | | | | | | | |
| 21 | 359 | CDI04326.1 | 24006 | 27235 | 1842 | | | | | | | | | | |
| 22 | 351 | KPA09466.1 | 24010 | 27239 | 1795 | | | | | | | | | | |
| 23 | 359 | KHD06508.1 | 24013 | 27242 | 1796 | | | | | | | | | | |
| 24 | 350 | KJH65674.1 | 24018 | 27247 | 1843 | | | | | | | | | | |
| 25 | 340 | CDM70056.1 | 24022 | 27251 | 1761 | | | | | | | | | | |
| 26 | 352 | KEI16343.1 | 24025 | 27254 | 1767 | | | | | | | | | | |
| 27 | 342 | EGB92910.1 | 24029 | 27258 | 1738 | | | | | | | | | | |
| 28 | 339 | ACL18697.1 | 24032 | 27261 | 1740 | | | | | | | | | | |
| 29 | 338 | ACV64030.1 | 24035 | 27264 | 1741 | | | | | | | | | | |
| 30 | 341 | AMC93639.1 | 24038 | 27267 | 1739 | | | | | | | | | | |
| 31 | 347 | KHG78161.1 | 24043 | 27272 | 1836 | | | | | | | | | | |
| 32 | 347 | KHI73839.1 | 24048 | 27277 | 1836 | | | | | | | | | | |
| 33 | 347 | KHI66628.1 | 24051 | 27280 | 1836 | | | | | | | | | | |
| 34 | 347 | KHI48868.1 | 24056 | 27285 | 1836 | | | | | | | | | | |
| 35 | 347 | KHI24186.1 | 24060 | 27289 | 1836 | | | | | | | | | | |
| 36 | 347 | KMV42880.1 | 24065 | 27294 | 1836 | | | | | | | | | | |
| 37 | 347 | KQJ50743.1 | 24070 | 27299 | 1836 | | | | | | | | | | |
| 38 | 347 | ALN47014.1 | 24075 | 27304 | 1836 | | | | | | | | | | |
| 39 | 347 | KSY14480.1 | 24080 | 27309 | 1836 | | | | | | | | | | |
| 40 | 347 | KXR68575.1 | 24085 | 27314 | 1836 | | | | | | | | | | |
| 41 | 347 | KIO85003.1 | 24090 | 27319 | 1836 | | | | | | | | | | |
| 42 | 347 | EQS48047.1 | 24095 | 27324 | 1836 | | | | | | | | | | |
| 43 | 347 | EQO85270.1 | 24100 | 27329 | 1836 | | | | | | | | | | |
| 44 | 347 | EQO74909.1 | 24105 | 27334 | 1836 | | | | | | | | | | |
| 45 | 347 | EYT06142.1 | 24110 | 27339 | 1836 | | | | | | | | | | |
| 46 | 347 | EQV41650.1 | 24115 | 27344 | 1836 | | | | | | | | | | |
| 47 | 347 | ELC24072.1 | 24120 | 27349 | 1836 | | | | | | | | | | |
| 48 | 347 | ELH39088.1 | 24125 | 27354 | 1836 | | | | | | | | | | |
| 49 | 347 | EOV00815.1 | 24130 | 27359 | 1836 | | | | | | | | | | |
| 50 | 347 | EOU57730.1 | 24135 | 27364 | 1836 | | | | | | | | | | |
| 51 | 347 | ELE47062.1 | 24140 | 27369 | 1836 | | | | | | | | | | |
| 52 | 347 | ELE76870.1 | 24145 | 27374 | 1836 | | | | | | | | | | |
| 53 | 347 | EU64787.1 | 24150 | 27379 | 1836 | | | | | | | | | | |
| 54 | 347 | EOV85621.1 | 24155 | 27384 | 1836 | | | | | | | | | | |
| 55 | 347 | ELE86434.1 | 24160 | 27389 | 1836 | | | | | | | | | | |
| 56 | 347 | EWY52042.1 | 24165 | 27394 | 1836 | | | | | | | | | | |
| 57 | 260 | EFK51867.1 | 24170 | 27399 | 1836 | | | | | | | | | | |
| 58 | 260 | EGU96603.1 | 24173 | 27402 | 1836 | | | | | | | | | | |
| 59 | 347 | EMZ39753.1 | 24178 | 27407 | 1836 | | | | | | | | | | |
| 60 | 347 | EGI33544.1 | 24182 | 27411 | 1836 | | | | | | | | | | |
| 61 | 347 | EQX30248.1 | 24187 | 27416 | 1836 | | | | | | | | | | |
| 62 | 347 | EQZ12281.1 | 24192 | 27421 | 1836 | | | | | | | | | | |
| 63 | 347 | ERA40833.1 | 24197 | 27426 | 1836 | | | | | | | | | | |
| 64 | 338 | CDA97614.1 | 24201 | 27430 | 1732 | | | | | | | | | | |
| 65 | 317 | KFX30968.1 | 24205 | 27434 | 1786 | | | | | | | | | | |
| 66 | 317 | KYD25146.1 | 24209 | 27438 | 1786 | | | | | | | | | | |
| 67 | 317 | KLR73617.1 | 24212 | 27441 | 1786 | | | | | | | | | | |
| 68 | 317 | ADU94759.1 | 24216 | 27445 | 1787 | | | | | | | | | | |
| 69 | 317 | ACX76986.1 | 24220 | 27449 | 1787 | | | | | | | | | | |
| 70 | 317 | KFL17493.1 | 24224 | 27453 | 1786 | | | | | | | | | | |
| 71 | 317 | KFX35841.1 | 24228 | 27457 | 1786 | | | | | | | | | | |
| 72 | 365 | EDQ34543.1 | 24231 | 27460 | 1848 | | | | | | | | | | |
| 73 | 360 | KRB96439.1 | 24234 | 27463 | 1851 | | | | | | | | | | |
| 74 | 370 | AGK57209.1 | 24237 | 27466 | 1846 | | | | | | | | | | |
| 75 | 342 | KMV96846.1 | 24242 | 27471 | 1303 | | | | | | | | | | |
| 76 | 354 | ESN04441.1 | 24246 | 27475 | 1846 | | | | | | | | | | |
| 77 | 351 | ABX40975.1 | 24249 | 27478 | 1759 | | | | | | | | | | |
| 78 | 338 | EOS72128.1 | 24253 | 27482 | 1728 | | | | | | | | | | |
| 79 | | EDM25763.1 | 24256 | 27485 | 1813 | | | | | | | | | | |
| 80 | 356 | ESY17005.1 | 24259 | 27488 | 1853 | | | | | | | | | | |
| 81 | 346 | KUK70365.1 | 24263 | 27492 | 1774 | | | | | | | | | | |
| 82 | 343 | EHQ36505.1 | 24267 | 27496 | 1763 | | | | | | | | | | |
| 83 | 347 | KKG83060.1 | 24271 | 27500 | 1775 | | | | | | | | | | |
| 84 | 362 | EQM86810.1 | 24274 | 27503 | 1857 | | | | | | | | | | |
| 85 | 363 | AU18570.1 | 24277 | 27506 | 1858 | | | | | | | | | | |
| 86 | 363 | GAD34406.1 | 24280 | 27509 | 1858 | | | | | | | | | | |
| 87 | 360 | ADJ29891.1 | 24283 | 27512 | 1849 | | | | | | | | | | |
| 88 | 308 | KMP10707.1 | 24286 | 27515 | 1844 | | | | | | | | | | |
| 89 | 354 | EGY00301.1 | 24289 | 27518 | 1849 | | | | | | | | | | |
| 90 | 349 | EPY09172.1 | 24293 | 27522 | 1746 | | | | | | | | | | |
| 91 | 352 | ACX63340.1 | 24297 | 27526 | 1759 | | | | | | | | | | |
| 92 | 347 | KHN90282.1 | 24302 | 27531 | 1836 | | | | | | | | | | |
| 93 | 354 | KGA32596.1 | 24305 | 27534 | 1848 | | | | | | | | | | |
| 94 | 339 | AJQ25680.1 | 24309 | 27538 | 1735 | | | | | | | | | | |
| 95 | 352 | CUH95395.1 | 24313 | 27542 | 1734 | | | | | | | | | | |
| 96 | | KSF97362.1 | 24317 | 27546 | 1840 | | | | | | | | | | |
| 97 | 346 | KSL25394.1 | 24320 | 27549 | 1841 | | | | | | | | | | |
| 98 | | KSO15705.1 | 24324 | 27553 | 1840 | | | | | | | | | | |
| 99 | 353 | BAR67381.2 | 24329 | 27558 | 1844 | | | | | | | | | | |
| 100 | 289 | KAJ21864.1 | 24333 | 27562 | 1802 | | | | | | | | | | |
| 101 | | AGI81183.1 | 24336 | 27565 | 1844 | | | | | | | | | | |
| 102 | 343 | ERY34408.1 | 24341 | 27570 | 1840 | | | | | | | | | | |
| 103 | 353 | EZP23713.1 | 24346 | 27575 | 1844 | | | | | | | | | | |
| 104 | 345 | ERV69459.1 | 24351 | 27580 | 1840 | | | | | | | | | | |
| 105 | | EQM83906.1 | 24355 | 27584 | 1840 | | | | | | | | | | |
| 106 | 344 | AJP52376.1 | 24360 | 27589 | 1848 | | | | | | | | | | |
| 107 | 344 | EST14434.1 | 24365 | 27594 | 1845 | | | | | | | | | | |
| 108 | 343 | ENY74502.1 | 24370 | 27599 | 1840 | | | | | | | | | | |
| 109 | 353 | KWR75282.1 | 24373 | 27602 | 1844 | | | | | | | | | | |
| 110 | 344 | KFE46440.1 | 24378 | 27607 | 1851 | | | | | | | | | | |
| 111 | 371 | AMP72545.1 | 24383 | 27612 | 1853 | | | | | | | | | | |
| 112 | 361 | KQQ11278.1 | 24386 | 27615 | 1860 | | | | | | | | | | |
| 113 | 356 | KQS82594.1 | 24389 | 27618 | 1849 | | | | | | | | | | |
| 114 | 356 | KQS78957.1 | 24392 | 27621 | 1849 | | | | | | | | | | |
| 115 | 345 | AKE89963.1 | 24395 | 27624 | 2149 | | | | | | | | | | |
| 116 | 347 | EME23885.1 | 24398 | 27627 | 1805 | | | | | | | | | | |
| 117 | 364 | CDZ88162.1 | 24402 | 27631 | 2149 | | | | | | | | | | |
| 118 | 355 | ETI62662.1 | 24405 | 27634 | 1847 | | | | | | | | | | |
| 119 | 363 | EFL24975.1 | 24408 | 27637 | 1860 | | | | | | | | | | |
| 120 | 332 | AGA58892.1 | 24411 | 27640 | 1735 | | | | | | | | | | |
| 121 | 343 | EEY51342.1 | 24416 | 27645 | 1831 | | | | | | | | | | |
| 122 | 304 | AIL69853.1 | 24421 | 27650 | 1831 | | | | | | | | | | |
| 123 | 347 | CNL41877.1 | 24426 | 27655 | 1835 | | | | | | | | | | |
| 124 | | CUI54792.1 | 24427 | 27656 | 1891 | CUI54813.1 | 24428 | 27657 | 382 | CUI54751.1 | 24429 | 27658 | 659 | CUI54773.1 | 24430 |
| 125 | | KUL31266.1 | 24431 | 27660 | 1778 | KUL31262.1 | 24432 | 27661 | 427 | KUL31267.1 | 24433 | 27662 | 1018 | | |
| 126 | | AGL13716.1 | 24434 | 27663 | 1783 | AGL13720.1 | 24435 | 27664 | 354 | AGL13717.1 | 24436 | 27665 | 1021 | | |
| 127 | | EGP54151.1 | 24437 | 27666 | 1957 | EGP54154.1 | 24438 | 27667 | 614 | EGP54153.1 | 24439 | 27668 | 822 | EGP54152.1 | 24440 |
| 128 | | ABW19397.1 | 24441 | 27670 | 1903 | ABW19395.1 | 24442 | 27671 | 329 | ABW19399.1 | 24443 | 27672 | 683 | | |
| 129 | | ALO16789.1 | 24444 | 27673 | 2026 | ALO16791.1 | 24445 | 27674 | 390 | ALO16788.1 | 24446 | 27675 | 948 | | |
| 130 | | EIG62888.1 | 24447 | 27676 | 1953 | EIG62885.1 | 24448 | 27677 | 409 | EIG62886.1 | 24449 | 27678 | 852 | EIG62887.1 | 24450 |
| 131 | | ADL01345.1 | 24451 | 27680 | 1954 | ADL01343.1 | 24452 | 27681 | 377 | ADL01347.1 | 24453 | 27682 | 718 | ADL01346.1 | 24454 |
| 132 | | EEE02134.1 | 24455 | 27684 | 1968 | | | | | EEE02132.1 | 24456 | 27685 | 927 | EEE02133.1 | 24457 |
| 133 | | KWF28731.1 | 24458 | 27687 | 1948 | KWF28730.1 | 24459 | 27688 | 391 | KWF28733.1 | 24460 | 27689 | 892 | KWF28732.1 | 24461 |
| 134 | | KQR76945.1 | 24462 | 27691 | 1956 | KQR76951.1 | 24463 | 27692 | 382 | KQR76943.1 | 24464 | 27693 | 844 | KQR76944.1 | 24465 |
| 135 | | KVO29147.1 | 24466 | 27695 | 1947 | KVO29144.1 | 24467 | 27696 | 385 | | | | | KVO29146.1 | 24468 |
| 136 | | KVP15001.1 | 24469 | 27698 | 1947 | KVP14998.1 | 24470 | 27699 | 385 | | | | | KVP15000.1 | 24471 |
| 137 | | KVU67372.1 | 24472 | 27701 | 1948 | KVU67373.1 | 24473 | 27702 | 391 | KVU67370.1 | 24474 | 27703 | 892 | KVU67371.1 | 24475 |
| 138 | | KWH22082.1 | 24476 | 27705 | 1948 | KWH22081.1 | 24477 | 27706 | 391 | KWH22084.1 | 24478 | 27707 | 892 | KWH22083.1 | 24479 |
| 139 | | KWO52778.1 | 24480 | 27709 | 1947 | KWO52775.1 | 24481 | 27710 | 385 | | | | | KWO52777.1 | 24482 |
| 140 | | KQY41878.1 | 24483 | 27712 | 1833 | KQY41875.1 | 24484 | 27713 | 436 | KQY41880.1 | 24485 | 27714 | 692 | | |
| 141 | | ABP36100.1 | 24486 | 27715 | 1887 | ABP36104.1 | 24487 | 27716 | 467 | ABP36098.1 | 24488 | 27717 | 581 | | |
| 142 | | KXH85115.1 | 24489 | 27718 | 2009 | KXH85112.1 | 24490 | 27719 | 377 | KXH85116.1 | 24491 | 27720 | 948 | | |
| 143 | | ALD78636.1 | 24492 | 27721 | 1982 | ALD78633.1 | 24493 | 27722 | 361 | ALD78634.1 | 24494 | 27723 | 921 | ALD78635.1 | 24495 |
| 144 | | EEH92508.2 | 24496 | 27725 | 1947 | EEH92511.1 | 24497 | 27726 | 411 | EEH92510.1 | 24498 | 27727 | 854 | EEH92509.2 | 24499 |
| 145 | | GAL44508.1 | 24500 | 27729 | 1946 | GAL44505.1 | 24501 | 27730 | 395 | GAL44506.1 | 24502 | 27731 | 852 | GAL44507.1 | 24503 |
| 146 | | KUO74508.1 | 24504 | 27733 | 1914 | KUO74511.1 | 24505 | 27734 | 378 | KUO74506.1 | 24506 | 27735 | 675 | | |
| 147 | | AMP07507.1 | 24507 | 27736 | 1971 | AMP07506.1 | 24508 | 27737 | 379 | AMP07509.1 | 24509 | 27738 | 860 | AMP07508.1 | 24510 |
| 148 | | AIF40724.1 | 24511 | 27740 | 1809 | AIF40718.1 | 24512 | 27741 | 331 | AIF40722.1 | 24513 | 27742 | 683 | | |
| 149 | | ACT06326.1 | 24514 | 27743 | 1948 | ACT06329.1 | 24515 | 27744 | 411 | ACT06328.1 | 24516 | 27745 | 853 | ACT06327.1 | 24517 |
| 150 | | KLF19647.1 | 24518 | 27747 | 1982 | KLF19650.1 | 24519 | 27748 | 361 | KLF19649.1 | 24520 | 27749 | 921 | KLF19648.1 | 24521 |
| 151 | | KUQ16675.1 | 24522 | 27751 | 1982 | KUQ16672.1 | 24523 | 27752 | 361 | KUQ16673.1 | 24524 | 27753 | 921 | KUQ16674.1 | 24525 |
| 152 | | KUR17280.1 | 24526 | 27755 | 1982 | KUR17283.1 | 24527 | 27756 | 361 | KUR17282.1 | 24528 | 27757 | 921 | KUR17281.1 | 24529 |
| 153 | | KLG20346.1 | 24530 | 27759 | 1980 | KLG20343.1 | 24531 | 27760 | 361 | | | | | KLG20345.1 | 24532 |
| 154 | | KJL89848.1 | 24533 | 27762 | 1998 | KJL89845.1 | 24534 | 27763 | 361 | KJL89846.1 | 24535 | 27764 | 925 | KJL89847.1 | 24536 |
| 155 | | KJL84453.1 | 24537 | 27766 | 1998 | KJL84456.1 | 24538 | 27767 | 361 | KJL84455.1 | 24539 | 27768 | 925 | KJL84454.1 | 24540 |
| 156 | | KJL75892.1 | 24541 | 27770 | 1998 | KJL75889.1 | 24542 | 27771 | 361 | KJL75890.1 | 24543 | 27772 | 925 | KJL75891.1 | 24544 |
| 157 | | KJX56014.1 | 24545 | 27774 | 1998 | KJX56011.1 | 24546 | 27775 | 361 | KJX56012.1 | 24547 | 27776 | 925 | KJX56013.1 | 24548 |
| 158 | | KJX41325.1 | 24549 | 27778 | 1998 | KJX41322.1 | 24550 | 27779 | 361 | KJX41323.1 | 24551 | 27780 | 925 | KJX41324.1 | 24552 |
| 159 | | KJX62526.1 | 24553 | 27782 | 1998 | KJX62523.1 | 24554 | 27783 | 361 | KJX62524.1 | 24555 | 27784 | 925 | KJX62525.1 | 24556 |
| 160 | | KJX64332.1 | 24557 | 27786 | 1998 | KJX64329.1 | 24558 | 27787 | 361 | KJX64330.1 | 24559 | 27788 | 925 | KJX64331.1 | 24560 |
| 161 | | KJW84168.1 | 24561 | 27790 | 1998 | KJW84165.1 | 24562 | 27791 | 361 | KJW84166.1 | 24563 | 27792 | 925 | KJW84167.1 | 24564 |
| 162 | | KJX04040.1 | 24565 | 27794 | 1998 | KJX04037.1 | 24566 | 27795 | 361 | KJX04038.1 | 24567 | 27796 | 925 | KJX04039.1 | 24568 |
| 163 | | KJW83867.1 | 24569 | 27798 | 1998 | KJW83864.1 | 24570 | 27799 | 361 | KJW83865.1 | 24571 | 27800 | 925 | KJW83866.1 | 24572 |
| 164 | | KJX49731.1 | 24573 | 27802 | 1998 | KJX49728.1 | 24574 | 27803 | 361 | KJX49729.1 | 24575 | 27804 | 925 | KJX49730.1 | 24576 |
| 165 | | KKA32833.1 | 24577 | 27806 | 1998 | KKA32830.1 | 24578 | 27807 | 361 | KKA32831.1 | 24579 | 27808 | 925 | KKA32832.1 | 24580 |
| 166 | | AFM58287.1 | 24581 | 27810 | 1945 | AFM58284.1 | 24582 | 27811 | 411 | AFM58285.1 | 24583 | 27812 | 850 | AFM58286.1 | 24584 |
| 167 | | KTJ18639.1 | 24585 | 27814 | 1998 | KTJ18636.1 | 24586 | 27815 | 361 | KTJ18637.1 | 24587 | 27816 | 925 | KTJ18638.1 | 24588 |
| 168 | | KTH34056.1 | 24589 | 27818 | 1998 | KTH34053.1 | 24590 | 27819 | 361 | KTH34054.1 | 24591 | 27820 | 925 | KTH34055.1 | 24592 |
| 169 | | EWG70005.1 | 24593 | 27822 | 1982 | EWG70008.1 | 24594 | 27823 | 361 | EWG70007.1 | 24595 | 27824 | 921 | EWG70006.1 | 24596 |
| 170 | | BAH40614.1 | 24597 | 27826 | 2009 | BAH40611.1 | 24598 | 27827 | 407 | BAH40612.1 | 24599 | 27828 | 983 | BAH40613.1 | 24600 |
| 171 | | GAB92720.1 | 24601 | 27830 | 1755 | GAB92713.1 | 24602 | 27831 | 422 | GAB92719.1 | 24603 | 27832 | 1025 | | |
| 172 | | KOP23146.1 | 24604 | 27833 | 1766 | KOP23135.1 | 24605 | 27834 | 388 | KOP23134.1 | 24606 | 27835 | 689 | | |
| 173 | | EWE15861.1 | 24607 | 27836 | 1946 | EWE15858.1 | 24608 | 27837 | 381 | EWE15859.1 | 24609 | 27838 | 854 | EWE15860.1 | 24610 |
| 174 | | CDI15591.1 | 24611 | 27840 | 1998 | CDI15594.1 | 24612 | 27841 | 361 | CDI15593.1 | 24613 | 27842 | 925 | CDI15592.1 | 24614 |
| 175 | | EAW41505.1 | 24615 | 27844 | 2067 | EAW41501.1 | 24616 | 27845 | 463 | EAW41506.1 | 24617 | 27846 | 1000 | | |
| 176 | | KQQ96139.1 | 24618 | 27847 | 1983 | KQQ96136.1 | 24619 | 27848 | 363 | KQQ96141.1 | 24620 | 27849 | 940 | KQQ96140.1 | 24621 |
| 177 | | AKB67566.1 | 24622 | 27851 | 2047 | AKB67569.1 | 24623 | 27852 | 489 | AKB67568.1 | 24624 | 27853 | 697 | | |
| 178 | | AIQ93138.1 | 24625 | 27854 | 1960 | AIQ93137.1 | 24626 | 27855 | 340 | AIQ93140.1 | 24627 | 27856 | 925 | AIQ93139.1 | 24628 |
| 179 | | AMB47692.1 | 24629 | 27858 | 1963 | AMB47695.1 | 24630 | 27859 | 315 | AMB47694.1 | 24631 | 27860 | 851 | AMB47693.1 | 24632 |
| 180 | | KIP90348.1 | 24633 | 27862 | 1813 | KIP90388.1 | 24634 | 27863 | 331 | KIP90346.1 | 24635 | 27864 | 683 | | |
| 181 | | EWM65738.1 | 24636 | 27865 | 1812 | EWM65736.1 | 24637 | 27866 | 392 | EWM65739.1 | 24638 | 27867 | 1027 | | |
| 182 | | CCH89535.1 | 24639 | 27868 | 1805 | CCH89539.1 | 24640 | 27869 | 355 | CCH89533.1 | 24641 | 27870 | 668 | | |
| 183 | | EMP50968.1 | 24642 | 27871 | 1945 | EMP50971.1 | 24643 | 27872 | 411 | EMP50970.1 | 24644 | 27873 | 852 | EMP50969.1 | 24645 |
| 184 | | GAS97121.1 | 24646 | 27875 | 1827 | GAS97126.1 | 24647 | 27876 | 329 | GAS97123.1 | 24648 | 27877 | 703 | | |
| 185 | | ALI28820.1 | 24649 | 27878 | 1753 | ALI28823.1 | 24650 | 27879 | 431 | ALI28821.1 | 24651 | 27880 | 1085 | | |
| 186 | | AKS35859.1 | 24652 | 27881 | 1753 | AKS36815.1 | 24653 | 27882 | 431 | AKS35860.1 | 24654 | 27883 | 1031 | | |
| 187 | | GAT08462.1 | 24655 | 27884 | 1822 | GAT08465.1 | 24656 | 27885 | 326 | GAT08464.1 | 24657 | 27886 | 702 | | |
| 188 | | ACV78352.1 | 24658 | 27887 | 1780 | ACV78350.1 | 24659 | 27888 | 467 | ACV78351.1 | 24660 | 27889 | 1002 | | |
| 189 | | KJV46415.1 | 24661 | 27890 | 1946 | KJV46418.1 | 24662 | 27891 | 411 | KJV46417.1 | 24663 | 27892 | 852 | KJV46416.1 | 24664 |
| 190 | | KRW97754.1 | 24665 | 27894 | 1953 | KRW97756.1 | 24666 | 27895 | 603 | | | | | KRW97755.1 | 24667 |
| 191 | | KHT34503.1 | 24668 | 27897 | 1986 | KHT34506.1 | 24669 | 27898 | 361 | KHT34505.1 | 24670 | 27899 | 927 | KHT34504.1 | 24671 |
| 192 | | AFR03569.1 | 24672 | 27901 | 1980 | AFR03572.1 | 24673 | 27902 | 361 | AFR03571.1 | 24674 | 27903 | 921 | AFR03570.1 | 24675 |
| 193 | | AKJ41264.1 | 24676 | 27905 | 1983 | AKJ41261.1 | 24677 | 27906 | 361 | AKJ41262.1 | 24678 | 27907 | 932 | AKJ41263.1 | 24679 |
| 194 | | BAP50995.1 | 24680 | 27909 | 1946 | | | | | BAP50997.1 | 24681 | 27910 | 850 | BAP50996.1 | 24682 |
| 195 | | BAP23387.1 | 24683 | 27912 | 1946 | | | | | BAP23389.1 | 24684 | 27913 | 850 | BAP23388.1 | 24685 |
| 196 | | KSE43346.1 | 24686 | 27915 | 1946 | | | | | KSE43345.1 | 24687 | 27916 | 850 | KSE43344.1 | 24688 |
| 197 | | KSE74811.1 | 24689 | 27918 | 1946 | | | | | KSE74753.1 | 24690 | 27919 | 850 | KSE74754.1 | 24691 |
| 198 | | KSH20463.1 | 24692 | 27921 | 1946 | KSH20466.1 | 24693 | 27922 | 394 | KSH20465.1 | 24694 | 27923 | 850 | KSH20464.1 | 24695 |
| 199 | | KSD81170.1 | 24696 | 27925 | 1946 | KSD81167.1 | 24697 | 27926 | 394 | KSD81166.1 | 24698 | 27927 | 850 | KSD81165.1 | 24699 |
| 200 | | KSD90962.1 | 24700 | 27929 | 1946 | | | | | KSD90904.1 | 24701 | 27930 | 850 | KSD90905.1 | 24702 |
| 201 | | KSH64632.1 | 24703 | 27932 | 1946 | KSH64629.1 | 24704 | 27933 | 394 | KSH64628.1 | 24705 | 27934 | 850 | KSH64627.1 | 24706 |
| 202 | | KSH80104.1 | 24707 | 27936 | 1946 | KSH80101.1 | 24708 | 27937 | 394 | KSH80100.1 | 24709 | 27938 | 850 | KSH80099.1 | 24710 |
| 203 | | KSJ28920.1 | 24711 | 27940 | 1946 | KSJ28917.1 | 24712 | 27941 | 394 | KSJ28916.1 | 24713 | 27942 | 850 | KSJ28915.1 | 24714 |
| 204 | | KSK06443.1 | 24715 | 27944 | 1946 | KSK06442.1 | 24716 | 27945 | 394 | KSK06441.1 | 24717 | 27946 | 850 | KSK06440.1 | 24718 |
| 205 | | KSJ60779.1 | 24719 | 27948 | 1946 | KSJ60711.1 | 24720 | 27949 | 394 | KSJ60712.1 | 24721 | 27950 | 850 | KSJ60713.1 | 24722 |
| 206 | | KSK54149.1 | 24723 | 27952 | 1946 | KSK54146.1 | 24724 | 27953 | 394 | KSK54145.1 | 24725 | 27954 | 850 | KSK54144.1 | 24726 |
| 207 | | KSK39571.1 | 24727 | 27956 | 1946 | KSK39566.1 | 24728 | 27957 | 394 | KSK39565.1 | 24729 | 27958 | 850 | KSK39564.1 | 24730 |
| 208 | | KSL10852.1 | 24731 | 27960 | 1946 | KSL10784.1 | 24732 | 27961 | 394 | KSL10785.1 | 24733 | 27962 | 850 | KSL10786.1 | 24734 |
| 209 | | KSL65229.1 | 24735 | 27964 | 1946 | KSL65226.1 | 24736 | 27965 | 394 | KSL65225.1 | 24737 | 27966 | 850 | KSL65224.1 | 24738 |
| 210 | | KSL37891.1 | 24739 | 27968 | 1946 | KSL37823.1 | 24740 | 27969 | 394 | KSL37824.1 | 24741 | 27970 | 850 | KSL37825.1 | 24742 |
| 211 | | KSM35820.1 | 24743 | 27972 | 1946 | KSM35817.1 | 24744 | 27973 | 394 | KSM35816.1 | 24745 | 27974 | 850 | KSM35815.1 | 24746 |
| 212 | | KSM77524.1 | 24747 | 27976 | 1956 | | | | | KSM77522.1 | 24748 | 27977 | 846 | KSM77523.1 | 24749 |
| 213 | | KSO31601.1 | 24750 | 27979 | 1946 | KSO31533.1 | 24751 | 27980 | 394 | KSO31534.1 | 24752 | 27981 | 850 | KSO31535.1 | 24753 |
| 214 | | KSO28498.1 | 24754 | 27983 | 1946 | KSO28430.1 | 24755 | 27984 | 394 | KSO28431.1 | 24756 | 27985 | 850 | KSO28432.1 | 24757 |
| 215 | | KSL52322.1 | 24758 | 27987 | 1946 | KSL52254.1 | 24759 | 27988 | 394 | KSL52255.1 | 24760 | 27989 | 850 | KSL52256.1 | 24761 |
| 216 | | KSL73599.1 | 24762 | 27991 | 1946 | KSL73596.1 | 24763 | 27992 | 394 | KSL73595.1 | 24764 | 27993 | 850 | KSL73594.1 | 24765 |
| 217 | | KSL62790.1 | 24766 | 27995 | 1956 | | | | | KSL62788.1 | 24767 | 27996 | 846 | KSL62789.1 | 24768 |
| 218 | | KSM90742.1 | 24769 | 27998 | 1946 | KSM90740.1 | 24770 | 27999 | 394 | KSM90739.1 | 24771 | 28000 | 850 | KSM90738.1 | 24772 |
| 219 | | KSN64557.1 | 24773 | 28002 | 1946 | KSN64554.1 | 24774 | 28003 | 394 | KSN64553.1 | 24775 | 28004 | 850 | KSN64552.1 | 24776 |
| 220 | | KSO10606.1 | 24777 | 28006 | 1946 | KSO10538.1 | 24778 | 28007 | 394 | KSO10539.1 | 24779 | 28008 | 850 | KSO10540.1 | 24780 |
| 221 | | KSR13053.1 | 24781 | 28010 | 1946 | KSR12985.1 | 24782 | 28011 | 394 | KSR12986.1 | 24783 | 28012 | 850 | KSR12987.1 | 24784 |
| 222 | | KSR82354.1 | 24785 | 28014 | 1946 | KSR82286.1 | 24786 | 28015 | 394 | KSR82287.1 | 24787 | 28016 | 850 | KSR82288.1 | 24788 |
| 223 | | KSQ84593.1 | 24789 | 28018 | 1946 | KSQ84590.1 | 24790 | 28019 | 394 | KSQ84589.1 | 24791 | 28020 | 850 | KSQ84588.1 | 24792 |
| 224 | | EFQ41826.1 | 24793 | 28022 | 1946 | | | | | EFQ41828.1 | 24794 | 28023 | 850 | EFQ41827.1 | 24795 |
| 225 | | ERX42740.1 | 24796 | 28025 | 1946 | ERX42743.1 | 24797 | 28026 | 379 | ERX42742.1 | 24798 | 28027 | 850 | ERX42741.1 | 24799 |
| 226 | | ERV57398.1 | 24800 | 28029 | 1946 | ERV57401.1 | 24801 | 28030 | 379 | ERV57400.1 | 24802 | 28031 | 850 | ERV57399.1 | 24803 |
| 227 | | ERV46141.1 | 24804 | 28033 | 1946 | ERV46144.1 | 24805 | 28034 | 379 | ERV46143.1 | 24806 | 28035 | 850 | ERV46142.1 | 24807 |
| 228 | | ERV15095.1 | 24808 | 28037 | 1946 | ERV15098.1 | 24809 | 28038 | 379 | ERV15097.1 | 24810 | 28039 | 850 | ERV15096.1 | 24811 |
| 229 | | EZN68207.1 | 24812 | 28041 | 1946 | EZN68210.1 | 24813 | 28042 | 379 | EZN68209.1 | 24814 | 28043 | 850 | EZN68208.1 | 24815 |
| 230 | | EZP10099.1 | 24816 | 28045 | 1956 | EZP10096.1 | 24817 | 28046 | 384 | EZP10097.1 | 24818 | 28047 | 876 | EZP10098.1 | 24819 |
| 231 | | ERW79837.1 | 24820 | 28049 | 1946 | ERW79840.1 | 24821 | 28050 | 379 | ERW79839.1 | 24822 | 28051 | 850 | ERW79838.1 | 24823 |
| 232 | | ERU64537.1 | 24824 | 28053 | 1942 | ERU64534.1 | 24825 | 28054 | 398 | ERU64535.1 | 24826 | 28055 | 839 | ERU64536.1 | 24827 |
| 233 | | ERZ11046.1 | 24828 | 28057 | 1946 | ERZ11049.1 | 24829 | 28058 | 379 | ERZ11048.1 | 24830 | 28059 | 850 | ERZ11047.1 | 24831 |
| 234 | | CDH77378.1 | 24832 | 28061 | 1946 | | | | | CDH77380.1 | 24833 | 28062 | 511 | CDH77379.1 | 24834 |
| 235 | | BAK90082.1 | 24835 | 28064 | 1946 | | | | | BAK90080.1 | 24836 | 28065 | 850 | BAK90081.1 | 24837 |
| 236 | | ERX37642.1 | 24838 | 28067 | 1946 | ERX37645.1 | 24839 | 28068 | 379 | ERX37644.1 | 24840 | 28069 | 850 | ERX37643.1 | 24841 |
| 237 | | CDM51955.1 | 24842 | 28071 | 1946 | CDM51958.1 | 24843 | 28072 | 379 | CDM51957.1 | 24844 | 28073 | 850 | CDM51956.1 | 24845 |
| 238 | | AAY92286.1 | 24846 | 28075 | 1948 | AAY96277.1 | 24847 | 28076 | 394 | AAY92284.1 | 24848 | 28077 | 851 | AAY92285.1 | 24849 |
| 239 | | ELP96357.1 | 24850 | 28079 | 1945 | ELP96354.1 | 24851 | 28080 | 399 | ELP96355.1 | 24852 | 28081 | 838 | ELP96356.1 | 24853 |
| 240 | | ELQ02809.1 | 24854 | 28083 | 1945 | ELQ02806.1 | 24855 | 28084 | 399 | ELQ02807.1 | 24856 | 28085 | 838 | ELQ02808.1 | 24857 |
| 241 | | KGK94204.1 | 24858 | 28087 | 1957 | KGK94314.1 | 24859 | 28088 | 406 | KGK94207.1 | 24860 | 28089 | 847 | KGK94205.1 | 24861 |
| 242 | | KUR43160.1 | 24862 | 28091 | 1957 | KUR43163.1 | 24863 | 28092 | 384 | KUR43162.1 | 24864 | 28093 | 847 | KUR43161.1 | 24865 |
| 243 | | KUR49796.1 | 24866 | 28095 | 1957 | KUR49793.1 | 24867 | 28096 | 384 | KUR49794.1 | 24868 | 28097 | 847 | KUR49795.1 | 24869 |
| 244 | | EEB59176.1 | 24870 | 28099 | 1957 | EEB59179.1 | 24871 | 28100 | 406 | EEB59178.1 | 24872 | 28101 | 847 | EEB59177.1 | 24873 |
| 245 | | ERL54332.1 | 24874 | 28103 | 1930 | | | | | ERL54330.1 | 24875 | 28104 | 845 | ERL54331.1 | 24876 |
| 246 | | KPH05039.1 | 24877 | 28106 | 1961 | KPH05036.1 | 24878 | 28107 | 353 | KPH05037.1 | 24879 | 28108 | 854 | KPH05038.1 | 24880 |
| 247 | | KQS76378.1 | 24881 | 28110 | 1626 | | | | | KQS76380.1 | 24882 | 28111 | 853 | KQS76379.1 | 24883 |
| 248 | | KUJ85953.1 | 24884 | 28113 | 1804 | KUJ86243.1 | 24885 | 28114 | 472 | KUJ85952.1 | 24886 | 28115 | 1026 | | |
| 249 | | KTM77905.1 | 24887 | 28116 | 1980 | KTM77908.1 | 24888 | 28117 | 361 | KTM77907.1 | 24889 | 28118 | 921 | KTM77906.1 | 24890 |
| 250 | | GAR19711.1 | 24891 | 28120 | 1945 | GAR19708.1 | 24892 | 28121 | 395 | GAR19709.1 | 24893 | 28122 | 852 | GAR19710.1 | 24894 |
| 251 | | GAR29094.1 | 24895 | 28124 | 1945 | GAR29097.1 | 24896 | 28125 | 395 | GAR29096.1 | 24897 | 28126 | 852 | GAR29095.1 | 24898 |
| 252 | | GAR48964.1 | 24899 | 28128 | 1945 | GAR48967.1 | 24900 | 28129 | 395 | GAR48966.1 | 24901 | 28130 | 852 | GAR48965.1 | 24902 |
| 253 | | GAR51851.1 | 24903 | 28132 | 1980 | GAR51848.1 | 24904 | 28133 | 361 | GAR51849.1 | 24905 | 28134 | 921 | GAR51850.1 | 24906 |
| 254 | | GAR68135.1 | 24907 | 28136 | 1945 | GAR68138.1 | 24908 | 28137 | 395 | GAR68137.1 | 24909 | 28138 | 852 | GAR68136.1 | 24910 |
| 255 | | GAR79837.1 | 24911 | 28140 | 1945 | GAR79834.1 | 24912 | 28141 | 395 | GAR79835.1 | 24913 | 28142 | 852 | GAR79836.1 | 24914 |
| 256 | | GAS04635.1 | 24915 | 28144 | 1945 | GAS04638.1 | 24916 | 28145 | 395 | GAS04637.1 | 24917 | 28146 | 852 | GAS04636.1 | 24918 |
| 257 | | GAS14633.1 | 24919 | 28148 | 1945 | GAS14636.1 | 24920 | 28149 | 395 | GAS14635.1 | 24921 | 28150 | 852 | GAS14634.1 | 24922 |
| 258 | | GAS22419.1 | 24923 | 28152 | 1945 | GAS22416.1 | 24924 | 28153 | 395 | GAS22417.1 | 24925 | 28154 | 852 | GAS22418.1 | 24926 |
| 259 | | GAS34224.1 | 24927 | 28156 | 1945 | GAS34221.1 | 24928 | 28157 | 395 | GAS34222.1 | 24929 | 28158 | 852 | GAS34223.1 | 24930 |
| 260 | | GAS44702.1 | 24931 | 28160 | 1945 | GAS44699.1 | 24932 | 28161 | 395 | GAS44700.1 | 24933 | 28162 | 852 | GAS44701.1 | 24934 |
| 261 | | KSB75754.1 | 24935 | 28164 | 1945 | KSB75751.1 | 24936 | 28165 | 411 | KSB75752.1 | 24937 | 28166 | 849 | KSB75753.1 | 24938 |
| 262 | | AIP97316.1 | 24939 | 28168 | 1945 | AIP94652.1 | 24940 | 28169 | 411 | AIP97314.1 | 24941 | 28170 | 849 | AIP97315.1 | 24942 |
| 263 | | KFS83334.1 | 24943 | 28172 | 1980 | KFS83337.1 | 24944 | 28173 | 361 | KFS83336.1 | 24945 | 28174 | 921 | KFS83335.1 | 24946 |
| 264 | | KFS82350.1 | 24947 | 28176 | 1980 | | | | | KFS82348.1 | 24948 | 28177 | 617 | KFS82349.1 | 24949 |
| 265 | | KFS54100.1 | 24950 | 28179 | 1980 | KFS54103.1 | 24951 | 28180 | 361 | KFS54102.1 | 24952 | 28181 | 921 | KFS54101.1 | 24953 |
| 266 | | ETA85463.1 | 24954 | 28183 | 1946 | ETA85466.1 | 24955 | 28184 | 411 | ETA85465.1 | 24956 | 28185 | 852 | ETA85464.1 | 24957 |
| 267 | | AGQ75543.1 | 24958 | 28187 | 1946 | AGQ73595.1 | 24959 | 28188 | 395 | AGQ75541.1 | 24960 | 28189 | 852 | AGQ75542.1 | 24961 |
| 268 | | ESV53477.1 | 24962 | 28191 | 1946 | ESV53381.1 | 24963 | 28192 | 395 | ESV53475.1 | 24964 | 28193 | 852 | ESV53476.1 | 24965 |
| 269 | | ESJ68059.1 | 24966 | 28195 | 1980 | ESJ68062.1 | 24967 | 28196 | 361 | ESJ68061.1 | 24968 | 28197 | 921 | ESJ68060.1 | 24969 |
| 270 | | ESE97307.1 | 24970 | 28199 | 1980 | ESE97310.1 | 24971 | 28200 | 361 | ESE97309.1 | 24972 | 28201 | 921 | ESE97308.1 | 24973 |
| 271 | | EDZ02526.1 | 24974 | 28203 | 1980 | EDZ04146.1 | 24975 | 28204 | 361 | | | | | EDZ04762.1 | 24976 |
| 272 | | ETO88599.1 | 24977 | 28206 | 1980 | ETO88602.1 | 24978 | 28207 | 361 | ETO88601.1 | 24979 | 28208 | 921 | ETO88600.1 | 24980 |
| 273 | | CUS01271.1 | 24981 | 28210 | 1982 | CUS01249.1 | 24982 | 28211 | 361 | CUS01256.1 | 24983 | 28212 | 921 | CUS01267.1 | 24984 |
| 274 | | CUR99590.1 | 24985 | 28214 | 1982 | CUR99579.1 | 24986 | 28215 | 361 | CUR99583.1 | 24987 | 28216 | 921 | CUR99587.1 | 24988 |
| 275 | | CUR99591.1 | 24989 | 28218 | 1982 | CUR99580.1 | 24990 | 28219 | 361 | CUR99582.1 | 24991 | 28220 | 921 | CUR99586.1 | 24992 |
| 276 | | CUR99699.1 | 24993 | 28222 | 1982 | CUR99684.1 | 24994 | 28223 | 361 | CUR99689.1 | 24995 | 28224 | 921 | CUR99695.1 | 24996 |
| 277 | | CBY98492.1 | 24997 | 28226 | 1982 | CBY98489.1 | 24998 | 28227 | 361 | CBY98490.1 | 24999 | 28228 | 921 | CBY98491.1 | 25000 |
| 278 | | EDZ28883.1 | 25001 | 28230 | 1982 | EDZ28906.1 | 25002 | 28231 | 361 | EDZ28845.1 | 25003 | 28232 | 921 | EDZ28831.1 | 25004 |
| 279 | | KHQ80350.1 | 25005 | 28234 | 1946 | KHQ80347.1 | 25006 | 28235 | 411 | KHQ80348.1 | 25007 | 28236 | 852 | KHQ80349.1 | 25008 |
| 280 | | ESE86334.1 | 25009 | 28238 | 1946 | ESE86332.1 | 25010 | 28239 | 411 | | | | | ESE86333.1 | 25011 |
| 281 | | ETX40265.1 | 25012 | 28241 | 1947 | ETX40262.1 | 25013 | 28242 | 411 | ETX40263.1 | 25014 | 28243 | 852 | ETX40264.1 | 25015 |
| 282 | | EZQ62320.1 | 25016 | 28245 | 1947 | EZQ62323.1 | 25017 | 28246 | 411 | EZQ62322.1 | 25018 | 28247 | 852 | EZQ62321.1 | 25019 |
| 283 | | CAC47725.1 | 25020 | 28249 | 1832 | CAC47727.1 | 25021 | 28250 | 440 | CAC47726.1 | 25022 | 28251 | 997 | | |
| 284 | | AGG75744.1 | 25023 | 28252 | 1832 | AGG75746.1 | 25024 | 28253 | 440 | AGG75745.1 | 25025 | 28254 | 997 | | |
| 285 | | KSV87560.1 | 25026 | 28255 | 1961 | KSV87563.1 | 25027 | 28256 | 383 | KSV87562.1 | 25028 | 28257 | 854 | KSV87561.1 | 25029 |
| 286 | | EJJ06042.1 | 25030 | 28259 | 1849 | EJJ06043.1 | 25031 | 28260 | 405 | EJJ06040.1 | 25032 | 28261 | 705 | | |
| 287 | | KND14004.1 | 25033 | 28262 | 1857 | KND14010.1 | 25034 | 28263 | 405 | KND14006.1 | 25035 | 28264 | 712 | | |
| 288 | | EGU44860.1 | 25036 | 28265 | 2093 | EGU44862.1 | 25037 | 28266 | 528 | EGU44859.1 | 25038 | 28267 | 1014 | | |
| 289 | | CNL16915.1 | 25039 | 28268 | 1981 | CNL16836.1 | 25040 | 28269 | 362 | CNL16872.1 | 25041 | 28270 | 928 | CNL16894.1 | 25042 |
| 290 | | CNJ89349.1 | 25043 | 28272 | 1981 | CNJ89455.1 | 25044 | 28273 | 362 | CNJ89414.1 | 25045 | 28274 | 928 | CNJ89387.1 | 25046 |
| 291 | | CNK54575.1 | 25047 | 28276 | 1982 | CNK54663.1 | 25048 | 28277 | 376 | CNK54635.1 | 25049 | 28278 | 927 | CNK54608.1 | 25050 |
| 292 | | CNK94601.1 | 25051 | 28280 | 1981 | CNK94669.1 | 25052 | 28281 | 362 | CNK94646.1 | 25053 | 28282 | 928 | CNK94618.1 | 25054 |
| 293 | | CNI43727.1 | 25055 | 28284 | 1982 | CNI43814.1 | 25056 | 28285 | 376 | CNI43794.1 | 25057 | 28286 | 927 | CNI43767.1 | 25058 |
| 294 | | AJJ11891.1 | 25059 | 28288 | 1986 | AJJ11355.1 | 25060 | 28289 | 362 | AJJ10816.1 | 25061 | 28290 | 928 | AJJ11516.1 | 25062 |
| 295 | | EEQ02997.1 | 25063 | 28292 | 1986 | EEQ03000.1 | 25064 | 28293 | 362 | EEQ02999.1 | 25065 | 28294 | 928 | EEQ02998.1 | 25066 |
| 296 | | KXV70696.1 | 25067 | 28296 | 2166 | | | | | | | | | | |
| 297 | | AKQ30571.1 | 25069 | 28298 | 2105 | | | | | | | | | | |
| 298 | | KOP86148.1 | 25071 | 28300 | 2105 | | | | | | | | | | |
| 299 | | KRS04352.1 | 25073 | 28302 | 2105 | | | | | | | | | | |
| 300 | | KRS02342.1 | 25075 | 28304 | 2105 | | | | | | | | | | |
| 301 | | KRS03107.1 | 25077 | 28306 | 2105 | | | | | | | | | | |
| 302 | | KRR94714.1 | 25079 | 28308 | 2105 | | | | | | | | | | |
| 303 | | KRS09258.1 | 25081 | 28310 | 2105 | | | | | | | | | | |
| 304 | | EXE63524.1 | 25083 | 28312 | 2107 | | | | | | | | | | |
| 305 | | EXC47766.1 | 25085 | 28314 | 2099 | | | | | | | | | | |
| 306 | | ELW92979.1 | 25087 | 28316 | 2107 | | | | | | | | | | |
| 307 | | ENW35933.1 | 25089 | 28318 | 2105 | | | | | | | | | | |
| 308 | | ENW44602.1 | 25091 | 28320 | 2105 | | | | | | | | | | |
| 309 | | ENW49012.1 | 25093 | 28322 | 2098 | | | | | | | | | | |
| 310 | | EKP68370.1 | 25095 | 28324 | 2098 | | | | | | | | | | |
| 311 | | EKL42013.1 | 25097 | 28326 | 2105 | | | | | | | | | | |
| 312 | | ENV15228.1 | 25099 | 28328 | 2099 | | | | | | | | | | |
| 313 | | ENX21439.1 | 25101 | 28330 | 2105 | | | | | | | | | | |
| 314 | | ENV06099.1 | 25103 | 28332 | 2099 | | | | | | | | | | |
| 315 | | EDS03747.1 | 25105 | 28334 | 2047 | | | | | | | | | | |
| 316 | | AMN11450.1 | 25107 | 28336 | 2100 | | | | | | | | | | |
| 317 | | AFT94989.1 | 25109 | 28338 | 2100 | | | | | | | | | | |
| 318 | | EGF91079.1 | 25111 | 28340 | 2037 | | | | | | | | | | |
| 319 | | ESQ74519.1 | 25113 | 28342 | 2035 | | | | | | | | | | |
| 320 | | CAL94925.1 | 25115 | 28344 | 2109 | | | | | | | | | | |
| 321 | | AJE23874.1 | 25117 | 28346 | 1705 | | | | | | | | | | |
| 322 | | CUA18545.1 | 25119 | 28348 | 2048 | | | | | | | | | | |
| 323 | | CBW22536.1 | 25121 | 28350 | 2048 | | | | | | | | | | |
| 324 | | EYA28061.1 | 25123 | 28352 | 2046 | | | | | | | | | | |
| 325 | | EYA33839.1 | 25125 | 28354 | 2048 | | | | | | | | | | |
| 326 | | EXY44320.1 | 25127 | 28356 | 2048 | | | | | | | | | | |
| 327 | | EYB10318.1 | 25129 | 28358 | 2048 | | | | | | | | | | |
| 328 | | EXZ67979.1 | 25131 | 28360 | 2048 | | | | | | | | | | |
| 329 | | EXY49048.1 | 25133 | 28362 | 2048 | | | | | | | | | | |
| 330 | | EXY53777.1 | 25135 | 28364 | 2048 | | | | | | | | | | |
| 331 | | EDS16320.1 | 25137 | 28366 | 2047 | | | | | | | | | | |
| 332 | | KXT38969.1 | 25139 | 28368 | 2047 | | | | | | | | | | |
| 333 | | EGW44032.1 | 25141 | 28370 | 2053 | | | | | | | | | | |
| 334 | | EEA03717.1 | 25143 | 28372 | 2083 | | | | | | | | | | |
| 335 | | KVM07646.1 | 25145 | 28374 | 2080 | | | | | | | | | | |
| 336 | | KVM11423.1 | 25147 | 28376 | 2080 | | | | | | | | | | |
| 337 | | KVM41744.1 | 25149 | 28378 | 2080 | | | | | | | | | | |
| 338 | | KVU39940.1 | 25151 | 28380 | 2084 | | | | | | | | | | |
| 339 | | KVX50941.1 | 25153 | 28382 | 2080 | | | | | | | | | | |
| 340 | | CDH43330.1 | 25155 | 28384 | 2062 | | | | | | | | | | |
| 341 | | KPA18787.1 | 25157 | 28386 | 2057 | | | | | | | | | | |
| 342 | | AIY12566.1 | 25159 | 28388 | 1978 | | | | | | | | | | |
| 343 | | EYF08672.1 | 25161 | 28390 | 1820 | | | | | | | | | | |
| 344 | | KQM35753.1 | 25163 | 28392 | 1956 | | | | | | | | | | |
| 345 | | ALD78156.1 | 25165 | 28394 | 2108 | | | | | | | | | | |
| 346 | | KPR54498.1 | 25167 | 28396 | 2106 | | | | | | | | | | |
| 347 | | KLV49873.1 | 25169 | 28398 | 2162 | | | | | | | | | | |
| 348 | | KLV71165.1 | 25171 | 28400 | 2106 | | | | | | | | | | |
| 349 | | BAO81224.1 | 25173 | 28402 | 2099 | | | | | | | | | | |
| 350 | | ALB51925.1 | 25175 | 28404 | 2106 | | | | | | | | | | |
| 351 | | AGE87745.1 | 25177 | 28406 | 1380 | | | | | | | | | | |
| 352 | | KJR98717.1 | 25179 | 28408 | 2076 | | | | | | | | | | |
| 353 | | KLE94551.1 | 25181 | 28410 | 2106 | | | | | | | | | | |
| 354 | | KLF52638.1 | 25183 | 28412 | 2106 | | | | | | | | | | |
| 355 | | KLW28645.1 | 25185 | 28414 | 2106 | | | | | | | | | | |
| 356 | | KLW04619.1 | 25187 | 28416 | 2106 | | | | | | | | | | |
| 357 | | KLQ05990.1 | 25189 | 28418 | 2108 | | | | | | | | | | |
| 358 | | KJI56236.1 | 25191 | 28420 | 2108 | | | | | | | | | | |
| 359 | | KLP80553.1 | 25193 | 28422 | 2106 | | | | | | | | | | |
| 360 | | KLW09755.1 | 25195 | 28424 | 2106 | | | | | | | | | | |
| 361 | | KLW05113.1 | 25197 | 28426 | 2106 | | | | | | | | | | |
| 362 | | KUQ64543.1 | 25199 | 28428 | 2080 | | | | | | | | | | |
| 363 | | KUQ79081.1 | 25201 | 28430 | 2080 | | | | | | | | | | |
| 364 | | KPS33776.1 | 25203 | 28432 | 2106 | | | | | | | | | | |
| 365 | | ESL79957.1 | 25205 | 28434 | 2106 | | | | | | | | | | |
| 366 | | KLW78405.1 | 25207 | 28436 | 2106 | | | | | | | | | | |
| 367 | | KFC20758.1 | 25209 | 28438 | 1950 | | | | | | | | | | |
| 368 | | AKQ40859.1 | 25211 | 28440 | 1989 | | | | | | | | | | |
| 369 | | EDL49427.1 | 25213 | 28442 | 1988 | | | | | | | | | | |
| 370 | | KDM84272.1 | 25215 | 28444 | 2104 | | | | | | | | | | |
| 371 | | CDU40545.1 | 25217 | 28446 | 2114 | | | | | | | | | | |
| 372 | | KHJ28072.1 | 25219 | 28448 | 2114 | | | | | | | | | | |
| 373 | | KHI41602.1 | 25221 | 28450 | 2104 | | | | | | | | | | |
| 374 | | KHH60282.1 | 25223 | 28452 | 2114 | | | | | | | | | | |
| 375 | | KHH50418.1 | 25225 | 28454 | 2114 | | | | | | | | | | |
| 376 | | KHI22226.1 | 25227 | 28456 | 2104 | | | | | | | | | | |
| 377 | | KHH70907.1 | 25229 | 28458 | 2114 | | | | | | | | | | |
| 378 | | KIG29571.1 | 25231 | 28460 | 2104 | | | | | | | | | | |
| 379 | | AJE58952.1 | 25233 | 28462 | 2114 | | | | | | | | | | |
| 380 | | KIY28272.1 | 25235 | 28464 | 2104 | | | | | | | | | | |
| 381 | | KIZ09778.1 | 25237 | 28466 | 2104 | | | | | | | | | | |
| 382 | | KJJ46593.1 | 25239 | 28468 | 2104 | | | | | | | | | | |
| 383 | | KJW55354.1 | 25241 | 28470 | 2104 | | | | | | | | | | |
| 384 | | KJW51696.1 | 25243 | 28472 | 2104 | | | | | | | | | | |
| 385 | | KLG52811.1 | 25245 | 28474 | 2104 | | | | | | | | | | |
| 386 | | KLX28162.1 | 25247 | 28476 | 2114 | | | | | | | | | | |
| 387 | | KNF16836.1 | 25249 | 28478 | 2104 | | | | | | | | | | |
| 388 | | KNF20995.1 | 25251 | 28480 | 2104 | | | | | | | | | | |
| 389 | | KNF39640.1 | 25253 | 28482 | 2104 | | | | | | | | | | |
| 390 | | KNG40958.1 | 25255 | 28484 | 2104 | | | | | | | | | | |
| 391 | | KNZ99111.1 | 25257 | 28486 | 2114 | | | | | | | | | | |
| 392 | | KOZ12765.1 | 25259 | 28488 | 2104 | | | | | | | | | | |
| 393 | | KOZ62647.1 | 25261 | 28490 | 2104 | | | | | | | | | | |
| 394 | | KOZ92031.1 | 25263 | 28492 | 2104 | | | | | | | | | | |
| 395 | | KOZ11137.1 | 25265 | 28494 | 2104 | | | | | | | | | | |
| 396 | | KOZ14566.1 | 25267 | 28496 | 2104 | | | | | | | | | | |
| 397 | | KOZ32809.1 | 25269 | 28498 | 2104 | | | | | | | | | | |
| 398 | | KOZ23191.1 | 25271 | 28500 | 2104 | | | | | | | | | | |
| 399 | | KOZ33147.1 | 25273 | 28502 | 2104 | | | | | | | | | | |
| 400 | | KOZ37736.1 | 25275 | 28504 | 2104 | | | | | | | | | | |
| 401 | | KOZ50072.1 | 25277 | 28506 | 2104 | | | | | | | | | | |
| 402 | | KOZ47195.1 | 25279 | 28508 | 2104 | | | | | | | | | | |
| 403 | | KOZ49645.1 | 25281 | 28510 | 2104 | | | | | | | | | | |
| 404 | | KOZ66201.1 | 25283 | 28512 | 2104 | | | | | | | | | | |
| 405 | | KOZ69676.1 | 25285 | 28514 | 2104 | | | | | | | | | | |
| 406 | | KOZ74923.1 | 25287 | 28516 | 2104 | | | | | | | | | | |
| 407 | | KOZ84735.1 | 25289 | 28518 | 2104 | | | | | | | | | | |
| 408 | | KOZ80210.1 | 25291 | 28520 | 2104 | | | | | | | | | | |
| 409 | | KOZ97677.1 | 25293 | 28522 | 2104 | | | | | | | | | | |
| 410 | | CTS44204.1 | 25295 | 28524 | 2116 | | | | | | | | | | |
| 411 | | KPH47383.1 | 25297 | 28526 | 2104 | | | | | | | | | | |
| 412 | | KPH45899.1 | 25299 | 28528 | 2104 | | | | | | | | | | |
| 413 | | KPH35130.1 | 25301 | 28530 | 2104 | | | | | | | | | | |
| 414 | | KPH38257.1 | 25303 | 28532 | 2104 | | | | | | | | | | |
| 415 | | KPO74170.1 | 25305 | 28534 | 2104 | | | | | | | | | | |
| 416 | | KPP03700.1 | 25307 | 28536 | 2104 | | | | | | | | | | |
| 417 | | KPP08799.1 | 25309 | 28538 | 2104 | | | | | | | | | | |
| 418 | | KPP18124.1 | 25311 | 28540 | 2104 | | | | | | | | | | |
| 419 | | KPP23767.1 | 25313 | 28542 | 2104 | | | | | | | | | | |
| 420 | | KPP34281.1 | 25315 | 28544 | 2104 | | | | | | | | | | |
| 421 | | KPP38851.1 | 25317 | 28546 | 2104 | | | | | | | | | | |
| 422 | | KPP49039.1 | 25319 | 28548 | 2104 | | | | | | | | | | |
| 423 | | KPP10067.1 | 25321 | 28550 | 2104 | | | | | | | | | | |
| 424 | | KPP41789.1 | 25323 | 28552 | 2104 | | | | | | | | | | |
| 425 | | KPP53630.1 | 25325 | 28554 | 2104 | | | | | | | | | | |
| 426 | | KUH02052.1 | 25327 | 28556 | 2104 | | | | | | | | | | |
| 427 | | KUH15976.1 | 25329 | 28558 | 2114 | | | | | | | | | | |
| 428 | | KUR31930.1 | 25331 | 28560 | 2114 | | | | | | | | | | |
| 429 | | ALZ66920.1 | 25333 | 28562 | 2114 | | | | | | | | | | |
| 430 | | KUT20744.1 | 25335 | 28564 | 2114 | | | | | | | | | | |
| 431 | | KUT66046.1 | 25337 | 28566 | 2114 | | | | | | | | | | |
| 432 | | KUS25060.1 | 25339 | 28568 | 2114 | | | | | | | | | | |
| 433 | | KUS40192.1 | 25341 | 28570 | 2104 | | | | | | | | | | |
| 434 | | KUT25847.1 | 25343 | 28572 | 2104 | | | | | | | | | | |
| 435 | | KUT18408.1 | 25345 | 28574 | 2104 | | | | | | | | | | |
| 436 | | KUU15347.1 | 25347 | 28576 | 2114 | | | | | | | | | | |
| 437 | | KUT50287.1 | 25349 | 28578 | 2104 | | | | | | | | | | |
| 438 | | KUX11783.1 | 25351 | 28580 | 2114 | | | | | | | | | | |
| 439 | | KUU59436.1 | 25353 | 28582 | 2114 | | | | | | | | | | |
| 440 | | KUU32865.1 | 25355 | 28584 | 2104 | | | | | | | | | | |
| 441 | | KUU24011.1 | 25357 | 28586 | 2104 | | | | | | | | | | |
| 442 | | KUV87992.1 | 25359 | 28588 | 2104 | | | | | | | | | | |
| 443 | | KUW19154.1 | 25361 | 28590 | 2104 | | | | | | | | | | |
| 444 | | KUW69105.1 | 25363 | 28592 | 2104 | | | | | | | | | | |
| 445 | | KUW47130.1 | 25365 | 28594 | 2104 | | | | | | | | | | |
| 446 | | KUT58081.1 | 25367 | 28596 | 2114 | | | | | | | | | | |
| 447 | | KUX52751.1 | 25369 | 28598 | 2114 | | | | | | | | | | |
| 448 | | KUX36550.1 | 25371 | 28600 | 2114 | | | | | | | | | | |
| 449 | | AMG80375.1 | 25373 | 28602 | 2104 | | | | | | | | | | |
| 450 | | KXG88717.1 | 25375 | 28604 | 2090 | | | | | | | | | | |
| 451 | | KXK90271.1 | 25377 | 28606 | 2104 | | | | | | | | | | |
| 452 | | KXP75339.1 | 25379 | 28608 | 2104 | | | | | | | | | | |
| 453 | | KXP56977.1 | 25381 | 28610 | 2114 | | | | | | | | | | |
| 454 | | KXP32136.1 | 25383 | 28612 | 2114 | | | | | | | | | | |
| 455 | | KXP24174.1 | 25385 | 28614 | 2114 | | | | | | | | | | |
| 456 | | KXR08922.1 | 25387 | 28616 | 2114 | | | | | | | | | | |
| 457 | | KXR32560.1 | 25389 | 28618 | 2114 | | | | | | | | | | |
| 458 | | KXR26310.1 | 25391 | 28620 | 2114 | | | | | | | | | | |
| 459 | | KXR92242.1 | 25393 | 28622 | 2114 | | | | | | | | | | |
| 460 | | KXR64178.1 | 25395 | 28624 | 2114 | | | | | | | | | | |
| 461 | | KXR53387.1 | 25397 | 28626 | 2114 | | | | | | | | | | |
| 462 | | EKJ54998.1 | 25399 | 28628 | 2104 | | | | | | | | | | |
| 463 | | ERC53519.1 | 25401 | 28630 | 2104 | | | | | | | | | | |
| 464 | | ERE00883.1 | 25403 | 28632 | 2104 | | | | | | | | | | |
| 465 | | ERE21799.1 | 25405 | 28634 | 2104 | | | | | | | | | | |
| 466 | | ERB68143.1 | 25407 | 28636 | 2104 | | | | | | | | | | |
| 467 | | ELV15311.1 | 25409 | 28638 | 2104 | | | | | | | | | | |
| 468 | | EKK91185.1 | 25411 | 28640 | 2104 | | | | | | | | | | |
| 469 | | EKK67942.1 | 25413 | 28642 | 2104 | | | | | | | | | | |
| 470 | | EKK62293.1 | 25415 | 28644 | 2104 | | | | | | | | | | |
| 471 | | EYE30769.1 | 25417 | 28646 | 2104 | | | | | | | | | | |
| 472 | | EYE15511.1 | 25419 | 28648 | 2104 | | | | | | | | | | |
| 473 | | EYE15598.1 | 25421 | 28650 | 2104 | | | | | | | | | | |
| 474 | | ESA76409.1 | 25423 | 28652 | 2090 | | | | | | | | | | |
| 475 | | EZJ86908.1 | 25425 | 28654 | 2104 | | | | | | | | | | |
| 476 | | KEO21429.1 | 25427 | 28656 | 2104 | | | | | | | | | | |
| 477 | | KDA70980.1 | 25429 | 28658 | 2104 | | | | | | | | | | |
| 478 | | KDS94627.1 | 25431 | 28660 | 2114 | | | | | | | | | | |
| 479 | | KDT14053.1 | 25433 | 28662 | 2114 | | | | | | | | | | |
| 480 | | KEN70536.1 | 25435 | 28664 | 2114 | | | | | | | | | | |
| 481 | | KDV77036.1 | 25437 | 28666 | 2114 | | | | | | | | | | |
| 482 | | KDW27005.1 | 25439 | 28668 | 2114 | | | | | | | | | | |
| 483 | | KEN84157.1 | 25441 | 28670 | 2114 | | | | | | | | | | |
| 484 | | KEO02789.1 | 25443 | 28672 | 2114 | | | | | | | | | | |
| 485 | | KDX84120.1 | 25445 | 28674 | 2114 | | | | | | | | | | |
| 486 | | KEJ20443.1 | 25447 | 28676 | 2071 | | | | | | | | | | |
| 487 | | KEJ21099.1 | 25449 | 28678 | 2104 | | | | | | | | | | |
| 488 | | EMX91855.1 | 25451 | 28680 | 2657 | | | | | | | | | | |
| 489 | | EMW69586.1 | 25453 | 28682 | 2114 | | | | | | | | | | |
| 490 | | EMW64104.1 | 25455 | 28684 | 2114 | | | | | | | | | | |
| 491 | | EMW45432.1 | 25457 | 28686 | 2114 | | | | | | | | | | |
| 492 | | EMV86399.1 | 25459 | 28688 | 2114 | | | | | | | | | | |
| 493 | | ENA88227.1 | 25461 | 28690 | 2114 | | | | | | | | | | |
| 494 | | ENB03534.1 | 25463 | 28692 | 2090 | | | | | | | | | | |
| 495 | | ERD09266.1 | 25465 | 28694 | 2104 | | | | | | | | | | |
| 496 | | EKK37396.1 | 25467 | 28696 | 2104 | | | | | | | | | | |
| 497 | | ELW28319.1 | 25469 | 28698 | 2104 | | | | | | | | | | |
| 498 | | KDT83303.1 | 25471 | 28700 | 2104 | | | | | | | | | | |
| 499 | | KEK80770.1 | 25473 | 28702 | 2104 | | | | | | | | | | |
| 500 | | KEL07348.1 | 25475 | 28704 | 2104 | | | | | | | | | | |
| 501 | | KEK94607.1 | 25477 | 28706 | 2104 | | | | | | | | | | |
| 502 | | EKK37001.1 | 25479 | 28708 | 2104 | | | | | | | | | | |
| 503 | | EKI06062.1 | 25481 | 28710 | 2104 | | | | | | | | | | |
| 504 | | EIL64995.1 | 25483 | 28712 | 2114 | | | | | | | | | | |
| 505 | | EKI02734.1 | 25485 | 28714 | 2104 | | | | | | | | | | |
| 506 | | KEL97939.1 | 25487 | 28716 | 2104 | | | | | | | | | | |
| 507 | | KEM08515.1 | 25489 | 28718 | 2104 | | | | | | | | | | |
| 508 | | KEM49607.1 | 25491 | 28720 | 2104 | | | | | | | | | | |
| 509 | | KEN01218.1 | 25493 | 28722 | 2114 | | | | | | | | | | |
| 510 | | KEM09157.1 | 25495 | 28724 | 2114 | | | | | | | | | | |
| 511 | | KEM25601.1 | 25497 | 28726 | 2114 | | | | | | | | | | |
| 512 | | KEM85724.1 | 25499 | 28728 | 2104 | | | | | | | | | | |
| 513 | | KEN65096.1 | 25501 | 28730 | 2104 | | | | | | | | | | |
| 514 | | ELW21807.1 | 25503 | 28732 | 2104 | | | | | | | | | | |
| 515 | | EKK71769.1 | 25505 | 28734 | 2104 | | | | | | | | | | |
| 516 | | EKK61091.1 | 25507 | 28736 | 2104 | | | | | | | | | | |
| 517 | | EKK52335.1 | 25509 | 28738 | 2104 | | | | | | | | | | |
| 518 | | EKK87669.1 | 25511 | 28740 | 2104 | | | | | | | | | | |
| 519 | | EKV85101.1 | 25513 | 28742 | 2104 | | | | | | | | | | |
| 520 | | EKV70655.1 | 25515 | 28744 | 2104 | | | | | | | | | | |
| 521 | | EKW05774.1 | 25517 | 28746 | 2104 | | | | | | | | | | |
| 522 | | EKW03229.1 | 25519 | 28748 | 2104 | | | | | | | | | | |
| 523 | | ESD10541.1 | 25521 | 28750 | 2104 | | | | | | | | | | |
| 524 | | ESA83483.1 | 25523 | 28752 | 2090 | | | | | | | | | | |
| 525 | | ESD19201.1 | 25525 | 28754 | 2090 | | | | | | | | | | |
| 526 | | ESD45641.1 | 25527 | 28756 | 2090 | | | | | | | | | | |
| 527 | | ESD61126.1 | 25529 | 28758 | 2090 | | | | | | | | | | |
| 528 | | ESD71191.1 | 25531 | 28760 | 2104 | | | | | | | | | | |
| 529 | | ESD92014.1 | 25533 | 28762 | 2090 | | | | | | | | | | |
| 530 | | ESD92684.1 | 25535 | 28764 | 2090 | | | | | | | | | | |
| 531 | | EKW04204.1 | 25537 | 28766 | 2104 | | | | | | | | | | |
| 532 | | EKW19026.1 | 25539 | 28768 | 2104 | | | | | | | | | | |
| 533 | | EIN33839.1 | 25541 | 28770 | 2104 | | | | | | | | | | |
| 534 | | EKW08489.1 | 25543 | 28772 | 2104 | | | | | | | | | | |
| 535 | | ELW29953.1 | 25545 | 28774 | 2104 | | | | | | | | | | |
| 536 | | EKW22423.1 | 25547 | 28776 | 2104 | | | | | | | | | | |
| 537 | | EKW74828.1 | 25549 | 28778 | 2104 | | | | | | | | | | |
| 538 | | EKY34593.1 | 25551 | 28780 | 2104 | | | | | | | | | | |
| 539 | | EKW38126.1 | 25553 | 28782 | 2104 | | | | | | | | | | |
| 540 | | EKW51346.1 | 25555 | 28784 | 2104 | | | | | | | | | | |
| 541 | | EKW70677.1 | 25557 | 28786 | 2104 | | | | | | | | | | |
| 542 | | EKW68015.1 | 25559 | 28788 | 2104 | | | | | | | | | | |
| 543 | | EKW71373.1 | 25561 | 28790 | 2104 | | | | | | | | | | |
| 544 | | EKY34710.1 | 25563 | 28792 | 2104 | | | | | | | | | | |
| 545 | | EKW75844.1 | 25565 | 28794 | 2104 | | | | | | | | | | |
| 546 | | ELW46373.1 | 25567 | 28796 | 2104 | | | | | | | | | | |
| 547 | | EKW96658.1 | 25569 | 28798 | 2104 | | | | | | | | | | |
| 548 | | EKW96262.1 | 25571 | 28800 | 2104 | | | | | | | | | | |
| 549 | | ELV31252.1 | 25573 | 28802 | 2104 | | | | | | | | | | |
| 550 | | ELV35525.1 | 25575 | 28804 | 2104 | | | | | | | | | | |
| 551 | | ELV44385.1 | 25577 | 28806 | 2104 | | | | | | | | | | |
| 552 | | ELW27709.1 | 25579 | 28808 | 2104 | | | | | | | | | | |
| 553 | | ELV47170.1 | 25581 | 28810 | 2104 | | | | | | | | | | |
| 554 | | ELW24264.1 | 25583 | 28812 | 2104 | | | | | | | | | | |
| 555 | | ELV62894.1 | 25585 | 28814 | 2104 | | | | | | | | | | |
| 556 | | ETJ70882.1 | 25587 | 28816 | 2104 | | | | | | | | | | |
| 557 | | ELV63261.1 | 25589 | 28818 | 2104 | | | | | | | | | | |
| 558 | | ACA79488.1 | 25591 | 28820 | 2104 | | | | | | | | | | |
| 559 | | ETJ79055.1 | 25593 | 28822 | 2104 | | | | | | | | | | |
| 560 | | ERB88976.1 | 25595 | 28824 | 2104 | | | | | | | | | | |
| 561 | | ERD08450.1 | 25597 | 28826 | 2104 | | | | | | | | | | |
| 562 | | ERD05022.1 | 25599 | 28828 | 2104 | | | | | | | | | | |
| 563 | | ERD20749.1 | 25601 | 28830 | 2104 | | | | | | | | | | |
| 564 | | ERD22952.1 | 25603 | 28832 | 2104 | | | | | | | | | | |
| 565 | | ERB79218.1 | 25605 | 28834 | 2104 | | | | | | | | | | |
| 566 | | ERD23993.1 | 25607 | 28836 | 2104 | | | | | | | | | | |
| 567 | | ERD35139.1 | 25609 | 28838 | 2104 | | | | | | | | | | |
| 568 | | ERD37186.1 | 25611 | 28840 | 2104 | | | | | | | | | | |
| 569 | | ERD26785.1 | 25613 | 28842 | 2104 | | | | | | | | | | |
| 570 | | ERD52932.1 | 25615 | 28844 | 2104 | | | | | | | | | | |
| 571 | | ERD40233.1 | 25617 | 28846 | 2104 | | | | | | | | | | |
| 572 | | ERD45130.1 | 25619 | 28848 | 2104 | | | | | | | | | | |
| 573 | | ERB91933.1 | 25621 | 28850 | 2104 | | | | | | | | | | |
| 574 | | ERC00105.1 | 25623 | 28852 | 2104 | | | | | | | | | | |
| 575 | | ERC08313.1 | 25625 | 28854 | 2104 | | | | | | | | | | |
| 576 | | ERC07683.1 | 25627 | 28856 | 2104 | | | | | | | | | | |
| 577 | | ERC15356.1 | 25629 | 28858 | 2104 | | | | | | | | | | |
| 578 | | ERC23447.1 | 25631 | 28860 | 2104 | | | | | | | | | | |
| 579 | | ERC10661.1 | 25633 | 28862 | 2104 | | | | | | | | | | |
| 580 | | ERC32307.1 | 25635 | 28864 | 2104 | | | | | | | | | | |
| 581 | | ERD72600.1 | 25637 | 28866 | 2104 | | | | | | | | | | |
| 582 | | ERD68378.1 | 25639 | 28868 | 2104 | | | | | | | | | | |
| 583 | | ERD73346.1 | 25641 | 28870 | 2104 | | | | | | | | | | |
| 584 | | ERD83190.1 | 25643 | 28872 | 2104 | | | | | | | | | | |
| 585 | | ERC25312.1 | 25645 | 28874 | 2104 | | | | | | | | | | |
| 586 | | ERC30062.1 | 25647 | 28876 | 2104 | | | | | | | | | | |
| 587 | | ERD87992.1 | 25649 | 28878 | 2104 | | | | | | | | | | |
| 588 | | ERD91778.1 | 25651 | 28880 | 2104 | | | | | | | | | | |
| 589 | | ERD98685.1 | 25653 | 28882 | 2104 | | | | | | | | | | |
| 590 | | ERD88430.1 | 25655 | 28884 | 2104 | | | | | | | | | | |
| 591 | | ERE36113.1 | 25657 | 28886 | 2104 | | | | | | | | | | |
| 592 | | ERE23642.1 | 25659 | 28888 | 2104 | | | | | | | | | | |
| 593 | | ERC33936.1 | 25661 | 28890 | 2104 | | | | | | | | | | |
| 594 | | ERC40343.1 | 25663 | 28892 | 2104 | | | | | | | | | | |
| 595 | | ERC48260.1 | 25665 | 28894 | 2104 | | | | | | | | | | |
| 596 | | ETY20411.1 | 25667 | 28896 | 2114 | | | | | | | | | | |
| 597 | | ETY13489.1 | 25669 | 28898 | 2114 | | | | | | | | | | |
| 598 | | ETY13648.1 | 25671 | 28900 | 2114 | | | | | | | | | | |
| 599 | | ETY08682.1 | 25673 | 28902 | 2114 | | | | | | | | | | |
| 600 | | ETX96687.1 | 25675 | 28904 | 2114 | | | | | | | | | | |
| 601 | | ERO99484.1 | 25677 | 28906 | 2114 | | | | | | | | | | |
| 602 | | ETY35402.1 | 25679 | 28908 | 2114 | | | | | | | | | | |
| 603 | | ETY29966.1 | 25681 | 28910 | 2114 | | | | | | | | | | |
| 604 | | ESL20614.1 | 25683 | 28912 | 2104 | | | | | | | | | | |
| 605 | | ETX82126.1 | 25685 | 28914 | 2114 | | | | | | | | | | |
| 606 | | ETX76976.1 | 25687 | 28916 | 2114 | | | | | | | | | | |
| 607 | | ETY61260.1 | 25689 | 28918 | 2114 | | | | | | | | | | |
| 608 | | EZQ66604.1 | 25691 | 28920 | 2114 | | | | | | | | | | |
| 609 | | ETY23955.1 | 25693 | 28922 | 2114 | | | | | | | | | | |
| 610 | | EKH96740.1 | 25695 | 28924 | 2104 | | | | | | | | | | |
| 611 | | CDU33063.1 | 25697 | 28926 | 2114 | | | | | | | | | | |
| 612 | | EHV18501.1 | 25699 | 28928 | 2104 | | | | | | | | | | |
| 613 | | EIP71495.1 | 25701 | 28930 | 2104 | | | | | | | | | | |
| 614 | | EKI46661.1 | 25703 | 28932 | 2104 | | | | | | | | | | |
| 615 | | EKI57136.1 | 25705 | 28934 | 2104 | | | | | | | | | | |
| 616 | | EKI59126.1 | 25707 | 28936 | 2104 | | | | | | | | | | |
| 617 | | EIP63563.1 | 25709 | 28938 | 2104 | | | | | | | | | | |
| 618 | | EIP72315.1 | 25711 | 28940 | 2104 | | | | | | | | | | |
| 619 | | EKI64841.1 | 25713 | 28942 | 2104 | | | | | | | | | | |
| 620 | | EKI72765.1 | 25715 | 28944 | 2104 | | | | | | | | | | |
| 621 | | EKI91872.1 | 25717 | 28946 | 2104 | | | | | | | | | | |
| 622 | | EKI82677.1 | 25719 | 28948 | 2104 | | | | | | | | | | |
| 623 | | EKJ05431.1 | 25721 | 28950 | 2104 | | | | | | | | | | |
| 624 | | EKI92955.1 | 25723 | 28952 | 2104 | | | | | | | | | | |
| 625 | | EKJ00854.1 | 25725 | 28954 | 2104 | | | | | | | | | | |
| 626 | | EIP72928.1 | 25727 | 28956 | 2104 | | | | | | | | | | |
| 627 | | EKJ19827.1 | 25729 | 28958 | 2104 | | | | | | | | | | |
| 628 | | EKJ20864.1 | 25731 | 28960 | 2104 | | | | | | | | | | |
| 629 | | EKJ36038.1 | 25733 | 28962 | 2104 | | | | | | | | | | |
| 630 | | EKJ47665.1 | 25735 | 28964 | 2104 | | | | | | | | | | |
| 631 | | EKJ36501.1 | 25737 | 28966 | 2104 | | | | | | | | | | |
| 632 | | EIP38855.1 | 25739 | 28968 | 2104 | | | | | | | | | | |
| 633 | | EIO92486.1 | 25741 | 28970 | 2104 | | | | | | | | | | |
| 634 | | EIO87517.1 | 25743 | 28972 | 2104 | | | | | | | | | | |
| 635 | | EIP27283.1 | 25745 | 28974 | 2104 | | | | | | | | | | |
| 636 | | EIP10343.1 | 25747 | 28976 | 2104 | | | | | | | | | | |
| 637 | | EIP33944.1 | 25749 | 28978 | 2104 | | | | | | | | | | |
| 638 | | EIP40257.1 | 25751 | 28980 | 2104 | | | | | | | | | | |
| 639 | | EIP48993.1 | 25753 | 28982 | 2104 | | | | | | | | | | |
| 640 | | EIP35357.1 | 25755 | 28984 | 2104 | | | | | | | | | | |
| 641 | | EIP50032.1 | 25757 | 28986 | 2104 | | | | | | | | | | |
| 642 | | EKI03043.1 | 25759 | 28988 | 2104 | | | | | | | | | | |
| 643 | | EST65289.1 | 25761 | 28990 | 2114 | | | | | | | | | | |
| 644 | | EMX76370.1 | 25763 | 28992 | 1715 | | | | | | | | | | |
| 645 | | EMX78116.1 | 25765 | 28994 | 1715 | | | | | | | | | | |
| 646 | | EKH36317.1 | 25767 | 28996 | 2104 | | | | | | | | | | |
| 647 | | EIN15911.1 | 25769 | 28998 | 2104 | | | | | | | | | | |
| 648 | | EKH25288.1 | 25771 | 29000 | 2104 | | | | | | | | | | |
| 649 | | EKH13354.1 | 25773 | 29002 | 2104 | | | | | | | | | | |
| 650 | | EIN16634.1 | 25775 | 29004 | 2104 | | | | | | | | | | |
| 651 | | EIN33026.1 | 25777 | 29006 | 2104 | | | | | | | | | | |
| 652 | | EKH48832.1 | 25779 | 29008 | 2104 | | | | | | | | | | |
| 653 | | EKJ48076.1 | 25781 | 29010 | 2104 | | | | | | | | | | |
| 654 | | EFI22364.1 | 25783 | 29012 | 2114 | | | | | | | | | | |
| 655 | | EFF02931.1 | 25785 | 29014 | 2114 | | | | | | | | | | |
| 656 | | EQN36980.1 | 25787 | 29016 | 2114 | | | | | | | | | | |
| 657 | | EQQ54038.1 | 25789 | 29018 | 2114 | | | | | | | | | | |
| 658 | | EQQ62151.1 | 25791 | 29020 | 1302 | | | | | | | | | | |
| 659 | | EQQ82445.1 | 25793 | 29022 | 2114 | | | | | | | | | | |
| 660 | | EQR15650.1 | 25795 | 29024 | 2114 | | | | | | | | | | |
| 661 | | EQR29834.1 | 25797 | 29026 | 2114 | | | | | | | | | | |
| 662 | | EQR56342.1 | 25799 | 29028 | 2114 | | | | | | | | | | |
| 663 | | EQR70531.1 | 25801 | 29030 | 2114 | | | | | | | | | | |
| 664 | | EQR73388.1 | 25803 | 29032 | 2114 | | | | | | | | | | |
| 665 | | ESP12228.1 | 25805 | 29034 | 2104 | | | | | | | | | | |
| 666 | | EQR98265.1 | 25807 | 29036 | 2114 | | | | | | | | | | |
| 667 | | EQS19620.1 | 25809 | 29038 | 2114 | | | | | | | | | | |
| 668 | | EQS44554.1 | 25811 | 29040 | 2114 | | | | | | | | | | |
| 669 | | EQS43788.1 | 25813 | 29042 | 2114 | | | | | | | | | | |
| 670 | | ERA63201.1 | 25815 | 29044 | 2114 | | | | | | | | | | |
| 671 | | EQS73534.1 | 25817 | 29046 | 2114 | | | | | | | | | | |
| 672 | | EQS83533.1 | 25819 | 29048 | 2114 | | | | | | | | | | |
| 673 | | EQT06519.1 | 25821 | 29050 | 2114 | | | | | | | | | | |
| 674 | | EQT31741.1 | 25823 | 29052 | 2104 | | | | | | | | | | |
| 675 | | EQT33091.1 | 25825 | 29054 | 2114 | | | | | | | | | | |
| 676 | | EQT84560.1 | 25827 | 29056 | 2104 | | | | | | | | | | |
| 677 | | EQU07296.1 | 25829 | 29058 | 2114 | | | | | | | | | | |
| 678 | | EQU46108.1 | 25831 | 29060 | 2114 | | | | | | | | | | |
| 679 | | EQU56271.1 | 25833 | 29062 | 2114 | | | | | | | | | | |
| 680 | | EQU82066.1 | 25835 | 29064 | 2114 | | | | | | | | | | |
| 681 | | EQN74806.1 | 25837 | 29066 | 2114 | | | | | | | | | | |
| 682 | | EQV15999.1 | 25839 | 29068 | 2114 | | | | | | | | | | |
| 683 | | EQO01912.1 | 25841 | 29070 | 2114 | | | | | | | | | | |
| 684 | | EQO57394.1 | 25843 | 29072 | 2104 | | | | | | | | | | |
| 685 | | EQO66405.1 | 25845 | 29074 | 2104 | | | | | | | | | | |
| 686 | | EQO74550.1 | 25847 | 29076 | 2114 | | | | | | | | | | |
| 687 | | EQP20054.1 | 25849 | 29078 | 2114 | | | | | | | | | | |
| 688 | | EQP30926.1 | 25851 | 29080 | 2114 | | | | | | | | | | |
| 689 | | EQP87867.1 | 25853 | 29082 | 2114 | | | | | | | | | | |
| 690 | | EQV39985.1 | 25855 | 29084 | 2114 | | | | | | | | | | |
| 691 | | EQV77954.1 | 25857 | 29086 | 2114 | | | | | | | | | | |
| 692 | | EQV75318.1 | 25859 | 29088 | 2114 | | | | | | | | | | |
| 693 | | EQV93985.1 | 25861 | 29090 | 2114 | | | | | | | | | | |
| 694 | | EOX00083.1 | 25863 | 29092 | 2114 | | | | | | | | | | |
| 695 | | EOW11795.1 | 25865 | 29094 | 2114 | | | | | | | | | | |
| 696 | | ELF04268.1 | 25867 | 29096 | 2114 | | | | | | | | | | |
| 697 | | ELI36532.1 | 25869 | 29098 | 2114 | | | | | | | | | | |
| 698 | | ELI49202.1 | 25871 | 29100 | 2104 | | | | | | | | | | |
| 699 | | EOW43092.1 | 25873 | 29102 | 2114 | | | | | | | | | | |
| 700 | | ELI49522.1 | 25875 | 29104 | 2114 | | | | | | | | | | |
| 701 | | EOW53696.1 | 25877 | 29106 | 2114 | | | | | | | | | | |
| 702 | | EOW53661.1 | 25879 | 29108 | 2114 | | | | | | | | | | |
| 703 | | EOW60866.1 | 25881 | 29110 | 2114 | | | | | | | | | | |
| 704 | | ELG97963.1 | 25883 | 29112 | 2114 | | | | | | | | | | |
| 705 | | ELH03274.1 | 25885 | 29114 | 2114 | | | | | | | | | | |
| 706 | | ELF28434.1 | 25887 | 29116 | 2104 | | | | | | | | | | |
| 707 | | EU30967.1 | 25889 | 29118 | 2114 | | | | | | | | | | |
| 708 | | EOW72675.1 | 25891 | 29120 | 2114 | | | | | | | | | | |
| 709 | | ELC68673.1 | 25893 | 29122 | 2114 | | | | | | | | | | |
| 710 | | ELC04770.1 | 25895 | 29124 | 2114 | | | | | | | | | | |
| 711 | | EOV27243.1 | 25897 | 29126 | 2114 | | | | | | | | | | |
| 712 | | ELH63192.1 | 25899 | 29128 | 2104 | | | | | | | | | | |
| 713 | | ELD00702.1 | 25901 | 29130 | 2114 | | | | | | | | | | |
| 714 | | ELD16727.1 | 25903 | 29132 | 2114 | | | | | | | | | | |
| 715 | | EOV39942.1 | 25905 | 29134 | 2114 | | | | | | | | | | |
| 716 | | EOX13560.1 | 25907 | 29136 | 2114 | | | | | | | | | | |
| 717 | | ELD74209.1 | 25909 | 29138 | 2114 | | | | | | | | | | |
| 718 | | ELC51202.1 | 25911 | 29140 | 2114 | | | | | | | | | | |
| 719 | | ELC65367.1 | 25913 | 29142 | 2114 | | | | | | | | | | |
| 720 | | ELG08157.1 | 25915 | 29144 | 2104 | | | | | | | | | | |
| 721 | | ELE06192.1 | 25917 | 29146 | 1584 | | | | | | | | | | |
| 722 | | ELE13901.1 | 25919 | 29148 | 2114 | | | | | | | | | | |
| 723 | | EOV54810.1 | 25921 | 29150 | 2114 | | | | | | | | | | |
| 724 | | ELE75378.1 | 25923 | 29152 | 2114 | | | | | | | | | | |
| 725 | | ELJ61315.1 | 25925 | 29154 | 2114 | | | | | | | | | | |
| 726 | | ELE76412.1 | 25927 | 29156 | 2114 | | | | | | | | | | |
| 727 | | EGI23327.1 | 25929 | 29158 | 2114 | | | | | | | | | | |
| 728 | | EIF87148.1 | 25931 | 29160 | 2104 | | | | | | | | | | |
| 729 | | KDG67767.1 | 25933 | 29162 | 2114 | | | | | | | | | | |
| 730 | | EFK89793.1 | 25935 | 29164 | 2090 | | | | | | | | | | |
| 731 | | EFK27050.1 | 25937 | 29166 | 2104 | | | | | | | | | | |
| 732 | | EFI89547.1 | 25939 | 29168 | 2114 | | | | | | | | | | |
| 733 | | EFJ73000.1 | 25941 | 29170 | 2090 | | | | | | | | | | |
| 734 | | EKH61308.1 | 25943 | 29172 | 2104 | | | | | | | | | | |
| 735 | | EKJ53063.1 | 25945 | 29174 | 2104 | | | | | | | | | | |
| 736 | | EMS03602.1 | 25947 | 29176 | 2104 | | | | | | | | | | |
| 737 | | KDM81021.1 | 25949 | 29178 | 2104 | | | | | | | | | | |
| 738 | | AHY73976.1 | 25951 | 29180 | 2104 | | | | | | | | | | |
| 739 | | AHG12157.1 | 25953 | 29182 | 2104 | | | | | | | | | | |
| 740 | | EYZ76662.1 | 25955 | 29184 | 2104 | | | | | | | | | | |
| 741 | | EYW98552.1 | 25957 | 29186 | 2104 | | | | | | | | | | |
| 742 | | EYV59037.1 | 25959 | 29188 | 2104 | | | | | | | | | | |
| 743 | | EZE90567.1 | 25961 | 29190 | 2104 | | | | | | | | | | |
| 744 | | EYV46017.1 | 25963 | 29192 | 2104 | | | | | | | | | | |
| 745 | | EYV44258.1 | 25965 | 29194 | 2104 | | | | | | | | | | |
| 746 | | EYV24875.1 | 25967 | 29196 | 2104 | | | | | | | | | | |
| 747 | | EYV22943.1 | 25969 | 29198 | 2104 | | | | | | | | | | |
| 748 | | EYV18168.1 | 25971 | 29200 | 2104 | | | | | | | | | | |
| 749 | | EYV20078.1 | 25973 | 29202 | 2104 | | | | | | | | | | |
| 750 | | EYV16484.1 | 25975 | 29204 | 2104 | | | | | | | | | | |
| 751 | | EYZ14529.1 | 25977 | 29206 | 2104 | | | | | | | | | | |
| 752 | | EZQ47394.1 | 25979 | 29208 | 2104 | | | | | | | | | | |
| 753 | | EZQ50282.1 | 25981 | 29210 | 2104 | | | | | | | | | | |
| 754 | | EFX13464.1 | 25983 | 29212 | 2104 | | | | | | | | | | |
| 755 | | EFX18241.1 | 25985 | 29214 | 2104 | | | | | | | | | | |
| 756 | | KKF77973.1 | 25987 | 29216 | 2104 | | | | | | | | | | |
| 757 | | KKF80397.1 | 25989 | 29218 | 2104 | | | | | | | | | | |
| 758 | | KKY44751.1 | 25991 | 29220 | 2104 | | | | | | | | | | |
| 759 | | ALH93595.1 | 25993 | 29222 | 2104 | | | | | | | | | | |
| 760 | | KRQ04755.1 | 25995 | 29224 | 2104 | | | | | | | | | | |
| 761 | | EYZ52258.1 | 25997 | 29226 | 2104 | | | | | | | | | | |
| 762 | | EYZ38307.1 | 25999 | 29228 | 2104 | | | | | | | | | | |
| 763 | | EYZ37416.1 | 26001 | 29230 | 2104 | | | | | | | | | | |
| 764 | | EYZ36217.1 | 26003 | 29232 | 2104 | | | | | | | | | | |
| 765 | | EYX13628.1 | 26005 | 29234 | 2104 | | | | | | | | | | |
| 766 | | EYX12327.1 | 26007 | 29236 | 2104 | | | | | | | | | | |
| 767 | | EYX02204.1 | 26009 | 29238 | 2104 | | | | | | | | | | |
| 768 | | EZD85330.1 | 26011 | 29240 | 2104 | | | | | | | | | | |
| 769 | | EZE88806.1 | 26013 | 29242 | 2104 | | | | | | | | | | |
| 770 | | EYV70456.1 | 26015 | 29244 | 2104 | | | | | | | | | | |
| 771 | | EZE89449.1 | 26017 | 29246 | 2104 | | | | | | | | | | |
| 772 | | EYV67648.1 | 26019 | 29248 | 2104 | | | | | | | | | | |
| 773 | | EYX70060.1 | 26021 | 29250 | 2104 | | | | | | | | | | |
| 774 | | EYX57443.1 | 26023 | 29252 | 2104 | | | | | | | | | | |
| 775 | | EYX54548.1 | 26025 | 29254 | 2104 | | | | | | | | | | |
| 776 | | EYX48134.1 | 26027 | 29256 | 2104 | | | | | | | | | | |
| 777 | | EYX44881.1 | 26029 | 29258 | 2104 | | | | | | | | | | |
| 778 | | EYX43993.1 | 26031 | 29260 | 2104 | | | | | | | | | | |
| 779 | | EYX33004.1 | 26033 | 29262 | 2104 | | | | | | | | | | |
| 780 | | EYX30696.1 | 26035 | 29264 | 2104 | | | | | | | | | | |
| 781 | | EYX27761.1 | 26037 | 29266 | 2104 | | | | | | | | | | |
| 782 | | EYW85332.1 | 26039 | 29268 | 2104 | | | | | | | | | | |
| 783 | | EYW83365.1 | 26041 | 29270 | 2104 | | | | | | | | | | |
| 784 | | EYW75521.1 | 26043 | 29272 | 2104 | | | | | | | | | | |
| 785 | | EYW71151.1 | 26045 | 29274 | 2104 | | | | | | | | | | |
| 786 | | EYW67179.1 | 26047 | 29276 | 2104 | | | | | | | | | | |
| 787 | | EYW64048.1 | 26049 | 29278 | 2104 | | | | | | | | | | |
| 788 | | EYW57176.1 | 26051 | 29280 | 2104 | | | | | | | | | | |
| 789 | | EYW49142.1 | 26053 | 29282 | 2104 | | | | | | | | | | |
| 790 | | EYW49455.1 | 26055 | 29284 | 2104 | | | | | | | | | | |
| 791 | | EYW43048.1 | 26057 | 29286 | 2104 | | | | | | | | | | |
| 792 | | EYW39162.1 | 26059 | 29288 | 2104 | | | | | | | | | | |
| 793 | | EYW34611.1 | 26061 | 29290 | 2104 | | | | | | | | | | |
| 794 | | EYW25812.1 | 26063 | 29292 | 2104 | | | | | | | | | | |
| 795 | | EYW27182.1 | 26065 | 29294 | 2104 | | | | | | | | | | |
| 796 | | EYW24511.1 | 26067 | 29296 | 2104 | | | | | | | | | | |
| 797 | | EYW09905.1 | 26069 | 29298 | 2104 | | | | | | | | | | |
| 798 | | EYW13502.1 | 26071 | 29300 | 2104 | | | | | | | | | | |
| 799 | | EZF08560.1 | 26073 | 29302 | 2104 | | | | | | | | | | |
| 800 | | EYW07433.1 | 26075 | 29304 | 2104 | | | | | | | | | | |
| 801 | | EZF05481.1 | 26077 | 29306 | 2104 | | | | | | | | | | |
| 802 | | EDZ87478.1 | 26079 | 29308 | 2104 | | | | | | | | | | |
| 803 | | EDZ81928.1 | 26081 | 29310 | 2104 | | | | | | | | | | |
| 804 | | EDU68725.1 | 26083 | 29312 | 2104 | | | | | | | | | | |
| 805 | | EDU54295.1 | 26085 | 29314 | 2104 | | | | | | | | | | |
| 806 | | ACI39430.1 | 26087 | 29316 | 2104 | | | | | | | | | | |
| 807 | | EDU34122.1 | 26089 | 29318 | 2104 | | | | | | | | | | |
| 808 | | EDZ76631.1 | 26091 | 29320 | 2104 | | | | | | | | | | |
| 809 | | EDU76303.1 | 26093 | 29322 | 2104 | | | | | | | | | | |
| 810 | | EDU82569.1 | 26095 | 29324 | 2104 | | | | | | | | | | |
| 811 | | EDU87409.1 | 26097 | 29326 | 2104 | | | | | | | | | | |
| 812 | | EDU98012.1 | 26099 | 29328 | 2104 | | | | | | | | | | |
| 813 | | AAG59484.1 | 26101 | 29330 | 2104 | | | | | | | | | | |
| 814 | | AIG71774.1 | 26103 | 29332 | 2104 | | | | | | | | | | |
| 815 | | EZA89751.1 | 26105 | 29334 | 2104 | | | | | | | | | | |
| 816 | | EZB05974.1 | 26107 | 29336 | 2104 | | | | | | | | | | |
| 817 | | EZB04403.1 | 26109 | 29338 | 2104 | | | | | | | | | | |
| 818 | | EZB11565.1 | 26111 | 29340 | 2104 | | | | | | | | | | |
| 819 | | EYV89285.1 | 26113 | 29342 | 2104 | | | | | | | | | | |
| 820 | | EZB20620.1 | 26115 | 29344 | 2104 | | | | | | | | | | |
| 821 | | EZB18143.1 | 26117 | 29346 | 2104 | | | | | | | | | | |
| 822 | | EZB30349.1 | 26119 | 29348 | 2104 | | | | | | | | | | |
| 823 | | EFX08675.1 | 26121 | 29350 | 2104 | | | | | | | | | | |
| 824 | | EZB32015.1 | 26123 | 29352 | 2104 | | | | | | | | | | |
| 825 | | EZB41524.1 | 26125 | 29354 | 2104 | | | | | | | | | | |
| 826 | | EZB46985.1 | 26127 | 29356 | 2104 | | | | | | | | | | |
| 827 | | EZB48638.1 | 26129 | 29358 | 2104 | | | | | | | | | | |
| 828 | | EZB48354.1 | 26131 | 29360 | 2104 | | | | | | | | | | |
| 829 | | EZB52648.1 | 26133 | 29362 | 2104 | | | | | | | | | | |
| 830 | | EZB74690.1 | 26135 | 29364 | 2104 | | | | | | | | | | |
| 831 | | EZB73674.1 | 26137 | 29366 | 2104 | | | | | | | | | | |
| 832 | | EZB87911.1 | 26139 | 29368 | 2104 | | | | | | | | | | |
| 833 | | EZB80135.1 | 26141 | 29370 | 2104 | | | | | | | | | | |
| 834 | | EZB81695.1 | 26143 | 29372 | 2104 | | | | | | | | | | |
| 835 | | EZB95442.1 | 26145 | 29374 | 2104 | | | | | | | | | | |
| 836 | | EZC17285.1 | 26147 | 29376 | 2104 | | | | | | | | | | |
| 837 | | EZC37645.1 | 26149 | 29378 | 2104 | | | | | | | | | | |
| 838 | | EZC28524.1 | 26151 | 29380 | 2104 | | | | | | | | | | |
| 839 | | EZC43983.1 | 26153 | 29382 | 2104 | | | | | | | | | | |
| 840 | | EZC48748.1 | 26155 | 29384 | 2104 | | | | | | | | | | |
| 841 | | EZC62955.1 | 26157 | 29386 | 2104 | | | | | | | | | | |
| 842 | | EZC70422.1 | 26159 | 29388 | 2104 | | | | | | | | | | |
| 843 | | EZC77662.1 | 26161 | 29390 | 2104 | | | | | | | | | | |
| 844 | | EZC64795.1 | 26163 | 29392 | 2104 | | | | | | | | | | |
| 845 | | EZC83414.1 | 26165 | 29394 | 2104 | | | | | | | | | | |
| 846 | | EZC90333.1 | 26167 | 29396 | 2104 | | | | | | | | | | |
| 847 | | EZC92771.1 | 26169 | 29398 | 2104 | | | | | | | | | | |
| 848 | | EZC86953.1 | 26171 | 29400 | 2104 | | | | | | | | | | |
| 849 | | EZD00267.1 | 26173 | 29402 | 2104 | | | | | | | | | | |
| 850 | | EYV84723.1 | 26175 | 29404 | 2104 | | | | | | | | | | |
| 851 | | EZD08968.1 | 26177 | 29406 | 2104 | | | | | | | | | | |
| 852 | | EZD17519.1 | 26179 | 29408 | 2104 | | | | | | | | | | |
| 853 | | EZD15757.1 | 26181 | 29410 | 2104 | | | | | | | | | | |
| 854 | | EZD19488.1 | 26183 | 29412 | 2104 | | | | | | | | | | |
| 855 | | EZD75269.1 | 26185 | 29414 | 2104 | | | | | | | | | | |
| 856 | | BAB38683.1 | 26187 | 29416 | 2104 | | | | | | | | | | |
| 857 | | AIF96934.1 | 26189 | 29418 | 2104 | | | | | | | | | | |
| 858 | | AJA29436.1 | 26191 | 29420 | 2104 | | | | | | | | | | |
| 859 | | ACT75064.1 | 26193 | 29422 | 2104 | | | | | | | | | | |
| 860 | | EEC30693.1 | 26195 | 29424 | 2104 | | | | | | | | | | |
| 861 | | EYZ63880.1 | 26197 | 29426 | 2104 | | | | | | | | | | |
| 862 | | EFX22734.1 | 26199 | 29428 | 2104 | | | | | | | | | | |
| 863 | | ADD59519.1 | 26201 | 29430 | 2104 | | | | | | | | | | |
| 864 | | ENC26729.1 | 26203 | 29432 | 2114 | | | | | | | | | | |
| 865 | | ENA10896.1 | 26205 | 29434 | 2114 | | | | | | | | | | |
| 866 | | EMZ79273.1 | 26207 | 29436 | 2114 | | | | | | | | | | |
| 867 | | ENG24753.1 | 26209 | 29438 | 2114 | | | | | | | | | | |
| 868 | | ENG35039.1 | 26211 | 29440 | 2114 | | | | | | | | | | |
| 869 | | ENG38631.1 | 26213 | 29442 | 2090 | | | | | | | | | | |
| 870 | | END33529.1 | 26215 | 29444 | 2090 | | | | | | | | | | |
| 871 | | ENE04446.1 | 26217 | 29446 | 2114 | | | | | | | | | | |
| 872 | | ENG47569.1 | 26219 | 29448 | 2090 | | | | | | | | | | |
| 873 | | ENG50954.1 | 26221 | 29450 | 2114 | | | | | | | | | | |
| 874 | | ENG56305.1 | 26223 | 29452 | 2114 | | | | | | | | | | |
| 875 | | ENG57264.1 | 26225 | 29454 | 2090 | | | | | | | | | | |
| 876 | | ENH40674.1 | 26227 | 29456 | 2090 | | | | | | | | | | |
| 877 | | ENG66730.1 | 26229 | 29458 | 2114 | | | | | | | | | | |
| 878 | | ENG74277.1 | 26231 | 29460 | 2114 | | | | | | | | | | |
| 879 | | EST67460.1 | 26233 | 29462 | 2104 | | | | | | | | | | |
| 880 | | EST67374.1 | 26235 | 29464 | 2104 | | | | | | | | | | |
| 881 | | EIN65416.1 | 26237 | 29466 | 2104 | | | | | | | | | | |
| 882 | | ELV75969.1 | 26239 | 29468 | 2104 | | | | | | | | | | |
| 883 | | ELV90964.1 | 26241 | 29470 | 2104 | | | | | | | | | | |
| 884 | | EIN69805.1 | 26243 | 29472 | 2104 | | | | | | | | | | |
| 885 | | EIN85485.1 | 26245 | 29474 | 2104 | | | | | | | | | | |
| 886 | | ELV76555.1 | 26247 | 29476 | 2104 | | | | | | | | | | |
| 887 | | ELV98807.1 | 26249 | 29478 | 2104 | | | | | | | | | | |
| 888 | | EIN94452.1 | 26251 | 29480 | 2104 | | | | | | | | | | |
| 889 | | EKH63851.1 | 26253 | 29482 | 2104 | | | | | | | | | | |
| 890 | | EIN88182.1 | 26255 | 29484 | 2104 | | | | | | | | | | |
| 891 | | EIN89808.1 | 26257 | 29486 | 2104 | | | | | | | | | | |
| 892 | | EIO09765.1 | 26259 | 29488 | 2104 | | | | | | | | | | |
| 893 | | EIN49114.1 | 26261 | 29490 | 2104 | | | | | | | | | | |
| 894 | | EIO07035.1 | 26263 | 29492 | 2104 | | | | | | | | | | |
| 895 | | EIO07406.1 | 26265 | 29494 | 2104 | | | | | | | | | | |
| 896 | | EIO11195.1 | 26267 | 29496 | 2104 | | | | | | | | | | |
| 897 | | EKH20919.1 | 26269 | 29498 | 2104 | | | | | | | | | | |
| 898 | | ELW23234.1 | 26271 | 29500 | 2104 | | | | | | | | | | |
| 899 | | EKI33366.1 | 26273 | 29502 | 2104 | | | | | | | | | | |
| 900 | | EIO24463.1 | 26275 | 29504 | 2104 | | | | | | | | | | |
| 901 | | EKH71757.1 | 26277 | 29506 | 2104 | | | | | | | | | | |
| 902 | | EIO49135.1 | 26279 | 29508 | 2104 | | | | | | | | | | |
| 903 | | EKH87903.1 | 26281 | 29510 | 2104 | | | | | | | | | | |
| 904 | | ELV91644.1 | 26283 | 29512 | 2104 | | | | | | | | | | |
| 905 | | ELV93152.1 | 26285 | 29514 | 2104 | | | | | | | | | | |
| 906 | | EKH83479.1 | 26287 | 29516 | 2104 | | | | | | | | | | |
| 907 | | EIN52368.1 | 26289 | 29518 | 2104 | | | | | | | | | | |
| 908 | | EKH07683.1 | 26291 | 29520 | 2104 | | | | | | | | | | |
| 909 | | ELW12426.1 | 26293 | 29522 | 2104 | | | | | | | | | | |
| 910 | | EIN68648.1 | 26295 | 29524 | 2104 | | | | | | | | | | |
| 911 | | ACB19214.1 | 26297 | 29526 | 2104 | | | | | | | | | | |
| 912 | | ERE14330.1 | 26299 | 29528 | 2104 | | | | | | | | | | |
| 913 | | ERC65825.1 | 26301 | 29530 | 2104 | | | | | | | | | | |
| 914 | | ERC74189.1 | 26303 | 29532 | 2104 | | | | | | | | | | |
| 915 | | ERC92370.1 | 26305 | 29534 | 2104 | | | | | | | | | | |
| 916 | | EGI28995.1 | 26307 | 29536 | 2104 | | | | | | | | | | |
| 917 | | EKH95568.1 | 26309 | 29538 | 2104 | | | | | | | | | | |
| 918 | | EIO46248.1 | 26311 | 29540 | 2104 | | | | | | | | | | |
| 919 | | EIO79506.1 | 26313 | 29542 | 2104 | | | | | | | | | | |
| 920 | | EIO65789.1 | 26315 | 29544 | 2106 | | | | | | | | | | |
| 921 | | EIO79103.1 | 26317 | 29546 | 2104 | | | | | | | | | | |
| 922 | | EIO63560.1 | 26319 | 29548 | 2104 | | | | | | | | | | |
| 923 | | EIO69660.1 | 26321 | 29550 | 2104 | | | | | | | | | | |
| 924 | | EIP05657.1 | 26323 | 29552 | 2104 | | | | | | | | | | |
| 925 | | EIP03388.1 | 26325 | 29554 | 2104 | | | | | | | | | | |
| 926 | | ERE42063.1 | 26327 | 29556 | 2104 | | | | | | | | | | |
| 927 | | ERE45411.1 | 26329 | 29558 | 2104 | | | | | | | | | | |
| 928 | | KDG81462.1 | 26331 | 29560 | 2114 | | | | | | | | | | |
| 929 | | KDG84325.1 | 26333 | 29562 | 2114 | | | | | | | | | | |
| 930 | | ERB08806.1 | 26335 | 29564 | 2104 | | | | | | | | | | |
| 931 | | ERB13350.1 | 26337 | 29566 | 2104 | | | | | | | | | | |
| 932 | | EQX93205.1 | 26339 | 29568 | 2114 | | | | | | | | | | |
| 933 | | EQY50266.1 | 26341 | 29570 | 2114 | | | | | | | | | | |
| 934 | | ERB23701.1 | 26343 | 29572 | 2114 | | | | | | | | | | |
| 935 | | EQY93867.1 | 26345 | 29574 | 2114 | | | | | | | | | | |
| 936 | | EQZ08532.1 | 26347 | 29576 | 2114 | | | | | | | | | | |
| 937 | | EQZ94053.1 | 26349 | 29578 | 2114 | | | | | | | | | | |
| 938 | | ERA40555.1 | 26351 | 29580 | 2114 | | | | | | | | | | |
| 939 | | CAR16064.1 | 26353 | 29582 | 2114 | | | | | | | | | | |
| 940 | | AFJ31995.1 | 26355 | 29584 | 2104 | | | | | | | | | | |
| 941 | | KWW01508.1 | 26357 | 29586 | 2113 | | | | | | | | | | |
| 942 | | CAQ90578.1 | 26359 | 29588 | 2113 | | | | | | | | | | |
| 943 | | EGC09238.1 | 26361 | 29590 | 2114 | | | | | | | | | | |
| 944 | | EOW71262.1 | 26363 | 29592 | 2114 | | | | | | | | | | |
| 945 | | AJY69764.1 | 26365 | 29594 | 2084 | | | | | | | | | | |
| 946 | | EDL62312.1 | 26367 | 29596 | 2084 | | | | | | | | | | |
| 947 | | EOD77322.1 | 26369 | 29598 | 2144 | | | | | | | | | | |
| 948 | | KJS14046.1 | 26371 | 29600 | 2046 | | | | | | | | | | |
| 949 | | EAQ32828.1 | 26373 | 29602 | 2099 | | | | | | | | | | |
| 950 | | KXS34467.1 | 26375 | 29604 | 2099 | | | | | | | | | | |
| 951 | | CDG80809.1 | 26377 | 29606 | 2106 | | | | | | | | | | |
| 952 | | KMK41965.1 | 26379 | 29608 | 2106 | | | | | | | | | | |
| 953 | | KMV95474.1 | 26381 | 29610 | 2108 | | | | | | | | | | |
| 954 | | EYT05883.1 | 26383 | 29612 | 2108 | | | | | | | | | | |
| 955 | | KGK50933.1 | 26385 | 29614 | 2106 | | | | | | | | | | |
| 956 | | KHE28071.1 | 26387 | 29616 | 2106 | | | | | | | | | | |
| 957 | | KHF57366.1 | 26389 | 29618 | 2106 | | | | | | | | | | |
| 958 | | KHQ22239.1 | 26391 | 29620 | 2106 | | | | | | | | | | |
| 959 | | KLZ78427.1 | 26393 | 29622 | 2106 | | | | | | | | | | |
| 960 | | KMB09547.1 | 26395 | 29624 | 2106 | | | | | | | | | | |
| 961 | | KMG65749.1 | 26397 | 29626 | 2108 | | | | | | | | | | |
| 962 | | KMG69376.1 | 26399 | 29628 | 2106 | | | | | | | | | | |
| 963 | | KMH23798.1 | 26401 | 29630 | 2106 | | | | | | | | | | |
| 964 | | KMH84528.1 | 26403 | 29632 | 2106 | | | | | | | | | | |
| 965 | | KMX40524.1 | 26405 | 29634 | 2106 | | | | | | | | | | |
| 966 | | ALH86088.1 | 26407 | 29636 | 2106 | | | | | | | | | | |
| 967 | | KRR31027.1 | 26409 | 29638 | 2108 | | | | | | | | | | |
| 968 | | ALQ84490.1 | 26411 | 29640 | 2106 | | | | | | | | | | |
| 969 | | ALQ89985.1 | 26413 | 29642 | 2106 | | | | | | | | | | |
| 970 | | KSX16169.1 | 26415 | 29644 | 2106 | | | | | | | | | | |
| 971 | | KSX18601.1 | 26417 | 29646 | 2106 | | | | | | | | | | |
| 972 | | KSX52402.1 | 26419 | 29648 | 2106 | | | | | | | | | | |
| 973 | | ALP76744.1 | 26421 | 29650 | 2106 | | | | | | | | | | |
| 974 | | KSZ32505.1 | 26423 | 29652 | 2106 | | | | | | | | | | |
| 975 | | KUF65064.1 | 26425 | 29654 | 2106 | | | | | | | | | | |
| 976 | | KUG47427.1 | 26427 | 29656 | 2106 | | | | | | | | | | |
| 977 | | KXO23872.1 | 26429 | 29658 | 2106 | | | | | | | | | | |
| 978 | | KYM26278.1 | 26431 | 29660 | 2106 | | | | | | | | | | |
| 979 | | ERN57701.1 | 26433 | 29662 | 2082 | | | | | | | | | | |
| 980 | | EWE85118.1 | 26435 | 29664 | 2106 | | | | | | | | | | |
| 981 | | ESL33173.1 | 26437 | 29666 | 2106 | | | | | | | | | | |
| 982 | | KDK59886.1 | 26439 | 29668 | 2106 | | | | | | | | | | |
| 983 | | CDK69438.1 | 26441 | 29670 | 2114 | | | | | | | | | | |
| 984 | | EMH91682.1 | 26443 | 29672 | 2106 | | | | | | | | | | |
| 985 | | EOZ63311.1 | 26445 | 29674 | 2082 | | | | | | | | | | |
| 986 | | EOY66995.1 | 26447 | 29676 | 2106 | | | | | | | | | | |
| 987 | | ESN46753.1 | 26449 | 29678 | 2108 | | | | | | | | | | |
| 988 | | EWF66266.1 | 26451 | 29680 | 2106 | | | | | | | | | | |
| 989 | | ESM58757.1 | 26453 | 29682 | 2106 | | | | | | | | | | |
| 990 | | KDL89512.1 | 26455 | 29684 | 2108 | | | | | | | | | | |
| 991 | | AIX83032.1 | 26457 | 29686 | 2106 | | | | | | | | | | |
| 992 | | AIG86151.1 | 26459 | 29688 | 2082 | | | | | | | | | | |
| 993 | | EKB81085.1 | 26461 | 29690 | 2106 | | | | | | | | | | |
| 994 | | ESM10101.1 | 26463 | 29692 | 2106 | | | | | | | | | | |
| 995 | | EPO98451.1 | 26465 | 29694 | 2106 | | | | | | | | | | |
| 996 | | EPA89958.1 | 26467 | 29696 | 2106 | | | | | | | | | | |
| 997 | | EJI89219.1 | 26469 | 29698 | 2103 | | | | | | | | | | |
| 998 | | KDE37040.1 | 26471 | 29700 | 2103 | | | | | | | | | | |
| 999 | | CAH16734.1 | 26473 | 29702 | 2106 | | | | | | | | | | |
| 1000 | | KTD65146.1 | 26475 | 29704 | 2108 | | | | | | | | | | |
| 1001 | | ETX11506.1 | 26477 | 29706 | 2097 | | | | | | | | | | |
| 1002 | | ESY80708.1 | 26479 | 29708 | 2007 | | | | | | | | | | |
| 1003 | | ESY66205.1 | 26481 | 29710 | 2034 | | | | | | | | | | |
| 1004 | | ESY44731.1 | 26483 | 29712 | 2037 | | | | | | | | | | |
| 1005 | | KQU80074.1 | 26485 | 29714 | 2042 | | | | | | | | | | |
| 1006 | | EMS40059.1 | 26487 | 29716 | 2080 | | | | | | | | | | |
| 1007 | | EMS40205.1 | 26489 | 29718 | 2080 | | | | | | | | | | |
| 1008 | | KQQ15550.1 | 26491 | 29720 | 2079 | | | | | | | | | | |
| 1009 | | KQO59081.1 | 26493 | 29722 | 2002 | | | | | | | | | | |
| 1010 | | KQO90918.1 | 26495 | 29724 | 2035 | | | | | | | | | | |
| 1011 | | EFV81023.1 | 26497 | 29726 | 1694 | | | | | | | | | | |
| 1012 | | EHJ60591.1 | 26499 | 29728 | 1959 | | | | | | | | | | |
| 1013 | | AIT79632.1 | 26501 | 29730 | 1987 | | | | | | | | | | |
| 1014 | | CCA92392.1 | 26503 | 29732 | 1985 | | | | | | | | | | |
| 1015 | | KTS15500.1 | 26505 | 29734 | 2108 | | | | | | | | | | |
| 1016 | | KTS86096.1 | 26507 | 29736 | 2108 | | | | | | | | | | |
| 1017 | | EFM21232.1 | 26509 | 29738 | 2109 | | | | | | | | | | |
| 1018 | | KGA41246.1 | 26511 | 29740 | 2104 | | | | | | | | | | |
| 1019 | | ACX87465.1 | 26513 | 29742 | 2104 | | | | | | | | | | |
| 1020 | | EAU47586.1 | 26515 | 29744 | 2003 | | | | | | | | | | |
| 1021 | | EAS45763.1 | 26517 | 29746 | 2065 | | | | | | | | | | |
| 1022 | | KJM66695.1 | 26519 | 29748 | 2105 | | | | | | | | | | |
| 1023 | | KMK11833.1 | 26521 | 29750 | 2105 | | | | | | | | | | |
| 1024 | | KMK24779.1 | 26523 | 29752 | 2105 | | | | | | | | | | |
| 1025 | | KXU56724.1 | 26525 | 29754 | 2024 | | | | | | | | | | |
| 1026 | | EGW47202.1 | 26527 | 29756 | 2027 | | | | | | | | | | |
| 1027 | | KSX98964.1 | 26529 | 29758 | 2094 | | | | | | | | | | |
| 1028 | | KTF11893.1 | 26531 | 29760 | 2100 | | | | | | | | | | |
| 1029 | | KGB84628.1 | 26533 | 29762 | 2102 | | | | | | | | | | |
| 1030 | | KHE32029.1 | 26535 | 29764 | 2071 | | | | | | | | | | |
| 1031 | | KQJ75582.1 | 26537 | 29766 | 2111 | | | | | | | | | | |
| 1032 | | KRV15964.1 | 26539 | 29768 | 2071 | | | | | | | | | | |
| 1033 | | KSD09758.1 | 26541 | 29770 | 2111 | | | | | | | | | | |
| 1034 | | KSD19533.1 | 26543 | 29772 | 2071 | | | | | | | | | | |
| 1035 | | KSG03215.1 | 26545 | 29774 | 2071 | | | | | | | | | | |
| 1036 | | KSG67481.1 | 26547 | 29776 | 2111 | | | | | | | | | | |
| 1037 | | KSE90523.1 | 26549 | 29778 | 2065 | | | | | | | | | | |
| 1038 | | KSF67271.1 | 26551 | 29780 | 2111 | | | | | | | | | | |
| 1039 | | KSG19233.1 | 26553 | 29782 | 2071 | | | | | | | | | | |
| 1040 | | KSG75230.1 | 26555 | 29784 | 2071 | | | | | | | | | | |
| 1041 | | KSG85551.1 | 26557 | 29786 | 2071 | | | | | | | | | | |
| 1042 | | KSH39435.1 | 26559 | 29788 | 2071 | | | | | | | | | | |
| 1043 | | KSH60318.1 | 26561 | 29790 | 2071 | | | | | | | | | | |
| 1044 | | KSI21888.1 | 26563 | 29792 | 2071 | | | | | | | | | | |
| 1045 | | KSI51647.1 | 26565 | 29794 | 2111 | | | | | | | | | | |
| 1046 | | KSI82065.1 | 26567 | 29796 | 2111 | | | | | | | | | | |
| 1047 | | KSI99534.1 | 26569 | 29798 | 2071 | | | | | | | | | | |
| 1048 | | KSJ34446.1 | 26571 | 29800 | 2111 | | | | | | | | | | |
| 1049 | | KSK63577.1 | 26573 | 29802 | 2111 | | | | | | | | | | |
| 1050 | | KSL53780.1 | 26575 | 29804 | 2071 | | | | | | | | | | |
| 1051 | | KSM73159.1 | 26577 | 29806 | 2111 | | | | | | | | | | |
| 1052 | | KSM79529.1 | 26579 | 29808 | 2071 | | | | | | | | | | |
| 1053 | | KSN72433.1 | 26581 | 29810 | 2071 | | | | | | | | | | |
| 1054 | | KSO70043.1 | 26583 | 29812 | 2065 | | | | | | | | | | |
| 1055 | | KSQ54928.1 | 26585 | 29814 | 2071 | | | | | | | | | | |
| 1056 | | KSQ13665.1 | 26587 | 29816 | 2071 | | | | | | | | | | |
| 1057 | | KSK33061.1 | 26589 | 29818 | 2071 | | | | | | | | | | |
| 1058 | | KSL80809.1 | 26591 | 29820 | 2071 | | | | | | | | | | |
| 1059 | | KSL64950.1 | 26593 | 29822 | 2071 | | | | | | | | | | |
| 1060 | | KSM29110.1 | 26595 | 29824 | 2111 | | | | | | | | | | |
| 1061 | | KSN07702.1 | 26597 | 29826 | 2111 | | | | | | | | | | |
| 1062 | | KSN22462.1 | 26599 | 29828 | 2111 | | | | | | | | | | |
| 1063 | | KSN45602.1 | 26601 | 29830 | 2071 | | | | | | | | | | |
| 1064 | | KSO16559.1 | 26603 | 29832 | 2111 | | | | | | | | | | |
| 1065 | | KSO84740.1 | 26605 | 29834 | 2071 | | | | | | | | | | |
| 1066 | | KSO99160.1 | 26607 | 29836 | 2111 | | | | | | | | | | |
| 1067 | | KSQ29773.1 | 26609 | 29838 | 2071 | | | | | | | | | | |
| 1068 | | KSR12008.1 | 26611 | 29840 | 2071 | | | | | | | | | | |
| 1069 | | KSR96663.1 | 26613 | 29842 | 2063 | | | | | | | | | | |
| 1070 | | KSS25407.1 | 26615 | 29844 | 2066 | | | | | | | | | | |
| 1071 | | KSS39723.1 | 26617 | 29846 | 2102 | | | | | | | | | | |
| 1072 | | KSR72291.1 | 26619 | 29848 | 2071 | | | | | | | | | | |
| 1073 | | KSS45916.1 | 26621 | 29850 | 2111 | | | | | | | | | | |
| 1074 | | ALY37667.1 | 26623 | 29852 | 2111 | | | | | | | | | | |
| 1075 | | ALY62761.1 | 26625 | 29854 | 2111 | | | | | | | | | | |
| 1076 | | KXC98055.1 | 26627 | 29856 | 2071 | | | | | | | | | | |
| 1077 | | KXC86270.1 | 26629 | 29858 | 2071 | | | | | | | | | | |
| 1078 | | KXD25935.1 | 26631 | 29860 | 2071 | | | | | | | | | | |
| 1079 | | KXD08976.1 | 26633 | 29862 | 2071 | | | | | | | | | | |
| 1080 | | KXD14400.1 | 26635 | 29864 | 2071 | | | | | | | | | | |
| 1081 | | KXD23256.1 | 26637 | 29866 | 2071 | | | | | | | | | | |
| 1082 | | KXC87701.1 | 26639 | 29868 | 2071 | | | | | | | | | | |
| 1083 | | KXF38181.1 | 26641 | 29870 | 2071 | | | | | | | | | | |
| 1084 | | KXF47395.1 | 26643 | 29872 | 2071 | | | | | | | | | | |
| 1085 | | KXF43344.1 | 26645 | 29874 | 2071 | | | | | | | | | | |
| 1086 | | KYO95528.1 | 26647 | 29876 | 2111 | | | | | | | | | | |
| 1087 | | KAJ18077.1 | 26649 | 29878 | 2071 | | | | | | | | | | |
| 1088 | | ERY57593.1 | 26651 | 29880 | 2071 | | | | | | | | | | |
| 1089 | | ERY65607.1 | 26653 | 29882 | 2071 | | | | | | | | | | |
| 1090 | | ERV59835.1 | 26655 | 29884 | 2071 | | | | | | | | | | |
| 1091 | | ERY33374.1 | 26657 | 29886 | 2071 | | | | | | | | | | |
| 1092 | | ERY37451.1 | 26659 | 29888 | 2071 | | | | | | | | | | |
| 1093 | | ERY30829.1 | 26661 | 29890 | 2071 | | | | | | | | | | |
| 1094 | | ERW68206.1 | 26663 | 29892 | 2071 | | | | | | | | | | |
| 1095 | | ERW13882.1 | 26665 | 29894 | 2071 | | | | | | | | | | |
| 1096 | | ERV79732.1 | 26667 | 29896 | 2071 | | | | | | | | | | |
| 1097 | | ETV52349.1 | 26669 | 29898 | 1470 | | | | | | | | | | |
| 1098 | | ERU88468.1 | 26671 | 29900 | 2071 | | | | | | | | | | |
| 1099 | | ERU86603.1 | 26673 | 29902 | 2071 | | | | | | | | | | |
| 1100 | | KEA15335.1 | 26675 | 29904 | 2071 | | | | | | | | | | |
| 1101 | | ERZ32986.1 | 26677 | 29906 | 2071 | | | | | | | | | | |
| 1102 | | GAA19670.1 | 26679 | 29908 | 2071 | | | | | | | | | | |
| 1103 | | EME92221.1 | 26681 | 29910 | 2111 | | | | | | | | | | |
| 1104 | | EYU00121.1 | 26683 | 29912 | 2111 | | | | | | | | | | |
| 1105 | | EOT13873.1 | 26685 | 29914 | 2066 | | | | | | | | | | |
| 1106 | | ETU84934.1 | 26687 | 29916 | 2068 | | | | | | | | | | |
| 1107 | | ERX16723.1 | 26689 | 29918 | 2071 | | | | | | | | | | |
| 1108 | | EWH25347.1 | 26691 | 29920 | 2071 | | | | | | | | | | |
| 1109 | | GAD64771.1 | 26693 | 29922 | 2066 | | | | | | | | | | |
| 1110 | | GAD61323.1 | 26695 | 29924 | 2066 | | | | | | | | | | |
| 1111 | | EZQ18206.1 | 26697 | 29926 | 2105 | | | | | | | | | | |
| 1112 | | AMO73922.1 | 26699 | 29928 | 2112 | | | | | | | | | | |
| 1113 | | KPW38759.1 | 26701 | 29930 | 2073 | | | | | | | | | | |
| 1114 | | KQB53691.1 | 26703 | 29932 | 2111 | | | | | | | | | | |
| 1115 | | EZI30291.1 | 26705 | 29934 | 2087 | | | | | | | | | | |
| 1116 | | KIR22316.1 | 26707 | 29936 | 2085 | | | | | | | | | | |
| 1117 | | KJH86793.1 | 26709 | 29938 | 2065 | | | | | | | | | | |
| 1118 | | KWV84209.1 | 26711 | 29940 | 2065 | | | | | | | | | | |
| 1119 | | EFQ63350.1 | 26713 | 29942 | 2099 | | | | | | | | | | |
| 1120 | | KMM97951.1 | 26715 | 29944 | 2111 | | | | | | | | | | |
| 1121 | | ENY78086.1 | 26717 | 29946 | 2084 | | | | | | | | | | |
| 1122 | | ENA27917.1 | 26719 | 29948 | 1970 | | | | | | | | | | |
| 1123 | | EWC41755.1 | 26721 | 29950 | 1771 | | | | | | | | | | |
| 1124 | | EMD98966.1 | 26723 | 29952 | 2068 | | | | | | | | | | |
| 1125 | | KPB88882.1 | 26725 | 29954 | 1448 | | | | | | | | | | |
| 1126 | | KFD13679.1 | 26727 | 29956 | 2106 | | | | | | | | | | |
| 1127 | | ACE91184.1 | 26729 | 29958 | 2041 | | | | | | | | | | |
| 1128 | | KKZ86596.1 | 26731 | 29960 | 2036 | | | | | | | | | | |
| 1129 | | KQU04981.1 | 26733 | 29962 | 2042 | | | | | | | | | | |
| 1130 | | CCF21881.1 | 26735 | 29964 | 1778 | | | | | | | | | | |
| 1131 | | KQZ63426.1 | 26737 | 29966 | 2007 | | | | | | | | | | |
| 1132 | | KIV64827.1 | 26739 | 29968 | 2033 | | | | | | | | | | |
| 1133 | | KQB14222.1 | 26741 | 29970 | 2012 | | | | | | | | | | |
| 1134 | | KQB14197.1 | 26743 | 29972 | 2012 | | | | | | | | | | |
| 1135 | | ETX15683.1 | 26745 | 29974 | 2020 | | | | | | | | | | |
| 1136 | | KJS41398.1 | 26747 | 29976 | 1995 | | | | | | | | | | |
| 1137 | | EPX84387.1 | 26749 | 29978 | 1417 | | | | | | | | | | |
| 1138 | | GAS73920.1 | 26751 | 29980 | 2106 | | | | | | | | | | |
| 1139 | | GAS79508.1 | 26753 | 29982 | 2106 | | | | | | | | | | |
| 1140 | | KHP17885.1 | 26755 | 29984 | 2106 | | | | | | | | | | |
| 1141 | | KHP06994.1 | 26757 | 29986 | 2106 | | | | | | | | | | |
| 1142 | | ESJ40086.1 | 26759 | 29988 | 2106 | | | | | | | | | | |
| 1143 | | KNB22031.1 | 26761 | 29990 | 2106 | | | | | | | | | | |
| 1144 | | AJD94187.1 | 26763 | 29992 | 2106 | | | | | | | | | | |
| 1145 | | AJD98581.1 | 26765 | 29994 | 2106 | | | | | | | | | | |
| 1146 | | CEA95105.1 | 26767 | 29996 | 2106 | | | | | | | | | | |
| 1147 | | CEB50843.1 | 26769 | 29998 | 2106 | | | | | | | | | | |
| 1148 | | CDU93374.1 | 26771 | 30000 | 2106 | | | | | | | | | | |
| 1149 | | CEB74773.1 | 26773 | 30002 | 2106 | | | | | | | | | | |
| 1150 | | CED02079.1 | 26775 | 30004 | 2106 | | | | | | | | | | |
| 1151 | | CEC70256.1 | 26777 | 30006 | 2106 | | | | | | | | | | |
| 1152 | | CDZ07208.1 | 26779 | 30008 | 2106 | | | | | | | | | | |
| 1153 | | CED89041.1 | 26781 | 30010 | 2106 | | | | | | | | | | |
| 1154 | | CDV50414.1 | 26783 | 30012 | 2106 | | | | | | | | | | |
| 1155 | | CFW88482.1 | 26785 | 30014 | 2106 | | | | | | | | | | |
| 1156 | | CDZ03619.1 | 26787 | 30016 | 2106 | | | | | | | | | | |
| 1157 | | CEC95426.1 | 26789 | 30018 | 2106 | | | | | | | | | | |
| 1158 | | CDV33411.1 | 26791 | 30020 | 2106 | | | | | | | | | | |
| 1159 | | CEB60520.1 | 26793 | 30022 | 2106 | | | | | | | | | | |
| 1160 | | CEC11581.1 | 26795 | 30024 | 2106 | | | | | | | | | | |
| 1161 | | CEA33004.1 | 26797 | 30026 | 2106 | | | | | | | | | | |
| 1162 | | CDV54740.1 | 26799 | 30028 | 2106 | | | | | | | | | | |
| 1163 | | CEA34479.1 | 26801 | 30030 | 2106 | | | | | | | | | | |
| 1164 | | CED50260.1 | 26803 | 30032 | 2106 | | | | | | | | | | |
| 1165 | | CEC06544.1 | 26805 | 30034 | 2106 | | | | | | | | | | |
| 1166 | | CDY81479.1 | 26807 | 30036 | 2106 | | | | | | | | | | |
| 1167 | | CEC66459.1 | 26809 | 30038 | 2106 | | | | | | | | | | |
| 1168 | | CDU75276.1 | 26811 | 30040 | 2106 | | | | | | | | | | |
| 1169 | | CDV02402.1 | 26813 | 30042 | 2106 | | | | | | | | | | |
| 1170 | | CDU44889.1 | 26815 | 30044 | 2106 | | | | | | | | | | |
| 1171 | | CEA82129.1 | 26817 | 30046 | 2106 | | | | | | | | | | |
| 1172 | | CDV48179.1 | 26819 | 30048 | 2106 | | | | | | | | | | |
| 1173 | | CEA48949.1 | 26821 | 30050 | 2106 | | | | | | | | | | |
| 1174 | | CDU62790.1 | 26823 | 30052 | 2106 | | | | | | | | | | |
| 1175 | | CDV82103.1 | 26825 | 30054 | 2106 | | | | | | | | | | |
| 1176 | | CEC15870.1 | 26827 | 30056 | 2106 | | | | | | | | | | |
| 1177 | | CEB34159.1 | 26829 | 30058 | 2106 | | | | | | | | | | |
| 1178 | | CEC22809.1 | 26831 | 30060 | 2106 | | | | | | | | | | |
| 1179 | | CEC29439.1 | 26833 | 30062 | 2106 | | | | | | | | | | |
| 1180 | | CEC81190.1 | 26835 | 30064 | 2106 | | | | | | | | | | |
| 1181 | | CEC27073.1 | 26837 | 30066 | 2106 | | | | | | | | | | |
| 1182 | | CDV36502.1 | 26839 | 30068 | 2106 | | | | | | | | | | |
| 1183 | | CDV99879.1 | 26841 | 30070 | 2106 | | | | | | | | | | |
| 1184 | | CEB21249.1 | 26843 | 30072 | 2106 | | | | | | | | | | |
| 1185 | | CED29538.1 | 26845 | 30074 | 2106 | | | | | | | | | | |
| 1186 | | CEA65653.1 | 26847 | 30076 | 2106 | | | | | | | | | | |
| 1187 | | CDV77393.1 | 26849 | 30078 | 2106 | | | | | | | | | | |
| 1188 | | CEB99322.1 | 26851 | 30080 | 2106 | | | | | | | | | | |
| 1189 | | CEC87091.1 | 26853 | 30082 | 2106 | | | | | | | | | | |
| 1190 | | CEC03349.1 | 26855 | 30084 | 2106 | | | | | | | | | | |
| 1191 | | CDW68451.1 | 26857 | 30086 | 2106 | | | | | | | | | | |
| 1192 | | CEB36538.1 | 26859 | 30088 | 2106 | | | | | | | | | | |
| 1193 | | CEB92475.1 | 26861 | 30090 | 2106 | | | | | | | | | | |
| 1194 | | CEC70642.1 | 26863 | 30092 | 2106 | | | | | | | | | | |
| 1195 | | CED19417.1 | 26865 | 30094 | 2106 | | | | | | | | | | |
| 1196 | | CDU57393.1 | 26867 | 30096 | 2106 | | | | | | | | | | |
| 1197 | | CEC55614.1 | 26869 | 30098 | 2106 | | | | | | | | | | |
| 1198 | | CDW10769.1 | 26871 | 30100 | 2106 | | | | | | | | | | |
| 1199 | | CED40434.1 | 26873 | 30102 | 2106 | | | | | | | | | | |
| 1200 | | CEA77527.1 | 26875 | 30104 | 2106 | | | | | | | | | | |
| 1201 | | CEC78576.1 | 26877 | 30106 | 2106 | | | | | | | | | | |
| 1202 | | CDV87318.1 | 26879 | 30108 | 2106 | | | | | | | | | | |
| 1203 | | CEA60260.1 | 26881 | 30110 | 2106 | | | | | | | | | | |
| 1204 | | CDU45976.1 | 26883 | 30112 | 2106 | | | | | | | | | | |
| 1205 | | CED26176.1 | 26885 | 30114 | 2106 | | | | | | | | | | |
| 1206 | | CEA55542.1 | 26887 | 30116 | 2106 | | | | | | | | | | |
| 1207 | | CDU57356.1 | 26889 | 30118 | 2106 | | | | | | | | | | |
| 1208 | | CEC22620.1 | 26891 | 30120 | 2106 | | | | | | | | | | |
| 1209 | | CDU81239.1 | 26893 | 30122 | 2106 | | | | | | | | | | |
| 1210 | | CEC22198.1 | 26895 | 30124 | 2106 | | | | | | | | | | |
| 1211 | | CDV00136.1 | 26897 | 30126 | 2106 | | | | | | | | | | |
| 1212 | | CDV32907.1 | 26899 | 30128 | 2106 | | | | | | | | | | |
| 1213 | | CEB32341.1 | 26901 | 30130 | 2106 | | | | | | | | | | |
| 1214 | | CDU66154.1 | 26903 | 30132 | 2106 | | | | | | | | | | |
| 1215 | | CEB23430.1 | 26905 | 30134 | 2106 | | | | | | | | | | |
| 1216 | | CEA69988.1 | 26907 | 30136 | 2106 | | | | | | | | | | |
| 1217 | | CED34529.1 | 26909 | 30138 | 2106 | | | | | | | | | | |
| 1218 | | CDU60154.1 | 26911 | 30140 | 2106 | | | | | | | | | | |
| 1219 | | CEB02150.1 | 26913 | 30142 | 2106 | | | | | | | | | | |
| 1220 | | CDV16494.1 | 26915 | 30144 | 2106 | | | | | | | | | | |
| 1221 | | CEA70647.1 | 26917 | 30146 | 2106 | | | | | | | | | | |
| 1222 | | CEB86467.1 | 26919 | 30148 | 2106 | | | | | | | | | | |
| 1223 | | CDV63738.1 | 26921 | 30150 | 2106 | | | | | | | | | | |
| 1224 | | CEB22316.1 | 26923 | 30152 | 2106 | | | | | | | | | | |
| 1225 | | CDY85018.1 | 26925 | 30154 | 2106 | | | | | | | | | | |
| 1226 | | CDY91991.1 | 26927 | 30156 | 2106 | | | | | | | | | | |
| 1227 | | CDV63669.1 | 26929 | 30158 | 2106 | | | | | | | | | | |
| 1228 | | CDV76959.1 | 26931 | 30160 | 2106 | | | | | | | | | | |
| 1229 | | CDV25167.1 | 26933 | 30162 | 2106 | | | | | | | | | | |
| 1230 | | CEA29072.1 | 26935 | 30164 | 2106 | | | | | | | | | | |
| 1231 | | CEC16650.1 | 26937 | 30166 | 2106 | | | | | | | | | | |
| 1232 | | CDV58579.1 | 26939 | 30168 | 2106 | | | | | | | | | | |
| 1233 | | CDV98717.1 | 26941 | 30170 | 2106 | | | | | | | | | | |
| 1234 | | CED02849.1 | 26943 | 30172 | 2106 | | | | | | | | | | |
| 1235 | | CDU96709.1 | 26945 | 30174 | 2106 | | | | | | | | | | |
| 1236 | | CEB76238.1 | 26947 | 30176 | 2106 | | | | | | | | | | |
| 1237 | | CEC37117.1 | 26949 | 30178 | 2106 | | | | | | | | | | |
| 1238 | | CDU99401.1 | 26951 | 30180 | 2106 | | | | | | | | | | |
| 1239 | | CEB54811.1 | 26953 | 30182 | 2106 | | | | | | | | | | |
| 1240 | | CEC86156.1 | 26955 | 30184 | 2106 | | | | | | | | | | |
| 1241 | | CDV41199.1 | 26957 | 30186 | 2106 | | | | | | | | | | |
| 1242 | | CDV19346.1 | 26959 | 30188 | 2106 | | | | | | | | | | |
| 1243 | | CEA51459.1 | 26961 | 30190 | 2106 | | | | | | | | | | |
| 1244 | | CEA31321.1 | 26963 | 30192 | 2106 | | | | | | | | | | |
| 1245 | | CEC70728.1 | 26965 | 30194 | 2106 | | | | | | | | | | |
| 1246 | | CEB55402.1 | 26967 | 30196 | 2106 | | | | | | | | | | |
| 1247 | | CED14441.1 | 26969 | 30198 | 2106 | | | | | | | | | | |
| 1248 | | CED18823.1 | 26971 | 30200 | 2106 | | | | | | | | | | |
| 1249 | | CEB11068.1 | 26973 | 30202 | 2106 | | | | | | | | | | |
| 1250 | | CEA27404.1 | 26975 | 30204 | 2106 | | | | | | | | | | |
| 1251 | | CED08652.1 | 26977 | 30206 | 2106 | | | | | | | | | | |
| 1252 | | CEB93594.1 | 26979 | 30208 | 2106 | | | | | | | | | | |
| 1253 | | CDY97806.1 | 26981 | 30210 | 2106 | | | | | | | | | | |
| 1254 | | CEA81537.1 | 26983 | 30212 | 2106 | | | | | | | | | | |
| 1255 | | CEA95804.1 | 26985 | 30214 | 2106 | | | | | | | | | | |
| 1256 | | CED39167.1 | 26987 | 30216 | 2106 | | | | | | | | | | |
| 1257 | | CEC46303.1 | 26989 | 30218 | 2106 | | | | | | | | | | |
| 1258 | | CEB93174.1 | 26991 | 30220 | 2106 | | | | | | | | | | |
| 1259 | | CEB06233.1 | 26993 | 30222 | 2106 | | | | | | | | | | |
| 1260 | | CEC59899.1 | 26995 | 30224 | 2106 | | | | | | | | | | |
| 1261 | | CDW11869.1 | 26997 | 30226 | 2106 | | | | | | | | | | |
| 1262 | | CEB87176.1 | 26999 | 30228 | 2106 | | | | | | | | | | |
| 1263 | | CDU53202.1 | 27001 | 30230 | 2106 | | | | | | | | | | |
| 1264 | | CEB57382.1 | 27003 | 30232 | 2106 | | | | | | | | | | |
| 1265 | | CED48957.1 | 27005 | 30234 | 2106 | | | | | | | | | | |
| 1266 | | CDW00036.1 | 27007 | 30236 | 2106 | | | | | | | | | | |
| 1267 | | CDV01782.1 | 27009 | 30238 | 2106 | | | | | | | | | | |
| 1268 | | CEA40515.1 | 27011 | 30240 | 2106 | | | | | | | | | | |
| 1269 | | CEB13671.1 | 27013 | 30242 | 2106 | | | | | | | | | | |
| 1270 | | CEA18907.1 | 27015 | 30244 | 2106 | | | | | | | | | | |
| 1271 | | CDY92810.1 | 27017 | 30246 | 2106 | | | | | | | | | | |
| 1272 | | CEA88151.1 | 27019 | 30248 | 2106 | | | | | | | | | | |
| 1273 | | AKO82197.1 | 27021 | 30250 | 2106 | | | | | | | | | | |
| 1274 | | CAR62300.1 | 27023 | 30252 | 2106 | | | | | | | | | | |
| 1275 | | ESF93194.1 | 27025 | 30254 | 2106 | | | | | | | | | | |
| 1276 | | AAV80042.1 | 27027 | 30256 | 2106 | | | | | | | | | | |
| 1277 | | EPE40530.1 | 27029 | 30258 | 2106 | | | | | | | | | | |
| 1278 | | EPE40312.1 | 27031 | 30260 | 2106 | | | | | | | | | | |
| 1279 | | EPE40094.1 | 27033 | 30262 | 2106 | | | | | | | | | | |
| 1280 | | KSB43365.1 | 27035 | 30264 | 2106 | | | | | | | | | | |
| 1281 | | ELX27348.1 | 27037 | 30266 | 2106 | | | | | | | | | | |
| 1282 | | EHC78169.1 | 27039 | 30268 | 2106 | | | | | | | | | | |
| 1283 | | ESF47592.1 | 27041 | 30270 | 2106 | | | | | | | | | | |
| 1284 | | CUS01661.1 | 27043 | 30272 | 2106 | | | | | | | | | | |
| 1285 | | CUS00363.1 | 27045 | 30274 | 2106 | | | | | | | | | | |
| 1286 | | CUS00365.1 | 27047 | 30276 | 2106 | | | | | | | | | | |
| 1287 | | CUS00364.1 | 27049 | 30278 | 2106 | | | | | | | | | | |
| 1288 | | CBY96201.1 | 27051 | 30280 | 2106 | | | | | | | | | | |
| 1289 | | EDZ29121.1 | 27053 | 30282 | 2106 | | | | | | | | | | |
| 1290 | | KNM15295.1 | 27055 | 30284 | 2106 | | | | | | | | | | |
| 1291 | | KNM69140.1 | 27057 | 30286 | 2106 | | | | | | | | | | |
| 1292 | | KNO58854.1 | 27059 | 30288 | 2106 | | | | | | | | | | |
| 1293 | | KNW78917.1 | 27061 | 30290 | 2106 | | | | | | | | | | |
| 1294 | | KTZ77423.1 | 27063 | 30292 | 2106 | | | | | | | | | | |
| 1295 | | KUC23741.1 | 27065 | 30294 | 2106 | | | | | | | | | | |
| 1296 | | ESF03066.1 | 27067 | 30296 | 2106 | | | | | | | | | | |
| 1297 | | KMJ09049.1 | 27069 | 30298 | 2106 | | | | | | | | | | |
| 1298 | | CVG51413.1 | 27071 | 30300 | 1441 | | | | | | | | | | |
| 1299 | | CVB32145.1 | 27073 | 30302 | 1441 | | | | | | | | | | |
| 1300 | | EZQ69787.1 | 27075 | 30304 | 2106 | | | | | | | | | | |
| 1301 | | EFE97640.1 | 27077 | 30306 | 2084 | | | | | | | | | | |
| 1302 | | KFK98826.1 | 27079 | 30308 | 2114 | | | | | | | | | | |
| 1303 | | KFK92331.1 | 27081 | 30310 | 2114 | | | | | | | | | | |
| 1304 | | ABK48269.1 | 27083 | 30312 | 2120 | | | | | | | | | | |
| 1305 | | AFJ48530.1 | 27085 | 30314 | 2106 | | | | | | | | | | |
| 1306 | | GAB81433.1 | 27087 | 30316 | 2106 | | | | | | | | | | |
| 1307 | | ACP25985.1 | 27089 | 30318 | 2042 | | | | | | | | | | |
| 1308 | | CAN98362.1 | 27091 | 30320 | 2099 | | | | | | | | | | |
| 1309 | | EPR18398.1 | 27093 | 30322 | 1312 | | | | | | | | | | |
| 1310 | | KKW93259.1 | 27095 | 30324 | 1989 | | | | | | | | | | |
| 1311 | | CCW17775.1 | 27097 | 30326 | 1558 | | | | | | | | | | |
| 1312 | | KER36316.1 | 27099 | 30328 | 1987 | | | | | | | | | | |
| 1313 | | KQM97530.1 | 27101 | 30330 | 1999 | | | | | | | | | | |
| 1314 | | KPV39946.1 | 27103 | 30332 | 2084 | | | | | | | | | | |
| 1315 | | KQW61501.1 | 27105 | 30334 | 2113 | | | | | | | | | | |
| 1316 | | KLE23444.1 | 27107 | 30336 | 2066 | | | | | | | | | | |
| 1317 | | EDL70258.1 | 27109 | 30338 | 1452 | | | | | | | | | | |
| 1318 | | KHD25449.1 | 27111 | 30340 | 2145 | | | | | | | | | | |
| 1319 | | KFE26121.1 | 27113 | 30342 | 2068 | | | | | | | | | | |
| 1320 | | KFD94244.1 | 27115 | 30344 | 2068 | | | | | | | | | | |
| 1321 | | EJH60535.1 | 27117 | 30346 | 2104 | | | | | | | | | | |
| 1322 | | EMQ54782.1 | 27119 | 30348 | 2068 | | | | | | | | | | |
| 1323 | | KNA52262.1 | 27121 | 30350 | 2068 | | | | | | | | | | |
| 1324 | | GAD79748.1 | 27123 | 30352 | 2141 | | | | | | | | | | |
| 1325 | | KNY42355.1 | 27125 | 30354 | 2065 | | | | | | | | | | |
| 1326 | | KHF16000.1 | 27127 | 30356 | 2066 | | | | | | | | | | |
| 1327 | | KOF25301.1 | 27129 | 30358 | 2068 | | | | | | | | | | |
| 1328 | | KHT39219.1 | 27131 | 30360 | 2104 | | | | | | | | | | |
| 1329 | | KYN85117.1 | 27133 | 30362 | 2068 | | | | | | | | | | |
| 1330 | | EKM24799.1 | 27135 | 30364 | 2143 | | | | | | | | | | |
| 1331 | | CDU08194.1 | 27137 | 30366 | 2107 | | | | | | | | | | |
| 1332 | | CAV18548.1 | 27139 | 30368 | 2085 | | | | | | | | | | |
| 1333 | | KWU01490.1 | 27141 | 30370 | 2066 | | | | | | | | | | |
| 1334 | | KOO13422.1 | 27143 | 30372 | 2065 | | | | | | | | | | |
| 1335 | | CNI05795.1 | 27145 | 30374 | 2106 | | | | | | | | | | |
| 1336 | | CQJ58418.1 | 27147 | 30376 | 2106 | | | | | | | | | | |
| 1337 | | CQJ21067.1 | 27149 | 30378 | 2109 | | | | | | | | | | |
| 1338 | | CFR01911.1 | 27151 | 30380 | 2106 | | | | | | | | | | |
| 1339 | | CNH31705.1 | 27153 | 30382 | 2106 | | | | | | | | | | |
| 1340 | | CFV22963.1 | 27155 | 30384 | 2106 | | | | | | | | | | |
| 1341 | | KFE39720.1 | 27157 | 30386 | 2106 | | | | | | | | | | |
| 1342 | | AKA39096.1 | 27159 | 30388 | 2106 | | | | | | | | | | |
| 1343 | | EHM51572.1 | 27161 | 30390 | 2082 | | | | | | | | | | |

(Part D)

| | | AO | | | | AS | | | |
|---|---|---|---|---|---|---|---|---|---|
| | | DruG | | | | DruH | | | |
| | AN | protein | AP | AQ | AR | protein | AT | AU | |
| | DNA SEQ | length | DruH | PRT SEQ | DNA SEQ | length | Genomic Start | Genomic End | AV |
| 1 | ID NO: | (aa) | protein_accession | ID NO: | ID NO: | (aa) | Point | Point | Comments |
| 2 | | | | | | | 285161 | 295071 | |
| 3 | | | | | | | 23658 | 35022 | |
| 4 | | | | | | | 122429 | 132246 | |
| 5 | | | | | | | 5336 | 16034 | |
| 6 | | | | | | | 5300 | 15998 | |
| 7 | | | | | | | 4236 | 14105 | |
| 8 | | | | | | | 859665 | 869540 | |
| 9 | | | | | | | 346656 | 356168 | |
| 10 | | | | | | | 43741 | 53633 | |
| 11 | | | | | | | 227293 | 237188 | |
| 12 | | | | | | | 1304116 | 1314874 | |
| 13 | | | | | | | 704089 | 714847 | |
| 14 | | | | | | | 1053641 | 1062444 | |
| 15 | | | | | | | 2593529 | 2604285 | |
| 16 | | | | | | | 102484 | 110617 | |
| 17 | | | | | | | 718104 | 726907 | |
| 18 | | | | | | | 621905 | 629933 | |
| 19 | | | | | | | 58930 | 69532 | |
| 20 | | | | | | | 130247 | 138278 | |
| 21 | | | | | | | 3789 | 14436 | |
| 22 | | | | | | | 7008 | 18501 | |
| 23 | | | | | | | 650 | 9027 | |
| 24 | | | | | | | 5201 | 16574 | |
| 25 | | | | | | | 245534 | 255452 | |
| 26 | | | | | | | 2444 | 10852 | |
| 27 | | | | | | | 252885 | 262420 | |
| 28 | | | | | | | 692119 | 701372 | |
| 29 | | | | | | | 3488434 | 3497693 | |
| 30 | | | | | | | 1381151 | 1390413 | |
| 31 | | | | | | | 26796 | 38135 | |
| 32 | | | | | | | 86252 | 97591 | |
| 33 | | | | | | | 1 | 7760 | |
| 34 | | | | | | | 226285 | 237624 | |
| 35 | | | | | | | 825 | 12164 | |
| 36 | | | | | | | 45166 | 56505 | |
| 37 | | | | | | | 6539 | 17878 | |
| 38 | | | | | | | 2707610 | 2718949 | |
| 39 | | | | | | | 111135 | 122474 | |
| 40 | | | | | | | 26765 | 38104 | |
| 41 | | | | | | | 1618476 | 1629815 | |
| 42 | | | | | | | 389081 | 400420 | |
| 43 | | | | | | | 189561 | 200900 | |
| 44 | | | | | | | 33964 | 45303 | |
| 45 | | | | | | | 316476 | 327815 | |
| 46 | | | | | | | 198709 | 210048 | |
| 47 | | | | | | | 203020 | 214359 | |
| 48 | | | | | | | 3735099 | 3746438 | |
| 49 | | | | | | | 170794 | 182133 | |
| 50 | | | | | | | 170697 | 182036 | |
| 51 | | | | | | | 395842 | 407181 | |
| 52 | | | | | | | 314697 | 326036 | |
| 53 | | | | | | | 2239 | 13578 | |
| 54 | | | | | | | 1513766 | 1525105 | |
| 55 | | | | | | | 318207 | 329546 | |
| 56 | | | | | | | 23620 | 34959 | |
| 57 | | | | | | | 90793 | 102132 | |
| 58 | | | | | | | 1 | 8155 | |
| 59 | | | | | | | 30224 | 41563 | |
| 60 | | | | | | | 31431 | 41533 | |
| 61 | | | | | | | 393726 | 405065 | |
| 62 | | | | | | | 1485066 | 1496405 | |
| 63 | | | | | | | 318709 | 330048 | |
| 64 | | | | | | | 7772 | 17322 | |
| 65 | | | | | | | 57001 | 66608 | |
| 66 | | | | | | | 84320 | 94149 | |
| 67 | | | | | | | 1 | 9036 | |
| 68 | | | | | | | 2431766 | 2441378 | |
| 69 | | | | | | | 298110 | 307722 | |
| 70 | | | | | | | 1 | 9075 | |
| 71 | | | | | | | 68076 | 77685 | |
| 72 | | | | | | | 678847 | 689572 | |
| 73 | | | | | | | 267564 | 278272 | |
| 74 | | | | | | | 993973 | 1004769 | |
| 75 | | | | | | | 1471479 | 1481221 | |
| 76 | | | | | | | 1814944 | 1833410 | |
| 77 | | | | | | | 756187 | 764469 | |
| 78 | | | | | | | 273674 | 283215 | |
| 79 | | | | | | | 33201 | 43136 | |
| 80 | | | | | | | 82360 | 93087 | |
| 81 | | | | | | | 207 | 10677 | |
| 82 | | | | | | | 2573999 | 2584115 | |
| 83 | | | | | | | 17690 | 27795 | |
| 84 | | | | | | | 88811 | 98680 | |
| 85 | | | | | | | 233470 | 243330 | |
| 86 | | | | | | | 1894236 | 1904088 | |
| 87 | | | | | | | 18610 | 29425 | |
| 88 | | | | | | | 225 | 10961 | |
| 89 | | | | | | | 5302 | 15990 | |
| 90 | | | | | | | 48622 | 58258 | |
| 91 | | | | | | | 1226195 | 1236109 | |
| 92 | | | | | | | 340028 | 351370 | |
| 93 | | | | | | | 2729 | 13414 | |
| 94 | | | | | | | 426089 | 435318 | |
| 95 | | | | | | | 245308 | 254531 | |
| 96 | | | | | | | 6222 | 17587 | |
| 97 | | | | | | | 10445 | 17368 | |
| 98 | | | | | | | 1131 | 12496 | |
| 99 | | | | | | | 2602750 | 2614148 | |
| 100 | | | | | | | 27199 | 38358 | |
| 101 | | | | | | | 2402449 | 2413847 | |
| 102 | | | | | | | 383162 | 394525 | |
| 103 | | | | | | | 1671024 | 1682422 | |
| 104 | | | | | | | 137353 | 148718 | |
| 105 | | | | | | | 36724 | 47675 | |
| 106 | | | | | | | 3018853 | 3030235 | |
| 107 | | | | | | | 149958 | 161333 | |
| 108 | | | | | | | 17322 | 28685 | |
| 109 | | | | | | | 150639 | 162037 | |
| 110 | | | | | | | 34865 | 46258 | |
| 111 | | | | | | | 19937 | 31423 | |
| 112 | | | | | | | 2177440 | 2186149 | |
| 113 | | | | | | | 118192 | 128839 | |
| 114 | | | | | | | 443806 | 454453 | |
| 115 | | | | | | | 2764522 | 2775796 | |
| 116 | | | | | | | 8919 | 17199 | |
| 117 | | | | | | | 83723 | 99028 | |
| 118 | | | | | | | 10459 | 21092 | |
| 119 | | | | | | | 5588864 | 5599650 | |
| 120 | | | | | | | 2918005 | 2927268 | |
| 121 | | | | | | | 8795 | 20113 | |
| 122 | | | | | | | 808851 | 820169 | |
| 123 | | | | | | | 232897 | 244248 | |
| 124 | 27659 | 699 | | | | | 112735 | 123898 | |
| 125 | | | | | | | 79463 | 92802 | |
| 126 | | | | | | | 220561 | 233009 | |
| 127 | 27669 | 639 | | | | | 246334 | 258609 | |
| 128 | | | | | | | 1958381 | 1969570 | |
| 129 | | | | | | | 3844801 | 3855950 | |
| 130 | 27679 | 696 | | | | | 7678787 | 7690517 | |
| 131 | 27683 | 689 | | | | | 2014187 | 2025976 | |
| 132 | 27686 | 700 | | | | | 550646 | 561413 | |
| 133 | 27690 | 707 | | | | | 5526 | 17650 | |
| 134 | 27694 | 716 | | | | | 112272 | 128556 | |
| 135 | 27697 | 541 | | | | | 308758 | 321298 | |
| 136 | 27700 | 541 | | | | | 305254 | 317794 | |
| 137 | 27704 | 655 | | | | | 46911 | 59042 | |
| 138 | 27708 | 655 | | | | | 104315 | 116446 | |
| 139 | 27711 | 541 | | | | | 5069 | 17609 | |
| 140 | | | | | | | 27101 | 39571 | |
| 141 | | | | | | | 80817 | 95890 | |
| 142 | | | | | | | 1127089 | 1138713 | |
| 143 | 27724 | 926 | | | | | 4083820 | 4096459 | |
| 144 | 27728 | 696 | | | | | 701693 | 713454 | |
| 145 | 27732 | 698 | | | | | 337549 | 349277 | |
| 146 | | | | | | | 2777 | 14206 | |
| 147 | 27739 | 695 | | | | | 5370773 | 5382607 | |
| 148 | | | | | | | 1480736 | 1493419 | |
| 149 | 27746 | 695 | | | | | 1679797 | 1691556 | |
| 150 | 27750 | 926 | | | | | 220348 | 232987 | |
| 151 | 27754 | 926 | | | | | 6453 | 19092 | |
| 152 | 27758 | 926 | | | | | 46058 | 58697 | |
| 153 | 27761 | 926 | | | | | 46480 | 59113 | |
| 154 | 27765 | 937 | | | | | 96516 | 109246 | |
| 155 | 27769 | 937 | | | | | 1092 | 13822 | |
| 156 | 27773 | 937 | | | | | 96516 | 109246 | |
| 157 | 27777 | 937 | | | | | 96516 | 109246 | |
| 158 | 27781 | 937 | | | | | 96516 | 109246 | |
| 159 | 27785 | 937 | | | | | 96516 | 109246 | |
| 160 | 27789 | 937 | | | | | 96516 | 109246 | |
| 161 | 27793 | 937 | | | | | 96516 | 109246 | |
| 162 | 27797 | 937 | | | | | 96516 | 109246 | |
| 163 | 27801 | 937 | | | | | 96516 | 109246 | |
| 164 | 27805 | 937 | | | | | 96516 | 109246 | |
| 165 | 27809 | 937 | | | | | 96516 | 109246 | |
| 166 | 27813 | 690 | | | | | 581118 | 592872 | |
| 167 | 27817 | 937 | | | | | 115861 | 128591 | |
| 168 | 27821 | 937 | | | | | 96538 | 109268 | |
| 169 | 27825 | 926 | | | | | 1528 | 14167 | |
| 170 | 27829 | 754 | | | | | 4194850 | 4207568 | |
| 171 | | | | | | | 3329 | 19651 | |
| 172 | | | | | | | 39907 | 50236 | |
| 173 | 27839 | 696 | | | | | 2598976 | 2610644 | |
| 174 | 27843 | 937 | | | | | 5340349 | 5353079 | |
| 175 | | | | | | | 236820 | 251252 | |
| 176 | 27850 | 872 | | | | | 66102 | 80532 | |
| 177 | | | | | | | 1203521 | 1214561 | |
| 178 | 27857 | 684 | | | | | 5406366 | 5418388 | |
| 179 | 27861 | 715 | | | | | 4827708 | 4839442 | |
| 180 | | | | | | | 49526 | 60017 | |
| 181 | | | | | | | 3247787 | 3258736 | |
| 182 | | | | | | | 4110265 | 4122706 | |
| 183 | 27874 | 695 | | | | | 163466 | 175215 | |
| 184 | | | | | | | 8136 | 20398 | |
| 185 | | | | | | | 5149282 | 5160143 | |
| 186 | | | | | | | 6943666 | 6954529 | |
| 187 | | | | | | | 115793 | 125399 | |
| 188 | | | | | | | 2162370 | 2172185 | |
| 189 | 27893 | 696 | | | | | 43659 | 55415 | |
| 190 | 27896 | 530 | | | | | 441 | 12638 | |
| 191 | 27900 | 940 | | | | | 1385409 | 1398159 | |
| 192 | 27904 | 931 | | | | | 2442587 | 2455235 | |
| 193 | 27908 | 938 | | | | | 864468 | 877224 | |
| 194 | 27911 | 711 | | | | | 3263838 | 3274393 | |
| 195 | 27914 | 711 | | | | | 4548827 | 4559382 | |
| 196 | 27917 | 711 | | | | | 63393 | 73948 | |
| 197 | 27920 | 711 | | | | | 743 | 11298 | |
| 198 | 27924 | 711 | | | | | 72805 | 84541 | |
| 199 | 27928 | 711 | | | | | 72805 | 84541 | |
| 200 | 27931 | 711 | | | | | 741 | 11296 | |
| 201 | 27935 | 711 | | | | | 72805 | 84541 | |
| 202 | 27939 | 711 | | | | | 72805 | 84541 | |
| 203 | 27943 | 711 | | | | | 70442 | 82178 | |
| 204 | 27947 | 711 | | | | | 37743 | 49479 | |
| 205 | 27951 | 711 | | | | | 982 | 12718 | |
| 206 | 27955 | 711 | | | | | 72805 | 84541 | |
| 207 | 27959 | 711 | | | | | 205420 | 217156 | |
| 208 | 27963 | 711 | | | | | 915 | 12651 | |
| 209 | 27967 | 711 | | | | | 72805 | 84541 | |
| 210 | 27971 | 711 | | | | | 977 | 12713 | |
| 211 | 27975 | 711 | | | | | 72805 | 84541 | |
| 212 | 27978 | 697 | | | | | 5833 | 16378 | |
| 213 | 27982 | 711 | | | | | 915 | 12651 | |
| 214 | 27986 | 711 | | | | | 988 | 12724 | |
| 215 | 27990 | 711 | | | | | 915 | 12651 | |
| 216 | 27994 | 711 | | | | | 72805 | 84541 | |
| 217 | 27997 | 697 | | | | | 5631 | 16176 | |
| 218 | 28001 | 711 | | | | | 72805 | 84541 | |
| 219 | 28005 | 711 | | | | | 72805 | 84541 | |
| 220 | 28009 | 711 | | | | | 915 | 12651 | |
| 221 | 28013 | 711 | | | | | 915 | 12651 | |
| 222 | 28017 | 711 | | | | | 732 | 12468 | |
| 223 | 28021 | 711 | | | | | 72805 | 84541 | |
| 224 | 28024 | 711 | | | | | 2632018 | 2642573 | |
| 225 | 28028 | 711 | | | | | 2471032 | 2482723 | |
| 226 | 28032 | 711 | | | | | 795908 | 807599 | |
| 227 | 28036 | 711 | | | | | 2515204 | 2526895 | |
| 228 | 28040 | 711 | | | | | 3347675 | 3359366 | |
| 229 | 28044 | 711 | | | | | 73643 | 85334 | |
| 230 | 28048 | 697 | | | | | 353197 | 365180 | |
| 231 | 28052 | 711 | | | | | 3317256 | 3328947 | |
| 232 | 28056 | 710 | | | | | 2412440 | 2424132 | |
| 233 | 28060 | 711 | | | | | 328927 | 340618 | |
| 234 | 28063 | 713 | | | | | 90286 | 99824 | |
| 235 | 28066 | 711 | | | | | 3447532 | 3458087 | |
| 236 | 28070 | 711 | | | | | 2935764 | 2947455 | |
| 237 | 28074 | 711 | | | | | 27284 | 38975 | |
| 238 | 28078 | 712 | | | | | 3467956 | 3479700 | |
| 239 | 28082 | 711 | | | | | 128157 | 139861 | |
| 240 | 28086 | 711 | | | | | 39127 | 50831 | |
| 241 | 28090 | 611 | | | | | 18407 | 30437 | |
| 242 | 28094 | 697 | | | | | 18502 | 30466 | |
| 243 | 28098 | 697 | | | | | 119061 | 131025 | |
| 244 | 28102 | 697 | | | | | 18386 | 30416 | |
| 245 | 28105 | 627 | | | | | 1131 | 11369 | |
| 246 | 28109 | 688 | | | | | 51400 | 63317 | |
| 247 | 28112 | 688 | | | | | 25409 | 35277 | |
| 248 | | | | | | | 619907 | 631929 | |
| 249 | 28119 | 926 | | | | | 86254 | 98887 | |
| 250 | 28123 | 698 | | | | | 84624 | 96349 | |
| 251 | 28127 | 698 | | | | | 260934 | 272659 | |
| 252 | 28131 | 698 | | | | | 260934 | 272659 | |
| 253 | 28135 | 926 | | | | | 138803 | 151436 | |
| 254 | 28139 | 698 | | | | | 254096 | 265821 | |
| 255 | 28143 | 698 | | | | | 84624 | 96349 | |
| 256 | 28147 | 698 | | | | | 260934 | 272659 | |
| 257 | 28151 | 698 | | | | | 260934 | 272659 | |
| 258 | 28155 | 698 | | | | | 84624 | 96349 | |
| 259 | 28159 | 698 | | | | | 84624 | 96349 | |
| 260 | 28163 | 698 | | | | | 84624 | 96349 | |
| 261 | 28167 | 698 | | | | | 105497 | 117255 | |
| 262 | 28171 | 698 | | | | | 941313 | 953071 | |
| 263 | 28175 | 926 | | | | | 36048 | 48681 | |
| 264 | 28178 | 926 | | | | | 1 | 10627 | |
| 265 | 28182 | 926 | | | | | 4052 | 16685 | |
| 266 | 28186 | 698 | | | | | 75007 | 86783 | |
| 267 | 28190 | 698 | | | | | 3128238 | 3139966 | |
| 268 | 28194 | 698 | | | | | 117975 | 129703 | |
| 269 | 28198 | 926 | | | | | 30971 | 43604 | |
| 270 | 28202 | 926 | | | | | 55282 | 67915 | |
| 271 | 28205 | 926 | | | | | 1886892 | 1899525 | |
| 272 | 28209 | 926 | | | | | 2821816 | 2834449 | |
| 273 | 28213 | 679 | | | | | 4744370 | 4757010 | |
| 274 | 28217 | 926 | | | | | 4554614 | 4567253 | |
| 275 | 28221 | 926 | | | | | 4646084 | 4658723 | |
| 276 | 28225 | 679 | | | | | 4811280 | 4823920 | |
| 277 | 28229 | 926 | | | | | 149904 | 162543 | |
| 278 | 28233 | 618 | | | | | 11206 | 23846 | |
| 279 | 28237 | 695 | | | | | 4232584 | 4244337 | |
| 280 | 28240 | 695 | | | | | 3948 | 15701 | |
| 281 | 28244 | 693 | | | | | 3412342 | 3424101 | |
| 282 | 28248 | 696 | | | | | 92338 | 104097 | |
| 283 | | | | | | | 3419212 | 3429296 | |
| 284 | | | | | | | 3422352 | 3432436 | |
| 285 | 28258 | 639 | | | | | 16523 | 28443 | |
| 286 | | | | | | | 3523471 | 3533850 | |
| 287 | | | | | | | 1624260 | 1637507 | |
| 288 | | | | | | | 12158 | 24902 | |
| 289 | 28271 | 938 | | | | | 39835 | 52569 | |
| 290 | 28275 | 938 | | | | | 225795 | 238529 | |
| 291 | 28279 | 929 | | | | | 32560 | 45315 | |
| 292 | 28283 | 938 | | | | | 1842 | 14576 | |
| 293 | 28287 | 929 | | | | | 288594 | 301349 | |
| 294 | 28291 | 938 | | | | | 4116123 | 4128871 | |
| 295 | 28295 | 901 | | | | | 101530 | 114278 | |
| 296 | | | KXV70697.1 | 25068 | 28297 | 557 | 3917 | 12134 | |
| 297 | | | AKQ30570.1 | 25070 | 28299 | 1096 | 1915082 | 1924692 | |
| 298 | | | KOP86149.1 | 25072 | 28301 | 1096 | 5407 | 15017 | |
| 299 | | | KRS04353.1 | 25074 | 28303 | 1096 | 11453 | 21063 | |
| 300 | | | KRS02341.1 | 25076 | 28305 | 1096 | 71328 | 80938 | |
| 301 | | | KRS03108.1 | 25078 | 28307 | 1096 | 11453 | 21063 | |
| 302 | | | KRR94713.1 | 25080 | 28309 | 1096 | 29556 | 39166 | |
| 303 | | | KRS09272.1 | 25082 | 28311 | 1096 | 71328 | 80938 | |
| 304 | | | EXE63525.1 | 25084 | 28313 | 1096 | 695254 | 704870 | |
| 305 | | | EXC47767.1 | 25086 | 28315 | 1122 | 5489 | 15158 | |
| 306 | | | ELW93014.1 | 25088 | 28317 | 1096 | 15113 | 24729 | |
| 307 | | | ENW35932.1 | 25090 | 28319 | 404 | 469715 | 477249 | |
| 308 | | | ENW44601.1 | 25092 | 28321 | 1097 | 573781 | 583394 | |
| 309 | | | ENW49013.1 | 25094 | 28323 | 1122 | 463130 | 472796 | |
| 310 | | | EKP68253.1 | 25096 | 28325 | 1122 | 270846 | 280512 | |
| 311 | | | EKL42058.1 | 25098 | 28327 | 1096 | 30124 | 39734 | |
| 312 | | | ENV15229.1 | 25100 | 28329 | 1120 | 3309500 | 3319165 | |
| 313 | | | ENX21438.1 | 25102 | 28331 | 1097 | 509761 | 519374 | |
| 314 | | | ENV06098.1 | 25104 | 28333 | 1122 | 771437 | 781106 | |
| 315 | | | EDS03748.1 | 25106 | 28335 | 1065 | 88763 | 98100 | |
| 316 | | | AMN11449.1 | 25108 | 28337 | 1132 | 1725136 | 1734833 | |
| 317 | | | AFT94988.1 | 25110 | 28339 | 1132 | 1765863 | 1775560 | |
| 318 | | | EGF91080.1 | 25112 | 28341 | 1147 | 331550 | 341110 | |
| 319 | | | ESQ74518.1 | 25114 | 28343 | 1147 | 32073 | 41627 | |
| 320 | | | CAL94924.1 | 25116 | 28345 | 1192 | 2527848 | 2537752 | |
| 321 | | | AJE23875.1 | 25118 | 28347 | 1110 | 197536 | 206001 | |
| 322 | | | CUA18546.1 | 25120 | 28349 | 1065 | 2356943 | 2366283 | |
| 323 | | | CBW22537.1 | 25122 | 28351 | 1065 | 2371910 | 2381250 | |
| 324 | | | EYA28062.1 | 25124 | 28353 | 1065 | 293528 | 302868 | |
| 325 | | | EYA33840.1 | 25126 | 28355 | 1037 | 163999 | 173255 | |
| 326 | | | EXY44319.1 | 25128 | 28357 | 1052 | 187 | 9488 | |
| 327 | | | EYB10317.1 | 25130 | 28359 | 1065 | 1271019 | 1280359 | |
| 328 | | | EXZ67957.1 | 25132 | 28361 | 1037 | 20085 | 29341 | |
| 329 | | | EXY49047.1 | 25134 | 28363 | 1065 | 152 | 9492 | |
| 330 | | | EXY53776.1 | 25136 | 28365 | 1065 | 152 | 9492 | |
| 331 | | | EDS16319.1 | 25138 | 28367 | 1065 | 257362 | 266699 | |
| 332 | | | KXT38968.1 | 25140 | 28369 | 1065 | 23341 | 32678 | |
| 333 | | | EGW44031.1 | 25142 | 28371 | 1115 | 780950 | 790461 | |
| 334 | | | EEA03716.1 | 25144 | 28373 | 1107 | 62115 | 71698 | |
| 335 | | | KVM07645.1 | 25146 | 28375 | 1046 | 33574 | 42969 | |
| 336 | | | KVM11422.1 | 25148 | 28377 | 1046 | 33574 | 42969 | |
| 337 | | | KVM41743.1 | 25150 | 28379 | 1046 | 33574 | 42969 | |
| 338 | | | KVU39939.1 | 25152 | 28381 | 247 | 370491 | 377497 | |
| 339 | | | KVX50940.1 | 25154 | 28383 | 1046 | 44196 | 53591 | |
| 340 | | | CDH43329.1 | 25156 | 28385 | 655 | 4045 | 12202 | |
| 341 | | | KPA18786.1 | 25158 | 28387 | 1131 | 595 | 10180 | |
| 342 | | | AIY12567.1 | 25160 | 28389 | 1006 | 1117511 | 1126448 | |
| 343 | | | EYF08671.1 | 25162 | 28391 | 1135 | 53327 | 62186 | |
| 344 | | | KQM35754.1 | 25164 | 28393 | 995 | 5095 | 13992 | |
| 345 | | | ALD78155.1 | 25166 | 28395 | 212 | 3535505 | 3542469 | |
| 346 | | | KPR54497.1 | 25168 | 28397 | 1099 | 99 | 9732 | |
| 347 | | | KLV49874.1 | 25170 | 28399 | 1204 | 585396 | 595495 | |
| 348 | | | KLV71166.1 | 25172 | 28401 | 1099 | 3121291 | 3130924 | |
| 349 | | | BAO81223.1 | 25174 | 28403 | 1185 | 1467812 | 1477691 | |
| 350 | | | ALB51924.1 | 25176 | 28405 | 581 | 3364334 | 3372410 | |
| 351 | | | AGE87744.1 | 25178 | 28407 | 581 | 3364989 | 3373065 | |
| 352 | | | KJR98716.1 | 25180 | 28409 | 1125 | 158922 | 168526 | |
| 353 | | | KLE94550.1 | 25182 | 28411 | 1099 | 34358 | 43990 | |
| 354 | | | KLF52639.1 | 25184 | 28413 | 1095 | 284140 | 293760 | |
| 355 | | | KLW28644.1 | 25186 | 28415 | 1099 | 100681 | 110313 | |
| 356 | | | KLW04618.1 | 25188 | 28417 | 1099 | 307954 | 317586 | |
| 357 | | | KLQ05989.1 | 25190 | 28419 | 978 | 81311 | 90573 | |
| 358 | | | KJI56237.1 | 25192 | 28421 | 978 | 146027 | 155289 | |
| 359 | | | KLP80554.1 | 25194 | 28423 | 736 | 56455 | 64988 | |
| 360 | | | KLW09756.1 | 25196 | 28425 | 1098 | 216709 | 226328 | |
| 361 | | | KLW05114.1 | 25198 | 28427 | 1098 | 663448 | 673067 | |
| 362 | | | KUQ64465.1 | 25200 | 28429 | 1098 | 1 | 9538 | |
| 363 | | | KUQ79075.1 | 25202 | 28431 | 736 | 1 | 8452 | |
| 364 | | | KPS33775.1 | 25204 | 28433 | 1098 | 80541 | 90160 | |
| 365 | | | ESL79956.1 | 25206 | 28435 | 981 | 2192087 | 2201355 | |
| 366 | | | KLW78404.1 | 25208 | 28437 | 736 | 3877717 | 3886250 | |
| 367 | | | KFC20757.1 | 25210 | 28439 | 1007 | 9124 | 18004 | |
| 368 | | | AKQ40860.1 | 25212 | 28441 | 1098 | 94495 | 103750 | |
| 369 | | | EDL49428.1 | 25214 | 28443 | 1099 | 20106 | 29358 | |
| 370 | | | KDM84273.1 | 25216 | 28445 | 978 | 6814 | 16064 | |
| 371 | | | CDU40544.1 | 25218 | 28447 | 1096 | 393610 | 403257 | |
| 372 | | | KHJ28073.1 | 25220 | 28449 | 1096 | 77599 | 87246 | |
| 373 | | | KHI41603.1 | 25222 | 28451 | 978 | 158488 | 167738 | |
| 374 | | | KHH60356.1 | 25224 | 28453 | 1096 | 25725 | 35372 | |
| 375 | | | KHH50449.1 | 25226 | 28455 | 1096 | 78872 | 88519 | |
| 376 | | | KHI22271.1 | 25228 | 28457 | 978 | 6097 | 15347 | |
| 377 | | | KHH70906.1 | 25230 | 28459 | 1096 | 36388 | 46035 | |
| 378 | | | KIG29579.1 | 25232 | 28461 | 978 | 23204 | 32454 | |
| 379 | | | AJE58951.1 | 25234 | 28463 | 1112 | 4932802 | 4942497 | |
| 380 | | | KIY28286.1 | 25236 | 28465 | 978 | 14480 | 23730 | |
| 381 | | | KIZ10080.1 | 25238 | 28467 | 978 | 13870 | 23120 | |
| 382 | | | KJJ46597.1 | 25240 | 28469 | 978 | 70937 | 80187 | |
| 383 | | | KJW55358.1 | 25242 | 28471 | 978 | 141103 | 150353 | |
| 384 | | | KJW51708.1 | 25244 | 28473 | 978 | 107073 | 116323 | |
| 385 | | | KLG52822.1 | 25246 | 28475 | 978 | 104422 | 113672 | |
| 386 | | | KLX28161.1 | 25248 | 28477 | 1096 | 4718573 | 4728220 | |
| 387 | | | KNF16924.1 | 25250 | 28479 | 978 | 6097 | 15347 | |
| 388 | | | KNF21006.1 | 25252 | 28481 | 978 | 104562 | 113812 | |
| 389 | | | KNF39647.1 | 25254 | 28483 | 978 | 6770 | 16020 | |
| 390 | | | KNG41000.1 | 25256 | 28485 | 978 | 150782 | 160032 | |
| 391 | | | KNZ99176.1 | 25258 | 28487 | 1096 | 44216 | 53863 | |
| 392 | | | KOZ12890.1 | 25260 | 28489 | 978 | 82598 | 91848 | |
| 393 | | | KOZ62952.1 | 25262 | 28491 | 978 | 13754 | 23004 | |
| 394 | | | KOZ92097.1 | 25264 | 28493 | 978 | 37881 | 47131 | |
| 395 | | | KOZ11136.1 | 25266 | 28495 | 978 | 13756 | 23006 | |
| 396 | | | KOZ14878.1 | 25268 | 28497 | 978 | 252679 | 261929 | |
| 397 | | | KOZ33113.1 | 25270 | 28499 | 978 | 79917 | 89167 | |
| 398 | | | KOZ23285.1 | 25272 | 28501 | 978 | 351820 | 361070 | |
| 399 | | | KOZ33453.1 | 25274 | 28503 | 978 | 13754 | 23004 | |
| 400 | | | KOZ38041.1 | 25276 | 28505 | 978 | 13755 | 23005 | |
| 401 | | | KOZ50107.1 | 25278 | 28507 | 978 | 351727 | 360977 | |
| 402 | | | KOZ47197.1 | 25280 | 28509 | 978 | 13752 | 23002 | |
| 403 | | | KOZ49679.1 | 25282 | 28511 | 978 | 351882 | 361132 | |
| 404 | | | KOZ66206.1 | 25284 | 28513 | 978 | 71615 | 80865 | |
| 405 | | | KOZ69711.1 | 25286 | 28515 | 978 | 351658 | 360908 | |
| 406 | | | KOZ74971.1 | 25288 | 28517 | 978 | 21854 | 31104 | |
| 407 | | | KOZ84785.1 | 25290 | 28519 | 978 | 70890 | 80140 | |
| 408 | | | KOZ80260.1 | 25292 | 28521 | 978 | 70889 | 80139 | |
| 409 | | | KOZ97703.1 | 25294 | 28523 | 978 | 140404 | 149654 | |
| 410 | | | CTS44167.1 | 25296 | 28525 | 847 | 218 | 9124 | |
| 411 | | | KPH47387.1 | 25298 | 28527 | 978 | 2323 | 11573 | |
| 412 | | | KPH46214.1 | 25300 | 28529 | 978 | 252468 | 261718 | |
| 413 | | | KPH35166.1 | 25302 | 28531 | 978 | 351816 | 361066 | |
| 414 | | | KPH38566.1 | 25304 | 28533 | 978 | 82601 | 91851 | |
| 415 | | | KPO74476.1 | 25306 | 28535 | 978 | 13791 | 23041 | |
| 416 | | | KPP03701.1 | 25308 | 28537 | 978 | 104692 | 113942 | |
| 417 | | | KPP08800.1 | 25310 | 28539 | 978 | 105621 | 114871 | |
| 418 | | | KPP18159.1 | 25312 | 28541 | 978 | 353473 | 362723 | |
| 419 | | | KPP24073.1 | 25314 | 28543 | 978 | 13790 | 23040 | |
| 420 | | | KPP34586.1 | 25316 | 28545 | 978 | 13790 | 23040 | |
| 421 | | | KPP39156.1 | 25318 | 28547 | 978 | 13790 | 23040 | |
| 422 | | | KPP49344.1 | 25320 | 28549 | 978 | 13791 | 23041 | |
| 423 | | | KPP10373.1 | 25322 | 28551 | 978 | 13791 | 23041 | |
| 424 | | | KPP42095.1 | 25324 | 28553 | 978 | 13789 | 23039 | |
| 425 | | | KPP53665.1 | 25326 | 28555 | 978 | 353543 | 362793 | |
| 426 | | | KUH02057.1 | 25328 | 28557 | 978 | 17180 | 26430 | |
| 427 | | | KUH15975.1 | 25330 | 28559 | 734 | 973 | 9534 | |
| 428 | | | KUR31969.1 | 25332 | 28561 | 1096 | 1385 | 11032 | |
| 429 | | | ALZ66919.1 | 25334 | 28563 | 734 | 2305792 | 2314353 | |
| 430 | | | KUT20785.1 | 25336 | 28565 | 1096 | 48863 | 58510 | |
| 431 | | | KUT66045.1 | 25338 | 28567 | 734 | 37927 | 46488 | |
| 432 | | | KUS25251.1 | 25340 | 28569 | 1096 | 36024 | 45671 | |
| 433 | | | KUS40200.1 | 25342 | 28571 | 978 | 12399 | 21649 | |
| 434 | | | KUT25862.1 | 25344 | 28573 | 978 | 18618 | 27868 | |
| 435 | | | KUT18409.1 | 25346 | 28575 | 303 | 18302 | 25527 | |
| 436 | | | KUU15387.1 | 25348 | 28577 | 1096 | 48864 | 58511 | |
| 437 | | | KUT50335.1 | 25350 | 28579 | 978 | 22067 | 31317 | |
| 438 | | | KUX11802.1 | 25352 | 28581 | 1096 | 21668 | 31315 | |
| 439 | | | KUU59476.1 | 25354 | 28583 | 1096 | 34340 | 43987 | |
| 440 | | | KUU32878.1 | 25356 | 28585 | 978 | 18302 | 27552 | |
| 441 | | | KUU24019.1 | 25358 | 28587 | 978 | 12402 | 21652 | |
| 442 | | | KUV88045.1 | 25360 | 28589 | 978 | 12596 | 21846 | |
| 443 | | | KUW19172.1 | 25362 | 28591 | 978 | 93523 | 102773 | |
| 444 | | | KUW69121.1 | 25364 | 28593 | 978 | 50756 | 60006 | |
| 445 | | | KUW47144.1 | 25366 | 28595 | 978 | 18299 | 27549 | |
| 446 | | | KUT58152.1 | 25368 | 28597 | 1096 | 75379 | 85026 | |
| 447 | | | KUX52806.1 | 25370 | 28599 | 1096 | 12564 | 22211 | |
| 448 | | | KUX36551.1 | 25372 | 28601 | 1096 | 44479 | 54126 | |
| 449 | | | AMG81877.1 | 25374 | 28603 | 978 | 4045570 | 4054820 | |
| 450 | | | KXG88716.1 | 25376 | 28605 | 1112 | 36249 | 45944 | |
| 451 | | | KXK90367.1 | 25378 | 28607 | 978 | 372776 | 382026 | |
| 452 | | | KXP75361.1 | 25380 | 28609 | 978 | 50949 | 60199 | |
| 453 | | | KXP57060.1 | 25382 | 28611 | 1096 | 70703 | 80350 | |
| 454 | | | KXP32161.1 | 25384 | 28613 | 850 | 1 | 8912 | |
| 455 | | | KXP24518.1 | 25386 | 28615 | 1096 | 297690 | 307337 | |
| 456 | | | KXR08921.1 | 25388 | 28617 | 524 | 1 | 7932 | |
| 457 | | | KXR32561.1 | 25390 | 28619 | 78 | 297913 | 304506 | |
| 458 | | | KXR26311.1 | 25392 | 28621 | 78 | 297953 | 304546 | |
| 459 | | | KXR92254.1 | 25394 | 28623 | 524 | 298103 | 306035 | |
| 460 | | | KXR64177.1 | 25396 | 28625 | 1096 | 7532 | 17179 | |
| 461 | | | KXR53486.1 | 25398 | 28627 | 1096 | 372284 | 381931 | |
| 462 | | | EKJ54997.1 | 25400 | 28629 | 978 | 13808 | 23058 | |
| 463 | | | ERC53518.1 | 25402 | 28631 | 978 | 83426 | 92676 | |
| 464 | | | ERE00882.1 | 25404 | 28633 | 978 | 83930 | 93180 | |
| 465 | | | ERE21798.1 | 25406 | 28635 | 978 | 81120 | 90370 | |
| 466 | | | ERB68142.1 | 25408 | 28637 | 978 | 80083 | 89333 | |
| 467 | | | ELV15310.1 | 25410 | 28639 | 978 | 13797 | 23047 | |
| 468 | | | EKK91184.1 | 25412 | 28641 | 978 | 10348 | 19598 | |
| 469 | | | EKK67941.1 | 25414 | 28643 | 978 | 79653 | 88903 | |
| 470 | | | EKK62292.1 | 25416 | 28645 | 982 | 79616 | 88878 | |
| 471 | | | EYE30768.1 | 25418 | 28647 | 1119 | 17116 | 26789 | |
| 472 | | | EYE15510.1 | 25420 | 28649 | 1119 | 12483 | 22156 | |
| 473 | | | EYE15597.1 | 25422 | 28651 | 1119 | 12403 | 22076 | |
| 474 | | | ESA76410.1 | 25424 | 28653 | 1112 | 23478 | 33173 | |
| 475 | | | EZJ86914.1 | 25426 | 28655 | 1119 | 3996 | 13669 | |
| 476 | | | KEO21428.1 | 25428 | 28657 | 1119 | 3949 | 13622 | |
| 477 | | | KDA70971.1 | 25430 | 28659 | 1119 | 12782 | 22455 | |
| 478 | | | KDS94687.1 | 25432 | 28661 | 810 | 1402 | 10191 | |
| 479 | | | KDT14123.1 | 25434 | 28663 | 1096 | 29694 | 39341 | |
| 480 | | | KEN70535.1 | 25436 | 28665 | 1096 | 28505 | 38152 | |
| 481 | | | KDV77073.1 | 25438 | 28667 | 1096 | 29694 | 39341 | |
| 482 | | | KDW26987.1 | 25440 | 28669 | 1096 | 37897 | 47544 | |
| 483 | | | KEN84156.1 | 25442 | 28671 | 77 | 824 | 7414 | |
| 484 | | | KEO02788.1 | 25444 | 28673 | 77 | 667 | 7257 | |
| 485 | | | KDX84121.1 | 25446 | 28675 | 77 | 30771 | 37361 | |
| 486 | | | KEJ20442.1 | 25448 | 28677 | 1119 | 12363 | 22036 | |
| 487 | | | KEJ21098.1 | 25450 | 28679 | 1119 | 12378 | 22051 | |
| 488 | | | EMX91852.1 | 25452 | 28681 | 279 | 75564 | 85936 | |
| 489 | | | EMW69585.1 | 25454 | 28683 | 580 | 227 | 8326 | |
| 490 | | | EMW64103.1 | 25456 | 28685 | 580 | 250 | 8349 | |
| 491 | | | EMW45431.1 | 25458 | 28687 | 580 | 353 | 8452 | |
| 492 | | | EMV86374.1 | 25460 | 28689 | 228 | 811 | 7854 | |
| 493 | | | ENA88226.1 | 25462 | 28691 | 580 | 363 | 8462 | |
| 494 | | | ENB03533.1 | 25464 | 28693 | 228 | 1250 | 8293 | |
| 495 | | | ERD09265.1 | 25466 | 28695 | 978 | 14046 | 23296 | |
| 496 | | | EKK37395.1 | 25468 | 28697 | 978 | 13796 | 23046 | |
| 497 | | | ELW28318.1 | 25470 | 28699 | 978 | 13976 | 23226 | |
| 498 | | | KDT83307.1 | 25472 | 28701 | 1119 | 16955 | 26628 | |
| 499 | | | KEK80771.1 | 25474 | 28703 | 1119 | 51355 | 61028 | |
| 500 | | | KEL07352.1 | 25476 | 28705 | 1119 | 15020 | 24693 | |
| 501 | | | KEK94608.1 | 25478 | 28707 | 1119 | 17085 | 26758 | |
| 502 | | | EKK36705.1 | 25480 | 28709 | 978 | 13809 | 23059 | |
| 503 | | | EKI06061.1 | 25482 | 28711 | 978 | 70939 | 80189 | |
| 504 | | | EIL64996.1 | 25484 | 28713 | 734 | 48987 | 57548 | |
| 505 | | | EKI02733.1 | 25486 | 28715 | 978 | 71504 | 80754 | |
| 506 | | | KEL97938.1 | 25488 | 28717 | 1119 | 5160 | 14833 | |
| 507 | | | KEM08516.1 | 25490 | 28719 | 1119 | 17042 | 26715 | |
| 508 | | | KEM49611.1 | 25492 | 28721 | 978 | 17146 | 26396 | |
| 509 | | | KEN01217.1 | 25494 | 28723 | 648 | 970 | 9273 | |
| 510 | | | KEM09156.1 | 25496 | 28725 | 648 | 1056 | 9359 | |
| 511 | | | KEM25600.1 | 25498 | 28727 | 648 | 1069 | 9372 | |
| 512 | | | KEM85725.1 | 25500 | 28729 | 1119 | 16764 | 26437 | |
| 513 | | | KEN65097.1 | 25502 | 28731 | 1119 | 4411 | 14084 | |
| 514 | | | ELW21806.1 | 25504 | 28733 | 978 | 23163 | 32413 | |
| 515 | | | EKK71768.1 | 25506 | 28735 | 738 | 72931 | 81461 | |
| 516 | | | EKK61090.1 | 25508 | 28737 | 978 | 13790 | 23040 | |
| 517 | | | EKK52334.1 | 25510 | 28739 | 978 | 13792 | 23042 | |
| 518 | | | EKK87668.1 | 25512 | 28741 | 978 | 81736 | 90986 | |
| 519 | | | EKV85100.1 | 25514 | 28743 | 978 | 13804 | 23054 | |
| 520 | | | EKV70654.1 | 25516 | 28745 | 978 | 13802 | 23052 | |
| 521 | | | EKW05773.1 | 25518 | 28747 | 978 | 79877 | 89127 | |
| 522 | | | EKW03271.1 | 25520 | 28749 | 978 | 13798 | 23048 | |
| 523 | | | ESD10540.1 | 25522 | 28751 | 1104 | 4185 | 13813 | |
| 524 | | | ESA83484.1 | 25524 | 28753 | 1112 | 48996 | 58691 | |
| 525 | | | ESD19200.1 | 25526 | 28755 | 399 | 1 | 7559 | |
| 526 | | | ESD45642.1 | 25528 | 28757 | 1112 | 48833 | 58528 | |
| 527 | | | ESD61125.1 | 25530 | 28759 | 589 | 18577 | 26703 | |
| 528 | | | ESD71192.1 | 25532 | 28761 | 1104 | 20331 | 29959 | |
| 529 | | | ESD92013.1 | 25534 | 28763 | 1112 | 60634 | 70329 | |
| 530 | | | ESD92685.1 | 25536 | 28765 | 1112 | 1234 | 10929 | |
| 531 | | | EKW04268.1 | 25538 | 28767 | 978 | 13806 | 23056 | |
| 532 | | | EKW19025.1 | 25540 | 28769 | 978 | 13808 | 23058 | |
| 533 | | | EIN33838.1 | 25542 | 28771 | 982 | 13788 | 23050 | |
| 534 | | | EKW08488.1 | 25544 | 28773 | 978 | 13808 | 23058 | |
| 535 | | | ELW29952.1 | 25546 | 28775 | 978 | 2439 | 11689 | |
| 536 | | | EKW22422.1 | 25548 | 28777 | 233 | 55 | 7070 | |
| 537 | | | EKW74795.1 | 25550 | 28779 | 978 | 13790 | 23040 | |
| 538 | | | EKY34592.1 | 25552 | 28781 | 978 | 13806 | 23056 | |
| 539 | | | EKW38125.1 | 25554 | 28783 | 978 | 13800 | 23050 | |
| 540 | | | EKW51347.1 | 25556 | 28785 | 978 | 13792 | 23042 | |
| 541 | | | EKW70676.1 | 25558 | 28787 | 978 | 79810 | 89060 | |
| 542 | | | EKW68014.1 | 25560 | 28789 | 982 | 14005 | 23267 | |
| 543 | | | EKW71372.1 | 25562 | 28791 | 978 | 10852 | 20102 | |
| 544 | | | EKY34709.1 | 25564 | 28793 | 1117 | 416 | 10083 | |
| 545 | | | EKW75843.1 | 25566 | 28795 | 978 | 13959 | 23209 | |
| 546 | | | ELW46372.1 | 25568 | 28797 | 978 | 13998 | 23248 | |
| 547 | | | EKW96657.1 | 25570 | 28799 | 978 | 79287 | 88537 | |
| 548 | | | EKW96261.1 | 25572 | 28801 | 978 | 13993 | 23243 | |
| 549 | | | ELV31250.1 | 25574 | 28803 | 978 | 30317 | 39567 | |
| 550 | | | ELV35524.1 | 25576 | 28805 | 978 | 30154 | 39404 | |
| 551 | | | ELV44384.1 | 25578 | 28807 | 978 | 842 | 10092 | |
| 552 | | | ELW27708.1 | 25580 | 28809 | 978 | 13946 | 23196 | |
| 553 | | | ELV47168.1 | 25582 | 28811 | 978 | 13933 | 23183 | |
| 554 | | | ELW24263.1 | 25584 | 28813 | 1119 | 4040 | 13713 | |
| 555 | | | ELV62897.1 | 25586 | 28815 | 978 | 19714 | 28964 | |
| 556 | | | ETJ70883.1 | 25588 | 28817 | 1129 | 37993 | 47697 | |
| 557 | | | ELV63260.1 | 25590 | 28819 | 978 | 4590 | 13840 | |
| 558 | | | ACA79489.1 | 25592 | 28821 | 1119 | 4256022 | 4265695 | |
| 559 | | | ETJ79054.1 | 25594 | 28823 | 287 | 15819 | 22996 | |
| 560 | | | ERB88975.1 | 25596 | 28825 | 978 | 13919 | 23169 | |
| 561 | | | ERD08337.1 | 25598 | 28827 | 978 | 14296 | 23546 | |
| 562 | | | ERD05021.1 | 25600 | 28829 | 978 | 14116 | 23366 | |
| 563 | | | ERD20748.1 | 25602 | 28831 | 978 | 14235 | 23485 | |
| 564 | | | ERD22951.1 | 25604 | 28833 | 978 | 14065 | 23315 | |
| 565 | | | ERB79217.1 | 25606 | 28835 | 978 | 81295 | 90545 | |
| 566 | | | ERD23992.1 | 25608 | 28837 | 978 | 13981 | 23231 | |
| 567 | | | ERD35316.1 | 25610 | 28839 | 978 | 14139 | 23389 | |
| 568 | | | ERD37185.1 | 25612 | 28841 | 978 | 14019 | 23269 | |
| 569 | | | ERD26786.1 | 25614 | 28843 | 1119 | 19748 | 29421 | |
| 570 | | | ERD52931.1 | 25616 | 28845 | 978 | 14048 | 23298 | |
| 571 | | | ERD40232.1 | 25618 | 28847 | 978 | 14087 | 23337 | |
| 572 | | | ERD45129.1 | 25620 | 28849 | 978 | 14048 | 23298 | |
| 573 | | | ERB91861.1 | 25622 | 28851 | 978 | 81300 | 90550 | |
| 574 | | | ERC00104.1 | 25624 | 28853 | 978 | 81417 | 90667 | |
| 575 | | | ERC08312.1 | 25626 | 28855 | 978 | 14059 | 23309 | |
| 576 | | | ERC07682.1 | 25628 | 28857 | 978 | 13951 | 23201 | |
| 577 | | | ERC15339.1 | 25630 | 28859 | 978 | 13964 | 23214 | |
| 578 | | | ERC23446.1 | 25632 | 28861 | 359 | 1 | 7395 | |
| 579 | | | ERC10660.1 | 25634 | 28863 | 978 | 13969 | 23219 | |
| 580 | | | ERC32306.1 | 25636 | 28865 | 978 | 13936 | 23186 | |
| 581 | | | ERD72599.1 | 25638 | 28867 | 978 | 14036 | 23286 | |
| 582 | | | ERD68377.1 | 25640 | 28869 | 978 | 13984 | 23234 | |
| 583 | | | ERD73456.1 | 25642 | 28871 | 978 | 14079 | 23329 | |
| 584 | | | ERD83189.1 | 25644 | 28873 | 978 | 13972 | 23222 | |
| 585 | | | ERC25311.1 | 25646 | 28875 | 978 | 253340 | 262590 | |
| 586 | | | ERC30061.1 | 25648 | 28877 | 978 | 253529 | 262779 | |
| 587 | | | ERD87991.1 | 25650 | 28879 | 978 | 14029 | 23279 | |
| 588 | | | ERD91777.1 | 25652 | 28881 | 978 | 14154 | 23404 | |
| 589 | | | ERD98684.1 | 25654 | 28883 | 978 | 14071 | 23321 | |
| 590 | | | ERD88429.1 | 25656 | 28885 | 978 | 14016 | 23266 | |
| 591 | | | ERE36112.1 | 25658 | 28887 | 978 | 14071 | 23321 | |
| 592 | | | ERE23641.1 | 25660 | 28889 | 978 | 4432 | 13682 | |
| 593 | | | ERC33935.1 | 25662 | 28891 | 978 | 256038 | 265288 | |
| 594 | | | ERC40342.1 | 25664 | 28893 | 978 | 252555 | 261805 | |
| 595 | | | ERC48259.1 | 25666 | 28895 | 978 | 317955 | 327205 | |
| 596 | | | ETY20410.1 | 25668 | 28897 | 1096 | 345968 | 355615 | |
| 597 | | | ETY13488.1 | 25670 | 28899 | 1096 | 347007 | 356654 | |
| 598 | | | ETY13649.1 | 25672 | 28901 | 1096 | 75313 | 84960 | |
| 599 | | | ETY08683.1 | 25674 | 28903 | 1096 | 75313 | 84960 | |
| 600 | | | ETX96686.1 | 25676 | 28905 | 1096 | 457262 | 466909 | |
| 601 | | | ERO99483.1 | 25678 | 28907 | 1096 | 5012479 | 5022126 | |
| 602 | | | ETY35401.1 | 25680 | 28909 | 1096 | 347245 | 356892 | |
| 603 | | | ETY29967.1 | 25682 | 28911 | 1096 | 75313 | 84960 | |
| 604 | | | ESL20615.1 | 25684 | 28913 | 1119 | 2595377 | 2605050 | |
| 605 | | | ETX82125.1 | 25686 | 28915 | 1096 | 410253 | 419900 | |
| 606 | | | ETX76975.1 | 25688 | 28917 | 1096 | 3544266 | 3553913 | |
| 607 | | | ETY61261.1 | 25690 | 28919 | 1096 | 75313 | 84960 | |
| 608 | | | EZQ66603.1 | 25692 | 28921 | 1096 | 36360 | 46007 | |
| 609 | | | ETY23956.1 | 25694 | 28923 | 1096 | 70745 | 80392 | |
| 610 | | | EKH96739.1 | 25696 | 28925 | 978 | 13540 | 22790 | |
| 611 | | | CDU33064.1 | 25698 | 28927 | 1096 | 296853 | 306500 | |
| 612 | | | EHV18500.1 | 25700 | 28929 | 1104 | 40989 | 50617 | |
| 613 | | | EIP71502.1 | 25702 | 28931 | 978 | 14462 | 23712 | |
| 614 | | | EKI46647.1 | 25704 | 28933 | 978 | 13801 | 23051 | |
| 615 | | | EKI57123.1 | 25706 | 28935 | 978 | 13803 | 23053 | |
| 616 | | | EKI59125.1 | 25708 | 28937 | 978 | 13801 | 23051 | |
| 617 | | | EIP63440.1 | 25710 | 28939 | 553 | 82334 | 90309 | |
| 618 | | | EIP72314.1 | 25712 | 28941 | 978 | 30328 | 39578 | |
| 619 | | | EKI64840.1 | 25714 | 28943 | 978 | 30338 | 39588 | |
| 620 | | | EKI72764.1 | 25716 | 28945 | 978 | 30328 | 39578 | |
| 621 | | | EKI91871.1 | 25718 | 28947 | 978 | 79661 | 88911 | |
| 622 | | | EKI82676.1 | 25720 | 28949 | 978 | 30380 | 39630 | |
| 623 | | | EKJ05365.1 | 25722 | 28951 | 978 | 30254 | 39504 | |
| 624 | | | EKI92954.1 | 25724 | 28953 | 978 | 116536 | 125786 | |
| 625 | | | EKJ00853.1 | 25726 | 28955 | 978 | 27618 | 36868 | |
| 626 | | | EIP72927.1 | 25728 | 28957 | 978 | 13800 | 23050 | |
| 627 | | | EKJ19826.1 | 25730 | 28959 | 978 | 13802 | 23052 | |
| 628 | | | EKJ20863.1 | 25732 | 28961 | 978 | 13806 | 23056 | |
| 629 | | | EKJ36028.1 | 25734 | 28963 | 978 | 13806 | 23056 | |
| 630 | | | EKJ47664.1 | 25736 | 28965 | 978 | 13808 | 23058 | |
| 631 | | | EKJ36500.1 | 25738 | 28967 | 978 | 13802 | 23052 | |
| 632 | | | EIP38854.1 | 25740 | 28969 | 978 | 79651 | 88901 | |
| 633 | | | EIO92502.1 | 25742 | 28971 | 978 | 30370 | 39620 | |
| 634 | | | EIO87495.1 | 25744 | 28973 | 978 | 30410 | 39660 | |
| 635 | | | EIP27285.1 | 25746 | 28975 | 978 | 858 | 10108 | |
| 636 | | | EIP10340.1 | 25748 | 28977 | 978 | 13800 | 23050 | |
| 637 | | | EIP33943.1 | 25750 | 28979 | 978 | 13798 | 23048 | |
| 638 | | | EIP40273.1 | 25752 | 28981 | 978 | 13804 | 23054 | |
| 639 | | | EIP48989.1 | 25754 | 28983 | 978 | 13794 | 23044 | |
| 640 | | | EIP35348.1 | 25756 | 28985 | 978 | 30343 | 39593 | |
| 641 | | | EIP50031.1 | 25758 | 28987 | 978 | 30347 | 39597 | |
| 642 | | | EKI03042.1 | 25760 | 28989 | 978 | 13596 | 22846 | |
| 643 | | | EST65290.1 | 25762 | 28991 | 734 | 297776 | 306337 | |
| 644 | | | EMX76367.1 | 25764 | 28993 | 191 | 49211 | 56397 | |
| 645 | | | EMX78113.1 | 25766 | 28995 | 443 | 53674 | 61616 | |
| 646 | | | EKH36316.1 | 25768 | 28997 | 978 | 13812 | 23062 | |
| 647 | | | EIN15910.1 | 25770 | 28999 | 978 | 13808 | 23058 | |
| 648 | | | EKH25287.1 | 25772 | 29001 | 978 | 332440 | 341690 | |
| 649 | | | EKH13353.1 | 25774 | 29003 | 978 | 13810 | 23060 | |
| 650 | | | EIN16633.1 | 25776 | 29005 | 978 | 384 | 9634 | |
| 651 | | | EIN33028.1 | 25778 | 29007 | 978 | 392 | 9642 | |
| 652 | | | EKH48831.1 | 25780 | 29009 | 978 | 13808 | 23058 | |
| 653 | | | EKJ48108.1 | 25782 | 29011 | 978 | 13813 | 23063 | |
| 654 | | | EFI22363.1 | 25784 | 29013 | 580 | 393643 | 401742 | |
| 655 | | | EFF02930.1 | 25786 | 29015 | 580 | 394852 | 402951 | |
| 656 | | | EQN36979.1 | 25788 | 29017 | 1096 | 424617 | 434264 | |
| 657 | | | EQQ54037.1 | 25790 | 29019 | 1096 | 103333 | 112980 | |
| 658 | | | EQQ62152.1 | 25792 | 29021 | 1096 | 309247 | 316458 | |
| 659 | | | EQQ82444.1 | 25794 | 29023 | 1096 | 390614 | 400261 | |
| 660 | | | EQR15649.1 | 25796 | 29025 | 1096 | 438811 | 448458 | |
| 661 | | | EQR29833.1 | 25798 | 29027 | 1096 | 391018 | 400665 | |
| 662 | | | EQR56341.1 | 25800 | 29029 | 1096 | 391165 | 400812 | |
| 663 | | | EQR70530.1 | 25802 | 29031 | 1096 | 553783 | 563430 | |
| 664 | | | EQR73387.1 | 25804 | 29033 | 1096 | 4977594 | 4987241 | |
| 665 | | | ESP12227.1 | 25806 | 29035 | 1119 | 351091 | 360764 | |
| 666 | | | EQR98264.1 | 25808 | 29037 | 1096 | 2757793 | 2767440 | |
| 667 | | | EQS19619.1 | 25810 | 29039 | 1096 | 427754 | 437401 | |
| 668 | | | EQS44553.1 | 25812 | 29041 | 1096 | 3133555 | 3143202 | |
| 669 | | | EQS43787.1 | 25814 | 29043 | 1096 | 1053884 | 1063531 | |
| 670 | | | ERA63200.1 | 25816 | 29045 | 1096 | 388536 | 398183 | |
| 671 | | | EQS73533.1 | 25818 | 29047 | 1096 | 430980 | 440627 | |
| 672 | | | EQS83532.1 | 25820 | 29049 | 1096 | 426028 | 435675 | |
| 673 | | | EQT06518.1 | 25822 | 29051 | 1096 | 102775 | 112422 | |
| 674 | | | EQT31740.1 | 25824 | 29053 | 1119 | 352526 | 362199 | |
| 675 | | | EQT33090.1 | 25826 | 29055 | 1096 | 3599701 | 3609348 | |
| 676 | | | EQT84559.1 | 25828 | 29057 | 1119 | 636062 | 645735 | |
| 677 | | | EQU07295.1 | 25830 | 29059 | 1096 | 262560 | 272207 | |
| 678 | | | EQU46107.1 | 25832 | 29061 | 847 | 2189631 | 2198531 | |
| 679 | | | EQU56270.1 | 25834 | 29063 | 1096 | 388758 | 398405 | |
| 680 | | | EQU82065.1 | 25836 | 29065 | 1096 | 4855064 | 4864711 | |
| 681 | | | EQN74805.1 | 25838 | 29067 | 1096 | 658360 | 668007 | |
| 682 | | | EQV15998.1 | 25840 | 29069 | 516 | 393529 | 401436 | |
| 683 | | | EQO01911.1 | 25842 | 29071 | 1096 | 430981 | 440628 | |
| 684 | | | EQO57393.1 | 25844 | 29073 | 1119 | 624054 | 633727 | |
| 685 | | | EQO66404.1 | 25846 | 29075 | 1119 | 1181503 | 1191176 | |
| 686 | | | EQO74549.1 | 25848 | 29077 | 1096 | 3758553 | 3768200 | |
| 687 | | | EQP20053.1 | 25850 | 29079 | 1096 | 388587 | 398234 | |
| 688 | | | EQP30925.1 | 25852 | 29081 | 1096 | 388774 | 398421 | |
| 689 | | | EQP87866.1 | 25854 | 29083 | 1096 | 3466364 | 3476011 | |
| 690 | | | EQV39984.1 | 25856 | 29085 | 1096 | 73576 | 83223 | |
| 691 | | | EQV77953.1 | 25858 | 29087 | 1096 | 2087647 | 2097294 | |
| 692 | | | EQV75317.1 | 25860 | 29089 | 1096 | 4273553 | 4283200 | |
| 693 | | | EQV93984.1 | 25862 | 29091 | 1096 | 3719713 | 3729360 | |
| 694 | | | EOX00082.1 | 25864 | 29093 | 1096 | 390270 | 399917 | |
| 695 | | | EOW11794.1 | 25866 | 29095 | 660 | 1242010 | 1250349 | |
| 696 | | | ELF04267.1 | 25868 | 29097 | 1096 | 558868 | 568515 | |
| 697 | | | ELI36531.1 | 25870 | 29099 | 1096 | 36436 | 46083 | |
| 698 | | | ELI49201.1 | 25872 | 29101 | 1119 | 4408 | 14081 | |
| 699 | | | EOW43091.1 | 25874 | 29103 | 1096 | 709076 | 718723 | |
| 700 | | | ELI49521.1 | 25876 | 29105 | 1096 | 29428 | 39075 | |
| 701 | | | EOW53695.1 | 25878 | 29107 | 362 | 410393 | 417840 | |
| 702 | | | EOW53660.1 | 25880 | 29109 | 362 | 460969 | 468416 | |
| 703 | | | EOW60867.1 | 25882 | 29111 | 1096 | 64416 | 74063 | |
| 704 | | | ELG97962.1 | 25884 | 29113 | 717 | 2669732 | 2678242 | |
| 705 | | | ELH03273.1 | 25886 | 29115 | 1096 | 560405 | 570052 | |
| 706 | | | ELF28433.1 | 25888 | 29117 | 1119 | 2025589 | 2035262 | |
| 707 | | | ELJ30966.1 | 25890 | 29119 | 1096 | 40359 | 50006 | |
| 708 | | | EOW72674.1 | 25892 | 29121 | 894 | 398221 | 407262 | |
| 709 | | | ELC68672.1 | 25894 | 29123 | 1096 | 435063 | 444710 | |
| 710 | | | ELC04769.1 | 25896 | 29125 | 1096 | 390301 | 399948 | |
| 711 | | | EOV27242.1 | 25898 | 29127 | 1096 | 64489 | 74136 | |
| 712 | | | ELH63191.1 | 25900 | 29129 | 1119 | 392427 | 402100 | |
| 713 | | | ELD00701.1 | 25902 | 29131 | 1096 | 695401 | 705048 | |
| 714 | | | ELD16726.1 | 25904 | 29133 | 1096 | 2591525 | 2601172 | |
| 715 | | | EOV39941.1 | 25906 | 29135 | 1096 | 1942871 | 1952518 | |
| 716 | | | EOX13559.1 | 25908 | 29137 | 894 | 1232970 | 1242011 | |
| 717 | | | ELD74208.1 | 25910 | 29139 | 1096 | 3687026 | 3696673 | |
| 718 | | | ELC51201.1 | 25912 | 29141 | 1096 | 61006 | 70653 | |
| 719 | | | ELC65366.1 | 25914 | 29143 | 1096 | 410891 | 420538 | |
| 720 | | | ELG08156.1 | 25916 | 29145 | 1119 | 1535102 | 1544775 | |
| 721 | | | ELE06289.1 | 25918 | 29147 | 221 | 439185 | 445994 | |
| 722 | | | ELE13900.1 | 25920 | 29149 | 1096 | 2561123 | 2570770 | |
| 723 | | | EOV54809.1 | 25922 | 29151 | 1096 | 91839 | 101486 | |
| 724 | | | ELE75377.1 | 25924 | 29153 | 1096 | 655020 | 664667 | |
| 725 | | | EU61314.1 | 25926 | 29155 | 1096 | 36434 | 46081 | |
| 726 | | | ELE76411.1 | 25928 | 29157 | 1096 | 390340 | 399987 | |
| 727 | | | EGI23326.1 | 25930 | 29159 | 1112 | 73149 | 82844 | |
| 728 | | | EIF87147.1 | 25932 | 29161 | 1119 | 451385 | 461058 | |
| 729 | | | KDG67766.1 | 25934 | 29163 | 380 | 3753850 | 3761349 | |
| 730 | | | EFK89792.1 | 25936 | 29165 | 1112 | 30388 | 40083 | |
| 731 | | | EFK27049.1 | 25938 | 29167 | 978 | 7440 | 16690 | |
| 732 | | | EFI89546.1 | 25940 | 29169 | 295 | 155 | 7399 | |
| 733 | | | EFJ72999.1 | 25942 | 29171 | 1112 | 22606 | 32301 | |
| 734 | | | EKH61409.1 | 25944 | 29173 | 978 | 13807 | 23057 | |
| 735 | | | EKJ52944.1 | 25946 | 29175 | 978 | 13796 | 23046 | |
| 736 | | | EMS03601.1 | 25948 | 29177 | 1119 | 11246 | 20919 | |
| 737 | | | KDM81020.1 | 25950 | 29179 | 978 | 156383 | 165633 | |
| 738 | | | AHY73975.1 | 25952 | 29181 | 1119 | 5408661 | 5418334 | |
| 739 | | | AHG12156.1 | 25954 | 29183 | 1119 | 5408663 | 5418336 | |
| 740 | | | EYZ76663.1 | 25956 | 29185 | 978 | 104414 | 113664 | |
| 741 | | | EYW98551.1 | 25958 | 29187 | 978 | 140023 | 149273 | |
| 742 | | | EYV59036.1 | 25960 | 29189 | 978 | 140415 | 149665 | |
| 743 | | | EZE90568.1 | 25962 | 29191 | 978 | 7566 | 16816 | |
| 744 | | | EYV46018.1 | 25964 | 29193 | 978 | 106704 | 115954 | |
| 745 | | | EYV44257.1 | 25966 | 29195 | 978 | 139248 | 148498 | |
| 746 | | | EYV24874.1 | 25968 | 29197 | 978 | 140321 | 149571 | |
| 747 | | | EYV22944.1 | 25970 | 29199 | 978 | 8920 | 18170 | |
| 748 | | | EYV18169.1 | 25972 | 29201 | 978 | 106497 | 115747 | |
| 749 | | | EYV20079.1 | 25974 | 29203 | 978 | 7135 | 16385 | |
| 750 | | | EYV16483.1 | 25976 | 29205 | 978 | 139329 | 148579 | |
| 751 | | | EYZ14530.1 | 25978 | 29207 | 978 | 6648 | 15898 | |
| 752 | | | EZQ47393.1 | 25980 | 29209 | 978 | 302436 | 311686 | |
| 753 | | | EZQ50283.1 | 25982 | 29211 | 978 | 351950 | 361200 | |
| 754 | | | EFX13463.1 | 25984 | 29213 | 978 | 293415 | 302665 | |
| 755 | | | EFX18240.1 | 25986 | 29215 | 978 | 293366 | 302616 | |
| 756 | | | KKF77972.1 | 25988 | 29217 | 978 | 14601 | 23851 | |
| 757 | | | KKF80704.1 | 25990 | 29219 | 978 | 13870 | 23120 | |
| 758 | | | KKY44755.1 | 25992 | 29221 | 978 | 3452 | 12702 | |
| 759 | | | ALH93946.1 | 25994 | 29223 | 978 | 5197926 | 5207176 | |
| 760 | | | KRQ04868.1 | 25996 | 29225 | 978 | 284710 | 293960 | |
| 761 | | | EYZ52259.1 | 25998 | 29227 | 978 | 351745 | 360995 | |
| 762 | | | EYZ38308.1 | 26000 | 29229 | 978 | 351772 | 361022 | |
| 763 | | | EYZ37415.1 | 26002 | 29231 | 978 | 13749 | 22999 | |
| 764 | | | EYZ36218.1 | 26004 | 29233 | 978 | 351747 | 360997 | |
| 765 | | | EYX13627.1 | 26006 | 29235 | 978 | 13750 | 23000 | |
| 766 | | | EYX12328.1 | 26008 | 29237 | 978 | 351786 | 361036 | |
| 767 | | | EYX02203.1 | 26010 | 29239 | 978 | 13747 | 22997 | |
| 768 | | | EZD85329.1 | 26012 | 29241 | 978 | 80155 | 89405 | |
| 769 | | | EZE88805.1 | 26014 | 29243 | 978 | 14613 | 23863 | |
| 770 | | | EYV70455.1 | 26016 | 29245 | 978 | 129736 | 138986 | |
| 771 | | | EZE89448.1 | 26018 | 29247 | 978 | 251411 | 260661 | |
| 772 | | | EYV67647.1 | 26020 | 29249 | 978 | 302523 | 311773 | |
| 773 | | | EYX70059.1 | 26022 | 29251 | 978 | 250164 | 259414 | |
| 774 | | | EYX57444.1 | 26024 | 29253 | 978 | 351787 | 361037 | |
| 775 | | | EYX54549.1 | 26026 | 29255 | 978 | 351787 | 361037 | |
| 776 | | | EYX48135.1 | 26028 | 29257 | 978 | 351787 | 361037 | |
| 777 | | | EYX44882.1 | 26030 | 29259 | 978 | 351787 | 361037 | |
| 778 | | | EYX43992.1 | 26032 | 29261 | 978 | 13749 | 22999 | |
| 779 | | | EYX33005.1 | 26034 | 29263 | 978 | 351787 | 361037 | |
| 780 | | | EYX30697.1 | 26036 | 29265 | 978 | 351787 | 361037 | |
| 781 | | | EYX27760.1 | 26038 | 29267 | 978 | 13749 | 22999 | |
| 782 | | | EYW85333.1 | 26040 | 29269 | 978 | 351787 | 361037 | |
| 783 | | | EYW83366.1 | 26042 | 29271 | 978 | 351787 | 361037 | |
| 784 | | | EYW75520.1 | 26044 | 29273 | 978 | 13748 | 22998 | |
| 785 | | | EYW71150.1 | 26046 | 29275 | 978 | 13748 | 22998 | |
| 786 | | | EYW67180.1 | 26048 | 29277 | 978 | 351652 | 360902 | |
| 787 | | | EYW64049.1 | 26050 | 29279 | 978 | 351651 | 360901 | |
| 788 | | | EYW57177.1 | 26052 | 29281 | 978 | 351652 | 360902 | |
| 789 | | | EYW49141.1 | 26054 | 29283 | 978 | 13748 | 22998 | |
| 790 | | | EYW49454.1 | 26056 | 29285 | 978 | 13748 | 22998 | |
| 791 | | | EYW43049.1 | 26058 | 29287 | 978 | 351652 | 360902 | |
| 792 | | | EYW39161.1 | 26060 | 29289 | 978 | 13748 | 22998 | |
| 793 | | | EYW34610.1 | 26062 | 29291 | 978 | 13749 | 22999 | |
| 794 | | | EYW25813.1 | 26064 | 29293 | 978 | 351733 | 360983 | |
| 795 | | | EYW27181.1 | 26066 | 29295 | 978 | 79670 | 88920 | |
| 796 | | | EYW24510.1 | 26068 | 29297 | 978 | 80111 | 89361 | |
| 797 | | | EYW09906.1 | 26070 | 29299 | 978 | 351749 | 360999 | |
| 798 | | | EYW13501.1 | 26072 | 29301 | 978 | 80139 | 89389 | |
| 799 | | | EZF08561.1 | 26074 | 29303 | 978 | 351749 | 360999 | |
| 800 | | | EYW07432.1 | 26076 | 29305 | 978 | 13749 | 22999 | |
| 801 | | | EZF05482.1 | 26078 | 29307 | 978 | 351681 | 360931 | |
| 802 | | | EDZ88246.1 | 26080 | 29309 | 978 | 3701544 | 3710794 | |
| 803 | | | EDZ83804.1 | 26082 | 29311 | 978 | 2581794 | 2591044 | |
| 804 | | | EDU68764.1 | 26084 | 29313 | 978 | 75340 | 84590 | |
| 805 | | | EDU54287.1 | 26086 | 29315 | 978 | 83808 | 93058 | |
| 806 | | | ACI36184.1 | 26088 | 29317 | 978 | 5437955 | 5447205 | |
| 807 | | | EDU34142.1 | 26090 | 29319 | 978 | 82700 | 91950 | |
| 808 | | | EDZ77846.1 | 26092 | 29321 | 978 | 2713466 | 2722716 | |
| 809 | | | EDU76195.1 | 26094 | 29323 | 978 | 115023 | 124273 | |
| 810 | | | EDU82677.1 | 26096 | 29325 | 978 | 313683 | 322933 | |
| 811 | | | EDU87436.1 | 26098 | 29327 | 978 | 115901 | 125151 | |
| 812 | | | EDU97874.1 | 26100 | 29329 | 978 | 80068 | 89318 | |
| 813 | | | AAG59483.1 | 26102 | 29331 | 1117 | 5393893 | 5403560 | |
| 814 | | | AIG71773.1 | 26104 | 29333 | 978 | 5413191 | 5422441 | |
| 815 | | | EZA89752.1 | 26106 | 29335 | 978 | 351745 | 360995 | |
| 816 | | | EZB05975.1 | 26108 | 29337 | 978 | 351787 | 361037 | |
| 817 | | | EZB04404.1 | 26110 | 29339 | 978 | 351787 | 361037 | |
| 818 | | | EZB11566.1 | 26112 | 29341 | 978 | 351878 | 361128 | |
| 819 | | | EYV89286.1 | 26114 | 29343 | 978 | 351787 | 361037 | |
| 820 | | | EZB20621.1 | 26116 | 29345 | 978 | 351787 | 361037 | |
| 821 | | | EZB18142.1 | 26118 | 29347 | 978 | 79602 | 88852 | |
| 822 | | | EZB30350.1 | 26120 | 29349 | 978 | 351749 | 360999 | |
| 823 | | | EFX08674.1 | 26122 | 29351 | 978 | 287972 | 297222 | |
| 824 | | | EZB32014.1 | 26124 | 29353 | 978 | 13750 | 23000 | |
| 825 | | | EZB41523.1 | 26126 | 29355 | 978 | 13747 | 22997 | |
| 826 | | | EZB46984.1 | 26128 | 29357 | 978 | 13747 | 22997 | |
| 827 | | | EZB48637.1 | 26130 | 29359 | 978 | 14769 | 24019 | |
| 828 | | | EZB48353.1 | 26132 | 29361 | 488 | 1 | 7782 | |
| 829 | | | EZB52649.1 | 26134 | 29363 | 714 | 20977 | 29436 | |
| 830 | | | EZB74689.1 | 26136 | 29365 | 978 | 14053 | 23303 | |
| 831 | | | EZB73673.1 | 26138 | 29367 | 978 | 13126 | 22376 | |
| 832 | | | EZB87910.1 | 26140 | 29369 | 978 | 14311 | 23561 | |
| 833 | | | EZB80136.1 | 26142 | 29371 | 978 | 351521 | 360771 | |
| 834 | | | EZB81694.1 | 26144 | 29373 | 978 | 13944 | 23194 | |
| 835 | | | EZB95443.1 | 26146 | 29375 | 978 | 146895 | 156145 | |
| 836 | | | EZC17286.1 | 26148 | 29377 | 596 | 351887 | 359991 | |
| 837 | | | EZC37646.1 | 26150 | 29379 | 978 | 351954 | 361204 | |
| 838 | | | EZC28523.1 | 26152 | 29381 | 978 | 79400 | 88650 | |
| 839 | | | EZC43982.1 | 26154 | 29383 | 978 | 251669 | 260919 | |
| 840 | | | EZC48749.1 | 26156 | 29385 | 978 | 351852 | 361102 | |
| 841 | | | EZC62956.1 | 26158 | 29387 | 978 | 63484 | 72734 | |
| 842 | | | EZC70421.1 | 26160 | 29389 | 978 | 14637 | 23887 | |
| 843 | | | EZC77661.1 | 26162 | 29391 | 978 | 14037 | 23287 | |
| 844 | | | EZC64796.1 | 26164 | 29393 | 978 | 352100 | 361350 | |
| 845 | | | EZC83413.1 | 26166 | 29395 | 978 | 14468 | 23718 | |
| 846 | | | EZC90332.1 | 26168 | 29397 | 978 | 13966 | 23216 | |
| 847 | | | EZC92770.1 | 26170 | 29399 | 978 | 14435 | 23685 | |
| 848 | | | EZC86952.1 | 26172 | 29401 | 978 | 13396 | 22646 | |
| 849 | | | EZD00268.1 | 26174 | 29403 | 978 | 82072 | 91322 | |
| 850 | | | EYV84724.1 | 26176 | 29405 | 978 | 352019 | 361269 | |
| 851 | | | EZD08969.1 | 26178 | 29407 | 978 | 351981 | 361231 | |
| 852 | | | EZD17520.1 | 26180 | 29409 | 978 | 352026 | 361276 | |
| 853 | | | EZD15758.1 | 26182 | 29411 | 978 | 351390 | 360640 | |
| 854 | | | EZD19489.1 | 26184 | 29413 | 978 | 351929 | 361179 | |
| 855 | | | EZD75268.1 | 26186 | 29415 | 978 | 13749 | 22999 | |
| 856 | | | BAB38682.1 | 26188 | 29417 | 1117 | 5363890 | 5373557 | |
| 857 | | | AIF96933.1 | 26190 | 29419 | 1117 | 5389312 | 5398979 | |
| 858 | | | AJA29435.1 | 26192 | 29421 | 1117 | 5354079 | 5363746 | |
| 859 | | | ACT75063.1 | 26194 | 29423 | 1117 | 5393599 | 5403266 | |
| 860 | | | EEC29561.1 | 26196 | 29425 | 978 | 1424935 | 1434185 | |
| 861 | | | EYZ63881.1 | 26198 | 29427 | 978 | 12253 | 21503 | |
| 862 | | | EFX22733.1 | 26200 | 29429 | 280 | 1 | 7159 | |
| 863 | | | ADD59518.1 | 26202 | 29431 | 1119 | 5202149 | 5211822 | |
| 864 | | | ENC26728.1 | 26204 | 29433 | 1096 | 30243 | 39890 | |
| 865 | | | ENA10895.1 | 26206 | 29435 | 1096 | 68021 | 77668 | |
| 866 | | | EMZ79274.1 | 26208 | 29437 | 630 | 79591 | 87840 | |
| 867 | | | ENG24752.1 | 26210 | 29439 | 580 | 361 | 8460 | |
| 868 | | | ENG35038.1 | 26212 | 29441 | 580 | 308 | 8407 | |
| 869 | | | ENG38630.1 | 26214 | 29443 | 580 | 299 | 8398 | |
| 870 | | | END33528.1 | 26216 | 29445 | 580 | 225 | 8324 | |
| 871 | | | ENE04445.1 | 26218 | 29447 | 580 | 299 | 8398 | |
| 872 | | | ENG47568.1 | 26220 | 29449 | 648 | 74 | 8377 | |
| 873 | | | ENG50953.1 | 26222 | 29451 | 580 | 274 | 8373 | |
| 874 | | | ENG56304.1 | 26224 | 29453 | 580 | 275 | 8374 | |
| 875 | | | ENG57263.1 | 26226 | 29455 | 580 | 248 | 8347 | |
| 876 | | | ENH40673.1 | 26228 | 29457 | 580 | 249 | 8348 | |
| 877 | | | ENG66729.1 | 26230 | 29459 | 580 | 341 | 8440 | |
| 878 | | | ENG74276.1 | 26232 | 29461 | 648 | 133 | 8436 | |
| 879 | | | EST67461.1 | 26234 | 29463 | 978 | 52346 | 61596 | |
| 880 | | | EST67375.1 | 26236 | 29465 | 978 | 26084 | 35334 | |
| 881 | | | EIN65415.1 | 26238 | 29467 | 515 | 15190 | 23051 | |
| 882 | | | ELV75968.1 | 26240 | 29469 | 978 | 13903 | 23153 | |
| 883 | | | ELV90963.1 | 26242 | 29471 | 1119 | 4036 | 13709 | |
| 884 | | | EIN69804.1 | 26244 | 29473 | 978 | 13804 | 23054 | |
| 885 | | | EIN85520.1 | 26246 | 29475 | 978 | 13808 | 23058 | |
| 886 | | | ELV76554.1 | 26248 | 29477 | 978 | 22913 | 32163 | |
| 887 | | | ELV98806.1 | 26250 | 29479 | 1119 | 13633 | 23306 | |
| 888 | | | EIN94345.1 | 26252 | 29481 | 982 | 80889 | 90151 | |
| 889 | | | EKH63850.1 | 26254 | 29483 | 978 | 13810 | 23060 | |
| 890 | | | EIN88191.1 | 26256 | 29485 | 978 | 30257 | 39507 | |
| 891 | | | EIN89776.1 | 26258 | 29487 | 978 | 116447 | 125697 | |
| 892 | | | EIO09773.1 | 26260 | 29489 | 978 | 13804 | 23054 | |
| 893 | | | EIN49113.1 | 26262 | 29491 | 978 | 30335 | 39585 | |
| 894 | | | EIO07042.1 | 26264 | 29493 | 978 | 13806 | 23056 | |
| 895 | | | EIO07418.1 | 26266 | 29495 | 978 | 13802 | 23052 | |
| 896 | | | EIO11194.1 | 26268 | 29497 | 978 | 13808 | 23058 | |
| 897 | | | EKH20918.1 | 26270 | 29499 | 978 | 13807 | 23057 | |
| 898 | | | ELW23233.1 | 26272 | 29501 | 978 | 4450 | 13700 | |
| 899 | | | EKI33365.1 | 26274 | 29503 | 1119 | 328 | 10001 | |
| 900 | | | EIO24462.1 | 26276 | 29505 | 233 | 60 | 7075 | |
| 901 | | | EKH71762.1 | 26278 | 29507 | 978 | 13807 | 23057 | |
| 902 | | | EIO49153.1 | 26280 | 29509 | 978 | 13808 | 23058 | |
| 903 | | | EKH87902.1 | 26282 | 29511 | 978 | 13810 | 23060 | |
| 904 | | | ELV91643.1 | 26284 | 29513 | 978 | 30222 | 39472 | |
| 905 | | | ELV93151.1 | 26286 | 29515 | 978 | 6984 | 16234 | |
| 906 | | | EKH83462.1 | 26288 | 29517 | 978 | 13812 | 23062 | |
| 907 | | | EIN52367.1 | 26290 | 29519 | 978 | 13804 | 23054 | |
| 908 | | | EKH07682.1 | 26292 | 29521 | 978 | 369039 | 378289 | |
| 909 | | | ELW12425.1 | 26294 | 29523 | 978 | 13985 | 23235 | |
| 910 | | | EIN68647.1 | 26296 | 29525 | 978 | 13804 | 23054 | |
| 911 | | | ACB20170.1 | 26298 | 29527 | 1119 | 4912969 | 4922642 | |
| 912 | | | ERE14329.1 | 26300 | 29529 | 978 | 82268 | 91518 | |
| 913 | | | ERC65824.1 | 26302 | 29531 | 978 | 80921 | 90171 | |
| 914 | | | ERC74188.1 | 26304 | 29533 | 287 | 14108 | 21285 | |
| 915 | | | ERC92369.1 | 26306 | 29535 | 978 | 4611 | 13861 | |
| 916 | | | EGI28994.1 | 26308 | 29537 | 1119 | 296390 | 306063 | |
| 917 | | | EKH95567.1 | 26310 | 29539 | 978 | 13812 | 23062 | |
| 918 | | | EIO46356.1 | 26312 | 29541 | 978 | 245564 | 254814 | |
| 919 | | | EIO79510.1 | 26314 | 29543 | 978 | 7053 | 16303 | |
| 920 | | | EIO65811.1 | 26316 | 29545 | 978 | 13799 | 23055 | |
| 921 | | | EIO79102.1 | 26318 | 29547 | 982 | 81173 | 90435 | |
| 922 | | | EIO63487.1 | 26320 | 29549 | 978 | 254421 | 263671 | |
| 923 | | | EIO69659.1 | 26322 | 29551 | 978 | 14347 | 23597 | |
| 924 | | | EIP05663.1 | 26324 | 29553 | 978 | 11135 | 20385 | |
| 925 | | | EIP03387.1 | 26326 | 29555 | 375 | 1 | 7442 | |
| 926 | | | ERE42062.1 | 26328 | 29557 | 978 | 80488 | 89738 | |
| 927 | | | ERE45410.1 | 26330 | 29559 | 978 | 80936 | 90186 | |
| 928 | | | KDG81461.1 | 26332 | 29561 | 1096 | 4589703 | 4599350 | |
| 929 | | | KDG84324.1 | 26334 | 29563 | 1096 | 577940 | 587587 | |
| 930 | | | ERB08805.1 | 26336 | 29565 | 1119 | 3410757 | 3420430 | |
| 931 | | | ERB13351.1 | 26338 | 29567 | 1119 | 312752 | 322425 | |
| 932 | | | EQX93206.1 | 26340 | 29569 | 1096 | 1299123 | 1308770 | |
| 933 | | | EQY50265.1 | 26342 | 29571 | 333 | 972500 | 979858 | |
| 934 | | | ERB23700.1 | 26344 | 29573 | 580 | 575397 | 583496 | |
| 935 | | | EQY93866.1 | 26346 | 29575 | 580 | 381918 | 390017 | |
| 936 | | | EQZ08531.1 | 26348 | 29577 | 1096 | 4369199 | 4378846 | |
| 937 | | | EQZ94052.1 | 26350 | 29579 | 1096 | 413548 | 423195 | |
| 938 | | | ERA40554.1 | 26352 | 29581 | 1096 | 440488 | 450135 | |
| 939 | | | CAR16063.1 | 26354 | 29583 | 1112 | 5111725 | 5121420 | |
| 940 | | | AFJ31994.1 | 26356 | 29585 | 1117 | 5251667 | 5261334 | |
| 941 | | | KWW01507.1 | 26358 | 29587 | 1096 | 161157 | 170801 | |
| 942 | | | CAQ90579.1 | 26360 | 29589 | 1112 | 3162768 | 3172460 | |
| 943 | | | EGC09237.1 | 26362 | 29591 | 1096 | 152611 | 162258 | |
| 944 | | | EOW71261.1 | 26364 | 29593 | 894 | 3729077 | 3738118 | |
| 945 | | | AJY69763.1 | 26366 | 29595 | 1141 | 2031423 | 2041104 | |
| 946 | | | EDL62311.1 | 26368 | 29597 | 1176 | 180740 | 190521 | |
| 947 | | | EOD77323.1 | 26370 | 29599 | 1172 | 615 | 10570 | |
| 948 | | | KJS14045.1 | 26372 | 29601 | 1149 | 1372 | 10961 | |
| 949 | | | EAQ32829.1 | 26374 | 29603 | 1113 | 307409 | 317059 | |
| 950 | | | KXS34468.1 | 26376 | 29605 | 1113 | 44606 | 54256 | |
| 951 | | | CDG80808.1 | 26378 | 29607 | 1090 | 170928 | 180527 | |
| 952 | | | KMK41964.1 | 26380 | 29609 | 1095 | 35196 | 44816 | |
| 953 | | | KMV95473.1 | 26382 | 29611 | 1117 | 1146551 | 1156230 | |
| 954 | | | EYT05882.1 | 26384 | 29613 | 1117 | 319260 | 328939 | |
| 955 | | | KGK50932.1 | 26386 | 29615 | 1095 | 410829 | 420449 | |
| 956 | | | KHE28070.1 | 26388 | 29617 | 1099 | 5171646 | 5181278 | |
| 957 | | | KHF57367.1 | 26390 | 29619 | 1095 | 316218 | 325838 | |
| 958 | | | KHQ22240.1 | 26392 | 29621 | 1095 | 2386538 | 2396158 | |
| 959 | | | KLZ78428.1 | 26394 | 29623 | 1095 | 5093831 | 5103451 | |
| 960 | | | KMB09548.1 | 26396 | 29625 | 1095 | 318671 | 328291 | |
| 961 | | | KMG65748.1 | 26398 | 29627 | 1117 | 5116317 | 5125996 | |
| 962 | | | KMG69377.1 | 26400 | 29629 | 1095 | 565524 | 575144 | |
| 963 | | | KMH23799.1 | 26402 | 29631 | 1095 | 5137914 | 5147534 | |
| 964 | | | KMH84529.1 | 26404 | 29633 | 1095 | 1291264 | 1300884 | |
| 965 | | | KMX40525.1 | 26406 | 29635 | 1095 | 315214 | 324834 | |
| 966 | | | ALH86087.1 | 26408 | 29637 | 1095 | 3020287 | 3029907 | |
| 967 | | | KRR31028.1 | 26410 | 29639 | 978 | 49625 | 58887 | |
| 968 | | | ALQ84489.1 | 26412 | 29641 | 1095 | 2158397 | 2168017 | |
| 969 | | | ALQ89984.1 | 26414 | 29643 | 1095 | 2150002 | 2159622 | |
| 970 | | | KSX16170.1 | 26416 | 29645 | 1095 | 8524 | 18144 | |
| 971 | | | KSX18602.1 | 26418 | 29647 | 1095 | 8564 | 18184 | |
| 972 | | | KSX52403.1 | 26420 | 29649 | 1095 | 137974 | 147594 | |
| 973 | | | ALP76745.1 | 26422 | 29651 | 1095 | 840774 | 850394 | |
| 974 | | | KSZ32506.1 | 26424 | 29653 | 1095 | 26187 | 35807 | |
| 975 | | | KUF65063.1 | 26426 | 29655 | 1008 | 109 | 9468 | |
| 976 | | | KUG47426.1 | 26428 | 29657 | 1095 | 20414 | 30034 | |
| 977 | | | KXO23871.1 | 26430 | 29659 | 1095 | 14263 | 23883 | |
| 978 | | | KYM26277.1 | 26432 | 29661 | 1095 | 41531 | 51151 | |
| 979 | | | ERN57702.1 | 26434 | 29663 | 983 | 10160 | 19444 | |
| 980 | | | EWE85119.1 | 26436 | 29665 | 1095 | 328445 | 338065 | |
| 981 | | | ESL33174.1 | 26438 | 29667 | 1095 | 5034330 | 5043950 | |
| 982 | | | KDK59887.1 | 26440 | 29669 | 1095 | 315804 | 325424 | |
| 983 | | | CDK69437.1 | 26442 | 29671 | 1096 | 45317 | 54964 | |
| 984 | | | EMH91691.1 | 26444 | 29673 | 1095 | 9198 | 18818 | |
| 985 | | | EOZ63296.1 | 26446 | 29675 | 1095 | 5980 | 15600 | |
| 986 | | | EOY67007.1 | 26448 | 29677 | 1095 | 5980 | 15600 | |
| 987 | | | ESN46752.1 | 26450 | 29679 | 1117 | 360085 | 369764 | |
| 988 | | | EWF66267.1 | 26452 | 29681 | 1095 | 4867354 | 4876974 | |
| 989 | | | ESM58758.1 | 26454 | 29683 | 286 | 1837389 | 1844582 | |
| 990 | | | KDL89511.1 | 26456 | 29685 | 1117 | 324473 | 334152 | |
| 991 | | | AIX83031.1 | 26458 | 29687 | 1095 | 1046321 | 1055941 | |
| 992 | | | AIG86150.1 | 26460 | 29689 | 983 | 2966500 | 2975784 | |
| 993 | | | EKB81086.1 | 26462 | 29691 | 1095 | 363340 | 372960 | |
| 994 | | | ESM10102.1 | 26464 | 29693 | 1095 | 362779 | 372399 | |
| 995 | | | EPO98435.1 | 26466 | 29695 | 1095 | 8713 | 18333 | |
| 996 | | | EPA89974.1 | 26468 | 29697 | 1095 | 25993 | 35613 | |
| 997 | | | EJI89218.1 | 26470 | 29699 | 997 | 541259 | 550532 | |
| 998 | | | KDE37041.1 | 26472 | 29701 | 1095 | 322666 | 332267 | |
| 999 | | | CAH16733.1 | 26474 | 29703 | 1130 | 2836365 | 2846089 | |
| 1000 | | | KTD65147.1 | 26476 | 29705 | 1129 | 286299 | 296026 | |
| 1001 | | | ETX11656.1 | 26478 | 29707 | 1143 | 71478 | 81199 | |
| 1002 | | | ESY80721.1 | 26480 | 29709 | 1033 | 45837 | 54964 | |
| 1003 | | | ESY66318.1 | 26482 | 29711 | 1047 | 196269 | 205519 | |
| 1004 | | | ESY44730.1 | 26484 | 29713 | 1088 | 453521 | 462897 | |
| 1005 | | | KQU80075.1 | 26486 | 29715 | 1774 | 218186 | 229640 | |
| 1006 | | | EMS40058.1 | 26488 | 29717 | 1141 | 3688 | 13384 | |
| 1007 | | | EMS40204.1 | 26490 | 29719 | 1141 | 172603 | 182299 | |
| 1008 | | | KQQ15549.1 | 26492 | 29721 | 1141 | 42064 | 51757 | |
| 1009 | | | KQO59080.1 | 26494 | 29723 | 1161 | 65935 | 75509 | |
| 1010 | | | KQO90880.1 | 26496 | 29725 | 1161 | 25635 | 35221 | |
| 1011 | | | EFV81024.1 | 26498 | 29727 | 1115 | 1071595 | 1080026 | |
| 1012 | | | EHJ60590.1 | 26500 | 29729 | 1099 | 90561 | 99810 | |
| 1013 | | | AIT79633.1 | 26502 | 29731 | 1099 | 1555853 | 1565102 | |
| 1014 | | | CCA92391.1 | 26504 | 29733 | 1099 | 1584078 | 1593321 | |
| 1015 | | | KTS15499.1 | 26506 | 29735 | 978 | 42898 | 52160 | |
| 1016 | | | KTS86095.1 | 26508 | 29737 | 978 | 116960 | 126222 | |
| 1017 | | | EFM21231.1 | 26510 | 29739 | 1117 | 215561 | 225243 | |
| 1018 | | | KGA41247.1 | 26512 | 29741 | 1098 | 133311 | 142924 | |
| 1019 | | | ACX87466.1 | 26514 | 29743 | 1097 | 1819036 | 1828646 | |
| 1020 | | | EAU47587.1 | 26516 | 29745 | 964 | 2465108 | 2474018 | |
| 1021 | | | EAS45762.1 | 26518 | 29747 | 1124 | 716356 | 725945 | |
| 1022 | | | KJM66694.1 | 26520 | 29749 | 1104 | 103727 | 113355 | |
| 1023 | | | KMK11834.1 | 26522 | 29751 | 1104 | 56209 | 65837 | |
| 1024 | | | KMK24778.1 | 26524 | 29753 | 1104 | 35136 | 44764 | |
| 1025 | | | KXU56725.1 | 26526 | 29755 | 1044 | 4561 | 13774 | |
| 1026 | | | EGW47199.1 | 26528 | 29757 | 292 | 245464 | 254742 | |
| 1027 | | | KSX98965.1 | 26530 | 29759 | 1012 | 140775 | 150099 | |
| 1028 | | | KTF11892.1 | 26532 | 29761 | 1090 | 229654 | 239236 | |
| 1029 | | | KGB84629.1 | 26534 | 29763 | 1099 | 215 | 9832 | |
| 1030 | | | KHE32030.1 | 26536 | 29765 | 1019 | 23646 | 32926 | |
| 1031 | | | KQJ75583.1 | 26538 | 29767 | 1111 | 16183 | 25846 | |
| 1032 | | | KRV15978.1 | 26540 | 29769 | 1036 | 3295 | 12626 | |
| 1033 | | | KSD09759.1 | 26542 | 29771 | 1109 | 5385 | 15042 | |
| 1034 | | | KSD19547.1 | 26544 | 29773 | 1036 | 60524 | 69855 | |
| 1035 | | | KSG03395.1 | 26546 | 29775 | 1036 | 438855 | 448186 | |
| 1036 | | | KSG67482.1 | 26548 | 29777 | 1111 | 15322 | 24985 | |
| 1037 | | | KSE90722.1 | 26550 | 29779 | 1036 | 21419 | 30732 | |
| 1038 | | | KSF67272.1 | 26552 | 29781 | 1111 | 15322 | 24985 | |
| 1039 | | | KSG19247.1 | 26554 | 29783 | 1036 | 1688 | 11019 | |
| 1040 | | | KSG75426.1 | 26556 | 29785 | 1036 | 22047 | 31378 | |
| 1041 | | | KSG85748.1 | 26558 | 29787 | 1036 | 21450 | 30781 | |
| 1042 | | | KSH39447.1 | 26560 | 29789 | 1036 | 194095 | 203426 | |
| 1043 | | | KSH60514.1 | 26562 | 29791 | 1036 | 22047 | 31378 | |
| 1044 | | | KSI22085.1 | 26564 | 29793 | 1036 | 22046 | 31377 | |
| 1045 | | | KSI51646.1 | 26566 | 29795 | 1109 | 518066 | 527723 | |
| 1046 | | | KSI82064.1 | 26568 | 29797 | 1111 | 199155 | 208818 | |
| 1047 | | | KSI99556.1 | 26570 | 29799 | 1036 | 449321 | 458652 | |
| 1048 | | | KSJ34445.1 | 26572 | 29801 | 1111 | 21403 | 31066 | |
| 1049 | | | KSK63576.1 | 26574 | 29803 | 1109 | 573017 | 582674 | |
| 1050 | | | KSL54235.1 | 26576 | 29805 | 1036 | 24722 | 34053 | |
| 1051 | | | KSM73158.1 | 26578 | 29807 | 1111 | 23541 | 33204 | |
| 1052 | | | KSM79531.1 | 26580 | 29809 | 1036 | 22039 | 31370 | |
| 1053 | | | KSN72845.1 | 26582 | 29811 | 1036 | 24722 | 34053 | |
| 1054 | | | KSO70094.1 | 26584 | 29813 | 1036 | 8292 | 17605 | |
| 1055 | | | KSQ54942.1 | 26586 | 29815 | 1036 | 31335 | 40666 | |
| 1056 | | | KSQ13844.1 | 26588 | 29817 | 1036 | 443745 | 453076 | |
| 1057 | | | KSK33231.1 | 26590 | 29819 | 1036 | 61118 | 70449 | |
| 1058 | | | KSL81229.1 | 26592 | 29821 | 1036 | 194095 | 203426 | |
| 1059 | | | KSL64952.1 | 26594 | 29823 | 1036 | 22039 | 31370 | |
| 1060 | | | KSM29109.1 | 26596 | 29825 | 1111 | 42134 | 51797 | |
| 1061 | | | KSN07703.1 | 26598 | 29827 | 1111 | 378604 | 388267 | |
| 1062 | | | KSN22463.1 | 26600 | 29829 | 1111 | 16138 | 25801 | |
| 1063 | | | KSN45780.1 | 26602 | 29831 | 1036 | 438815 | 448146 | |
| 1064 | | | KSO16560.1 | 26604 | 29833 | 1111 | 15322 | 24985 | |
| 1065 | | | KSO84936.1 | 26606 | 29835 | 1036 | 605 | 9936 | |
| 1066 | | | KSO99159.1 | 26608 | 29837 | 1111 | 23415 | 33078 | |
| 1067 | | | KSQ29951.1 | 26610 | 29839 | 1036 | 438855 | 448186 | |
| 1068 | | | KSR12022.1 | 26612 | 29841 | 1036 | 3385 | 12716 | |
| 1069 | | | KSR96744.1 | 26614 | 29843 | 1036 | 518449 | 527756 | |
| 1070 | | | KSS25556.1 | 26616 | 29845 | 1028 | 203854 | 213146 | |
| 1071 | | | KSS39722.1 | 26618 | 29847 | 1099 | 12270 | 21887 | |
| 1072 | | | KSR72710.1 | 26620 | 29849 | 1036 | 194095 | 203426 | |
| 1073 | | | KSS45915.1 | 26622 | 29851 | 1109 | 472018 | 481675 | |
| 1074 | | | ALY37666.1 | 26624 | 29853 | 1111 | 4647649 | 4657312 | |
| 1075 | | | ALY62762.1 | 26626 | 29855 | 1111 | 5985465 | 5995128 | |
| 1076 | | | KXC98082.1 | 26628 | 29857 | 1036 | 73491 | 82822 | |
| 1077 | | | KXC86337.1 | 26630 | 29859 | 1036 | 478140 | 487471 | |
| 1078 | | | KXD25984.1 | 26632 | 29861 | 1036 | 24577 | 33908 | |
| 1079 | | | KXD09025.1 | 26634 | 29863 | 1036 | 84962 | 94293 | |
| 1080 | | | KXD14448.1 | 26636 | 29865 | 1036 | 47987 | 57318 | |
| 1081 | | | KXD23305.1 | 26638 | 29867 | 1036 | 24766 | 34097 | |
| 1082 | | | KXC87753.1 | 26640 | 29869 | 1036 | 84679 | 94010 | |
| 1083 | | | KXF38232.1 | 26642 | 29871 | 1036 | 73251 | 82582 | |
| 1084 | | | KXF47447.1 | 26644 | 29873 | 1036 | 84960 | 94291 | |
| 1085 | | | KXF43394.1 | 26646 | 29875 | 1036 | 84964 | 94295 | |
| 1086 | | | KYO95527.1 | 26648 | 29877 | 1111 | 13894 | 23557 | |
| 1087 | | | KAJ18078.1 | 26650 | 29879 | 970 | 68033 | 77166 | |
| 1088 | | | ERY57592.1 | 26652 | 29881 | 1115 | 1472487 | 1482055 | |
| 1089 | | | ERY65606.1 | 26654 | 29883 | 1115 | 3001215 | 3010783 | |
| 1090 | | | ERV59834.1 | 26656 | 29885 | 1115 | 3014713 | 3024281 | |
| 1091 | | | ERY33375.1 | 26658 | 29887 | 1115 | 276729 | 286297 | |
| 1092 | | | ERY37452.1 | 26660 | 29889 | 1115 | 303965 | 313533 | |
| 1093 | | | ERY30830.1 | 26662 | 29891 | 1115 | 323839 | 333407 | |
| 1094 | | | ERW68207.1 | 26664 | 29893 | 1115 | 321053 | 330621 | |
| 1095 | | | ERW13881.1 | 26666 | 29895 | 1115 | 438293 | 447861 | |
| 1096 | | | ERV79733.1 | 26668 | 29897 | 1115 | 316993 | 326561 | |
| 1097 | | | ETV52348.1 | 26670 | 29899 | 1115 | 387845 | 395610 | |
| 1098 | | | ERU88469.1 | 26672 | 29901 | 1115 | 308446 | 318014 | |
| 1099 | | | ERU86604.1 | 26674 | 29903 | 1115 | 308446 | 318014 | |
| 1100 | | | KEA15334.1 | 26676 | 29905 | 1140 | 772974 | 782617 | |
| 1101 | | | ERZ32987.1 | 26678 | 29907 | 1115 | 332366 | 341934 | |
| 1102 | | | GAA19669.1 | 26680 | 29909 | 970 | 5052470 | 5061603 | |
| 1103 | | | EME92222.1 | 26682 | 29911 | 1111 | 15085 | 24748 | |
| 1104 | | | EYU00120.1 | 26684 | 29913 | 1111 | 198162 | 207825 | |
| 1105 | | | EOT13872.1 | 26686 | 29915 | 1028 | 4956028 | 4965320 | |
| 1106 | | | ETU84933.1 | 26688 | 29917 | 1115 | 527654 | 537213 | |
| 1107 | | | ERX16724.1 | 26690 | 29919 | 1115 | 629489 | 639057 | |
| 1108 | | | EWH25348.1 | 26692 | 29921 | 1140 | 1491323 | 1500966 | |
| 1109 | | | GAD64770.1 | 26694 | 29923 | 1115 | 16216 | 25769 | |
| 1110 | | | GAD61322.1 | 26696 | 29925 | 1116 | 202461 | 212017 | |
| 1111 | | | EZQ18205.1 | 26698 | 29927 | 1099 | 419637 | 429263 | |
| 1112 | | | AMO73921.1 | 26700 | 29929 | 1111 | 445996 | 455662 | |
| 1113 | | | KPW38787.1 | 26702 | 29931 | 1158 | 36556 | 46279 | |
| 1114 | | | KQB53692.1 | 26704 | 29933 | 1111 | 1406 | 11069 | |
| 1115 | | | EZI30290.1 | 26706 | 29935 | 1099 | 22889 | 32461 | |
| 1116 | | | KIR22317.1 | 26708 | 29937 | 1099 | 33962 | 43528 | |
| 1117 | | | KJH86852.1 | 26710 | 29939 | 1029 | 114387 | 123676 | |
| 1118 | | | KWV84208.1 | 26712 | 29941 | 1029 | 9497 | 18786 | |
| 1119 | | | EFQ63351.1 | 26714 | 29943 | 634 | 3228353 | 3236566 | |
| 1120 | | | KMM97952.1 | 26716 | 29945 | 1111 | 145121 | 154784 | |
| 1121 | | | ENY78085.1 | 26718 | 29947 | 1043 | 45721 | 55116 | |
| 1122 | | | ENA27916.1 | 26720 | 29949 | 1116 | 122129 | 131384 | |
| 1123 | | | EWC41654.1 | 26722 | 29951 | 1140 | 1199767 | 1208507 | |
| 1124 | | | EMD98965.1 | 26724 | 29953 | 1027 | 61976 | 71271 | |
| 1125 | | | KPB88881.1 | 26726 | 29955 | 794 | 33409 | 40166 | |
| 1126 | | | KFD13680.1 | 26728 | 29957 | 1099 | 44083 | 53715 | |
| 1127 | | | ACE91185.1 | 26730 | 29959 | 1074 | 2221342 | 2230688 | |
| 1128 | | | KKZ86595.1 | 26732 | 29961 | 1140 | 262183 | 271712 | |
| 1129 | | | KQU05107.1 | 26734 | 29963 | 1079 | 513 | 9877 | |
| 1130 | | | CCF21880.1 | 26736 | 29965 | 911 | 4095719 | 4104474 | |
| 1131 | | | KQZ63425.1 | 26738 | 29967 | 1079 | 733975 | 743234 | |
| 1132 | | | KIV64826.1 | 26740 | 29969 | 1133 | 375717 | 385216 | |
| 1133 | | | KQB14223.1 | 26742 | 29971 | 1033 | 23685 | 32821 | |
| 1134 | | | KQB14198.1 | 26744 | 29973 | 1033 | 23685 | 32821 | |
| 1135 | | | ETX15682.1 | 26746 | 29975 | 1055 | 1000 | 10241 | |
| 1136 | | | KJS41397.1 | 26748 | 29977 | 1042 | 38507 | 47619 | |
| 1137 | | | EPX84388.1 | 26750 | 29979 | 547 | 176357 | 182232 | |
| 1138 | | | GAS73921.1 | 26752 | 29981 | 1099 | 341435 | 351068 | |
| 1139 | | | GAS79507.1 | 26754 | 29983 | 1099 | 214261 | 223894 | |
| 1140 | | | KHP17886.1 | 26756 | 29985 | 1099 | 348692 | 358324 | |
| 1141 | | | KHP06993.1 | 26758 | 29987 | 1099 | 389798 | 399430 | |
| 1142 | | | ESJ40085.1 | 26760 | 29989 | 1099 | 28 | 9660 | |
| 1143 | | | KNB22032.1 | 26762 | 29991 | 1099 | 41580 | 51212 | |
| 1144 | | | AJD94188.1 | 26764 | 29993 | 1099 | 505155 | 514787 | |
| 1145 | | | AJD98580.1 | 26766 | 29995 | 1099 | 968609 | 978241 | |
| 1146 | | | CEA95106.1 | 26768 | 29997 | 1099 | 1741830 | 1751462 | |
| 1147 | | | CEB50849.1 | 26770 | 29999 | 1099 | 1749103 | 1758735 | |
| 1148 | | | CDU93373.1 | 26772 | 30001 | 1099 | 743440 | 753072 | |
| 1149 | | | CEB74778.1 | 26774 | 30003 | 1099 | 3835521 | 3845153 | |
| 1150 | | | CED02081.1 | 26776 | 30005 | 1099 | 1754122 | 1763754 | |
| 1151 | | | CEC70259.1 | 26778 | 30007 | 1099 | 1753225 | 1762857 | |
| 1152 | | | CDZ07209.1 | 26780 | 30009 | 1099 | 1754686 | 1764318 | |
| 1153 | | | CED89042.1 | 26782 | 30011 | 1099 | 3619879 | 3629511 | |
| 1154 | | | CDV50415.1 | 26784 | 30013 | 1099 | 1753988 | 1763620 | |
| 1155 | | | CFW88484.1 | 26786 | 30015 | 1099 | 309528 | 319160 | |
| 1156 | | | CDZ03620.1 | 26788 | 30017 | 1099 | 2401412 | 2411044 | |
| 1157 | | | CEC95430.1 | 26790 | 30019 | 1099 | 343828 | 353460 | |
| 1158 | | | CDV33413.1 | 26792 | 30021 | 1099 | 1855125 | 1864757 | |
| 1159 | | | CEB60512.1 | 26794 | 30023 | 1099 | 3889568 | 3899200 | |
| 1160 | | | CEC11573.1 | 26796 | 30025 | 1099 | 2654142 | 2663774 | |
| 1161 | | | CEA33006.1 | 26798 | 30027 | 1099 | 607822 | 617454 | |
| 1162 | | | CDV54742.1 | 26800 | 30029 | 1099 | 1754224 | 1763856 | |
| 1163 | | | CEA34475.1 | 26802 | 30031 | 1099 | 2091180 | 2100812 | |
| 1164 | | | CED50261.1 | 26804 | 30033 | 1099 | 676459 | 686091 | |
| 1165 | | | CEC06550.1 | 26806 | 30035 | 1099 | 309528 | 319160 | |
| 1166 | | | CDY81480.1 | 26808 | 30037 | 1099 | 310058 | 319690 | |
| 1167 | | | CEC66464.1 | 26810 | 30039 | 1099 | 3761780 | 3771412 | |
| 1168 | | | CDU75282.1 | 26812 | 30041 | 1099 | 309308 | 318940 | |
| 1169 | | | CDV02408.1 | 26814 | 30043 | 1099 | 642213 | 651845 | |
| 1170 | | | CDU44895.1 | 26816 | 30045 | 1099 | 343655 | 353287 | |
| 1171 | | | CEA82133.1 | 26818 | 30047 | 1099 | 1789537 | 1799169 | |
| 1172 | | | CDV48178.1 | 26820 | 30049 | 1099 | 3855153 | 3864785 | |
| 1173 | | | CEA48951.1 | 26822 | 30051 | 1099 | 344237 | 353869 | |
| 1174 | | | CDU62795.1 | 26824 | 30053 | 1099 | 1785128 | 1794760 | |
| 1175 | | | CDV82107.1 | 26826 | 30055 | 1099 | 2344699 | 2354331 | |
| 1176 | | | CEC15878.1 | 26828 | 30057 | 1099 | 607549 | 617181 | |
| 1177 | | | CEB34163.1 | 26830 | 30059 | 1099 | 1754745 | 1764377 | |
| 1178 | | | CEC22818.1 | 26832 | 30061 | 1099 | 1753415 | 1763047 | |
| 1179 | | | CEC29447.1 | 26834 | 30063 | 1099 | 1962606 | 1972238 | |
| 1180 | | | CEC81193.1 | 26836 | 30065 | 1099 | 1752823 | 1762455 | |
| 1181 | | | CEC27085.1 | 26838 | 30067 | 1099 | 643261 | 652893 | |
| 1182 | | | CDV36505.1 | 26840 | 30069 | 1099 | 3830845 | 3840477 | |
| 1183 | | | CDV99881.1 | 26842 | 30071 | 1099 | 1788948 | 1798580 | |
| 1184 | | | CEB21254.1 | 26844 | 30073 | 1099 | 1785448 | 1795080 | |
| 1185 | | | CED29540.1 | 26846 | 30075 | 1099 | 2414784 | 2424416 | |
| 1186 | | | CEA65654.1 | 26848 | 30077 | 1099 | 2411587 | 2421219 | |
| 1187 | | | CDV77398.1 | 26850 | 30079 | 1099 | 1754018 | 1763650 | |
| 1188 | | | CEB99329.1 | 26852 | 30081 | 1099 | 666458 | 676090 | |
| 1189 | | | CEC87093.1 | 26854 | 30083 | 1099 | 102895 | 112527 | |
| 1190 | | | CEC03343.1 | 26856 | 30085 | 1099 | 2038905 | 2048537 | |
| 1191 | | | CDW68452.1 | 26858 | 30087 | 1099 | 1754895 | 1764527 | |
| 1192 | | | CEB36542.1 | 26860 | 30089 | 1099 | 1505242 | 1514874 | |
| 1193 | | | CEB92481.1 | 26862 | 30091 | 1099 | 1754998 | 1764630 | |
| 1194 | | | CEC70640.1 | 26864 | 30093 | 1099 | 2655621 | 2665253 | |
| 1195 | | | CED19421.1 | 26866 | 30095 | 1099 | 309298 | 318930 | |
| 1196 | | | CDU57399.1 | 26868 | 30097 | 1099 | 1744361 | 1753993 | |
| 1197 | | | CEC55612.1 | 26870 | 30099 | 1099 | 3432850 | 3442482 | |
| 1198 | | | CDW10772.1 | 26872 | 30101 | 1099 | 1775102 | 1784734 | |
| 1199 | | | CED40437.1 | 26874 | 30103 | 1099 | 309601 | 319233 | |
| 1200 | | | CEA77531.1 | 26876 | 30105 | 1099 | 344224 | 353856 | |
| 1201 | | | CEC78581.1 | 26878 | 30107 | 1099 | 1754570 | 1764202 | |
| 1202 | | | CDV87320.1 | 26880 | 30109 | 1099 | 1754358 | 1763990 | |
| 1203 | | | CEA60264.1 | 26882 | 30111 | 1099 | 2553269 | 2562901 | |
| 1204 | | | CDU45979.1 | 26884 | 30113 | 1099 | 1753121 | 1762753 | |
| 1205 | | | CED26178.1 | 26886 | 30115 | 1099 | 1854653 | 1864285 | |
| 1206 | | | CEA55546.1 | 26888 | 30117 | 1099 | 1754980 | 1764612 | |
| 1207 | | | CDU57361.1 | 26890 | 30119 | 1099 | 1753795 | 1763427 | |
| 1208 | | | CEC22628.1 | 26892 | 30121 | 1099 | 309060 | 318692 | |
| 1209 | | | CDU81244.1 | 26894 | 30123 | 1099 | 2357174 | 2366806 | |
| 1210 | | | CEC22208.1 | 26896 | 30125 | 1099 | 1746204 | 1755836 | |
| 1211 | | | CDV00141.1 | 26898 | 30127 | 1099 | 1753396 | 1763028 | |
| 1212 | | | CDV32910.1 | 26900 | 30129 | 1099 | 309248 | 318880 | |
| 1213 | | | CEB32348.1 | 26902 | 30131 | 1099 | 1787540 | 1797172 | |
| 1214 | | | CDU66161.1 | 26904 | 30133 | 1099 | 134848 | 144480 | |
| 1215 | | | CEB23433.1 | 26906 | 30135 | 1099 | 1754743 | 1764375 | |
| 1216 | | | CEA69989.1 | 26908 | 30137 | 1099 | 1788795 | 1798427 | |
| 1217 | | | CED34531.1 | 26910 | 30139 | 1099 | 1762471 | 1772103 | |
| 1218 | | | CDU60158.1 | 26912 | 30141 | 1099 | 1772870 | 1782502 | |
| 1219 | | | CEB02153.1 | 26914 | 30143 | 1099 | 1505400 | 1515032 | |
| 1220 | | | CDV16495.1 | 26916 | 30145 | 1099 | 1753390 | 1763022 | |
| 1221 | | | CEA70649.1 | 26918 | 30147 | 1099 | 309354 | 318986 | |
| 1222 | | | CEB86473.1 | 26920 | 30149 | 1099 | 3281543 | 3291175 | |
| 1223 | | | CDV63744.1 | 26922 | 30151 | 1099 | 1753068 | 1762700 | |
| 1224 | | | CEB22320.1 | 26924 | 30153 | 1099 | 1298956 | 1308588 | |
| 1225 | | | CDY85019.1 | 26926 | 30155 | 1099 | 633632 | 643264 | |
| 1226 | | | CDY91993.1 | 26928 | 30157 | 1099 | 2414151 | 2423783 | |
| 1227 | | | CDV63674.1 | 26930 | 30159 | 1099 | 601562 | 611194 | |
| 1228 | | | CDV76963.1 | 26932 | 30161 | 1099 | 1298539 | 1308171 | |
| 1229 | | | CDV25168.1 | 26934 | 30163 | 1099 | 77424 | 87056 | |
| 1230 | | | CEA29073.1 | 26936 | 30165 | 1099 | 3746810 | 3756442 | |
| 1231 | | | CEC16657.1 | 26938 | 30167 | 1099 | 1743338 | 1752970 | |
| 1232 | | | CDV58583.1 | 26940 | 30169 | 1099 | 1753914 | 1763546 | |
| 1233 | | | CDV98720.1 | 26942 | 30171 | 1099 | 601239 | 610871 | |
| 1234 | | | CED02856.1 | 26944 | 30173 | 1099 | 2381174 | 2390806 | |
| 1235 | | | CDU96713.1 | 26946 | 30175 | 1099 | 642929 | 652561 | |
| 1236 | | | CEB76242.1 | 26948 | 30177 | 1099 | 3766799 | 3776431 | |
| 1237 | | | CEC37126.1 | 26950 | 30179 | 1099 | 597747 | 607379 | |
| 1238 | | | CDU99405.1 | 26952 | 30181 | 1099 | 1754390 | 1764022 | |
| 1239 | | | CEB54820.1 | 26954 | 30183 | 1099 | 1847245 | 1856877 | |
| 1240 | | | CEC86157.1 | 26956 | 30185 | 1099 | 165417 | 175049 | |
| 1241 | | | CDV41201.1 | 26958 | 30187 | 1099 | 608177 | 617809 | |
| 1242 | | | CDV19348.1 | 26960 | 30189 | 1099 | 608193 | 617825 | |
| 1243 | | | CEA51462.1 | 26962 | 30191 | 1099 | 1785262 | 1794894 | |
| 1244 | | | CEA31323.1 | 26964 | 30193 | 1099 | 669961 | 679593 | |
| 1245 | | | CEC70731.1 | 26966 | 30195 | 1099 | 1753358 | 1762990 | |
| 1246 | | | CEB55411.1 | 26968 | 30197 | 1099 | 1749599 | 1759231 | |
| 1247 | | | CED14443.1 | 26970 | 30199 | 1099 | 1754022 | 1763654 | |
| 1248 | | | CED18826.1 | 26972 | 30201 | 1099 | 607130 | 616762 | |
| 1249 | | | CEB11072.1 | 26974 | 30203 | 1099 | 1753867 | 1763499 | |
| 1250 | | | CEA27402.1 | 26976 | 30205 | 1099 | 3814476 | 3824108 | |
| 1251 | | | CED08653.1 | 26978 | 30207 | 1099 | 668385 | 678017 | |
| 1252 | | | CEB93599.1 | 26980 | 30209 | 1099 | 2227341 | 2236973 | |
| 1253 | | | CDY97807.1 | 26982 | 30211 | 1099 | 706460 | 716092 | |
| 1254 | | | CEA81540.1 | 26984 | 30213 | 1099 | 309301 | 318933 | |
| 1255 | | | CEA95806.1 | 26986 | 30215 | 1099 | 309463 | 319095 | |
| 1256 | | | CED39170.1 | 26988 | 30217 | 1099 | 2443048 | 2452680 | |
| 1257 | | | CEC46310.1 | 26990 | 30219 | 1099 | 3244245 | 3253877 | |
| 1258 | | | CEB93178.1 | 26992 | 30221 | 1099 | 517816 | 527448 | |
| 1259 | | | CEB06236.1 | 26994 | 30223 | 1099 | 2332565 | 2342197 | |
| 1260 | | | CEC59901.1 | 26996 | 30225 | 1099 | 1788361 | 1797993 | |
| 1261 | | | CDW11872.1 | 26998 | 30227 | 1099 | 1789272 | 1798904 | |
| 1262 | | | CEB87182.1 | 27000 | 30229 | 1099 | 1777428 | 1787060 | |
| 1263 | | | CDU53208.1 | 27002 | 30231 | 1099 | 503202 | 512834 | |
| 1264 | | | CEB57391.1 | 27004 | 30233 | 1099 | 676605 | 686237 | |
| 1265 | | | CED48958.1 | 27006 | 30235 | 1099 | 3782745 | 3792377 | |
| 1266 | | | CDW00039.1 | 27008 | 30237 | 1099 | 1754437 | 1764069 | |
| 1267 | | | CDV01787.1 | 27010 | 30239 | 1099 | 1788427 | 1798059 | |
| 1268 | | | CEA40519.1 | 27012 | 30241 | 1099 | 1783442 | 1793074 | |
| 1269 | | | CEB13673.1 | 27014 | 30243 | 1099 | 1753084 | 1762716 | |
| 1270 | | | CEA18908.1 | 27016 | 30245 | 1099 | 1854428 | 1864060 | |
| 1271 | | | CDY92812.1 | 27018 | 30247 | 1099 | 1752529 | 1762161 | |
| 1272 | | | CEA88154.1 | 27020 | 30249 | 1099 | 1506435 | 1516067 | |
| 1273 | | | AKO82198.1 | 27022 | 30251 | 1099 | 4482333 | 4491965 | |
| 1274 | | | CAR62301.1 | 27024 | 30253 | 1099 | 4477563 | 4487195 | |
| 1275 | | | ESF93195.1 | 27026 | 30255 | 1099 | 11502 | 21134 | |
| 1276 | | | AAV80043.1 | 27028 | 30257 | 1099 | 4482333 | 4491965 | |
| 1277 | | | EPE40531.1 | 27030 | 30259 | 1099 | 85913 | 95545 | |
| 1278 | | | EPE40313.1 | 27032 | 30261 | 1099 | 85780 | 95412 | |
| 1279 | | | EPE40095.1 | 27034 | 30263 | 1099 | 85905 | 95537 | |
| 1280 | | | KSB43364.1 | 27036 | 30265 | 1099 | 156994 | 166626 | |
| 1281 | | | ELX27349.1 | 27038 | 30267 | 1099 | 65113 | 74745 | |
| 1282 | | | EHC78170.1 | 27040 | 30269 | 77 | 221 | 6787 | |
| 1283 | | | ESF47593.1 | 27042 | 30271 | 1099 | 172275 | 181907 | |
| 1284 | | | CUS01662.1 | 27044 | 30273 | 1099 | 4951384 | 4961016 | |
| 1285 | | | CUS00367.1 | 27046 | 30275 | 944 | 4759655 | 4768822 | |
| 1286 | | | CUS00368.1 | 27048 | 30277 | 944 | 4851124 | 4860291 | |
| 1287 | | | CUS00366.1 | 27050 | 30279 | 1099 | 5018293 | 5027925 | |
| 1288 | | | CBY96200.1 | 27052 | 30281 | 944 | 85 | 9252 | |
| 1289 | | | EDZ29008.1 | 27054 | 30283 | 285 | 63002 | 70192 | |
| 1290 | | | KNM15296.1 | 27056 | 30285 | 1099 | 282369 | 292001 | |
| 1291 | | | KNM69141.1 | 27058 | 30287 | 1099 | 343834 | 353466 | |
| 1292 | | | KNO58855.1 | 27060 | 30289 | 1099 | 206734 | 216366 | |
| 1293 | | | KNW78916.1 | 27062 | 30291 | 1099 | 1907 | 11539 | |
| 1294 | | | KTZ77424.1 | 27064 | 30293 | 1099 | 96532 | 106164 | |
| 1295 | | | KUC23740.1 | 27066 | 30295 | 1099 | 171297 | 180929 | |
| 1296 | | | ESF03067.1 | 27068 | 30297 | 1099 | 120111 | 129743 | |
| 1297 | | | KMJ09050.1 | 27070 | 30299 | 1099 | 529831 | 539463 | |
| 1298 | | | CVG51486.1 | 27072 | 30301 | 1099 | 238999 | 248631 | |
| 1299 | | | CVB32240.1 | 27074 | 30303 | 1099 | 239061 | 248693 | |
| 1300 | | | EZQ69786.1 | 27076 | 30305 | 1099 | 90156 | 99788 | |
| 1301 | | | EFE97639.1 | 27078 | 30307 | 482 | 743953 | 751819 | |
| 1302 | | | KFK98827.1 | 27080 | 30309 | 1095 | 286734 | 296378 | |
| 1303 | | | KFK92330.1 | 27082 | 30311 | 1095 | 1654 | 11298 | |
| 1304 | | | ABK48268.1 | 27084 | 30313 | 1180 | 2437310 | 2447236 | |
| 1305 | | | AFJ48529.1 | 27086 | 30315 | 263 | 3585169 | 3592293 | |
| 1306 | | | GAB81434.1 | 27088 | 30317 | 269 | 178785 | 185928 | |
| 1307 | | | ACP25984.1 | 27090 | 30319 | 1083 | 2298324 | 2307700 | |
| 1308 | | | CAN98361.1 | 27092 | 30321 | 1152 | 11387949 | 11397690 | |
| 1309 | | | EPR18397.1 | 27094 | 30323 | 1038 | 2646 | 9729 | |
| 1310 | | | KKW93258.1 | 27096 | 30325 | 1099 | 135724 | 144994 | |
| 1311 | | | CCW17774.1 | 27098 | 30327 | 1098 | 7698 | 15633 | |
| 1312 | | | KER36315.1 | 27100 | 30329 | 1064 | 2812 | 11959 | |
| 1313 | | | KQM97529.1 | 27102 | 30331 | 1002 | 1512 | 10520 | |
| 1314 | | | KPV39945.1 | 27104 | 30333 | 499 | 46068 | 53818 | |
| 1315 | | | KQW61500.1 | 27106 | 30335 | 1187 | 77355 | 87231 | |
| 1316 | | | KLE23445.1 | 27108 | 30337 | 1121 | 177407 | 186987 | |
| 1317 | | | EDL70290.1 | 27110 | 30339 | 1125 | 191775 | 201360 | |
| 1318 | | | KHD25448.1 | 27112 | 30341 | 1169 | 189282 | 199238 | |
| 1319 | | | KFE26106.1 | 27114 | 30343 | 1118 | 33695 | 43271 | |
| 1320 | | | KFD94236.1 | 27116 | 30345 | 1118 | 12302 | 21878 | |
| 1321 | | | EJH60536.1 | 27118 | 30347 | 1102 | 68538 | 78157 | |
| 1322 | | | EMQ54781.1 | 27120 | 30349 | 1118 | 244112 | 253688 | |
| 1323 | | | KNA52261.1 | 27122 | 30351 | 1118 | 12538 | 22114 | |
| 1324 | | | GAD79747.1 | 27124 | 30353 | 1169 | 25836 | 35781 | |
| 1325 | | | KNY42356.1 | 27126 | 30355 | 1125 | 111138 | 120729 | |
| 1326 | | | KHF16001.1 | 27128 | 30357 | 1121 | 3364 | 12944 | |
| 1327 | | | KOF25302.1 | 27130 | 30359 | 1121 | 11973 | 21559 | |
| 1328 | | | KHT39220.1 | 27132 | 30361 | 1102 | 105669 | 115288 | |
| 1329 | | | KYN85118.1 | 27134 | 30363 | 1118 | 68509 | 78085 | |
| 1330 | | | EKM24798.1 | 27136 | 30365 | 1169 | 448059 | 458009 | |
| 1331 | | | CDU08195.1 | 27138 | 30367 | 1102 | 291331 | 300963 | |
| 1332 | | | CAV18547.1 | 27140 | 30369 | 1124 | 1498484 | 1508125 | |
| 1333 | | | KWU01491.1 | 27142 | 30371 | 1119 | 60437 | 70011 | |
| 1334 | | | KOO13423.1 | 27144 | 30373 | 1125 | 88330 | 97921 | |
| 1335 | | | CNI05770.1 | 27146 | 30375 | 1100 | 395449 | 405084 | |
| 1336 | | | CQJ58416.1 | 27148 | 30377 | 1100 | 455230 | 464865 | |
| 1337 | | | CQJ21073.1 | 27150 | 30379 | 1117 | 22700 | 32382 | |
| 1338 | | | CFR01913.1 | 27152 | 30381 | 1100 | 235368 | 245003 | |
| 1339 | | | CNH31670.1 | 27154 | 30383 | 1100 | 474426 | 484061 | |
| 1340 | | | CFV22965.1 | 27156 | 30385 | 1100 | 113536 | 123171 | |
| 1341 | | | KFE39719.1 | 27158 | 30387 | 1100 | 4143 | 13778 | |
| 1342 | | | AKA39097.1 | 27160 | 30389 | 1100 | 2710693 | 2720328 | |
| 1343 | | | EHM51571.1 | 27162 | 30391 | 944 | 252227 | 261394 | |

### Example 7

### Genomic Identification and Analysis of an Anti-Plasmid System

[2124] Objective:

[2125] Some of the putative defense systems experimentally tested did not show any anti-phage activity despite being strongly associated with known defense genes. It was reasoned that some of these systems may defend against other forms of foreign nucleic acid. The objective in this case was to analyze a candidate defense system, which we hereby denote Wadjet (god protector of ancient Egypt) for further experimentation.

[2126] Methods:

[2127] To test this hypothesis, the Wadjet system was selected for further experimentation. The selected candidate system is a 4-gene system, jetA, jetB, jetC, and jetC, that is common in microbial genomes and is very frequently found next to defense genes (FIG. 7A). Three different types of the Wadjet system were cloned from three separate Bacillus species into B. subtilis BEST7003 (FIG. 7B).

[2128] Results:

[2129] While none of these systems provided protection against any of the 10 Bacillus phages in the array tested (data not shown), all three consistently and significantly reduced transformation efficiency of the episomal plasmid pHCMC05 (FIG. 7C). These results suggest that this may be a defense system specifically targeting foreign plasmids.

[2130] Three different domain compositions were identified, each encoding a different set of pfams, but all with common sequence signatures marking them as three types of Wadjet (FIG. 7B). While the pfam domains of Wadjet genes are mostly defined as “domains of unknown function”, structural modeling using Phyre2 showed structural homology between JetA, JetB and JetC and genes belonging to the housekeeping condensin system MukF, MukE and MukB, respectively. Bacterial condensins are chromosome-organizing complexes that are responsible for DNA condensation and accurate segregation during replication, and mutations in the housekeeping condensins lead to severe defects in chromosome segregation and viability. Several versions of housekeeping codensins appear in bacterial genomes: SMC, MukBEF and MksBEF; the Wadjet system was previously noted as a distant homolog of the MksBEF system described in P. aeruginosa.

[2131] While the domain organization of the jetABC genes may lead to the hypothesis that Wadjet is an alternative condensin system involved in bacterial chromosome maintenance, the data herein presented imply that its role is defensive. This system is highly enriched within defense islands, undergoes extensive horizontal gene transfer, and is only sporadically found within strains of the same species, all of which is inconsistent with a core, essential role in chromosome maintenance. The Wadjet system may have adapted from a MukBEF condensin ancestor to become a defense system. Possibly, the system identifies foreign plasmids and uses its condensin properties to interfere with proper plasmid segregation into daughter cells. Notably, plasmid transformation in B. subtilis takes place via the natural competence of this organism, during which the plasmid DNA is transformed to the cell through dedicated transporters as single-stranded DNA (ssDNA). It is possible that the Wadjet system protects against rampant natural transformation or, alternatively, may specifically target ssDNA phages. However, as no ssDNA phage was reported for B. subtilis, it could not be tested whether ssDNA phages are specifically blocked by the Wadjet systems we cloned in B. subtilis BEST7003.

[2132] The Wadjet system is broadly spread in bacterial and archaeal genomes (found in ˜6% of the genomes that were studied), where it presents high sequence diversity (Table 11; FIG. 3H). Deletion of each of the four genes in Type I Wadjet from B. cereus Q1 abolished its activity and restored plasmid transformation, indicating that each of the genes is essential for anti-plasmid defense (FIG. 7C). Moreover, point mutations E59K/K60E in JetB, predicted to disrupt the MukE-MukF-like protein-protein interactions, resulted in loss of protective activity against plasmids (data not shown), and so has the E1025Q mutation in the Walker-B motif of JetC that is predicted to abolish ATPase activity. The JetD gene, which has no homology to genes in the Muk system has a putative topoisomerase VI domain based on structural predictions; a point mutation JetD:E226A, predicted to diminish binding of the topoisomerase VI domain to DNA, also abolished the protective activity of the system.

[2133] Table 11: The Wadjet Defense System and Components Thereof

[2134] This table is presented in landscape orientation. Due to the number of columns, the table has been split into parts. Part A includes the first set of columns and therefore should be place to the left of subsequent parts (Part B and where relevant Part C). To avoid any doubt, the rows of the table in each part line up once the tables are placed together.

Lengthy table referenced here
US20200109395A1-20200409-T00001
Please refer to the end of the specification for access instructions.

### Example 8

### Genomic Identification and Analysis of Additional Defense System

[2135] Objective:

[2136] To identify additional Defense Systems

[2137] Methods:

[2138] As above for Examples 1-7, wherein anchor protein families used in the searches were as follows:

[2139] for the Hachiman Family: pfam08878;

[2140] for the Gabija Family: pfam13175, pfam13304;

[2141] for the Kiwa Family: pfam16162;

[2142] for the Lamassu Family: pfam14130;

[2143] for the Shedu Family: pfam14082;

[2144] for the Septu Family: COG3950; and

[2145] for the Wadjet Family: COG4913, COG4924, pfam11796, pfam09664, pfam13555.

[2146] Results:

[2147] each of these systems was validated by introducing the system constructs into an appropriate bacterial host. The Hachiman, Shedu, Gabija, Septu, and Lamassu candidate Defense Systems were each individually engineered into B. subtilis BEST7003, which does not contain the respective defense systems identified. The correct insertion of the system into the B. subtilis BEST7003 genome was verified by whole genome sequencing. The defense system containing B. subtilis BEST7003 strains were challenged with multiple phages spanning the three families Myoviridae, Siphoviridae, and Podoviridae. The cloned systems were found to confer defense against myophages (FIG. 3B), with different fold protection to all or a subset of the phage provided as shown.

[2148] The Kiwa candidate Defense System was engineered into a host E. coli (E. coli MG1655; correct insertion checked by whole genome sequencing), wherein it was shown to provide protection against viruses in the Siphoviridae family (FIG. 3C).

[2149] The Hachiman, Shedu, Gabija, Septu, and Lamassu candidate Defense Systems were broadly distributed in bacteria and archaea (Tables 12-17; FIG. 3H).

Lengthy table referenced here
US20200109395A1-20200409-T00002
Please refer to the end of the specification for access instructions.

Lengthy table referenced here
US20200109395A1-20200409-T00003
Please refer to the end of the specification for access instructions.

Lengthy table referenced here
US20200109395A1-20200409-T00004
Please refer to the end of the specification for access instructions.

Lengthy table referenced here
US20200109395A1-20200409-T00005
Please refer to the end of the specification for access instructions.

Lengthy table referenced here
US20200109395A1-20200409-T00006
Please refer to the end of the specification for access instructions.

Lengthy table referenced here
US20200109395A1-20200409-T00007
Please refer to the end of the specification for access instructions.

### Summary Examples 1-8

[2150] Examples 1-8 significantly expand the known arsenal of defense systems used by prokaryotes for protection against phages. This knowledge leads to broader understanding of the global defense capabilities of bacteria, and indeed with our results the content of defense islands now becomes much clearer (FIGS. 4A, 4D, 5A, 6A, 7A). However, the results do not yet expose the complete set of prokaryotic defense systems. Out of the 28 candidate systems tested, 10 were verified as anti-phage defense systems and an additional one showed protection against plasmids. The remaining 17, although not verified by the experiments, do not necessarily represent false predictions, as exemplified by the fact that only 50% of our positive control systems showed defense in the assays. Lack of activity could possibly stem from incompatibility of some tested systems with the recipient organism (E. coli or B. subtilis), or due to pseudogenization of some systems in their genome of origin. Some systems can be highly specific against a certain type of phages or foreign genetic element not represented in the phage set, while others may work in a specific condition not tested in the study. Clade-specific potential systems such as those found only in archaea or cyanobacteria (Table 3) were not tested in this study and can represent a more specialized defense arsenal unique only to a subset of organisms. Finally, some true systems may have been missed by falsely tagging them as belonging to the “mobilome” (Table 2), as mobile genetic elements have intimate evolutionary relationship with defense systems.

[2151] While certain features have been illustrated and described herein, many modifications, substitutions, changes, and equivalents will now occur to those of ordinary skill in the art. It is, therefore, to be understood that the appended claims are intended to cover all such modifications and changes as fall within the true spirit of the disclosure presented herein.

LENGTHY TABLES
The patent application contains a lengthy table section. A copy of the table is available in electronic form from the USPTO web site (http://seqdata.uspto.gov/?pageRequest=docDetail&DocID=US20200109395A1). An electronic copy of the table will also be available from the USPTO upon request and payment of the fee set forth in 37 CFR 1.19(b)(3).

What is claimed is:

1. A method of protecting bacteria from foreign nucleic acid invasion, said method comprising a step of introducing into the bacteria at least one defense system (a) to (o), said at least one defense system comprising:
(a) a Defense System IV comprising at least two different polypeptide components selected from
a HamA polypeptide comprising a pfam08878 domain or a DUF1837 domain or a combination thereof, or comprising an amino acid sequence having at least 80% identity to a sequence selected from the group referenced in Table 12 rows 2-1782 columns H and I; and
a HamB polypeptide comprising COG1204 domain or a pfam00270 domain or a pfam00271 domain or any combination thereof, or comprising an amino acid sequence having at least 80% identity to a sequence selected from the group referenced in Table 12 rows 2-1782 columns L and M; or
(b) a Defense System Ia comprising at least two different polypeptide components selected from
a ZorA polypeptide comprising a pfam01618 domain, or comprising an amino acid sequence having at least 80% identity to a sequence selected from the group referenced in Table 8 rows 2-1830 columns J and K;
a ZorB polypeptide comprising a pfam13677 domain or a pfam00691 domain or a combination thereof, or comprising an amino acid sequence having at least 80% identity to a sequence selected from the group referenced in Table 8 rows 2-1830 columns N and O;
a ZorC polypeptide comprising a pfam15611 domain, or comprising an amino acid sequence having at least 80% identity to a sequence selected from the group referenced in Table 8 rows 2-1174 columns R and S; and
a ZorD polypeptide comprising a pfam00176 domain or a pfam00271 domain or a combination thereof, or comprising an amino acid sequence having at least 80% identity to a sequence selected from the group referenced in Table 8 rows 2-1174 columns V and W;
or
(c) a Defense System Ib comprising a ZorE polypeptide comprising a pfam01844 domain or a COG3183 domain or a combination thereof, or comprising an amino acid sequence having at least 80% identity to a sequence selected from the group referenced in Table 8 rows 1175-1830 columns Z and AA; and at least one other polypeptide component selected from
a ZorA polypeptide comprising a pfam01618 domain, or comprising an amino acid sequence having at least 80% identity to a sequence selected from the group referenced in Table 8 rows 2-1830 columns J and K; and
a ZorB polypeptide comprising a pfam13677 domain or a pfam00691 domain or a combination thereof, or comprising an amino acid sequence having at leak 80% identity to a sequence selected from the group referenced in Table 8 rows 2-1830 columns N and O; or
(d) a Defense System II comprising at least two different polypeptide components selected from
a ThsA polypeptide comprising a pfam13289 domain or a pfam14519 domain or a combination thereof, or comprising an amino acid sequence having at least 80% identity to a sequence selected from the group referenced in Table 9 rows 2-2100 columns I and J; and
a ThsB polypeptide comprising a pfam13676 domain or a pfam08937 domain or a pfam08357 domain or any combination thereof, or comprising an amino acid sequence having at least 80% identity to a sequence selected from the group referenced in Table 9 rows 2-2100 columns M and N, Q and R, U and V, Y and Z, and AC and AD; or
(e) a Defense System IIIa comprising at least two different polypeptide components selected from
a DruA polypeptide comprising a DUF4338 domain or a pfam14236 domain or a combination thereof; or comprising an amino acid sequence having at least 80% identity to a sequence selected from the group referenced in Table 10 rows 2-123 columns J and K, or a combination thereof;
a DruB polypeptide comprising an amino acid sequence having at least 80% identity to a sequence selected from the group referenced in Table 10 rows 2-123 columns N and O;
a DruC polypeptide comprising an amino acid sequence having at least 80% identity to a sequence selected from the group referenced in Table 10 rows 2-123 columns R and S;
a DruD polypeptide comprising an amino acid sequence having at least 80% identity to a sequence selected from the group referenced in Table 10 rows 2-123 columns V and W; and
a DruE polypeptide comprising a pfam00270 domain or a pfam00271 domain or a pfam09369 domain or a DUF1998 domain or any combination thereof, or comprising an amino acid sequence having at least 80% identity to a sequence selected from the group referenced in Table 10 rows 2-1343 columns Z and AA; or
(f) a Defense System IIIb comprising at least two different polypeptide components selected from
a DruM polypeptide comprising a pfam00145 domain or a COG0270 domain or a combination thereof, or comprising an amino acid sequence having at least 80% identity to a sequence selected from the group referenced in Table 10 rows 124-295 columns AD and AE;
a DruF polypeptide comprising an amino acid sequence having at least 80% identity to a sequence selected from the group referenced in Table 10 rows 124-295 columns AH and AI;
a DruG polypeptide comprising an amino acid sequence having at least 80% identity to a sequence selected from the group referenced in Table 10 rows 124-295 columns AL and AM; and
a DruE polypeptide comprising a pfam00270 domain or a pfam00271 domain or a pfam09369 domain or a DUF1998 domain or any combination thereof, or comprising an amino acid sequence having at least 80% identity to a sequence selected from the group referenced in Table 10 rows 2-1343 column Z and AA; or
(g) a Defense System IIIc comprising at least two different polypeptide components selected from
a DruH polypeptide comprising an amino acid sequence having at least 80% identity to a sequence selected from the group referenced in Table 10 rows 296-1343 columns AP and AQ; and
a DruE polypeptide comprising a pfam00270 domain or a pfam00271 domain or a pfam09369 domain or a DUF1998 domain or any combination thereof, or comprising an amino acid sequence having at least 80% identity to a sequence selected from the group referenced in Table 10 rows 2-1343 columns Z and AA; or
(h) a Defense System V comprising a SduA polypeptide comprising a pfam14082 domain or a pfam01939 domain or a combination thereof, or comprising an amino acid sequence having at least 80% identity to a sequence selected from the group referenced in Table 13 rows 2-1247 columns H and I; or
(i) a Defense System VI comprising at least two different polypeptide components selected from
a GajA polypeptide comprising a pfam13175 domain or a COG3593 domain or a combination thereof, or comprising an amino acid sequence having at least 80% identity to a sequence selected from the group referenced in Table 14 rows 2-4599 columns H and I; and
a GajB polypeptide comprising a pfam04257 domain or a pfam00580 domain or a pfam13361 domain or any combination thereof, or comprising an amino acid sequence having at least 80% identity to a sequence selected from the group referenced in Table 14 rows 2-4599 columns L and M; or
(j) a Defense System VII comprising at least two different polypeptide components selected from
a PtuA polypeptide comprising a pfam13304 domain or a pfam02463 domain or a combination thereof, or comprising an amino acid sequence having at least 80% identity to a sequence selected from the group referenced in Table 15 rows 2-12507 columns H and I; and
a PtuB polypeptide comprising pfam13395 domain or a pfam 01844 domain or a combination thereof, or comprising an amino acid sequence having at least 80% identity to a sequence selected from the group referenced in Table 15 rows 2-2507 columns L and M; or
(k) a Defense System VIII comprising at least two different polypeptide components selected from
a LmuA polypeptide comprising a pfam14130 domain or a DUF4297 domain or a combination thereof, or comprising an amino acid sequence having at least 80% identity to a sequence selected from the group referenced in Table 16 rows 2-698 columns H and I; and
a LmuB polypeptide comprising a pfam02463 domain, or comprising an amino acid sequence having at least 80% identity to a sequence selected from the group referenced in Table 16 rows 2-698 columns L and M; or
(l) a Defense System IX comprising at least two different polypeptide components selected from
a KwaA polypeptide comprising an amino acid sequence having at least 80% identity to a sequence selected from the group referenced in Table 17 rows 2-935 columns H and I; and
a KwaB polypeptide comprising a pfam16162 domain or a DUF4868 domain or a combination thereof; or comprising an amino acid sequence having at least 80% identity to a sequence selected from the group referenced in Table 17 rows 2-935 columns L and M; or
(m) a Defense System Xa comprising at least two different polypeptide components selected from
a JetA polypeptide comprising a pfam11855 domain or a DUF3375 domain or a combination thereof, or comprising an amino acid sequence having at least 80% identity to a sequence selected from the group referenced in Table 11 rows 2-2322 columns J and K;
a JetB polypeptide comprising a pfam13835 domain or a DUF4194 domain or a combination thereof, or comprising an amino acid sequence having at least 80% identity to a sequence selected from the group referenced in Table 11 rows 2-2322 columns N and O;
a JetC polypeptide comprising a pfam13555 domain or a pfam13558 domain or a COG4913 domain or any combination thereof; or comprising an amino acid sequence having at least 80% identity to a sequence selected from the group referenced in Table 11 rows 2-2322 columns R and S; and
a JetD polypeptide comprising a pfam11795 domain or a DUF3322 domain or a pfam09983 domain or a DUF2220 domain or a COG4924 domain or any combination thereof, or comprising an amino acid sequence having at least 80% identity to a sequence selected from the group referenced in Table 11 rows 2-2322 columns V and W; or
(n) a Defense System Xb comprising at least two different polypeptide components selected from
a JetAⁱⁱ polypeptide comprising a pfam09660 domain or a DUF2397 domain or a combination thereof, or comprising an amino acid sequence having at least 80% identity to a sequence selected from the group referenced in Table 11 rows 2323-2844 columns J and K;
a JetBⁱⁱ polypeptide comprising a pfam09661 domain or a DUF2398 domain or a combination thereof, or comprising an amino acid sequence having at least 80% identity to a sequence selected from the group referenced in Table 11 rows 2323-2844 columns N and O;
a JetCⁱⁱ polypeptide comprising a pfam13558 domain, or comprising an amino acid sequence having at least 80% identity to a sequence selected from the group referenced in Table 11 rows 2323-2844 columns R and S; and
a JetDⁱⁱ polypeptide comprising a pfam11796 domain or a DUF3323 domain or a pfam09664 domain or a DUF2399 domain or a combination thereof, or comprising an amino acid sequence having at least 80% identity to a sequence selected from the group referenced in Table 11 rows 2323-2844 columns V and W; or
(o) a Defense System Xc comprising at least two different polypeptide components selected from
a JetAⁱⁱⁱ polypeptide comprising an amino acid sequence having at least 80% identity to a sequence selected from the group referenced in Table 11 rows 2845-3174 columns and K;
a JetBⁱⁱⁱ polypeptide comprising an amino acid sequence having at least 80% identity to a sequence selected from the group referenced in Table 11 rows 2845-3174 columns N and O;
a JetCⁱⁱⁱ polypeptide comprising a COG1196 domain or comprising an amino acid sequence having at least 80% identity to a sequence selected from the group referenced in Table 11 rows 2845-3174 columns R and S; and
a JetDⁱⁱⁱ polypeptide comprising a pfam09983 domain or a pfam09664 domain or a DUF2220 or a DUF2399 domain or any combination thereof, or comprising an amino acid sequence having at least 80% identity to a sequence selected from the group referenced in Table 11 rows 2845-3174 columns V and W; or
(p) any combination of Defense Systems Ia-Xc (a)-(o);
wherein the introduction of said at least one defense system results in the bacteria being protected from foreign DNA invasion.

2. The method of claim 1, wherein said protecting bacteria from foreign nucleic acid invasion comprises protecting from phage infection, protection from plasmid transformation, or protecting from entry of conjugative elements, or any combination thereof.

3. The method of claim 2, wherein said phage comprises a single stranded DNA (ssDNA) phage, a double stranded DNA (dsDNA) phage, a single stranded RNA (ssRNA) phage, a double stranded RNA (dsRNA) phage, a lytic phage, or a lysogenic phage, or a combination thereof.

4. The method of claim 1, wherein said at least one defense system comprises
(a) a Defense System IV comprising the HamA polypeptide and the HamB polypeptide; or
(b) a Defense System Ia comprising the ZorA polypeptide, the ZorB polypeptide, the ZorC polypeptide, and the ZorD polypeptide; or
(c) a Defense System Ib comprising the ZorA polypeptide, the ZorB polypeptide, and the ZorE polypeptide; or
(d) a Defense System II comprising the ThsA polypeptide, and the ThsB polypeptide; or
(e) a Defense System IIIa comprising the DruA polypeptide, the DruB polypeptide, the DruC polypeptide, the DruD polypeptide, and the DruE polypeptide; or
(f) a Defense System IIIb comprising the DruM polypeptide, the DruF polypeptide, the DruG polypeptide, and the DruE polypeptide; or
(g) a Defense System IIIc comprising the DruH polypeptide and the DruE polypeptide; or
(h) a Defense System V comprising the SduA polypeptide; or
(i) a Defense System VI comprising the GajA polypeptide and the GajB polypeptide; or
(j) a Defense System VII comprising the PtuA polypeptide and the PtuB polypeptide; or
(k) a Defense System VIII comprising the LmuA polypeptide and the LmuB polypeptide; or
(l) a Defense System IX comprising the KwaA polypeptide and the KwaB polypeptide; or
(m) a Defense System Xa comprising the JetA polypeptide, the JetB polypeptide, the JetC polypeptide, and the JetD polypeptide; or
(n) a Defense System Xb comprising the JetAⁱⁱ polypeptide, the JetBⁱⁱ polypeptide, the JetCⁱⁱ polypeptide, and the JetDⁱⁱ polypeptide; or
(o) a Defense System Xc comprising the JetAⁱⁱⁱ polypeptide, the JetBⁱⁱⁱ polypeptide, the JetCⁱⁱⁱ polypeptide, and the JetDⁱⁱⁱ polypeptide; or
(p) any combination of Defense Systems Ia-Xc (a)-(o).

5. The method of claim 1, wherein
(a) said Defense System IV is encoded by
a nucleic acid sequence selected from the group referenced in Table 12, rows 2-1782, columns G, P, and Q or the nucleic acid sequence set forth in SEQ ID NO: 4; or
a nucleic acid sequence encoding the at least two different polypeptide sequences recited in claim 1; or
a nucleic acid sequence encoding the HamA polypeptide and HamB polypeptide recited in claim 4;
(b) said Defense System Ia is encoded by
a nucleic acid sequence selected from the group referenced in Table 8 rows 2-1174 columns G, AD, and AE or the nucleic acid sequence set forth in SEQ ID NO: 14; or
a nucleic acid sequence encoding the at least two different polypeptide sequences recited in claim 1; or
a nucleic acid sequence encoding the ZorA polypeptide, the ZorB polypeptide, the ZorC polypeptide, and ZorD polypeptide recited in claim 4;
(c) said Defense System Ib is encoded by
a nucleic acid sequence selected from the group referenced in Table 8 rows 1175-1830 columns G, AD, and AE or set forth in SEQ ID NO: 15; or
a nucleic acid sequence encoding the at least two different polypeptide sequences recited in claim 1; or
a nucleic acid sequence encoding the ZorA polypeptide, the ZorB polypeptide, and ZorE polypeptide recited in claim 4;
(d) said Defense System II is encoded by
a nucleic acid sequence selected from the group referenced in Table 9 rows 2-2100 columns G, AG, and AH or set forth in the nucleic acid sequence set forth in SEQ ID NO: 10 or SEQ ID NO: 11; or
a nucleic acid sequence encoding the at least two different polypeptide sequences recited in claim 1; or
a nucleic acid sequence encoding the ThsA polypeptide and the ThsB polypeptide recited in claim 4;
(e) said Defense System IIIa is encoded by
a nucleic acid sequence selected from the group referenced in Table 10 rows 2-123 columns G, AT, and AU or set forth in SEQ ID NO: 16; or
a nucleic acid sequence encoding the at least two different polypeptide sequences recited in claim 1; or
a nucleic acid sequence encoding the DruA polypeptide, the DruB polypeptide, the DruC, the DruD, and the DruE polypeptide recited in claim 4;
(f) said Defense System IIIb is encoded by
a nucleic acid sequence selected from the group referenced in Table 10 rows 124-295 columns G, AT, AU; or
a nucleic acid sequence encoding the at least two different polypeptide sequences recited in claim 1; or
a nucleic acid sequence encoding the DruM polypeptide, the DruF polypeptide, the DruG polypeptide, and the DruE polypeptide recited in claim 4;
(g) said Defense System IIIc is encoded by
a nucleic acid sequence selected from the group referenced in Table 10 rows 296-1343 columns G, AT, and AU; or
a nucleic acid sequence encoding the at least two different polypeptide sequences recited in claim 1; or
a nucleic acid sequence encoding the DruH polypeptide and the DruE polypeptide recited in claim 4;
(h) said Defense System V is encoded by
a nucleic acid sequence selected from the group referenced in Table 13, rows 2-1247, columns H and J; or
a nucleic acid sequence encoding the SduA polypeptide of claim 1 and claim 4;
(i) said Defense System VI is encoded by
a nucleic acid sequence selected from the group referenced in Table 14, rows 2-4599, columns G, P, and Q or the sequences set forth in SEQ ID NO: 5 and SEQ ID NO: 6; or
a nucleic acid sequence encoding the at least two different polypeptide sequences recited in claim 1; or
a nucleic acid sequence encoding the GajA polypeptide and the GajB polypeptide recited in claim 4;
(j) said Defense System VII is encoded by
a nucleic acid sequence selected from the group referenced in Table 15, rows 2-2507, columns G, P, and Q or the sequences set forth in SEQ ID NO: 12 and SEQ ID NO: 13; or
a nucleic acid sequence encoding the at least two different polypeptide sequences recited in claim 1; or
a nucleic acid sequence encoding the Ptu polypeptide and the PtuB polypeptide recited in claim 4;
(k) said Defense System VIII is encoded by
a nucleic acid sequence selected from the group referenced in Table 16, rows 2-698, columns G, P, and Q or the sequences set forth in SEQ ID NO: 7 and SEQ ID NO: 8; or
a nucleic acid sequence encoding the at least two different polypeptide sequences recited in claim 1; or
a nucleic acid sequence encoding the LmuA polypeptide and LmuB polypeptide recited in claim 4;
(l) said Defense System IX is encoded by
a nucleic acid sequence selected from the group referenced in Table 17, rows 2-935, columns G, P, and Q or the sequence set forth in SEQ ID NO: 3; or
a nucleic acid sequence encoding the at least two different polypeptide sequences recited in claim 1; or
a nucleic acid sequence encoding the KwaA polypeptide and the KwaB polypeptide recited in claim 4;
(m) said Defense System Xa is encoded by
a nucleic acid sequence selected from the group referenced in Table 11, rows 2-2322, columns G, Z, and AA or the sequence set forth in SEQ ID NO: 17; or
a nucleic acid sequence encoding the at least two different polypeptide sequences recited in claim 1; or
a nucleic acid sequence encoding the JetA polypeptide, the JetB polypeptide, the JetC polypeptide, and the JetD polypeptide recited in claim 4;
(n) said Defense System Xb is encoded by
a nucleic acid sequence having at least 80% homology to a sequence selected from the group referenced in Table 11, rows 2323-2844, columns G, Z, and AA or the sequence set forth in SEQ ID NO: 18; or
a nucleic acid sequence encoding the at least two different polypeptide sequences recited in claim 1; or
a nucleic acid sequence encoding the JetAⁱⁱ polypeptide, the JetBⁱⁱ polypeptide, the JetCⁱⁱ polypeptide, and the JetDⁱⁱ polypeptide recited in claim 4;
(o) said Defense System Xc is encoded by
a nucleic acid sequence selected from the group referenced in Table 11, rows 2845-3174, columns G, Z, and AA or the sequence set forth in SEQ ID NO: 19; or
a nucleic acid sequence encoding the at least two different polypeptide sequences recited in claim 1; or
a nucleic acid sequence encoding the JetAⁱⁱⁱ polypeptide, the JetBⁱⁱⁱ polypeptide, the JetCⁱⁱⁱ polypeptide, and the JetDⁱⁱⁱ polypeptide recited in claim 4.

6. The method of claim 1, wherein
(a) for said Defense system IV, said HamA polypeptide is encoded by a nucleic acid sequence selected from the group referenced in Table 12, rows 2-1782, columns H and J, or
said HamB polypeptide is encoded by a nucleic acid sequence selected from the group referenced in Table 12, rows 2-1782, columns L and N, or
a combination thereof;
(b) for said Defense system Ia, said ZorA polypeptide is encoded by a nucleic acid sequence selected from the group referenced in Table 8 rows 2-1830 columns J and L,
said ZorB polypeptide is encoded by a nucleic acid sequence selected from the group referenced in Table 8 rows 2-1830 columns N and P,
said ZorC polypeptide is encoded by a nucleic acid sequence selected from the group referenced in Table 8 rows 2-1174 columns R and T, or
said ZorD polypeptide is encoded by a nucleic acid sequence selected from the group referenced in Table 8 rows 2-1174 columns V and X, or
a combination thereof;
(c) for said Defense system Ib, said ZorA polypeptide is encoded by a nucleic acid sequence selected from the group referenced in Table 8 rows 2-1830 columns J and L,
said ZorB polypeptide is encoded by a nucleic acid sequence selected from the group Table 8 rows 2-1830 columns N and P,
said ZorE polypeptide is encoded by a nucleic acid sequence selected from the group referenced in Table 8 rows 1175-1830 columns Z and AB, or a combination thereof;
(d) for said Defense system II, said ThsA polypeptide is encoded by a nucleic acid sequence selected from the group referenced in Table 9 rows 2-2100 columns I and K,
said ThsB polypeptide is encoded by a nucleic acid sequence selected from the group referenced in Table 9 rows 2-2100 columns M and O, Q and S, U and W, Y and AA, and AC and AE, or
a combination thereof;
(e) for said Defense system IIIa, said DruA polypeptide is encoded by a nucleic acid sequences selected from the group referenced in Table 10 rows 2-123 columns J and L, or
said DruB polypeptide is encoded by a nucleic acid sequence selected from the group referenced in Table 10 rows 2-123 columns N and P, or
said DruC polypeptide is encoded by a nucleic acid sequence selected from the group referenced in Table 10 rows 2-123 columns R and T, or
said DruD polypeptide is encoded by a nucleic acid sequence selected from the group referenced in Table 10 rows 2-123 columns V and X, or
said DruE polypeptide is encoded by a nucleic acid sequence selected from the group referenced in Table 10 rows 2-1343 columns Z and AB, or
a combination thereof;
(f) for said Defense system IIIb, said DruM polypeptide is encoded by a nucleic acid sequence selected from the group referenced in Table 10 rows 124-295 columns AD and AF, or
said DruF polypeptide is encoded by a nucleic acid sequence selected from the group referenced in Table 10 rows 124-295 columns AH and AJ, or
said DruG polypeptide is encoded by a nucleic acid sequence selected from the group referenced in Table 10 rows 124-295 columns AL and AN, or
said DruE polypeptide is encoded by a nucleic acid sequence selected from the group referenced in Table 10 rows 2-1343 columns Z and AB, or
a combination thereof;
(g) for said Defense system IIIc, said DruH polypeptide is encoded by a nucleic acid sequence selected from the group referenced in Table 10 rows 296-1343 columns AP and AR, or
said DruE polypeptide is encoded by a nucleic acid sequence selected from the group referenced in Table 10 rows 2-1343 columns Z and ZB, or
a combination thereof;
(h) for said Defense system V, said SduA polypeptide is encoded by a nucleic acid sequence selected from the group referenced in Table 13; rows 2-1247, columns H and J;
(i) for said Defense system VI, said GajA polypeptide is encoded by a nucleic acid sequence selected from the group referenced in Table 14, rows 2-4599, columns H and J, or
said GajB polypeptide is encoded by a nucleic acid sequence selected from the group referenced in Table 14, rows 2-4599, columns L and N, or
a combination thereof;
(j) for said Defense system VII, said PtuA polypeptide is encoded by a nucleic acid sequence selected from the group referenced in Table 15, rows 2-2507, columns H and J, or
said PtuB polypeptide is encoded by a nucleic acid sequence selected from the group referenced in Table 15, rows 2-2507, columns L and N, or
a combination thereof;
(k) for said Defense system VIII, said LmuA polypeptide is encoded by a nucleic acid sequence selected from the group referenced in Table 16, rows 2-698, columns H and J, or
said LmuB polypeptide is encoded by a nucleic acid sequence selected from the group referenced in Table 16, rows 2-698, columns L and N, or
a combination thereof;
(l) for said Defense system IX, said KwaA polypeptide is encoded by a nucleic acid sequence selected from the group referenced in Table 17, rows 2-935, columns H and J, or
said KwaB polypeptide is encoded by a nucleic acid sequence selected from the group referenced in Table 17, rows 2-935, columns L and N, or
a combination thereof;
(m) for said Defense system Xa, said JetA polypeptide is encoded by a nucleic acid sequence selected from the group referenced in Table 11, rows 2-2322, columns J and L, or
said JetB polypeptide is encoded by a nucleic acid sequence selected from the group referenced in Table 11, rows 2-2322, columns N and P, or
said JetC polypeptide is encoded by a nucleic acid sequence selected from the group referenced in Table 11, rows 2-2322, columns R and T, or
said JetD polypeptide is encoded by a nucleic acid sequence selected from the group referenced in Table 11, rows 2-2322, columns V and X, or
a combination thereof;
(n) for said Defense system Xb, said JetAⁱⁱ polypeptide is encoded by a nucleic acid sequence selected from the group referenced in Table 11, rows 2323-2844, columns J and L, or
said JetBⁱⁱ polypeptide is encoded by a nucleic acid sequence selected group referenced in Table 11, rows 2323-2844, columns N and P, or
said JetCⁱⁱ polypeptide is encoded by a nucleic acid sequence selected from the group referenced in Table 11, rows 2323-2844, columns R and T, or
said JetDⁱⁱ polypeptide is encoded by a nucleic acid sequence selected from the group referenced in Table 11, rows 2323-2844, columns V and X, or
a combination thereof;
(o) for said Defense system Xc, said JetAⁱⁱⁱ polypeptide is encoded by a nucleic acid sequence selected from the group referenced in Table 11, rows 2845-3174, columns J and L, or
said JetBⁱⁱⁱ polypeptide is encoded by a nucleic acid sequence selected from the group referenced in Table 11, rows 2845-3174, columns N and P, or
said JetCⁱⁱⁱ polypeptide is encoded by a nucleic acid sequence selected from the group referenced in Table 11, rows 2845-3174, columns R and T, or
said JetDⁱⁱⁱ polypeptide is encoded by a nucleic acid sequence selected from the group referenced in Table 11, rows 2845-3174, columns V and X, or
a combination thereof.

7. An at least one defense system (a)-(o), said at least one defense system comprising
(a) a Defense System IV comprising at least two different polypeptide components selected from
a HamA polypeptide comprising a pfam08878 domain or a DUF1837 domain or a combination thereof, or comprising an amino acid sequence having at least 80% identity to a sequence selected from the group referenced in Table 12 rows 2-1782 columns H and I; and
a HamB polypeptide comprising COG-1204 domain or a pfam00270 domain or a pfam00271 domain or any combination thereof, or comprising an amino acid sequence having at least 80% identity to a sequence selected from the group referenced in Table 12 rows 2-1782 columns L and M; or
(b) a Defense System Ia comprising at least two different polypeptide components selected from
a ZorA polypeptide comprising a pfam01618 domain, or comprising an amino acid sequence having at least 80% identity to a sequence selected from the group referenced in Table 8 rows 2-1830 columns J and K;
a ZorB polypeptide comprising a pfam13677 domain or a pfam00691 domain or a combination thereof, or comprising an amino acid sequence having at least 80% identity to a sequence selected from the group referenced in Table 8 rows 2-1830 columns N and O;
a ZorC polypeptide comprising a pfam15611 domain, or comprising an amino acid sequence having at least 80% identity to a sequence selected from the group referenced in Table 8 rows 2-1174 columns R and S; and
a ZorD polypeptide comprising a pfam00176 domain or a pfam00271 domain or a combination thereof, or comprising an amino acid sequence having at least 80% identity to a sequence selected from the group referenced in Table 8 rows 2-1174 columns V and W;
or
(c) a Defense System Ib comprising a ZorE polypeptide comprising a pfam01844 domain or a COG3183 domain or a combination thereof, or comprising an amino acid sequence having at least 80% identity to a sequence selected from the group referenced in Table 8 rows 1175-1830 columns Z and AA; and at least one other polypeptide component selected from
a ZorA polypeptide comprising a pfam01618 domain, or comprising an amino acid sequence having at least 80% identity to a sequence selected from the group referenced in Table 8 rows 2-1830 columns J and K; and
a ZorB polypeptide comprising a pfam13677 domain or a pfam00691 domain or a combination thereof, or comprising an amino acid sequence having at least 80% identity to a sequence selected from the group referenced in Table 8 rows 2-1830 columns N and O; or
(d) a Defense System II comprising at least two different polypeptide components selected from
a ThsA polypeptide comprising a pfam13289 domain or a pfam14519 domain or a combination thereof, or comprising an amino acid sequence having at least 80% identity to a sequence selected from the group referenced in Table 9 rows 2-2100 columns I and J; and
a ThsB polypeptide comprising a pfam13676 domain or a pfam08937 domain or a pfam08357 domain or any combination thereof, or comprising an amino acid sequence having at least 80% identity to a sequence selected from the group referenced in Table 9 rows 2-2100 columns M and N, Q and R, U and V, Y and Z, and AC and AD; or
(e) a Defense System IIIa comprising at least two different polypeptide components selected from
a DruA polypeptide comprising a DUF4338 domain or a pfam14236 domain or a combination thereof, or comprising an amino acid sequence having at least 80% identity to a sequence selected from the group referenced in Table 10 rows 2-123 columns J and K, or a combination thereof;
a DruB polypeptide comprising an amino acid sequence having at least 80% identity to a sequence selected from the group referenced in Table 10 rows 2-123 columns N and O;
a DruC polypeptide comprising an amino acid sequence having at least 80% identity to a sequence selected from the group referenced in Table 10 rows 2-123 columns R and S;
a DruD polypeptide comprising an amino acid sequence having at least 80% identity to a sequence selected from the group referenced in Table 10 rows 2-123 columns V and W; and
a DruE polypeptide comprising a pfam00270 domain or a pfam00271 domain or a pfam09369 domain or a DUF1998 domain or any combination thereof, or comprising an amino acid sequence having at least 80% identity to a sequence selected from the group referenced in Table 10 rows 2-1343 columns Z and AA; or
(f) a Defense System IIIb comprising at least two different polypeptide components selected from
a DruM polypeptide comprising a pfam00145 domain or a COG0270 domain or a combination thereof, or comprising an amino acid sequence having at least 80% identity to a sequence selected from the group referenced in Table 10 rows 124-295 columns AD and AE;
a DruF polypeptide comprising an amino acid sequence having at least 80% identity to a sequence selected from the group referenced in Table 10 rows 124-295 columns AH and AI;
a DruG polypeptide comprising an amino acid sequence having at least 80% identity to a sequence selected from the group referenced in Table 10 rows 124-295 columns AL and AM; and
a DruE polypeptide comprising a pfam00270 domain or a pfam00271 domain or a pfam09369 domain or a DUF1998 domain, or any combination thereof, or comprising an amino acid sequence having at least 80% identity to a sequence selected from the group referenced in Table 10 rows 2-1343 columns Z and AA; or
(g) a Defense System IIIc comprising at least two different polypeptide components selected from
a DruH polypeptide comprising an amino acid sequence having at least 80% identity to a sequence selected from the group referenced in Table 10 rows 296-1343 columns AP and AQ; and
a DruE polypeptide comprising a pfam00270 domain or a pfam00271 domain or a pfam09369 domain or a DUF1998 domain or any combination thereof, or comprising an amino acid sequence having at least 80% identity to a sequence selected from the group referenced in Table 10 rows 2-1343 columns Z and AA; or
(h) a Defense System V comprising a SduA polypeptide comprising a pfam14082 domain or a pfam01939 domain or a combination thereof, or comprising an amino acid sequence having at least 80% identity to a sequence selected from the group referenced in Table 13 rows 2-1247 columns H and I; or
(i) a Defense System VI comprising at least two different polypeptide components selected from
a GajA polypeptide comprising a pfam13175 domain or a COG3593 domain or a combination thereof, or comprising an amino acid sequence having at least 80% identity to a sequence selected from the group referenced in Table 14 rows 2-4599 columns H and I; and
a GajB polypeptide comprising a pfam04257 domain or a pfam00580 domain or a pfam13361 domain or any combination thereof, or comprising an amino acid sequence having at least 80% identity to a sequence selected from the group referenced in Table 14 rows 2-4599 columns L and M; or
(j) a Defense System VII comprising at least two different polypeptide components selected from
a PtuA polypeptide comprising a pfam13304 domain or a pfam02463 domain or a combination thereof, or comprising an amino acid sequence having at least 80% identity to a sequence selected from the group referenced in Table 15 rows 2-12507 columns H and I; and
a PtuB polypeptide comprising pfam13395 domain or a pfam 01844 domain or a combination thereof, or comprising an amino acid sequence having at least 80% identity to a sequence selected from the group referenced in Table 15 rows 2-2507 columns L and M; or
(k) a Defense System VIII comprising at least two different polypeptide components selected from
a LmuA polypeptide comprising a pfam14130 domain or a DUF4297 domain or a combination thereof, or comprising an amino acid sequence having at least 80% identity to a sequence selected from the group referenced in Table 16 rows 2-698 columns H and I; and
a LmuB polypeptide comprising a pfam02463 domain, or comprising an amino acid sequence having at least 80% identity to a sequence selected from the group referenced in Table 16 rows 2-698 columns L and M; or
(l) a Defense System IX comprising at least two different polypeptide components selected from
a KwaA polypeptide comprising an amino acid sequence having at least 80% identity to a sequence selected from the group referenced in Table 17 rows 2-935 columns H and I; and
a KwaB polypeptide comprising a pfam16162 domain or a DUF4868 domain or a combination thereof, or comprising an amino acid sequence having at least 80% identity to a sequence selected from the group referenced in Table 17 rows 2-935 columns L and M; or
(m) a Defense System Xa comprising at least two different polypeptide components selected from
a JetA polypeptide comprising a pfam11855 domain or a DUF3375 domain or a combination thereof, or comprising an amino acid sequence having at least 80% identity to a sequence selected from the group referenced in Table 11 rows 2-2322 columns J and K;
a JetB polypeptide comprising a pfam13835 domain or a DUF4194 domain or a combination thereof, or comprising an amino acid sequence having at least 80% identity to a sequence selected from the group referenced in Table 11 rows 2-2322 columns N and O;
a JetC polypeptide comprising a pfam13555 domain or a pfam13558 domain or a COG4913 domain or any combination thereof, or comprising an amino acid sequence having at least 80% identity to a sequence selected from the group referenced in Table 11 rows 2-2322 columns R and S; and
a JetD polypeptide comprising a pfam11795 domain or a DUF3322 domain or a pfam09983 domain or a DUF2220 domain or a COG4924 domain or any combination thereof, or comprising an amino acid sequence having at least 80% identity to a sequence selected from the group referenced in Table 11 rows 2-2322 columns V and W; or
(n) a Defense System Xb comprising at least two different polypeptide components selected from
a JetAⁱⁱ polypeptide comprising a pfam09660 domain or a DUF2397 domain or a combination thereof, or comprising an amino acid sequence having at least 80% identity to a sequence selected from the group referenced in Table 11 rows 2323-2844 columns J and K;
a JetBⁱⁱ polypeptide comprising a pfam09661 domain or a DUF2398 domain or a combination thereof, or comprising an amino acid sequence having at least 80% identity to a sequence selected from the group referenced in Table 11 rows 2323-2844 columns N and O;
a JetCⁱⁱ polypeptide comprising a pfam13558 domain comprising an amino acid sequence having at least 80% identity to a sequence selected from the group referenced in Table 11 rows 2323-2844 columns R and S; and
a JetDⁱⁱ polypeptide comprising a pfam11796 domain or a DUF3323 domain or a pfam09664 domain or a DUF2399 domain or a combination thereof, or comprising an amino acid sequence having at least 80% identity to a sequence selected from the group referenced in Table 11 rows 2323-2844 columns V and W; or
(o) a Defense System Xc comprising at least two different polypeptide components selected from
a JetAⁱⁱⁱ polypeptide comprising an amino acid sequence having at least 80% identity to a sequence selected from the group referenced in Table 11 rows 2845-3174 columns J and K;
a JetBⁱⁱⁱ polypeptide comprising an amino acid sequence having at least 80% identity to a sequence selected from the group referenced in Table 11 rows 2845-3174 columns N and O;
a JetCⁱⁱⁱ polypeptide comprising a COG1196 domain or comprising an amino acid sequence having at least 80% identity to a sequence selected from the group referenced in Table 11 rows 2845-3174 columns R and S; and
a JetDⁱⁱⁱ polypeptide comprising a pfam09983 domain or a pfam09664 domain or a DUF2220 or a DUF2399 domain or any combination thereof, or comprising an amino acid sequence having at least 80% identity to a sequence selected from the group referenced in Table 11 rows 2845-3174 columns V and W; or
(p) any combination of the Defense Systems Ia-Xc (a)-(o);
wherein said at least one defense system comprises a non-naturally occurring combination of components.

8. The defense system of claim 7, wherein
(a) said Defense System IV comprises the HamA polypeptide and the HamB polypeptide; or
(b) said Defense System Ia comprises the ZorA polypeptide, the ZorB polypeptide, the ZorC polypeptide, and the ZorD polypeptide; or
(c) said Defense System Ib comprises the ZorA polypeptide, the ZorB polypeptide, and the ZorE polypeptide; or
(d) said Defense System II comprises the ThsA polypeptide, and the ThsB polypeptide; or
(e) said Defense System IIIa comprises the DruA polypeptide, the DruB polypeptide, the DruC polypeptide, the DruD polypeptide, and the DruE polypeptide; or
(f) said Defense System IIIb comprises the DruM polypeptide, the DruF polypeptide, the DruG polypeptide, and the DruE polypeptide; or
(f) said Defense System IIIc comprises the DruH polypeptide and the DruE polypeptide; or
(h) said Defense System V comprises the SduA polypeptide; or
(i) said Defense System VI comprises the GajA polypeptide and the GajB polypeptide; or
(j) said Defense System VII comprises the PtuA polypeptide and the PtuB polypeptide; or
(k) said Defense System VIII comprises the LmuA polypeptide and the LmuB polypeptide; or
(l) said Defense System IX comprises the KwaA polypeptide and the KwaB polypeptide; or
(m) said Defense System Xa comprises the JetA polypeptide, the JetB polypeptide, the JetC polypeptide, and the JetD polypeptide; or
(n) said Defense System Xb comprises the JetAⁱⁱ polypeptide, the JetBⁱⁱ polypeptide, the JetCⁱⁱ polypeptide, and the JetDⁱⁱ polypeptide; or
(o) said Defense System Xc comprises the JetAⁱⁱⁱ polypeptide, the JetBⁱⁱⁱ polypeptide, the JetCⁱⁱⁱ polypeptide, and the JetDⁱⁱ polypeptide.

9. The at least one defense system of claim 7, wherein said defense system provides a host cell with resistance to foreign nucleic acid invasion.

10. The at least one defense system of claim 9, wherein said resistance to foreign nucleic acid invasion comprises resistance to at least one phage infection, or resistance to plasmid transformation, or resistance to entry of a conjugative element, or any combination thereof.

11. A nucleic acid construct encoding an at least one defense system (a)-(o), said nucleic acid construct comprising
(a) a nucleic acid construct encoding a Defense System IV comprising at least two different polypeptide components selected from
a HamA polypeptide comprising a pfam08878 domain or a DUF1837 domain or a combination thereof, or comprising an amino acid sequence having at least 80% identity to a sequence selected from the group referenced in Table 12 rows 2-1782 columns H and I; and
a HamB polypeptide comprising COG1204 domain or a pfam00270 domain or a pfam00271 domain or any combination thereof, or comprising an amino acid sequence having at least 80% identity to a sequence selected from the group referenced in Table 12 rows 2-1782 columns L and M; or
(b) a nucleic acid construct encoding a Defense System Ia comprising at least two different polypeptide components selected from
a ZorA polypeptide comprising a pfam01618 domain, or comprising an amino acid sequence having at least 80% identity to a sequence selected from the group referenced in Table 8 rows 2-1830 columns J and K;
a ZorB polypeptide comprising a pfam 13677 domain or a pfam00691 domain or a combination thereof, or comprising an amino acid sequence having at least 80% identity to a sequence selected from the group referenced in Table 8 rows 2-1830 columns N and O;
a ZorC polypeptide comprising a pfam15611 domain, or comprising an amino acid sequence having at least 80% identity to a sequence selected from the group referenced in Table 8 rows 2-1174 columns R and S; and
a ZorD polypeptide comprising a pfam00176 domain or a pfam00271 domain or a combination thereof, or comprising an amino acid sequence having at least 80% identity to a sequence selected from the group referenced in Table 8 rows 2-1174 columns V and W;
or
(c) a nucleic acid construct encoding a Defense System Ib comprising a ZorE polypeptide comprising a pfam01844 domain or a COG3183 domain or a combination thereof, or comprising an amino acid sequence having at least 80% identity to a sequence selected from the group referenced in Table 8 rows 1175-1830 columns Z and AA; and at least one other polypeptide component selected from
a ZorA polypeptide comprising a pfam01618 domain, or comprising an amino acid sequence having at least 80% identity to a sequence selected from the group referenced in Table 8 rows 2-1830 columns J and K; and
a ZorB polypeptide comprising a pfam13677 domain or a pfam00691 domain or a combination thereof, or comprising an amino acid sequence having at least 80% identity to a sequence selected from the group referenced in Table 8 rows 2-1830 columns N and O; or
(d) a nucleic acid construct encoding a Defense System II comprising at least two different polypeptide components selected from
a ThsA polypeptide comprising a pfam13289 domain or a pfam14519 domain or a combination thereof, or comprising an amino acid sequence having at least 80% identity to a sequence selected from the group referenced in Table 9 rows 2-2100 columns I and J; and
a ThsB polypeptide comprising a pfam13676 domain or a pfam08937 domain or a pfam08357 domain or any combination thereof, or comprising an amino acid sequence having at least 80% identity to a sequence selected from the group referenced in Table 9 rows 2-2100 columns M and N, Q and R, U and V, Y and Z, and AC and AD; or
(e) a nucleic acid construct encoding a Defense System IIIa comprising at least two different polypeptide components selected from
a DruA polypeptide comprising a DUF4338 domain or a pfam14236 domain or a combination thereof, or comprising an amino acid sequence having at least 80% identity to a sequence selected from the group referenced in Table 10 rows 2-123 columns J and K, or a combination thereof;
a DruB polypeptide comprising an amino acid sequence having at least 80% identity to a sequence selected from the group referenced in Table 10 rows 2-123 columns N and O;
a DruC polypeptide comprising an amino acid sequence having at least 80% identity to a sequence selected from the group referenced in Table 10 rows 2-123 columns R and S;
a DruD polypeptide comprising an amino acid sequence having at least 80% identity to a sequence selected from the group referenced in Table 10 rows 2-123 columns V and W; and
a DruE polypeptide comprising a pfam00270 domain or a pfam00271 domain or a pfam09369 domain or a DUF1998 domain or any combination thereof, or comprising an amino acid sequence having at least 80% identity to a sequence selected from the group referenced in Table 10 rows 2-1343 columns Z and AA; or
(f) a nucleic acid construct encoding a Defense System IIIb comprising at least two different polypeptide components selected from
a DruM polypeptide comprising a pfam00145 domain or a COG0270 domain or a combination thereof, or comprising an amino acid sequence having at least 80% identity to a sequence selected from the group referenced in Table 10 rows 124-295 columns AD and AE;
a DruF polypeptide comprising an amino acid sequence having at least 80% identity to a sequence selected from the group referenced in Table 10 rows 124-295 columns AH and AI;
a DruG polypeptide comprising an amino acid sequence having at least 80% identity to a sequence selected from the group referenced in Table 10 rows 124-295 columns AL and AM; and
a DruE polypeptide comprising a pfam00270 domain or a pfam00271 domain or a pfam09369 domain or a DUF1998 domain or any combination thereof, or comprising an amino acid sequence having at least 80% identity to a sequence selected from the group referenced in Table 10 rows 2-1343 columns Z and AA; or
(g) a nucleic acid construct encoding a Defense System IIIc comprising at least two different polypeptide components selected from
a DruH polypeptide comprising an amino acid sequence having at least 80% identity to a sequence selected from the group referenced in Table 10 rows 296-1343 columns AP and AQ; and
a DruE polypeptide comprising a pfam00270 domain or a pfam00271 domain or a pfam09369 domain or a DUF1998 domain or any combination thereof, or comprising an amino acid sequence having at least 80% identity to a sequence selected from the group referenced in Table 10 rows 2-1343 columns Z and AA; or
(h) a nucleic acid construct encoding a Defense System V comprising a SduA polypeptide comprising a pfam14082 domain or a pfam01939 domain or a combination thereof, or comprising an amino acid sequence having at least 80% identity to a sequence selected from the group referenced in Table 13 rows 2-1247 columns H and I; or
(i) a nucleic acid construct encoding a Defense System VI comprising at least two different polypeptide components selected from
a GajA polypeptide comprising a pfam13175 domain or a COG3593 domain or a combination thereof, or comprising an amino acid sequence having at least 80% identity to a sequence selected from the group referenced in Table 14 rows 2-4599 columns H and I; and
a GajB polypeptide comprising a pfam04257 domain or a pfam00580 domain or a pfam13361 domain or any combination thereof, or comprising an amino acid sequence having at least 80% identity to a sequence selected from the group referenced in Table 14 rows 2-4599 columns L and M; or
(j) a nucleic acid construct encoding a Defense System VII comprising at least two different polypeptide components selected from
a PtuA polypeptide comprising a pfam13304 domain or a pfam02463 domain or a combination thereof, or comprising an amino acid sequence having at least 80% identity to a sequence selected from the group referenced in Table 15 rows 2-12507 columns H and I; and
a PtuB polypeptide comprising pfam13395 domain or a pfam 01844 domain or a combination thereof, or comprising an amino acid sequence having at least 80% identity to a sequence selected from the group referenced in Table 15 rows 2-2507 columns L and M; or
(k) a nucleic acid construct encoding a Defense System VIII comprising at least two different polypeptide components selected from
a LmuA polypeptide comprising a pfam14130 domain or a DUF4297 domain or a combination thereof, or comprising an amino acid sequence having at least 80% identity to a sequence selected from the group referenced in Table 16 rows 2-698 columns H and I; and
a LmuB polypeptide comprising a pfam02463 domain, or comprising an amino acid sequence having at least 80% identity to a sequence selected from the group referenced in Table 16 rows 2-698 columns L and M; or
(l) a nucleic acid construct encoding a Defense System IX comprising at least different polypeptide components selected from
a KwaA polypeptide comprising an amino acid sequence having at least 80% identity to a sequence selected from the group referenced in Table 17 rows 2-935 columns II and I; and
a KwaB polypeptide comprising a pfam16162 domain or a DUF4868 domain or a combination thereof, or comprising an amino acid sequence having at least 80% identity to a sequence selected from the group referenced in Table 17 rows 2-935 columns L and M; or
(m) a nucleic acid construct encoding a Defense System Xa comprising at least two different polypeptide components selected from
a JetA polypeptide comprising a pfam11855 domain or a DUF3375 domain or a combination thereof, or comprising an amino acid sequence having at least 80% identity to a sequence selected from the group referenced in Table 11 rows 2-2322 columns J and K;
a JetB polypeptide comprising a pfam13835 domain or a DUF4194 domain or a combination thereof, or comprising an amino acid sequence having at least 80% identity to a sequence selected from the group referenced in Table 11 rows 2-2322 columns N and O;
a JetC polypeptide comprising a pfam13555 domain or a pfam13558 domain or a COG4913 domain or any combination thereof, or comprising an amino acid sequence having at least 80% identity to a sequence selected from the group referenced in Table 11 rows 2-2322 columns R and S; and
a JetD polypeptide comprising a pfam11795 domain or a DUF3322 domain or a pfam09983 domain or a DUF2220 domain or a COG4924 domain or any combination thereof, or comprising an amino acid sequence having at least 80% identity to a sequence selected from the group referenced in Table 11 rows 2-2322 columns V and W; or
(n) a nucleic acid construct encoding a Defense System Xb comprising at least two different polypeptide components selected from
a JetAⁱⁱ polypeptide comprising a pfam09660 domain or a DUF2397 domain or a combination thereof, or comprising an amino acid sequence having at least 80% identity to a sequence selected from the group referenced in Table 11 rows 2323-2844 columns J and K;
a JetBⁱⁱ polypeptide comprising a pfam09661 domain or a DUF2398 domain or a combination thereof, or comprising an amino acid sequence having at least 80% identity to a sequence selected from the group referenced in Table 11 rows 2323-2844 columns N and O;
a JetCⁱⁱ polypeptide comprising a pfam13558 domain comprising an amino acid sequence having at least 80% identity to a sequence selected from the group referenced in Table 11 rows 2323-2844 columns R and S; and
a JetDⁱⁱ polypeptide comprising a pfam11796 domain or a DUF3323 domain or a pfam09664 domain or a DUF2399 domain or a combination thereof, or comprising an amino acid sequence having at least 80% identity to a sequence selected from the group referenced in Table 11 rows 2323-2844 columns V and W; or
(o) a nucleic acid construct encoding a Defense System Xc comprising at least two different polypeptide components selected from
a JetAⁱⁱⁱ polypeptide comprising an amino acid sequence having at least 80% identity to a sequence selected from the group referenced in Table 11 rows 2845-3174 columns J and K;
a JetBⁱⁱⁱ polypeptide comprising an amino acid sequence having at least 80% identity to a sequence selected from the group referenced in Table 11 rows 2845-3174 columns N and O;
a JetCⁱⁱⁱ polypeptide comprising a COG1196 domain or comprising an amino acid sequence having at least 80% identity to a sequence selected from the group referenced in Table 11 rows 2845-3174 columns R and S; and
a JetDⁱⁱⁱ polypeptide comprising a pfam09983 domain or a pfam09664 domain or a DUF2220 or a DUF2399 domain or any combination thereof, or comprising an amino acid sequence having at least 80% identity to a sequence selected from the group referenced in Table 11 rows 2845-3174 columns V and W; or
(p) any combination of nucleic acid constructs encoding a Defense Systems Ia-Xc (a)-(o);
wherein each nucleic acid construct of each Defense System (a)-(o) further comprises a regulatory element operably linked to said construct comprising a cis-acting regulatory element for directing expression of said nucleic acid sequence, or a transmissible element for directing transfer of said nucleic acid sequence from one cell to another, or a recombination element for integrating said nucleic acid sequence into a genome of a cell transfected with said construct, or an element providing episomal maintenance of said construct within a cell transfected with said construct, or any combination thereof.

12. The nucleic acid construct of claim 11, wherein said expressed defense system comprises
(a) a Defense System IV comprising the HamA polypeptide, and the HamB polypeptide; or
(b) a Defense System Ia comprising the ZorA polypeptide, the ZorB polypeptide, the ZorC polypeptide, and the ZorD polypeptide; or
(c) a Defense System Ib comprising the ZorA polypeptide, the ZorB polypeptide, and the ZorE polypeptide; or
(d) a Defense System II comprising the ThsA polypeptide, and the ThsB polypeptide; or
(e) a Defense System IIIa comprising the DruA polypeptide, the DruB polypeptide, the DruC polypeptide, the DruD polypeptide, and the DruE polypeptide; or
(f) a Defense System IIIb comprising the Drug polypeptide, the DruF polypeptide, the DruG polypeptide, and the DruE polypeptide; or
(g) a Defense System IIIc comprising the DruH polypeptide and the DruE polypeptide; or
(h) a Defense System V comprising the SduA polypeptide; or
(i) a Defense System VI comprising the GajA polypeptide and the GajB polypeptide; or
(j) a Defense System VII comprising the PtuA polypeptide and the PtuB polypeptide; or
(k) a Defense System VIII comprising the LmuA polypeptide and the LmuB polypeptide; or
(l) a Defense System IX comprising the KwaA polypeptide and the KwaB polypeptide; or
(m) a Defense System Xa comprising the JetA polypeptide, the JetB polypeptide, the JetC polypeptide, and the JetD polypeptide; or
(n) a Defense System Xb comprising the JetAⁱⁱ polypeptide, the JetBⁱⁱ polypeptide, the JetCⁱⁱ polypeptide, and the JetDⁱⁱ polypeptide; or
(o) a Defense System Xc comprising the JetAⁱⁱⁱ polypeptide, the JetBⁱⁱⁱ polypeptide, the JetCⁱⁱⁱ polypeptide, and the JetDⁱⁱⁱ polypeptide.

13. The nucleic acid construct of claim 11, wherein
(a) said Defense System IV is encoded by
a nucleic acid sequence selected from the group referenced in Table 12, rows 2-1782, columns G, P, and Q or the nucleic acid sequence set forth in SEQ ID NO: 4; or
a nucleic acid sequence encoding the at least two different polypeptide sequences recited in claim 1; or
a nucleic acid sequence encoding the HamA polypeptide and HamB polypeptide recited in claim 4;
(b) said Defense System Ia is encoded by,
a nucleic acid sequence selected from the group referenced in Table 8 rows 2-1174 columns G, AD, and AE or the nucleic acid sequence set forth in SEQ ID NO: 14; or
a nucleic acid sequence encoding the at least two different polypeptide sequences recited in claim 1; or
a nucleic acid sequence encoding the ZorA polypeptide, the ZorB polypeptide, the ZorC polypeptide, and ZorD polypeptide recited in claim 4;
(c) said Defense System Ib is encoded by
a nucleic acid sequence selected from the group referenced in Table 8 rows 1175-1830 columns G, AD, and AE or set forth in SEQ ID NO: 15; or
a nucleic acid sequence encoding the at least two different polypeptide sequences recited in claim 1; or
a nucleic acid sequence encoding the ZorA polypeptide, the ZorB polypeptide, and ZorE polypeptide recited in claim 4;
(d) said Defense System II is encoded by
a nucleic acid sequence selected from the group referenced in Table 9 rows 2-2100 columns G, AG, and AH or set forth in the nucleic acid sequence set forth in SEQ ID NO: 10 or SEQ ID NO: 11; or
a nucleic acid sequence encoding the at least two different polypeptide sequences recited in claim 1; or
a nucleic acid sequence encoding the ThsA polypeptide and the ThsB polypeptide recited in claim 4;
(e) said Defense System IIIa is encoded by
a nucleic acid sequence selected from the group referenced in Table 10 rows 2-123 columns G, AT, and AU or set forth in SEQ ID NO: 16; or
a nucleic acid sequence encoding the at least two different polypeptide sequences recited in claim 1; or
a nucleic acid sequence encoding the DruA polypeptide, the DruB polypeptide, the DruC, the DruD, and the DruE polypeptide recited in claim 4;
(f) said Defense System IIIb is encoded by
a nucleic acid sequence selected from the group referenced in Table 10 rows 124-295 columns G, AT, AU; or
a nucleic acid sequence encoding the at least two different polypeptide sequences recited in claim 1; or
a nucleic acid sequence encoding the DruM polypeptide, the DruF polypeptide, the DruG polypeptide, and the DruE polypeptide recited in claim 4;
(g) said Defense System IIIc is encoded by
a nucleic acid sequence selected from the group referenced in Table 10 rows 296-1343 columns G, AT, and AU; or
a nucleic acid sequence encoding the at least two different polypeptide sequences recited in claim 1; or
a nucleic acid sequence encoding the DruH polypeptide and the DruE polypeptide recited in claim 4;
(h) said Defense System V is encoded by
a nucleic acid sequence selected from the group referenced in Table 13; rows 2-1247, columns H and J; or
a nucleic acid sequence encoding the SduA polypeptide of claim 1 and claim 4;
(i) said Defense System VI is encoded by
a nucleic acid sequence selected from the group referenced in Table 14, rows 2-4599, columns G, P, and Q or the sequences set forth in SEQ ID NO: 5 and SEQ ID NO: 6; or
a nucleic acid sequence encoding the at least two different polypeptide sequences recited in claim 1; or
a nucleic acid sequence encoding the GajA polypeptide and the GajB polypeptide recited in claim 4;
(j) said Defense System VII is encoded by
a nucleic acid sequence selected from the group referenced in Table 15, rows 2-2507, columns G, P, and Q or the sequences set forth in SEQ ID NO: 12 and SEQ ID NO: 13; or
a nucleic acid sequence encoding the at least two different polypeptide sequences recited in claim 1; or
a nucleic acid sequence encoding the Ptu polypeptide and the PtuB polypeptide recited in claim 4;
(k) said Defense System VIII is encoded by
a nucleic acid sequence selected from the group referenced in Table 16, rows 2-698, columns G, P, and Q or the sequences set forth in SEQ ID NO: 7 and SEQ ID NO: 8; or
a nucleic acid sequence encoding the at least two different polypeptide sequences recited in claim 1; or
a nucleic acid sequence encoding the LmuA polypeptide and LmuB polypeptide recited in claim 4;
(l) said Defense System IX is encoded by
a nucleic acid sequence selected from the group referenced in Table 17, rows 2-935, columns G, P, and Q or the sequence set forth in SEQ ID NO: 3; or
a nucleic acid sequence encoding the at least two different polypeptide sequences recited in claim 1; or
a nucleic acid sequence encoding the KwaA polypeptide and the KwaB polypeptide recited in claim 4;
(m) said Defense System Xa is encoded by
a nucleic acid sequence selected from the group referenced in Table 11, rows 2-2322, columns G, Z, and AA or the sequence set forth in SEQ ID NO: 17; or
a nucleic acid sequence encoding the at least two different polypeptide sequences recited in claim 1; or
a nucleic acid sequence encoding the JetA polypeptide, the JetB polypeptide, the JetC polypeptide, and the JetD polypeptide recited in claim 4;
(n) said Defense System Xb is encoded by
a nucleic acid sequence having at least 80% homology to a sequence selected from the group referenced in Table 11, rows 2323-2844, columns G, Z, and AA or the sequence set forth in SEQ ID NO: 18; or
a nucleic acid sequence encoding the at least two different polypeptide sequences recited in claim 1; or
a nucleic acid sequence encoding the JetAⁱⁱ polypeptide, the JetBⁱⁱ polypeptide, the JetCⁱⁱ polypeptide, and the JetDⁱⁱ polypeptide recited in claim 4;
(o) said Defense System Xc is encoded by
a nucleic acid sequence selected from the group referenced in Table 11, rows 2845-3174, columns G, Z, and AA or the sequence set forth in SEQ ID NO: 19; or
a nucleic acid sequence encoding the at least two different polypeptide sequences recited in claim 1; or
a nucleic acid sequence encoding the JetAⁱⁱⁱ polypeptide, the JetBⁱⁱⁱ polypeptide, the JetCⁱⁱⁱ polypeptide, and the JetDⁱⁱⁱ polypeptide recited in claim 4.

14. The nucleic acid construct of claim 11, wherein
(a) said HamA polypeptide is encoded by a nucleic acid sequence selected from the group referenced in Table 12, rows 2-1782, columns H and J, or
said HamB polypeptide is encoded by a nucleic acid sequence selected from the group referenced in Table 12, rows 2-1782, columns L and N, or a combination thereof;
(b) said ZorA polypeptide is encoded by a nucleic acid sequence selected from the group referenced in Table 8 rows 2-1830 columns J and L,
said ZorB polypeptide is encoded by a nucleic acid sequence selected from the group referenced in Table 8 rows 2-1830 columns N and P,
said ZorC polypeptide is encoded by a nucleic acid sequence selected from the group referenced in Table 8 rows 2-1174 columns R and T, or
said ZorD polypeptide is encoded by a nucleic acid sequence selected from the group referenced in Table 8 rows 2-1174 columns V and X, or
a combination thereof;
(c) said ZorA polypeptide is encoded by a nucleic acid sequence selected from the group referenced in Table 8 rows 2-1830 columns J and L,
said ZorB polypeptide is encoded by a nucleic acid sequence selected from the group Table 8 rows 2-1830 columns N and P,
said ZorE polypeptide is encoded by a nucleic acid sequence selected from the group referenced in Table 8 rows 1175-1830 columns Z and AB, or a combination thereof;
(d) said ThsA polypeptide is encoded by a nucleic acid sequence selected from the group referenced in Table 9 rows 2-2100 columns I and K,
said ThsB polypeptide is encoded by a nucleic acid sequence selected from the group referenced in Table 9 rows 2-2100 columns M and O, Q and S, U and W, Y and AA, and AC and AE, or
a combination thereof;
(e) said DruA polypeptide is encoded by a nucleic acid sequence selected from the group referenced in Table 10 rows 2-123 columns J and L, or
said DruB polypeptide is encoded by a nucleic acid sequence selected from the group referenced in Table 10 rows 2-123 columns N and P, or
said DruC polypeptide is encoded by a nucleic acid sequence selected from the group referenced in Table 10 rows 2-123 columns R and T, or
said DruD polypeptide is encoded by a nucleic acid sequence selected from the group referenced in Table 10 rows 2-123 columns V and X, or
said DruE polypeptide is encoded by a nucleic acid sequence selected from the group referenced in Table 10 rows 2-1343 columns Z and AB, or a combination thereof;
(f) said DruM polypeptide is encoded by a nucleic acid sequence selected from the group referenced in Table 10 rows 124-295 columns AD and AF, or
said DruF polypeptide is encoded by a nucleic acid sequence selected from the group referenced in Table 10 rows 124-295 columns AH and AJ, or
said DruG polypeptide is encoded by a nucleic acid sequence selected from the group referenced in Table 10 rows 124-295 columns AL and AN, or
said DruE polypeptide is encoded by a nucleic acid sequence selected from the group referenced in Table 10 rows 2-1343 columns Z and AB, or
a combination thereof;
(g) said DruH polypeptide is encoded by a nucleic acid sequence selected from the group referenced in Table 10 rows 296-1343 columns AP and AR, or
said DruE polypeptide is encoded by a nucleic acid sequence selected from the group referenced in Table 10 rows 2-1343 columns Z and AB, or
a combination thereof;
(h) said SduA polypeptide is encoded by a nucleic acid sequence selected from the group referenced in Table 13; rows 2-1247, columns H and J;
(i) said GajA polypeptide is encoded by a nucleic acid sequence selected from the group referenced in Table 14, rows 2-4599, columns H and J, or
said GajB polypeptide is encoded by a nucleic acid sequence selected from the group referenced in Table 14, rows 2-4599, columns L and N; or
a combination thereof;
(j) said PtuA polypeptide is encoded by a nucleic acid sequence selected from the group referenced in Table 15, rows 2-2507, columns H and J, or
said PtuB polypeptide is encoded by a nucleic acid sequence selected from the group referenced in Table 15, rows 2-2507, columns L and N, or
a combination thereof;
(k) said LmuA polypeptide is encoded by a nucleic acid sequence selected from the group referenced in Table 16, rows 2-698, columns H and J, or
said LmuB polypeptide is encoded by a nucleic acid sequence selected from the group referenced in Table 16, rows 2-698, columns L and N, or
a combination thereof;
(l) said KwaA polypeptide is encoded by a nucleic acid sequence selected from the group referenced in Table 17, rows 2-935, columns H and J, or
said KwaB polypeptide is encoded by a nucleic acid sequence selected from the group referenced in Table 17, rows 2-935, columns L and N, or
a combination thereof;
(m) said JetA polypeptide is encoded by a nucleic acid sequence selected from the group referenced in Table 11, rows 2-2322, columns J and L, or
said JetB polypeptide is encoded by a nucleic acid sequence selected from the group referenced in Table 11, rows 2-2322; columns N and P, or
said JetC polypeptide is encoded by a nucleic acid sequence selected from the group referenced in Table 11, rows 2-2322, columns R and T, or
said JetD polypeptide is encoded by a nucleic acid sequence selected from the group referenced in Table 11, rows 2-2322, columns V and X, or
a combination thereof;
(n) said JetAⁱⁱ polypeptide is encoded by a nucleic acid sequence selected from the group referenced in Table 11, rows 2323-2844, columns J and L, or
said JetBⁱⁱ polypeptide is encoded by a nucleic acid sequence selected from the group referenced in Table 11, rows 2323-2844, columns N and P, or
said JetCⁱⁱ polypeptide is encoded by a nucleic acid sequence selected from the group referenced in Table 11, rows 2323-2844, columns R and T, or
said JetDⁱⁱ polypeptide is encoded by a nucleic acid sequence selected from the group referenced in Table 11, rows 2323-2844, columns V and X, or
a combination thereof;
(o) said JetAⁱⁱⁱ polypeptide is encoded by a nucleic acid sequence selected from the group referenced in Table 11, rows 2845-3174, column J and L, or
said JetBⁱⁱⁱ polypeptide is encoded by a nucleic acid sequence selected from the group referenced in Table 11, rows 2845-3174, columns N and O, or
said JetCⁱⁱⁱ polypeptide is encoded by a nucleic acid sequence selected from the group referenced in Table 11, rows 2845-3174, columns R and T, or
said JetDⁱⁱⁱ polypeptide is encoded by a nucleic acid sequence selected from the group referenced in Table 11, rows 2845-3174, columns V and X, or
a combination thereof.

15. The nucleic acid construct of claim 11, wherein expression of said defense system in a host cells provides the host cell with resistance to foreign nucleic acid invasion.

16. The nucleic acid construct of claim 15, wherein said resistance to foreign nucleic acid invasion comprises resistance to at least one phage infection, or resistance to plasmid transformation, or resistance to entry of a conjugation element, or any combination thereof

17. A transmissible genetic element or an expression vector comprising the nucleic acid construct of claim 1.

18. An isolated cell expressing a nucleic acid construct of claim 1.

19. The isolated cell of claim 18, wherein said cell comprises a gram-positive bacterium or a gram-negative bacterium.

20. The isolated cell of claim 18, wherein said cell comprises resistance to foreign nucleic acid invasion.

21. The isolated cell of claim 20, wherein resistance to foreign nucleic acid invasion comprises resistance to at least one phage infection, or reduced plasmid transformation efficiency, or resistance to entry of a conjugation element, or a combination thereof.

22. A food, food additive, feed, nutritional supplement, probiotic supplement, personal care product, health care product, and or a veterinary product comprising the defense system of any one of claims 7-10, or the nucleic acid construct of any one of claims 11-16, or the transmissible genetic element of claim 17, or the isolated cell of any one of claims 18-21.

23. The food, food additive, feed, nutritional supplement, probiotic supplement, personal care product, health care product, and or a veterinary product of claim 22, wherein said defense system comprises a combination of Defense Systems selected from Defense Systems Ia-Xc (a)-(o).

24. A method of preparing a food, a food additive, a feed, a nutritional supplements, a probiotic supplement, a personal care product, a health care product or a veterinary product, the method comprising adding to the food, food additive, feed, nutritional supplement, probiotic supplement, personal care product, health care product, or veterinary product at least one defense system of any one of claims 7-10, or the nucleic acid construct of any one of claims 11-16, or the transmissible genetic element of claim 17, or the isolated cell of any one of claims 18-21.

25. A method for identifying a defense system in a prokaryotic cell, comprising the steps of:
(a) selecting, in-silico, a family of genes that are preferentially located in close proximity to a known defense-related gene family present in a plurality of prokaryotic genomes; and
(b) analyzing, in-silico, the DNA upstream and downstream of said gene; and
(c) identifying, in-silico, a cassette of genes within the upstream and downstream DNA analyzed in step (b) comprising said gene of step (a), wherein said cassette of genes has conserved synteny in said plurality of prokaryotic genomes.

26. The method of claim 25, wherein the gene of step (a), located in close proximity to a known defense related gene family, is within 10 genes upstream and or 10 genes downstream of the known defense related gene family.

27. A method gene editing; said method comprising contacting a nucleic acid sequence comprising a gene to be edited with at least one polypeptide component of a defense system, wherein said defense system component comprises a component selected from the defense system of claim 7; where said method results in the gene being edited.

The application's sequence listing, which the Patent Office published only in electronic form, follows.

SEQUENCE LISTING (97419 sequences)

SEQ ID NO: 1 - protein, 704 aa, Xanthobacter autotrophicus
MTVLKGLGRCVLFWTIIFGIFGVLYWLLPVVDMSALWGGTARAFSGDFSTVGTQPYAFALAFALFATAVGFASAFLILHVGPIGWRLRRLRLRIAGTGDMEGFARTYDATRALMERDRLISHAWKQFDTVLVHRPDERIIRSTARAHAFFNLGMAREKYFGLKMMGALPGYFVGIGLLLTFAGLVLALNKAAMAVNSSDAAGMQGATRELLQVATFKFATSIAGLGASIALSLLFRIYTILMEGFFIGFCETVEDRVRYLSAQQIAAESRDFAAEQTDQLKSINSADFFARMGQELTPGMSRMFETALDKVMSPVTTSIDQAVHRLADSSQSGMSEMLTRFTDSVQNGAGAELRGLAETLRGMQGAMVGVQQGLTGSGEDFGRRMSDAAENLNRLVTDAGARLGEGTDQSRAVLMDAVTAMRETFEQANRKVDEGLGAAAGGASARLEEVMGRVLGSLEAQVGGFRESLSGFQEKMAGQLDETRVRVSAAQAEATDAVAQASAQAARALQDGLADALVRINGEIERFVVAMRASEVTLAAQAKAMMDATDKSRQVADAFSRTAQDVRAASVPLAQSGERIAGATEKLGEAAGRSVAVLDKSQEEARRLAQALTGHVSNLDQVWRSYSARFEAVDEALGKAFERLTRGTDEQQDRIATFVRDVDVTFKEAVDTLAGCIGGLKDNTEEMVEAVDDLKRALRVEAAE

SEQ ID NO: 2 - DNA, 2115 bp, Xanthobacter autotrophicus
atgacggtcttgaagggtttggggcgctgcgttcttttttggacaatcatattcggcatcttcggcgtcttgtactggctccttcctgtcgtcgacatgagcgcgctctggggcgggacggcgcgcgccttcagcggtgatttttccaccgtcggcacccagccctatgctttcgccctggccttcgccctgttcgccacggcggtcggcttcgcctccgctttcctcatcctgcatgtgggtccgatcgggtggaggctgcggcgcctgcgattgcgtatcgcgggcacgggggacatggaaggcttcgccagaacctatgacgccacgcgcgcgctcatggagcgcgatcgactgatcagccatgcgtggaagcagttcgacaccgtgctcgttcatcggccggatgaacgcatcatccgcagcaccgcccgtgcccacgcctttttcaatctgggcatggcgcgggagaagtatttcggcctgaagatgatgggcgcgctgccgggctatttcgtcggcatcggtcttctgctcaccttcgccggcctcgtgctggcgctcaacaaggcggccatggccgtcaacagctcggatgccgccggaatgcagggcgcgacgcgcgaactgcttcaggtggcgaccttcaagtttgccacctccatcgccggccttggtgcctccatcgcgctctcgctgctgttccgcatctataccatcctgatggaaggcttcttcatcggcttctgcgagacggtggaggaccgggtgcgctatctgtcggcacagcagatcgcggccgagagccgggattttgccgccgaacagaccgatcagctcaagtcgatcaacagcgccgacttcttcgcgcgcatggggcaggagctgacgccgggcatgtcccgcatgttcgagacggcgctcgacaaggtcatgtcgccggtgaccaccagcatcgaccaggcggtccataggctcgccgacagcagccagagcggcatgtccgagatgctgacgcgcttcaccgattcggtgcagaacggggccggggccgagttgcgcgggctcgccgagacgctccggggcatgcagggtgccatggtgggcgtgcagcaggggctgaccgggtccggcgaggatttcggccggcgcatgtcggatgccgcggaaaacctcaaccgcctcgtcaccgacgccggcgcacgcctgggtgaaggcacggaccagagccgcgcggtcctcatggatgcggtcaccgccatgcgggagaccttcgagcaagccaatcgcaaggtggacgagggtctcggcgccgcggcgggcggggcttcggcgcggctggaggaggtcatggggcgggtgctcggcagcctcgaagcccaggtgggcggctttcgcgagagcctgtccggcttccaggagaagatggccggccagctcgatgagacccgggtccgcgtctccgccgcccaggcggaggcgaccgatgccgtcgcccaggcctcggcccaggcggcgcgcgcgctccaggacgggcttgcggatgcgctcgtgcgcatcaacggcgagatcgagcgtttcgtcgtcgccatgcgggccagcgaggtgacgctggcggcgcaggccaaggcgatgatggacgccaccgacaagtcgcgccaggtggccgatgccttcagccgcactgcgcaggatgtgcgcgcggctagcgtaccgctggcccaatcgggcgagcgcatcgcgggggcgaccgagaagctcggcgaggccgccggccggtcggtggcggtcctcgacaagagccaggaggaggcgcggcggctggcccaggcgctgaccggccatgtctccaacctcgatcaggtctggcgcagctattcggcccgcttcgaggcggtcgacgaggcgctgggcaaggcgttcgagcgcctgacgcgcggaaccgacgagcagcaggaccggatcgccactttcgttcgcgacgtggacgtgaccttcaaggaagcggtggatacgctggccggctgcatcggcggcctgaaggacaataccgaggagatggtggaggcggtggacgacctgaaacgcgcgctgcgcgtcgaggccgcggaatga

SEQ ID NO: 3 - DNA, 2168 bp, Escherichia coli
taatggtcttccttccattggtatctcgtgagtatacaagcaatatcgaatcggcaaatatactcattagtatactcacaagcctgttgatgtgggttggttcaggttgacttcagttgaggagaaaagctggaaaagccttgcgtggcgcggatttcaggcataaaaaaagacctcagttgaggtctatttacatacttttggtgcgaaggccggactcgaacatcgcaactatccttatgatcttaatggattaaaaattaccatattggtcatgataccatcattgataccatcagacccgattgatgataatcgaacagtaataaaatatgactaaacaatttatgcttcaacataagattgaatgctttgatctaccattttaatgcagtggaaaaatttttaacacaatacttaagaaaaataatttcatataaaaactacatttcatttcatatagttaacacaccaaaaacaactgtatataaacccagtaaaaaatggtagaatcactattgtgttcaattgttgaacatttataatacatttgtcggataggggggtgtttatgcaaaggaacacatacaacaaagtaggtctatacatcctatctttagctatgctttttgtttttattattatcctgactgccaaaatccccttttgcttcacttcggattgtagcttcataggtttgaagaaacttgtattaacaaatattgttcctattgtttgctttgtattttttctatttagtatttatttttataatagattaaaaaacataacaaaatacaatggacaagatagcgttaaaataacatcatgtcaaagcgaaagctatgaaagtttaacattcttagcaacatacattgtaccttttatggggtttagttttgaagacatgcaaaagaatatagcatatcttttgcttgtagtagtaataggcattatttttattaaaacagacaagtattatgcgaatccaactttagctctgtttggctttaaactatacagggtaaatatactacacccaggaagtggagaaacaaaaaatctgatagctatttcaaatgatgtattaaaagtggacgataatgtttattatagtttctttgacgaatttgtttttatagcaaggaaaaaaatatgactactcagcagttaaaagaaaaaatttcaaaaataattgataactttagcggaatcagggttgtatttactactactgctaatgaactaaagctttccagaattgaagggagtgcattaaatagcatagctgaagggtttattgacaaaatcaaagaagacattataaataatgaagatctcacctcacccttgctgtccaattttgatgatagaaaaaatgccttgtttaaatttgattacgaacaatatcctgaagaatttaacaaaatcactcaggccatcgctatccctcctaactcacaagattattataaccctttaaataaattcacagatgtgaaaggaattataattttaataagtggagataacaaatgcctggctctttataaaaacaaaactaaccttgcagtattgagaaatagcagaaaaatgtttaatttagtccctgaccctgatggatacttgaaacaactccctaatgagatattacggttagatttcaattatgatctattttcaattggtgaggatttttacattaaaaatcacaagactcttgaaactcaaatgaaatttcatcaagtgattgaagcccaagcagttattgctttaaattctttacgggattcactactaattgaagacatatcaggtttagaaaagagttcgagagaaatttcattcgctagaaagttggcaaaaatctccaaacattctcctgttttggggaaaatagatactaaaacaattattgattatgtatcccaacataaatatttatctgcaatacttcagattaatgaagcgggagataagttattaattaaaaccaagacatcacagaagcatttcattaaactcatgagcgatgattatttacaatcagatctaaccaaaataatatacatgagcatagcaaaagacagattagatgaatagaactttaagtagaagtgacaaatattataaaccattcttgaaatatatttgtcactattactaat

SEQ ID NO: 4 - DNA, 5122 bp, Bacillus cereus
taaaagctgcttcaggtaaatatcctgaagcagcttttgtggttaaaagagaaagtaggtaatagtcatttgtagtgtattaaagaagatggaggtgaataaaacgatgtaatttaagccataagttggccgctttggccaatgttttctttattttatatatggtaaaattataattagtttagatagtacatttgcttagtaaagatgtactttaaaaaaaaataaatttatttttgtggctcttaacgaaatgaatatgctattttgatgtatcttaggtagaaatctaaaaatattaagaagttgttaaacagcgttaagctaggaggaaatatatgactatacaagatgatatggttggaaaacatcctatcgagaatgatttttggaaatggttgcagcatgaagatacagaatcctcggatttaaaacggcatcgttacttagaagtggattctagtaatcgtgatgaagctattaaatctgttgcagcttggctaattaagtatcatttgtcggaaggtaaaaagagagtgataagaaaaaaacaagaaatacttgaaaaacatgattttgctgaatatgcacaatcgcttcatgtttttcctaaaagtgataaaacacagaaaggaaatttaggagaaatatttttatcggaatatttgagtcagacatcaggagttcaaatcctagtgtataaattacactacaaccccaacatagatcaatcgatgaaaggggatgacgttttacttgttaacccagataaagttttattaggagaaagtaaatttcgttctactccaaataaacgtgctgttgaagaggcttctgaacttatgaaagataagttaactttgcctatgtctcttggttttattgcagatagattatttgaacaaggaaaagatgaattaggtgaagtgattttcgatcttcaatttaagatgagtagtatagaaatagatattaaaaatatagggtttttattatctactaaaaaggttcgtagtatcgtagaaaataacctttcttctccaaattctgattttatttttatttcattaggaatggatgacccagcagcttttttgaaaagtgtatttgactatgcagaaagtaatcttctggagggatcttatgaaacttgaaacagcatataattattttgaaaagcttgaaaaagatgaacgtcttcaaaactatatttcacaggctaattcaagatatatcctttacatagcaaatgaaccattggaaaatttcccacattacactgtaaatctagatgaaaaatgtacacatatagcatttagttatctcaattgtggatggcgcttttttttagagaaaatcagtgatgaagctacaaaatgtatggaaaaggcttctgaaatattggagtatttgtatgcctatagtgattgcgaaaagttatataaagagtattaccgtttagtatgctcattagcgtattatatatctgcacagtattctaaatcttttattatcttggggaaatataattctgattcatatatagggaaaataacaaaattatttttaactagaaactttatagaattagaaaggcaactggaaattaagtacttgaagaacgatgaagaaacttcaagtgagaataaggataacataatatatgaaaaaattttatctaatgcatttttacatataattaattttattcgcacagggaagatggaatctttggaaagttctaaagatatggttcgagatttaattactttggctgatataaataatgaaccacatatgtggtggtactttagactactatatttggtttttgaagaatatgaagatgggtctttgtggaaagtggttccaccgcttttagataatgatgatatatcagctaaatatatttatgctaatttatacaaaaagaagccaataactgaattttttaagtcgcaaagggaatgtttggacggagagttattaaagaacgatggtttcgtaattggaatgcctactagttcaggaaaaacaaaggttgctgaagtaacaatattaaaaactttaactaaatctccaggtgcactttgtatttatattgcaccttatcgatctttggctaatgaagtggaatttagcctatctagtatgtttgagattatgggttatcaggtttcgcagttatatgggggatctcaaacgtctccgctggatcggcaattgactaagcaagctaatgtcataattgttactccggaaaaagctaaatcgatgttgagatctaataaagacttaaaggatagaattcaacttgtaatcattgatgaaggtcatttagtcgggtttcagccaagatatattacaggagaattgcttattgaagaactaaagattgttttgaaaaaaaataatggtcaacttgtactactatctgctgttcttcctaatatttctgatttttctttgtggattggtgaggatgataaagctaaaagaatgtctgtctggagaccatcaagtcaaagatttggagaattatctttagcaagaaatactgtgaatataaattgggagggagaaacaccatcatataataagaactttataacaccaaaattagtaaaaccagaacggattacaaaaacaggaaggaaatatgcagctaaatattttccagcagataaaaaagaaggtgttgctgcaaccgcaacaaaaatgctagatgtgggatccgttttgatttatgtaggaagatcgaatatggtattgtctcaagctaggattgtttcgaaactctttgaggaaaagggaatagaacatgagtggaggaataaaaacgattggttgtttgtggaattagcttgtatagaagaatatggggaagattcagaaatattatctttattaaaacaaggtatagtaccccatagttctaaattaccaacagaagtacgtcagagcatagagaaattaatggctaatgataatcctaagataataattgcgacatccacacttggacaaggggttaatattggtgtttcgacagttattgtatctaatgttcgtttagatgagagtaatactgtaaaagtaaatgatttttggaatattgctggtagagcggggagggcatttacagatacagagggtaaaattctatacgcaattgatagaaataaaagccagtggtctatttataatcaaattcaaatgaaagaaatgtatttcaaatatagaaatattgaaaaagctacaagtggtctctatcttcttcttcgttatctatttatattatcggaagaattcgagatagaatacagcttatttttagaacttctagcagaaaatagagaatccattgatgaacagaaagctgtggagtttttttctgaggcagatcagttccttgagttattagatgatactctaatttccatggatattatgaatgaggcaaacgttttggaaaattcctcttcttggatagacgatgtctttcgttcttcgctagcttttattcaagcaaaacaagatcaatcattttctgaagaaaaaatgattgaaatcttaaaagcaagaaattcaggtgtaataaagttggctggagaagaaacaaaatggcattcaatagcatcatcaagtgtaccattgagagcaagtcttgtaattgaacataggatagatgagctactaaagtatgtacgaaaatacattgactcagataagagttttgaagagttattatctcttgtgatggaacttgatatatttattgatagtctaccgatatctaaaatagaaggaatagaaataggtgctaatttttctgaaattcgtgagggatggtttagtggtactagcatacacatattggaaaaaaggcacgaaaatgtaagaagtatctgtaatgaatattattcttttcattttccttggattgtaaatgcgatagctcaaaagatcaaattaattgattgccaagaggaatcaaaggtgttggagcaaatttctttatttgctgaaatagggttaaacaataataaaagtgtaaaaatctatttggcaggtataaagtcaagaaattgtgccactgaattatctgagaaaataggcatggataatgatttggtgacgcctgttaaggagctacttctagagtttttcaatttatgtgtagtgaaaaaagaggattgttcagaaatttgtttcaattggttaaagcttttaaatgatgaaaaagaagctaaagagtatgtaaaggtaaaaagacggtctttccaatttaatattccttttgatttacatgacaatcttttatatataaagaaagtacagagtgaaatatggctgtgctcatttgattataaaattaaaattcctgtattaaaagagaaggcgttatttaatgagtgctcggatatacctgatattttcttgagaaaggaaaaaggagatgtctggattttagattctcataatccttatattattttttattaatttatttgaatttaatattttggataaggcagattgttcaactatttggaggaaataaaaaaacggattattaagggtgaactaaatttaatcaaactttttacaaatctgcatctttctcattttcacctttaaaaatgccaaggaactcaatgaaatttggtatgcagataccttcaagagccaccaatcctaaagtgaaatctccatagtttttacgatattcttcataaattaatctggctatatcttcaccaaaagaaaacatttcttttgttatttcggaaagataaggtagaagtggtatatactcatctggtttacctttttcatttgaaggtacttttactgcatacccttgatcaagtgtcataatgttaatttgatgaccactatgtacaatagaatcgcgtatttctctattcttatgaaagctttctataatagataatagttttttttctaaggattcaggtaatttatccttggttgttcctttttcaacggaagtaattaaactatttaaggaatcaaaactgagttgtccaacaaatttaggagctactgttaatcgtaggatttttgccatgaaatcataaattgaacgaatatccat

SEQ ID NO: 5 - DNA, 5325 bp, Bacillus cereus
gatcaaacaatttattcctattggaatgggggaagagtcccaaactctcaaagagctagttgatattgtttggctgctgtgatggatttatttctaagaaaatagtgtgggctattcatttttatgttggatgtttgcagacttaataatgatagctttagggaacacttactctgtaaaatcggttattccctaaaccgggatttaggttcacagtatacaagctctggggttacagaatacacttaatcttacagcatcattcaaccaaaagagtctctttatgataatgcctgtgtcgagtcattttacggtattaaaaaaagaagaagtaaattatgtgcaatatctagactaccaattttccaagataagaaatatatgttttacgtttcggaaatattagttgtatcaatggtttatagagcattctacattttcttgtgcaaatcatgtaacacagaaaaatgaagtttatgaaaaatatttatttatttttcactggtgaatactgaaatagtattcatttattttttgtttattttacaaatttttttgaaagtcgttcaatagcagagaatttctagtataattttggtaaataattctatagattgatcggaattatgaatttaatttacagatattttagagtaacattggagctattatattaaaaaagaatgcttcaagattgagcgaacgatagctttgggataaattagctttttggcggatagtgaagcagtaacgagtaagttagtaaataaagtgttaaatagaataacagaagaataggagagggctttatgtatttaaaaagtttaaaaatctacaactttagaaaatttggaacaaataacaacaagatagaatttgttgatgctaaaagttttcaagaacaaagaaataaaaaagaagtaaatattgctccaacaacaactttaattgtaggaaagaataactgtggaaaaacaacgattattaaatcgttagataatcttattaataataataaagacgcttttaaagcaaatgattttaattttttatacttaaaaaaactaattgagtattatgaacaagcaattccaaaattagatgatgaattaaaagaaaaaattaaaacaccgtatcttcaatttaatatttgtattggaattgagaataatagtaatgacttagttaccaatatagttcgttttatgaaattagatgatattaataattctgaattaaaaattgttataaaagtagaattggagaacgaagaagttttcattagagatgtgaaaaaactgttagagaaaaatgataattcgagtcttcggtttaatagctttttggaattgataaatgattcggattttaaaataaattattataatacagataatgataaaatagataattttaacataaaaaatttaattgaattgagaccgattaaagcaaataacattgaaagcgaaaaatgcctttcaaaagcttttagtaaaataattgaatatcgctataaaacattattcgaagaggaaagcgataatcttaattcgacaatcataaatattaatcgaacacttaccaaattaattagtgaaaaacatacggttagtataaataagtctttagaagaaattgaatcaaatgaaaaacttcaagtattgctaagggcagatttgacttttcaaaatgtgatgaataatttaatcaaatatgaatacgtcgaacgtaatatgaatatacctgagaatcaatttggtttaggttatacaaatttgatgatgataatagcggatttaattgattatatggaaaaatacccagaaaactcatttaacagtaaggttaatttaatttcaattgaagaacctgaaacatttatgcatccacaaatgcaggagttatttataaaaaatataaatgaagcgattgcttctttattgaaaagtaaaaataaaaacgtaaatagccagttgataattacaacacactcatcacatatactaaatagtaaaatacacagtggtaatacttttaataatataaattacgttactaccaaaaataattatactcatgtagtgaatttgcatgatgatataattatccctaaaagtgaaaaaaaagctcataaaagagagcaggatcttaagttcttaaaaaaacatattaagtataaagtttctgagttgtttttttcagatgctattatttttgttgaaggtgtgactgaagaaacgcttcttaaatattatattgatgataataataagctcaataaatattatatatcggttttcaatattgatggggctcacggaatggtttatcacaatttaattgaaatactacaagtacctgctttgataattacggatttagatatagaaagagatgatgatgaaaagaaaaatttcaagcaaatctctgatttaacgggaaaattcacaactaataaaacaattaaaaagtataatgatgactctaatagtttagaggaattacagcatgagcagcttaaaataaataatatgtatattgcatatcaaggtaaaatcgaagaatattatgcaacaagttttgaagaagcatttatcttaacaaattacaaaaatgaacttttaaatagtgtactaaaaaaaatgaaacctcagatttatgaaaatattatgggtgagggagatgatttcacaaagataaaggaaaattcctataaactccaaaaaaagttatcaaatgataaaagtgattttgcgaatgagctactctataagtttataacggaggatataacaattccttctttgccaaagtatattaagagtggcctttcatggttagctaaaaaattagaaggggaggaataagggtgagtttatccaaaataatcccatctaataagaaagaagagcagaaatcaataaatgcaatttttaattctattgataaaagtgaaggtatcatttttaattctggtgctggtgctggaaaaacatacgctcttattgaaagtttgaaatacataataagaaactacgagaagagcttaaaacaacataatcaacaaattatctgtatcacatatacgaatgttgcaactaaagaagtaaaagagagattaggaaacacagatttagtattagtttctacaattcatgaaagaatgtggggactcattaaagattatcaaaaagaattagttgagattcacaaagaaaagttggaagatgaaatctcaagtttaaaacaaaaattagaaaaaggtcagggatacgaaaaatttcaagaattagaagaggacttaaagggaaattttaaaaaaataatgattgagaatagggaactattttttcaaaattatagtgctaaagcagcagaggtaaaaaaatcatttaaaatactcttaaacgattaccctaatatgctgaaaaatgttggaaattttaagagaatagtaaatgcaatttacaaattagatcagtatagtaaatgctatgaaaatataagcttaaataaacagggttataaatctgtagagtacaattcgatttataataacgatcaactttataaaatgagaataagccatgatactttgttagattatggtctgaaaataattaagaaatatgacttgttaaaacaaataatcattgataaatatccatttatttttattgatgagtatcaggatacggatgaaaaagttatattaataatgagttatttagagcaatatgcaaaaaaaattgatcacaaaatttttataggttattttggtgatactgctcaaaatatttatgatgatggagtaggaagtgaaataacaaagattcactcaggattaaaacagatagataaagtgtttaatagaagatctacaaaagaagtcattgaggttataaacaaaattagaaacgatagcatcgaacaaatatcaatttatgatgattgtgaaggcggtagtgtaaagttttataaagggacttcaggtaatgttaaggacttaatagagcggtatatatatgaatggaaaataactacggaaaatcaactacattgtctagttttaactaataagattgttgcagaatatagtggttttaaaaacatatacgaagctttcaaagagacagataaatataaagggagcaattataatcaacttaatacggaactcttaagtaatgatttatctaagcttggtgaaattcctaagttgttatttaatatagttagattacagaataatcttgtggataaaacgacttcagttattgatattacacctaaagaaagcctattcgatgagatgagtatagaagggttaaggaatttaattaaactattaaaacaataccaagggaaaacattaggtgaatatatagaatcgatatcaactgtttattctcaagttaatgatgaaaattataaaaaaataatagattggacttttggttttgaaaatatcacattcgaactatttaaaaatcatcttatagaaaagttatttaataatatattagatgatgatgttgatcgtgcaaccgcaactatacaaaaaatactagaagttgatattgttgagtatggattgtggtataaatttattatggataaacaagaagagaaggttatttatcatacttatcatggtacaaagggacgagagtttgataatgttattattattatggaaaatgcttttggaagaaatcacaattattttaatttcttttttgaaaatttcttgcatccagatgtattagaaggtgaaaagaaactgaacttcgagaaaataaagaatttgttatatgtttcttgctctagagctattaagaatttaagagttttatatattgatgatgttaccgattttgaaagtgaaattaaggaaatgtttggagaagtatatcctttttagtaataattgaatgaagatatttttcatgaataaaaaaatgttgtgttgatgggaagcatcataaaaaaacactcttaacctttttacaaagaaacaccccactcgttaggcttaattattaagtttatgtattattttattattcaaaaccttatttttgctattgattagccgctcataatatttaattatgagcggttttataacatccgagcacaagttttaaaaatgaaaattcaggactaggtttattattcaagacgatgattacatatcatttaaggtgcaggaaaataattaaagcattataagtaatatcgatatttcagtttgttaagattttctaagggaaatttgttcttttatctagaaaataattggattatctaattcatcat

SEQ ID NO: 6 - DNA, 3893 bp, Bacillus cereus
ataatagtactatttaacgatacctgtcaaaaaacataatcgatattttatcaaaattaaaaaaagaaaccattttatttaacttttctttaaaatggtttcttggattatgggacttagttttttgtctggaaaatataatgggaatttattgtataataaaactatgtagaaatacatggtttttttatttattgaggatgggattctagtgaaggggaacagcttgcttaactatttataaaatacagggataagaacagaattaaagaaggtatatgttaaaagtaaaataattaagaagataaggtgatgaataatgaaattcagtaatattacaataaagaacttcaggaattttgaaaaagtaaatataaatttagataataaaaatgtgattttcgggatgaatgatattggaaaaacaaattttttatatgcattgagatttcttttagataaagagataagaaaattcggttttaataaatctgattatcataaacatgacacttctaaaaaaattgaaattattttaacacttgatttgtctaattatgaaaaggatgaagatacaaaaaaacttatttcagtggttaagggtgctagaacatcggcaaatgcagatgttttttatatcgcactagaatctaaatatgatgataaagaattatatgggaacataattttaaaatggggatcggaactagataatttaatagatataccagggagagggaacataaacgcgttagataatgtatttaaggtgatttatataaatccgcttgttgatttagacaaattgttcgcacaaaataaaaaatatatttttgaagagtcacagggtaatgaatcagatgaagggattttaaataatattaaatctttaacagatcaagtaaatcaacaaataggagaaatgacaattattaagggtttccagcaagagataacaagtgaatataggtctttaaaaaaagaagaggtttctattgagctgaagtccgaaatggcaattaaaggatttttctcagatattattccatatataaaaaaagacggtgattctaattactatccaacctcaggggatggtagaagaaaaatgctttcttactctatatataactatctggctaagaaaaaatatgaggataaaattgttatttatttaattgaggaacccgaaattagtctacatagatcaatgcaaattgctttatcaaaacagttatttgaacaatctacatataaatattttttcttatccactcactctcctgaacttctttatgaaatggataatacaagattaataagagtgcattcaactgaaaaggttgtatgttcttcccatatgtataatgtggaagaagcctatggaagtgtcaagaaaaagctaaataaagctttatcatcggctctatttgctgaaagagtacttttaatagaaggtccttcagaaaaaatattatttgaaaaggttttagacgaagtagaaccagaatatgaattaaatggaggtttcttgcttgaagtaggagggacgtactttaatcattatgtgtgtacattaaatgatttaggtataacccatataattaaaacagataatgatttgaaatcaaaaaaaggtaaaaaaggtgtatacgaattactaggattaaatagatgcttaaacttattaggacgtgaaaatctagatgagattactattgacatccctgaagatataaaaggtaagaagaaaaaagagagacttaatgaaagaaaaaaagagatttttaaacaatataaaaatgaggtaggggaattcttaggggaacgaatatatttatcggaaatcgatctggaaaatgatttatattctgcaattggtgaaagcatgaaaagaatttttgaaaacgaagatcccgtgcactatttacagaaaagtaaactatttaacatggtcgagctagtaaataatttaagtactaaagattgttttgatgtttttgagcacgaaaaatttgcatgcctaaaggagttggtgggtagtgatagaggatgaaatgtctagagaacaaataataaaggatgggggtaatattcttgttaccgctggagcaggttcgggtaaaacaacaatattagttagtaaaattgaagctgatttaaaagaaaataaaactcattactcaattgcagctgttacttttacaaataaggcagcaaaagaaatcgagggaagattagggtattcatcaagagggaattttattggcactaacgatggttttgtcgagtctgaaattattaggccgtttattaaagatgcatttggaaatgattatccagacaatttcactgctgaatattttgataaccaatttgcttcatacgataagggattgcaagtgctaaaatatcaaaatatattagggacttatagtaatcctaaaaagaattttaagtttcaattggctttagatattttaaaaaaatcacttgtcgctagacaatatatattttcaaaatacttcaagatatttatagacgagtaccaagattcggataaggatatgcataatttatttatgtatttaaaggatcagcttaaaattaagttatttattgttggtgacccaaaacaatctatttatatctggaggggagcagaacctgaaaattttaatggtcttatagaaaattctacggattttaataaatatcatttaacttccaactttcgatgctgtcaggatattcaaaattactctaatttatttaatgaagaaactagaagcttaattaaagaaaaaaatgaggttcaaaatgtaatcagtatagcagacgatatgccaatttcagatattttattaaaattaacagaagaaaagcaggtattaaacatagaagcggaattagtgattttagtccggagacgtaatcaagccattgaaataatgaaagaactaaatgaagaagggtttaattttatttttattccccaaaccccattagatagggcaactccaaatgcaactcttttaaaagaggtaattaaatatgttaaaaatgatagatattcaatatatgatttagctgctgaaattgtaggtaatctaagttcacgagaaattaaggagatacaaaaaataattaatgaattactagtacctaatattaatcaggtactaattaatcaggtattaattaatttatttgctaaattagaaattactttagatactagagaaattacagcatttacagaagtaatgatgacgaatgaatttgacatagcatttgatacaaatgaatatttacataaaatatttactgtacattctgcaaaaggattagaatttaatcaagtcattattactgcaagtgattacaatgtacactataatagagatactaacgaacattatgttgctacaactagagcaaaagataaattaattgtcattatggataataagaagtactcagattatattgagacgctaatgaaagaacttaaaattaaaaatattattaagtcaatataaggaaacttaagtttgacataataacgatgaaatataaaagtttgttttcgtaaatagccaatgtcactaagttatcaagacttaaattttaaaacctttaaaaataaagactctaacatattagtcataattaatatgttagggtcttttgttttatttgaaatgttattttcaactttataagacaatgaatattatttttgtttaataatatccagagtgctcaaaataaatatcagaaggtaattcctaataatattgcgtgtgtagttaatagttaaaataataaaataaaaaaagatggtataatttagtataccatctttttttattttattaggaggttcaaaa

SEQ ID NO: 7 - DNA, 3358 bp, Bacillus subtilis
tgcatatttataattgtgtgttgaggcgagtgttaatctattgcaaatagttttgcaattctccactagtcaattatatctcttgatatccatcttgataaaaaacttttaaagacactttctcatttgggaggtgtctttatttattggtatcatagtttttttatgggagctaataaaagtaacataagatccgctcatgcattctgtgtctgataatgaaaaaaattaggtatttatatttgatagttcaaaatctatattattgaaaacataataaaattttcctgataaatagtaccatttttttgaaaatcctgatatcatataaataagagagaggatatcaggaggagcgcaatgattgaaattgacaacgggggagccatcgcactaaaaggatttaactatcaaaaagcttccatcatacttgtaatgattcataattttgaaaaagataattttatagtcatacctgaatcgcaagaagattttgaaattcatcttggacaagatacttattttatacaagtgaaaggaacaaaaaaactttccataggtaagttgaagtcaaggcctagcggaaaagcttcaatcatagagaaaaatctttctcctggtaatgttggagatataaggaaaatatttctctgggatatagcggagttaacaaaaaacgaattgataagccaagaaggaacgcttattcctatgaaacacagcctttcattgaaacaaaagacagagattataaatactcttgatttagatgaagaacagaaaaatagaatgaacaatcaatatatatatataaccccttttccaaacgatataaatttggctttaacatttttaaaaggagaaatggttaatgaaaacttgctggtttctaacgatcgagctaaattagttttaggagaactatcattggaaatagatcgtaaaagtgaaatagtagtttctactgaaagtgatgtagaaaggaaaaaaatcgacgggaattatcttaagcaggtattcattaatattaagcaaaaagagatgtttgatgaaattttagataatctctctatcaacacaattatgaaaaaaaaagtaaagaaggagaaattaagaataccactcttgtatcaaaatattaaagagcaaacgaagcaaaaggcagatattaatttacttatgagggagaatgatgagggtgctattaactatctcagagatctattggtagagatagtgccagatatgaagcctacagaactatctattgctttagcaatagactgtttttgtgagttgggagaataaaatctatgataataattgctttttctattcttgattttaaaaataaagaagcacaaaattttgactttaaagctgggactaatctaattgttagtaaaggaaataccaaaggtaaatcaagtcttttaaaatcaatgtattatacattaggatttgatgtgcatcaatttcctagtaactggaacataaattttatgtatttccaaatagaagtcttaataaataatgttaaatataatataactagacaaaaaaatatttttagagtaagtgatgtagaagtacctttgaatgtaaaagagtattcagagtggcttcaacataaacttgagattaaaatgcagttagctaatactcatactaagcacttatacgaggcatattcttcggcagtaattttaccattttacatagatcaagacgattcttgggatggcggaatttatagaaatgtaactaatactctgaatcaatatactcgcataccggcagatattttcaaaagtgtttttaatctctccaattacgaacttctggagttgcaaaattcgcttactaattatagtaaagaaaagaatacggtagtgtctacaataaagagtttattaaatgttttggaagattatagacatgaaaacgcagatgtccctactgtttcaaaaattgataaaatagccttaaataaagatatcgatcgctacttgcagatgcaaaatgaattaaatgaacaaatagtaaaatataaaatgaagctattaaacaagcaagaaatgttggatttacaaaagcaagaattgtctgaattagagcagcttttaaaaatgaacaaaaagagatataactctattgaaacagaatgtcaatattgtcattctaaattaacaaaagaacaatctttaacaagacttgatttatcgaataattattttgaaatatcgcttttgaaagaggaaatagaaaaagaagtagtaaaattgactaatgaaattataatattcgaatcacaacaaaattctattgaatctaaaattgatgaaattcatcgtaggattcaaaattctaaagatctacttacgattgatgattatgtaaaagcaactgctaaaaaagaagcatcaaatgaattggaaagtttagttgataaacaagttctttctaaatataatttagaagaaaaaattaaagtattaagaagggaaattaataaactgaagaaagagaaagaaagtttaagagagattattgagcgagattacactgatttggtatttgaaataaaaaaagtgttgaatgatttaaatgatacaaagctggatttatctgaattaaatctggatgaacttaaatttcttgaatttaagaaaatatcggggagtggtatggataaaaataaaaaatttttagcttactatttaatttattttagtttgttgagaaagtatagctcttatataattcccttttgtatggattcgtttattaaaaatgaaattacgggtgagactgcaaaaaagatgtttgaagcaatagaaaaatatttttttgacactaatcagtctttcttttcaatcgtttctgaaaaccttaaacatttagagtttgtagatagttacaataagattaatgttgagggtaagctgttggttagagataaatatgatgagattgctttgaaattcaaatttgatagttaaaattattaaagggccttgaatgacatttgatagttcaaactttcaaatgcctgaagagaaaaatgattatccgaaagaaattaactcatatagaattatgcacttaatattcttaattttttagtagaatactcaatcctttgattttttttggaatataataacatttttcatcagaaaacaacaaggggaaaagccaatttctttacagtaggagttggctttattgtgcagaaactaaattaaatattatatgttttttcgatcttaaccatatgaaaggataaataaacaaagagttgattgacttcgttcttcgcttcatagattgaggagttgattcaactttccattct

SEQ ID NO: 8 - DNA, 3637 bp, Bacillus cereus
gaagatgcggttaacaaaatagaagagattttgttggtaatgtgaccaattttgtgatcactggttttgtatagtataggaatagaaaaataacaaccgtatcaaacgttaatttgacacggtttctacaactatgccctcggagaggctcgaactcatggccttcatcctgtcaaagtgtaaatagaagtcgttagtttaacgtaagtcaaatcggaaatcggcactatttacggataccgttatatcaacgtttgcagctaaatagttatacgtccgtcttgttttctattattaattaaagcgtgtagtaccgccatactgcaagatataaaaccgttaattgtcattttaggatccttcacattcattgattattacgaagctgcaggaatggctatgtaaacagtacatgtttggaaagaaatgaagatgataggagaaaatcttcatgaaatttatcatcgagcgaattaaatggacgtatgtaaaaggtgatgaacaacccacgatgaaaattaaatacaagtaaacgagccacgctcgtcactgggcgtggttttaatgtgtgtaattggaaactgtatgtaaaaaagaaattaacaagtttgttagtactggatgatttaggataaaaaatgaaatttataacaaattatagcttaaaattgatataatatgataagaaggatgttttgctattgtaatttaagaaacaagaattttgaacagaaaaaattcactatataaatgaaattgtaaaattgcctttgggatttaaaggagggatggctagtggatataagttcttatcctagcttggaaacttatgaagcacgtgagaatacaggttcaaggtcttcaaacagattagctatgcaaattagttttgctatgtggaagatttttgaattatatcaaaatgaagattttactgtggctatggattgtattgatgatgtagtcatatttaaaacatcaaatgaaaatccaactattgtgacttatcaattgaaaacaaaggatgctactacggggaactttgaactgagaaagctaattggtgataatgtatttttgaaaatgtatgatcacattgaaaaaatagatgcagatgttgaagaaatatatttaataactaacaatcctttgaaatttagaaagaaaacggttaatgcagaacggattttatttgaaaaattagatgaagatataaaagagttaattgaagaaaatatgtctcagagtaaagtttttgcagataaaggattatcatctaagtttatatattctttggtagatatgtcttttcataatcatagagaaatcagtcaatataaattaaattctttattaatgaaagaaaaaatagatattagtataacagctgcagatgcactttttaatgcattgcaagatattttaacaactaagcaaaattatgagtttagtttacaagatgaatttaatacggtactaaagaaaaaaagttactcgaaaacggaatttacatcactattggataactcgaaaaaaattaatgcctatgttttatctttcgaggatattcgtaccaactataaaagcaaacctttaaagctgaaagaagaaagtttatacaggagagcgatggctagtgttaaagaaaaatgcaataaatctcctaatatattacaaaatataaatgaagatatttttcaatatgctaaagagcagattgatatcaatgacgaaataacgagaattgagctagtcatacttttacaaagtgtttttgacgacaagataaatgttgagttatctaaagaagaaaaagaaattctatatatgcaaaatatcgaattagccctaagggagggataaactcatgaataaaataataattcgtaagttatttatatttgatgtgattgaaaaaaaagccaaaagtgtagattttgaagatggtatcaatattgttacaagtaaaggaaatcaactgggtaaatcaactataatgaaatctatttattatacattgggtgcagaagtgttttttgccgacagattaaatgtaaagagtaaaatccatatgttagagacagacgttaatgataagaaatatacctttattagacatggcgatgttgttgtgataaaagatggtaaaggaatttttaagacgtcgaacgcttctgaattatcatctaagttgcatgatatatttggatttagcgtttttctagaagataaacagaaaaaatatgtgatagctccacctgtatttcgttacattccttattatattgaccaagaccatggttggacatcagaattgaaatcttttgataaattaggtcaattcgataaaaaaagcagggatttattattttattatcatttaaatattcttgatgaagattatggagtaaagttgaaagagaaaaaagaactagatgcttcaatgactgatttgaaaactaggaaaaaagagattttaggcctactcgcatacataagagagaatattacagcttttaatttagaaatggatattacagcgttacaaattcaaaagagagaaatacttaataaatataaaaagtattcatatgatttgaataacatacgaagaaaaattttagaatatcaagaagaaatatttaaaattgacaatgtaattgataatttaaatagtactttgaaacaaaatgataaagtaagagaacatataaaacatcaatttgatgtagagtgcccgtattgtaataatcattttgaaatacaggcgaaagatatattaagaattaattataatattgtagacttagaggcatcaaaattagaaatgctagatataaaagaaaaattattggggaaaatgaaaaaagtacaaaaagagtatgaagattatcaagctacgttgaaagctattgaagaagaaaaagttgattcagaaaatacacttgaagacatactgaaatttaaagggttacaagaaactcaaaatcaactaaatacggaacttgtcaaaaatactggtgatatagaagaaaagtcagaagacttaaaagaaataagacgagatttaaaaaaatggcaggatgaaatagataaagttaacagtaggtataaggatatcttaaatttaaatctaattagatttaatacgaatgaacatgcactccctgaaaaatataatattggaaaaaacctcaaagcatctggtagcggtcaagttcgagttaatttagctagagtatattcatttataaagcttcttgaagaatataatcctacaggattaaaatatccattagtaattgactctcctaaaggcggagaacagagtactacaaatagtgaattgattttaagattgttgacggagaaagcgcaaatttcaaatcaaattattttagctacaattgattttgaaagtttttataatggagatactaaaaaattcaacataatctctttagaaaatgaaccttatcatttattatctgctgaagattatcaaaataatcaagtgataattgatgactttgtttctttatattttgaagcaaatcaataaatagaaatagtaaaaggacgctttaatacgaagcgtcctatttaatttgaaggagccctcaaacagggaatcctt

SEQ ID NO: 9 - DNA, 2213 bp, Bacillus cereus
aatgaaatttgaacgcctttcggcagtgatatttgtacacctcatttttacgtgccagcgtgatgtacatgaaaagtggtgaaaagattcctattgtggctgagagtagtagcatgatgatggtgtttcttttttcttttttgatggttttcatgagtgatttggccccctttttgttttgtcttctttaaattaggggtgacgttgggggagatgcaaggggaatctgtagaaaaattgattgagaccgatatagataaattccatatttttatttatgaaatcctatactgtcaatattaatcaaaacaattaatgagatcaaatttttttgttcatcagacattaatagaatgattgtatggataatagtagtttctttatcacaacaacgcattatcatgaagctccacaataggattgtagaataacctcaaattcaatcctatgttcattgaaaagggggcggggaactctttaaacatctccacgaggtattttgagtgtatgtgctttattaattctacatgcttaggctaactaatcattaatagactacaaaaaacattcatgcctagtacagaaacacacccttctcattgaagaagactaaccagtggtattcgcaaaagaagaaaagaggattacctcaacagccacctacctttttatattgtaaatatgtcctatttaattcggagtagtgtatactattagtagaaaattccaagcgtagctatcgaggagtgttaacaaaatatgagtgacaaaattaatgtatggacaacatcaagagactctgctgtatgtggtgacattgaattaaaaaaaacatctactactagacttatttttaggcctgaaatagtgaacaataataaaaatcctaaggcatctgttagaggatgctttatctttcaaaagaaaggtagaaatgccctttgggatgattataaggaattagatatgaataagttaaaagcagaggaatggattaaactagagataaactctgatgctatgctgactcttactaaagaaattcagaagcattatgcagtgcatgaaaagtatggggttaggtatggagcatttcaccttttcaaggataaccctgatatcgagaaactgattgaaatgtttgagagtaacactgatttgcttactcaattaatggaggatgacaagagtgaagctctagagaaaacattagaatggattgttacaaatgataatccagataaaataattgacaggcttaaaaatctaaaagagcaagatttagaccaacttaatactcttattgggatagctaatctaaaaaaggtattgtctgtttgggaaagcaacaaactcactaatacctctgagaagttttggcaaagtgtcttaaaagaaaacacttggattttgagtcagattttctctaacccgactgttttgataaatgatgaagcctatgtaggcggaaagactgtcaaaaatgatagtggtaagttagtagatttcttatatgcaaaccctttctcaaaagatgctgtacttattgagattaagactccatcaacgcctctaattactcccactgaatacagaacaggagtatattccgcacataaagacttgacaggagcagttacgcaagtgttgacttataagacaaccctacagagggagtatcagaatatagactataacaattatagacagggaatcaaaactgattttgacattattactccttgttgtgttgttatagcaggcatgtttgatacattaactgatacagctcatagacattcctttgaactgtacagaaaagagttaaaaaatgtaactgtaattacttttgatgaactgtttgaaagggttaaggggttaatcaagctattggaaggataaacccttgccttctttttttactgcctctaaatttatagaatgcatccgttaaagctaagtagaaatattagaagaaagggcaaaatttaaagagagaaatttgccttttctttttatcaaactgatcaaaaaattttatatttcaatcactttatttcgccacctgaatttttttattttttaaaagtgccttgcctctcaccaattcaggtcattataaaacaaaaaaagaaccgtttatcaacaacaaacggtccgattaaaaatcttgtgcgtatctattaaaaataacttaataaaacatgcttatt

SEQ ID NO: 10 - DNA, 2477 bp, Bacillus cereus
atgtttttagaaatttataattaatttactaatatattgcgataattagaaccatttgaattacagaagtgccaccaacgaggaagcaatcaattaaatagtaagtttaataattttattaagaaattgatttgttatacgaaattttattatatgataaaatatttatgtaataaatgtaaatttgtatattaggtaaggggaatgaaaatgaatccaatagttgaactatttattaaagattttacaaaagaagttatggaagagaatgctgcaatttttgcaggagcgggtttatcaatgtctgttgggtatgttagttgggcgaagttattggagcctattgctcaagaaattggattagatgtaaataaagaaaatgatttagtaagcttggcgcaatattattgtaatgagaatcagggtaatagaggtagaattaatcaaattatcctagatgaattttctcgaaaagtagatttaactgaaaatcacaaaattttagctcgattaccaattcatacttattggacgacaaattatgataggttaattgaaaaggcattagaagaagaaaataagattgctgatgtaaagtatacggtaaaacaattagctactacaaaggtaaaaagagatgcagttgtatataaaatgcatggagacgtggaacatccctctgaggcagttttgattaaagatgattatgaaaagtattctataaaaatggatccgtatattaaggcgttgagtggggatctagtttctaagacatttttatttgttggatttagttttactgatcccaatctagattatatattaagtcgagtaaggagtgcttatgaaagggatcaaagaagacactattgtttaataaaaaaagaagagcgaagaccagatgaattagaggcggattttgagtatagagtaagaaaacaggaattatttattagtgatttatcacgttttaatataaagactattgtacttaataattacaatgagattaccgagatattacaacgaattgaaaataatataaaaactaaaacagtatttttatctggtagtgcggttgaatataatcattgggagacagaacatgctgaacaattcattcatcagttaagtaaagaattaattagaaaggattttaatatagtatctggttttggacttggtgtagggagttttgttatcaatggagttctagaagaattgtatatgaaccagggaactatagatgatgatagacttattctaagaccgtttccacaggggaaaaagggcgaagagcaatgggataaatatagacgagatatgattacaagaactggggtaagcatctttttatatggaaataaaatagacaagggacaggttgttaaggctaagggtgtccaatctgaatttaatatttcttttgaacaaaataattacgttgttccggtaggtgcaactggttatattgcaaaagatttatggaataaagtaaatgaggaatttgaaacgtattacccaggtgctgatgcaaggatgaaaaaattgttcggagaattgaataatgaagcattatcaatagaggaactgattaacactataatagagtttgtagaaatcctatccaactaatcattactgattattaatcagagaggaactgttaaattatggcgaaaagagttttttttagtttccattatcaagatgtaattgattttagagtaaatgttgtaagaaatcattgggtaacaaaattaaatcaaagtgctgcgggggtctttgatgcatctctttgggaagatgcaaaaaaaacaagtgatatagcacttaaaagattaataaatggcgggctaaacaatacctcagttacatgtgttttaattggatctcagacttttaatagaagatgggtgagatatgaaattatgaaaagtatagaaaaaggaaataagataataggaattcatattaatgcttttaaagataaatatggaaatattaaaagtaaagggcctaatcctttcgattatttagggtatcaatatagttcagacggcaaacagttacatttgtatgagtggacagggggaaaatgggaggaatataaggatttggcaccatatagggtgaatcaaattgctccagaatcacttagaggaaaattctatagtttgtcatcggtttatcgtgtgtatgattgggttgctgatgatggatataacaaattttcctcttgggtgaactaattaagttttggataaaattataaatagaattgctattgggattagatacaaaatgattaaataagaaaagtacctataaaagtaggtgcttttttctttgttatatagaaattacacattaatttatatttaggttattttaaaaagaaaaagtgatgaatgatggtattcttacaattaatagttacttataactatatgtacatgaaaaacatctatatatgc

SEQ ID NO: 11 - DNA, 2050 bp, Bacillus amyloliquefaciens
gttaagctttaggcggacatcagcaacgatgtccgcttttatcatcttaacagcaatacaaggaggtttacgtggcggatgaaactctgaaacagtatatgggcctgtacaaatgttgttagcaatctcaagaaagcccaggagtagatatgattcactgaacagatgttcaatttaaatctaataatgaagagggcctagtcaaaggcgctcttcattattagataagacataatcattacacaagatttatgtcatggttctatattcatattttcattgtaataaattgaaaatatgaatataataggtagtgatcgcaatactaacattggaggttttatgtggaagtttaaagaattaataagagataagacatttagaaggtgggctctgagtataattctgactattccaactagtgtgagtacattcatttcatttctagacttggatgctcgttgtagattaattattttacttatattagtagggttgtcgctagtcataataattgttcaattcattagactactttttatgaataatatcactcttaatctcaatggttccgaagttgaaattaaaaaaggtgatatttttgaagtgccaagaaataattataaagtcattgcatttaatgagtattttgacactcaagtagatgacgtaataatcgcccgcgaaacattaaatggtcaatatataaagcgttattattcacatcaagatatcactgagttggatcagaaaattaaagatgacgtaaaacttaaaattgaagaaaaaaatgttgaaagaccttttggaggaaaaacaacacgttacagcttgggatcagtctttaaagatatggatttttttctagttgctttttcgaagtttgatagggaaaatcgtgcccaattaaaactaaatgaatatgcaagctgcatgcttaatgtatggaatgaaatcaatacattacatgcaagcaaagaagtgtttatccccttattaggttctggaataacaagacatgtggattctgatgttggagtcaatgaactattacatataatgttgtggacatttcagatcagtaaagtaaagtttagagaaccagccaaagttacaattcttttgtacaaaaatgatcacaagaagatcaatttttataagttaaaggagtttgagaagaatgggttataggaatggaaattatgctgctttctatgtcagtgaaccgtttagtgaaagtagtttaggggctaatgcaaccaaggattttgtgtcgtataacatgttaagagcatggaaaggaaaagataataactacccatttaatgactcccacgataaaacatacaatgtacgggacggtagtgattgggagaaaacattaaagccaagattaagaaaaagattagatcaatcaaaaaatataatcttttttttaagtaagcatactgaaaacagcaaagctttgcgagaagaaattgattacggtattaatgtgaaggggctaccagttatcgttgtataccctgaactttccgaaaagagtgacatcatcgactgcactacaaaggttttcagatcagaagtggtgaatttatggagtcgagtccctgtttttaaagactctatgctaaaggtaccaactattcatattccttataaaaaagaccaaattaaaaaagctttagagaacaaagattttatgattaattcaaagatttctgcaggttcggtttatttttatccatgttaatctattatgggtgaatataatttaaagagaaagaatagattttcagtttcgtcctcatggtagctcattaattcaaaaacctctatgaccaatttaatttattgaggaggtagaggttttggtattaaaatgatgaagatagattattggatatgaatttcattttatctagtttacataatatatattctaggaagttaaatctttaatgaaaattctgtctcgttatcttaagtgtacttagttggtgagacagaattaaaaaaataggatgtattacgatttgtatttatttct

SEQ ID NO: 12 - DNA, 3083 bp, Bacillus thuringiensis
gggaatgcaaaaaggaggcgggacttgagtgcgagttctgcctcttttttgctgaatttagaaatcttttaagttttatctaaaaaagcattcactttattgttatttatgtagtaagagtaaaattttattaaaaattctaaagctgtattggtttataagctagtgctatatctactatttgttctggagtaagatcttcatcattaaaagaaaggcattattatttttggtgaatgttatttagtataaaccataggggaatggaatattttatgataaaattgagtggagtaaataattgtaaagataaataaacggatagcatgtaaaaaaagggttgaccttgagccttattaagacgggtgttgtagtaataaatgaattaagagaaaaacatttgtaattagtcaacaaaaagggagttgcttgaatgttagttataaaagaattaaaaattgatgggattggcggtattaatagccttaaacttaattttaacgaggggttaaatttgatttgcggtccaaatggtgtagggaaaaccacaattcttgaaagtattggccatatgtttagtaatggtagtcgtagtaaggttaagagaaatgttaaatttgatcaggggagttgtgaaattagctattcaacattcctagatactatacatacacagtcatgtattttaaggaattatgaagaaaatgattcgctggattggcatggtggaaatgcaaatttggctaaagaggtcattgtcttcaaagctcaaagatcattcacttatacgcaattagattctcttcgtaaagatacggaaacaagtgatggtaaatttctggatgattctatgaatggaattcaatttttcgactttaagaattggtttatccatcgttttttatttagtcatgtagataatgaattaacaacagtacaaaaagagaattttaaacttgcgacagattgttttggtattttagataatagcattcgttttagtagtgttaaaagtgatacattcgatataattataagtacctcaaatggtgaaatctattttgagtatctatcatcaggattcaaatcatgtatctatattattcatgggttaattaaagaaatagagtatcgttttaaaaacgatggtggtattaaagttcaagattatgaagggctaatactaatcgatgagttggaccttcatttacatccacagtggcaagcgaaaatgatttatttaataaagcatatattacctaaagctcaaattattgcaacaacacatagtcctcatatggtacaagctgcagcaattaatgaacttatagctttaggaatcgatgaagatgcggatgtatatgtaagacaactacctaatgttcaatatggatttcagggatggactgttgaggaaatattggaagacgttatggggttagatgaaacacggtctccaatgtacatagaggctataactgaatttgaaaaatctctagatgaagaaaatgaggagaagatatttgaagcttattataagttagatttaatgctacacccaagtaatccacttcgcaagttgttaaagttacaagtagctcaattcgggagggttatagagtgattcatttaaaacgccctaatagtcctagtaaacttataaatgaagaagcaaaactaactcaagaatttcttcaaaatggtaatagtgtttggggaaagccttatattaagcttgctcttctagagatgtcaaataacaaatgtgtatactgtgaatgtagactagatgaagagagtaagtatatggaggtagagcactttctaccaaaagatacttatcctaatctagttgtcaattggagaaatttattaccaagttgtaaaagatgtaatggaaaaaaagggacacatgattcaaaaaaagaacctattatcaatcctactgttgatactccaagtaatcatataaaaatgtttaactattgcctaaagggaaaagatttaaaagggaaaacaacagttgatgtattgcacctaaaccaacttgatagattagtatacccaagaatgttaattggaacaaaaactatagaaacagtagaaaaacttttagaaatggcagagaactttaatttgaatattaatgctactgggcgtatcaaaagtcgtattatacatggcactacacagttgctcatagaagctcaaccgcattccgaatattctgcgacagttgcctcggttttatttaacaatgaagattttgttaagttaaaagagattatgattaagtgcacaatctggaatacagaacatcaaaagttactgtctaatgcagaaagaaatattttggtagagccactttacaattgcctcaataataagaattaatgattctaacgtatactctagctgaaagtatatagttagtgtattccttggggtagcttcaacctatttgatattagatgtagaattagagttacaattgatgtgaaagtaagtgtcaatggttcacaaattataaagtacacaacagtaaaggtaagccatactatgtaacagcaaatgaggtctatgtatatgggaagtaaaaaaagcggtctgctcaaattatgagtagaccgcttttttacttaagtatgctatttatcacttcataaatataaaattacatatcaattacttttttacgactttaccggcaacacctgtttaccgaattagttgatgaagactcatcaattaattcaatgcttttatttgcaatatattgcctcgcgttcttattaaaatcaatcagtgtagagaaaagaagctggaagagttagaggggatatatgatgtgtttgtgaagggatatataatagaggaaatataaaaagtgctaacaagtttgcaaacgaacttgctaacacctatacagaatagacataaaatatcgctgatatgtcatctttgaaatagctttaatcagttaaatcacacttatacgaaatgcttatagtaacagtcttaatatcaagaatataatcatccagatattcctttacttttcagacgaaaacgagggatgatat

SEQ ID NO: 13 - DNA, 3745 bp, Bacillus weihenstephanensis
ggctttttaagtgtacatttttattgaagattggatagaattcaacaagatgaatttgatgtttattaaacataagatggaaaggctatgtgttaaataaaaagatgaaataattaccattagtgtataaaataataagtaactagtttggtaatgattttaaggatatgaagtatattaaccgtgacatattatagttgaaattcagttttatatcatgtgaaaatatgcttttgaggagggtaaagatatgattcgaatacataaagataaatattttgattcaatatatgatgaattgttagaacaagcaactcaagaaaagtatatggatgagtatttactagaaaagtttatgaaaagatactttaatggtaaatgttcatactgtgaaattcgaatgaaagagttacgactaacaattgacttttatagacctataaatggatcgttaaacacgatggatggtgaatttcatcctgatcattataaatggttaaaaaatgaagatgataatatactttcaatttgtgtagaatgtaagcgagcgaaaagtaatcgttttccagtagatggcgatgtcgcttctattaatgctgataagaataaattagtgaaagaaagacgtttattgatacatccttgtagagattatcctgaaaggcattttgattacgatgaaagtggaatggtttattataaaagtaaaaaaggcgaggttactgtagatgttttaaatttgaatcgcggtatgttggtagaaatgcgtgcccaagtatatagtgaatttaataatctttgttatttattctcaatggagcaaagtccctactatttaaagcaaattctacaagaagttcagttggattcaatatttattggtttaaaaaagtttatactttctgaatgggtaatcttaaatgagaaaattccatttcttcaagaatttgagccattattaggtaagagattgcaggaagaagaagtgagagttttatcagttagaaataataagattagtcaaattgatattgataataatatcctttatgttgataatgataagcggagaaagcgtgttcctgcaaggaaaattaatgattattacgatgtatccgacgagaacgctttagaaaaatattatggaaaacagcgttttattgaaaaaattgaaatttataactttaaaagtattagaaatatgaaaattgattttactctcagtaaaagcagtaatgctccttggctaatgttattaggagaaaatggtgtgggcaaaagctcaattttacaagcaattgcattaacactaatgggaaacgaacaacggcaaaaaattataaaaaagaaaccttatgaatatttaacaaaaggctttgatgaaggttctataaagataaaattatcaggcatgcaagagcctattagtatttatttaaattcgaattcatttgaatttacaggtgaaaatcatcaaaggcctagggttctaattttaggttatggctcaacgcgattacttcctagagaagaaatgttatcaaattataaggtgacttgggcaagaatagaaaatctatttaatccttttattccattagttaatgtaagagagtatctcttatctttaaataatgaagattttaataatgttaaaaaagctattgagtccttatttttagatgaagtaataattgatcgggatcagatatatgaagaagtatattttggatttgcgaattcttacagtaaactagaagatttaagtgatggctatcagacaattattgctctggctactgatattatgatggttatgaagaatagatggcgaaattttgatgctgaaggaattgttttaatagatgaaattgatgcacatcttcatccaaggtggaatatagaaattgtttctcgattaaaaaatgcttttccgaaaattcaatttattgcaactacccataacccgctatcacttcgtggtttaatagatggagaagttgcagtattactagaaaatgaggaaagagaagcgtatattactcaaaagttaccttctcaaaaaggatttaatgtagaaggattattaacttctaaattttttggattgtatgacaccatgccagatttaaatgaattatttgatcgatattatttacttttatctaatcctagtcctaatgaaaggcaaaaggaagaaataaaaaatttacaagataaattgtcaaaatatgaaaaagtaggtaccacattaagagaacaaaaattctatgaagcagtggattactattttgcacagtacagaaaaaataatgtggaattaagtgatgaagagtttaacaatattatagaagatgctattaaatattttgaaaggtaagattttttatgataaaagttcaaagagaagcagaaccagctgtattaaatctaactgactcagattctattggttttaaagaattggaagcggcaaaaaaaactacttttacaaaagatacgaaatttccgttcgaggcatataaggatgaaagtgtaaaaaatcttttaaaaaaaatgtttaatggtaaatgtggatattgtgaaagtattattaatgtgacttcgtatgaagaaattgaacattttagacctaaaaaagctattaatatagaaggtatacaaggattgacttatcctggttactattggttggctatgagttggaataatttgttgatttcttgtcaaaggtgcaataggtcgcataaaaaaaattattttccaatagaaaacgaaagtaatcgtgcaaaagctcccggtgaagaaagtggagaggaggtattactattaaacccttgtgaagatgacccgagtgaacatttggaatttaaggatacaggtattattgaatttaaagagggatctaaaaagggagaaaaatctataaaagtttatgctcttcataggagagaacttactgaagaaagagcgaaagttgctaaggatattgagctgaagaaagtacaaatacttgacggattaagtactctaaaggtgcttttacgctatcaagaagatagtgatcttcaaaaagagattgaaaaaactgtatcaaatataatatcattatatgattttatatttgaatatgaaaatgatcctaacaggccttatcaggcaatggtaactcagattacttcggattttctgagtgaacgtaaagaattaatcaataaattgaagacaacatccaatcggaaaaattcctgtgaacaaagtcatatttcaagttaagttaatttaggataagagctataaaaaagctcttatcctatttattatgaagtttagcgagatagtaaaagtaacataattaatatttaaaaaattattttttcttgagtaacggtattaactctgctacatttaatattttttgtctttataaaatgccttatgtcaattataaaaaaatcatgatgctttctaatttagtcctagcgtcttctttaaattaagatactataaatatgaggtccctcaatgctgttgtttataaagtatttttgctaactggattactttgttgttacgttcatctgacttagtgttccagctccacctaactcaattaatatttctatgtttatcatcagtctatctttttaaaattagtatatctaaatttttgcaatggaagcaattggttttatataattgtagaaggatttaccaatggacaatagcgggaggattcaaaaaa

SEQ ID NO: 14 - DNA, 8750 bp, Escherichia coli
tgtaaatcctcggggtagatcgcagcgaaagagcaaccatgccttatcgcaaattcagttttggaatgcagttcgcaaaatgatacccggtacacttacgattacaaatgcgcggtataaagaagtttgcatttgatcggtgaataataggaaactcagtcactgtttcgtctgcaaaatcagccatttcgccttcatacgtagttcttcggttgaatagtaaggtctatcatgctgcatcgaacggtgattttgatggatgttggaagtgagtagctgtacgtaatttttgattaaaagtaatcaaaatgttgccaatggttatgctatcgtgtgttttttgaatatataacaggtaaaactatgtcctggcttaattctgtcttattggcgcttacctcggtgcaaccttatatggtaccggcaaccgttatcggcctcgtcagttttgcattcctctgttttattttcttttatttttttagagcagttaaaattattaacggcctgaaaaaatatactcagtcaattaatggcatcgaaaataatgagcctggtaatcagcttcagcatctgcaaagtttgtttgtacagcctgagttaaagcacgcctggaatgaattcgaagaatcgttgcactcacaatatgaactggaggacggggaagagaaaatcgtccgtattagggctactgcaccgagcgccagtttcttctcggagcaacaactggtcgatattccgctgaacaccgaatttttcaaacacctgcccggtattctgaccggtgtggggattatcggtaccttctacggtctgatgattggtctcaaccacttcgaccccagcacaccagagcaggtctccagcagcgtcaataatctgcttcgcgatgtgctgtacgccttcctcggttcagcatttgcgattacgttctctatccttatcacctggctggagaaattctgtctggcgaaatgctacaaatatctggaaaaattcaccgcagctctcgacgccctctatgacagcggtgttggcgaggagtaccttgcctcactggtaaaatccagtaatgaaagcgcgacccaggcacgccatctgaaagagagcctggttaccgatttacgcgatatgctgctgcatctggccaacagccagaaagtggaaaacgagcggctagcgaccaccctcagcaccacctatcgcgaaacaggacaacagtttgccgagcaagtcagcggtgcgattgaaaacagcctgaaatcaccgctggataaaatagcgggcgcggttcagaccgccagtggcgatcaaagcggcatggtacaaaacatgctgcaggatgtgctgaccgcgtttatggcgaaactcgacaccacctttggtcagcagtttactaatctcaacgaaatgatgggacaaaccgttggcgctattcagacaatgcaaaccggtttcggcgcgttattacaggacatgcgtcaggtgagcgatgattcccgccagggcagcgcgcagctcatcgagcaactgttatcagagatgaaatctggccagcaagctatgcaggctggcatgaatgacatgctcaccagccttcagacctcggtggctaaaattggcgcagaaggtgaaggtgccggcgagcgaatggctcgccaactagagaaaatgttcgctgatagcgaggcgcgagaaaaagcccaggcagaacatatgaccgcctttattgaagccattcagaattcagtgcagcagggacaaagcgccacaatggaaaaaatggcagcctctgtcgagtcgcttggtgaacaactgggtagcctgtttgggcagattgataagggtcagcaacagatttcagcaaatcagcaagcgaatcagcagtccctgcacgaacagactcagcgggtaatgagtgaggtagacgatcagattaaacaattggtcgaaactgttgccagccagcatcagggaacaactgaaacacttcgtttactcgcagaacaaactaaccgccagattcaggatatgcataccggcgcggacaaaatgcgtctggcggccgagcgctttgaacatgccggtgatcgggtgtcggaagcaaaccaccttaccgctgacgtgctgaataaagcgcaatcggcaggttcatcactctcccttgccaccagcgaactcacctctgtggtggctgattatcgtaacaatcgggaagcggttagcaaatccattgccatgctggagttgctcgccgcaaatacgcagtctgaacaaaccacgcgcacccaattcatcgccgaccttaagcagcacggtgagcgtctgcagagctataaccgggaagcacaggcctttatggaaaatgtcagtgacgtgctagggaaagggtttgaagacttctctgaaggtgtttcacgcagcctggataaaacgctgggcaaactggacgttgaaatggcgaaggcttctactctgctcgcgggttctgtcgaacagatcggagaaagcgtcagcgagcttgatgatgtcctgtcacgcgttcgtgcctaaggggtgacggctgatgtttggaaatgcatttggcgttaaaaaacgccgcagcgatgaagcagagaaacccttctggatctcctatgccgatttgatgactgccatgatggtgttatttctggtcgttatggttgcgtcgctgagttccgttacgcagcgtattcaacgtgcggagcaaggtgaaaaaacacgggggcaggatatttccagattgtgtgagcgcctggaattgcatgcccgcaacgtgaacaaaaccattgtggtggattgccatgataaccgtatcagttttggtgaagccgggcgtttcgatcacaaccaatttttcctgaacgctgaggggcaaaaagccttgcaggatgtggttcctcttgtgctggaagcgtccaacagtgaagaaggtaaaaaatggtttaagcagatcgttattgaagggtttaccgacaccgacggttcgtacttatacaacctacatctctccctgcaacgttctgagtgggtaatgtgtagtctgctcgatagccgcagccctctgcaaaaaaatatctccgcagaacagcagctccaaatccgtaaacttttcctcgcgggtggtgtctccttcaataatgccaaggaaagcaaggaagccagccgccgcgtcgagttgcgcatgcagttcttcgggcttaaagataaacgtgataaggccgatgaggtggatttcccccccgtcgtcaataaagaagtttgccagttggtaatgcccctatgacgcctgcactgaattctctttctcaacgcattgcagcgaggctctcttccagccaacgggatgaccattatctgcataatgatttccacgcgctggcctcagctgctctcgacatggaaaagcggtttgataaggcagaaaaaatccctttaccgccacaaaaaatgcgactggcagctctgcgtcgccttcgccttgcacaagaactcacggagcgagagtggcggatggtgttttatggtctcgccgataatgatccgtcatatcctgaccagccagtactgctggaggatgatacgtttttccctgaagtaaacaatgcaatcaaaaagcggcttgaaactaaaaccctgaaacgccgagactgggccgcactctgttcaagctattttgcttaccagaacccatcacctgagacaaacccgcactggtgcgtactgcgtggtcatatcgctcagggttacatggtggtgaaagcggctatacgacgagaaaaatcgtggatgaaaaccattgagttttatcacgatatttttaccccgcaggcgggaggcgtgatctccagacagttacttgcgggtgagagcaattcactctcgtcattagaaaaaatcgcgcaaatccctgatagcagttggttgtggaaacgtattttcacggtgcttttagcgcaactggacacactcgacgatccccagtttctggacaaaattagctggttgttaggtctggctgcccagtgggtacgtttccgtgatgacatcatgactgcgaccttgactcgctattaccattctatttatcgcgatcaggctcattcagctttgaagcaggccgcgctggaatactgggataacccgcaactgaaaagccagcagaataaatggcatcagtatgtctctgagccggtggctgcgatggtccggggctggctggcaaaacaagatctgatgcatttctttgaattgctgcgcggtaatggcgatgttgaccaggcacgattgcactattggctacgtttcgccaatcagatgggatttacccgtatcgtcatggggactgatgcctggcaagaccgtggtagtgactttgtgaaattccgcgaggagaataagggacgattgagttacttacgaggtggacgtaactttgataacgccatgattatgcagatcaacgattatctgttcgttgagttttccgggacagggaatgcaatgtatgcctatcgaataggtcacgcgccatttaaccctgaatcacgcacgcttgatatcaacattcatctaaaagataaggggcgctgcgtgctccgactgccccatacaccgcgcgcagaagggtataacaaagtccggataaccggctggatgttgaaatacgacgacgagctgcgtcagttgggcattcggtggatggcagaagaagccatcaagtttgtcgataagaaagcgtcctctcccgcctctatgtccgacattaaaatcatcaacccgttgcgtgatacggctatacagcatctggttgaaggtagttcatgtatcgtcagcgataatcgacaaaaaggtggcgtactgtccgtacaactcaatactcctgacgacaccatagaaagagagttgttacggctaggctttgcgcccgtggctaaagaaccgcatcgttactggatcaaataatgctgaaacgtctgttaagtaaactgacgggaaaccgtcagcagatagaacatcacctaaaaaatcagtaccaggttgaggaaaacggacttagctttccgctatcgctggttgatgattcgcagctttgggcactggcatcctggctagaacaactggctgaagaagactatctgatatcacttacagaccggtggttgttgagttgggacgcactgtatcgcctgctggaggatgaggaacatgccagcagcctgcctcttatcggtgtacctgacgtactgcctttacgcgcaagcctgagttcacgaggagcattaagcgatagcgattttcgcgtctggattgctgaatgggctacgcttccagcccgcaagccgatccgtttcagtcgtaccggtgccattttaacccatgaaaatcagcaatacctgttatcgcgtgaaaactgggcactcttacaggcaacagaacaactcagtgcacagaaaaatcagactcctggtgaaaccactaaccagttgggatgggccgctatccgcaaatgtgcgaagcaagcagccgcaaaatttgatgattatttagaaaaaacgcatgtcgtcaaaccaacttcattgtcattacgtctgcgtaaagcaacggttgccgatactgctgttatcgaaattgagccccatttcgaggaccagcctgctaactggctaggcagttttgacaaaaactcgcaggttcacgatagctaccgcatccctggagagaatggcgaactcagccatgtcattatccctcccgaagtgaaagaagtcctgaattcaatacactcgattccaagccgtcgagtggccggaagcgaagcgctttcctttgttcgcaatccttataccttcctgggtgaagatgccgccagtgttattgcccctgaagaacatgaacaggcactgtttgatgccaggattttctttcatcatttcaggttgataccgcaactgaatgcggaaaataagatcgcagaagttacgctggtacttgagcctgtttcacctgttccccagccagaaatcacttttgggttctcagccccccgggagctggataaattcatacagcaactcggtattagcgtcgctgcacagatgcctgccggttcatggcaaggttacgagctggaattaagtcagttcactgaacagcagtggcacgattgccaggcacttctaactcgctggcagcaagaaatagaaggaaaagaatttagcgatgtgctggatattgcgaagtatggcgatcgcgtgattggcattggtgaatttgaaaaaatctcctctccctggctgaccaaagcgcagagtgaaaactggcttccagatgacatcgatttctccgcgttttcagtcgaaacactgtctggctggcaacctgaaaaccttcaccatttcgatgaactgcaggagagaattactcaggcagaagctgtaggtgaaacgcatatcaccgcaccatggaatgacagccaattaccgttggatgctgctaaaaccttcagtaagaactgggaaaaacagcaaagcactgcaaatgaatctcaaggcaacgttgcagataaaacggcccgagccgtactcaaaattgagcagaatattgaagaaacggcctacatcaaacagcgccgcaattcactcctcaatgcgcgtcatgccgagcctgaaattcctctgagccttaaagagcatatccgactcaaagaccatcaacgtgaaggcgtagcctggctccagcaactcttccttcgttcacctgaggaaaccgcaggttgcctgctggcggatgatatggggcttgggaaaacgctgcaaattctgagcttcctggtatggttcattgaaaaattcccgcaagaaccgccaagtctcattgttgctcctgtctctcttttagataactgggaacgtgaactggacaatttcttctataccgcaggaataccggtattgaaattgtatggcgagaccattaaagcggtgaaatatcccaaacaggctatccctgctcatctgcaatctcaggggatcaaaaacctgcttaaacctggctggcagggtgaggcgaaaatcatcctgacaacctacgaaacgcttcgcgaccaggagttttctctggcacgccagccgtggtccattatggtgtgcgacgaggcacaaaaaataaaaaacccagctgcgttaatcacacatgcggccaacgcggtacaagccaggtttaaagtggcatgtacaggaacacctgtcgaaaacacacttgtcgacctgtggagcttatttgattttgcccagccaggattgttaggggcactaaatgaatttggtaaacactatgttcgccccatcgagaacgaagatggccgcgatacggaacggttggaaagcctgcgagcgctgatagaacctcagactttacgccgaaccaaagaagaggttgcgcgtgatttacctcagaaaattgaagtggaaagctgcaagcaattgacgttgtctggcgtgcaaaaacagctctacctttcgtccgttgcaaattggcaacaacagcaagcactgagcgaagggatgcagcaggccggaaccggtatgttaggtttgttacaccgactgaaactcatctgtgcacaccctgcagtagttaatccagaaccacgttttcgtgataactcacccaagcttaactggctgctgaaaatactcgcagaactaaaacacaccacgaaagataaggtcattatttttacggagcttcgagatttacagcgcgaacttcaacatgcgatccaccaaaagtttggtttccgccctgtcattatcaatggtgataccagcactaaaagtcaaagtcaaaacagccgccagcgcctgattgatgattttcaggctcagcctgggtttggggtgattattctctctacggttgccgtcggattcggcgttaacgtccagaaagccaatcatgttattcatttcactcgctgctggaacccagccaaagaagatcaggcaacagaccgggcgtaccgaattgggcaaactaaagatgtgtatgtctattacccgacggtgaaggacactgaaatcaccacatttgaagaaacactggatgaccttctgcagcgtcgacgtgcattggccagagatatgctctgcgctactcccgatttgagtggtgcggattttgaggccattttgaagggggcttaaccgatacgagtggcaataccaccagcagtcgaaccgattcatttgaaacgacacgtagccgcgatggatctgtatcacctaccgacagcttgggaaagtcccgaattacaaatgttcaggggaataccataacctgccggacttattcgtttggaacgacgtgttacgacttagtccgagggaaacatgccaggtaaaaaccgaatatccatcctcagctttagcaaatacctccccatactcgctacttcatattgagaagatattgtgttgctcatattgctttgagcatgctcttcagcgtttacatgtggatcgtactaccctgatgatccgatgcgttgtttactgcttttaacctctatatacaaaacccccactaaatatttttctgagactaacggtaaatcattatctatcatgtagttacgatagaattgcatgtatctggcacaaaataaggtttcattacgttctatcttgttaaatataaagggatcatttcctcccaaagtcacaatc

SEQ ID NO: 15 - DNA, 3917 bp, Escherichia coli
acctgccttcctttgatacaattcgtaacaggttactatcatcataaaaaagctcaacccgatgaactcgctaaaaatgagacaaatcatttatatctcgaaaaaacttgttacaatcatgagcgctacaccgaacttaaccatataaattatgtgtgttttgtttattttttaaacgattacaactatccattatttacacaggtatcaaaatgttagcgcagctttttgagcagttgtttcaatcgatagactctacactgatcaccaatattttcatctgggctgttatattcgtatttttatcagcgtggtggtgtgacaaaaaaaatatacatagtaagtttagagaatatgctccaaccttaatgggggcattaggtattctgggtactttcattggtattattattggtttactcaattttaataccgaaagtattgataccagcatccccgtattattaggtggcctaaaaacagcattcattacaagcattgtaggtatgttttttgccattttatttaatggaatggatgctttcttttttgccaataaacgaagtgcgttagctgaaaataaccctgaatctgttacacctgaacatatctatcatgaattaaaagagcagaaccagactctgactaaattagtctcgggtattaacggtgatagtgaaggttctcttattgctcaaataaaattactacgtactgagattagcgattcctcgcaggcacaattagctaatcacactcatttcagtaataagctttgggaacaacttgaacaatttgcagatctaatggcaaaaggtgctacagaacaaattattgatgctttgcgacaagtcattattgattttaatgaaaatttaactgaacagtttggtgaaaactttaaagctcttgatgcctctgtaaaaaaacttgttgagtggcagggaaattataaaacgcaaattgagcagatgtcagaacaatatcaacaaagtgtcgagtccctggttgaaacaaaaactgcggttgcagggatttgggaagaatgtaaagaaattcctctggctatgtctgaactgcgtgaagtgcttcaggtgaaccaacatcaaatcagcgaactctcccgccatttagaaacctttgtcgccatccgcgataaagctacaaccgtattacctgaaatacagaacaaaatggctgaagtgggtgaactgctgaaatccggagctgcaaatgttagtgcatctcttgagcaaaccagccagcaaatacttcttaatgcagattcaatgcgcgttgccctggatgaaggtaccgaaggattcagacaatcggttacccaaacacaacaagcatttgcctcgatggcgcatgatgtcagcaattcctccgaaaccctaaccagcacgttaggtgaaacaattactgaaatgaaacaaagtggtgaagaattcctgaaatcactagagtcgcactcgaaagaattgcatagaaatatggaacaaaatacgacgaatgtgattgatatgttcagtaagactggtgaaaagattaaccatcaactatccagtaatgccgataatatgtttgattcaatccagacatcatttgataaggctggtgcagggctgacttctcaagtcagagaatcaattgaaaaatttgctctatccatcaacgagcagttacatgcttttgagcaagcaactgaacgtgaaatgaaccgtgaaatgcaatcattaggtaatgctctgctttcaatcagcaaaggttttgtcggtaactatgaaaaacttattaaagattaccaaatagttatggggcagttacaagcattaatttctgctaataaacatcgagggtaatcgatcatggataagattatagggaaacaattacctaaaaaagatcaagataatgaacattgggtatccatgtcagacctaatggcagggctgatgatggtttttatgttcatatctattgcttatatgcactacgtacgtattgaaaaagaaaaaattaaagaagttgccgtagcctacgagaatgctcagttacagatttataatgctctggatattgagtttgcaaaggatttacaagactgggatgcagagatcgataaacagactctggaggttcgatttaaatcaccggatgttttatttggcttaggaagcacagagctaaaaccaaagtttaaactcattcttgacgacttctttcctcgctacctaaaagttctagataattatcaggaacatattactgaagtccgcattgaaggtcacacaagtactgactggacaggaacaacgaatcctgatattgcttattttaataatatggcactatcgcaaggtcgtacacgtgcagtattacaatacgtttatgacataaaaaatatcgcgacacaccaacaatgggttaaaagtaaatttgccgcagtaggttattcatctgcacatcccattcttgataaaaccggcaaagaggaccctaatcgctctcgtcgtgtcaccttcaaagttgtaacaaatgccgagttgcagattagaaagattattcaggagtaagagatgaaattatctatcgacatttcagaacttattcaattagggaagaaaatgttaccagaaggagtcgatttttttctggatgaatcccctattgactttgatcctatagatattgagttatccacgggtaaagaagttagtatcgaagatcttgaccctggtagcgggcttatctcttatcatggccgccaggttcttttatatattcgggaccattcagggcgttatgatgcggctatcgtagatggcgaaaaaggaaaacgttttcatattgcctggtgcagaactcttgatgaaatgcgccataaaaatcgatttgaaaggtatcatgcaactaaccgcatagatggtttattcgaaattgatgatggttcaggtcggagccaggatgttgatttacgggtatgtatgaattgcctcgaacgacttaattataaaggaagtattgataaacaacgaaaaagagagatttttaaatcattctcattaaatgagtttttttcagattatagtacctgttttcgtcatatgcctaagggtatctatgacaaaacaaatagtgggtatgtcgaaaactggaaggaaatatctaaagaaatacgagaaaaggcaaattatgtttgtaatgattgtggcgtgaatttatcaaccgccaaaaacttgtgccatgtccatcataaaaatggcatcaaatatgataatcaccatgaaaaccttcttgttctgtgcaaggattgccatcgaaaacagcccctccacgaaggtatattcgttacccaagcagagatggctatcattcaacgtttacgttcccaacaagggttattaaaagcagaatcctggaatgaaatatatgacctgactgatccatcagtgcatggtgatattaatatgatgcaacataaaggctttcaacctcctgttcctgggttagatcttcaaaactcagaacatgaaattattgcaaccgtagaagctgcatggccaggccttaaaattgcagttaaccttactcccgccgaagtcgaaggatggagaatatataccgtgggtgagctggttaaagaaatacaaaccggagcctttacgccagcaaaattgtaaattctaaaactccgtgaaagttaaggctttcacggaagataaataaagtttccctgatttgtgactcaaattacaaaagtagtttatggcataacttgtctgatttttatggtgtaacaggtataaaagcatatgctatggttcgcctcatacttaaaacttccctcatatgggtgaaggttaaagcttggtagacagaagacagtcacaatgaataaagcaataaattga

SEQ ID NO: 16 - DNA, 11967 bp, Escherichia coli
tagtaaggcattatagtgaaacgatgtctatgaatcacacatctaatgtccggtgaacgtttggttgatagggtagtaaaactagtaatcatcctataattagctatattcgtggttattagattgaaaacagataacattaacaaaatctataaatctatttgaatgatttttttcatcaatgctgttgtaacctcctgctatcaaaagtttttcacaaaatctataagctcccagaattgcttgtataaatgctatcattggcgctgtcccgatcgagggagcaaggaggggactctcttgtgccatgcgattaatcacttgggctctaagtgaaatttagtgggactaaatactaattggaacgtgagataaaaatgcacaaagatccctctataatagttaatatcaaccttcgagaagccaaactgaaaaagaaggtacgtgagcatttacaatccttgggttttacaagatctgattctggagcgctccaggccccgggaaataccaaagatgtaatacgggctcttcatagttctcaacgagctgagcggatatttgcaaaccaaaagttcataacgctaagagcggcaaagcttattaaatttttcgcatccggcaatgaggtcattccggataaaatttcaccggtacttgaacgtgtaaagtcaggaacctggcaaggagatctctttaggttagcagcattaacttggtccgtacctgtttcaagcggatttggaaggcgtctccggtatcttgtatgggatgaaagcaacggaaaattgatagggctgatcgcaattggtgaccctgtgttcaaccttgcagtccgagataatttgattgggtgggatactcatgccagaagttcccggcttgttaatttgatggatgcatacgtcctcggtgctcttcccccttataatgccctgctgggaggaaaattaattgcatgtctgcttcgtagccgcgatctttatgatgactttgcaaaggtctatggtgataccgttggagtaatatctcaaaaaaagaaacaagcacgtcttttggctattacaacaacatcgtctatggggcgctcatcggtatataaccgtttaaagctggatggaattcaatatttaaaatcgattggatatacaggcggttgggggcattttcatatacctgatagcttgttcattgaattacgtgattacttacgtgatatggatcacgcttatgcagatcattatatgtttggtaatgggcctaactggcgtttacgtacaactaaggcagctttaaatgtactaggatttagagataatttgatgaagcatggaattcaacgtgaagtttttatcagtcagctagcagaaaatgcaactagtattctgcaaacaggcaaaggtgaaccagatctaacctctttgctttctgctaaagagatagctgagtgtgcgatggcacgatggatggttccacgatcaattcgcaatccagaatatcggctttggaaagcaagagatctatttgattttattagtaatgactcgctaaaatttcccccgtctgacgagatagcgaaaacagttgtctaatcttaactgaagggggagtaagtgaattacgctattgataagttcaccgggacactgatattagcagctcgagcaacgaaatatgctcaatatgtttgcccagtttgtaaaaaaggtgttaacctccgtaaagggaaggttatacccccatattttgctcatttgcccggacatggtacgtcagactgtgaaaattttgttcccggaaattccatcattatcgaaactattaaaactatttcaaagcgatatatggatttgcgcttattgattcctgtcggaagtaatagtcgagagtggtcattagaattagtgttgccaacctgtaatttatgtagagcaaagataacgttagatgtaggaggcagaagccaaacgcttgatatgaggagtatggtaaagagtcgccagattggtgctgaattatcagtaaaatcttaccgtattgtttcatatagtggtgaacccgatccaaaatttgtaacagaagttgaaagagaatgccccggtttaccttctgagggagcagcagttttcactgctttagggcgtggggcatcgaagggatttccacgagcacaagagttaagatgtactgaaacatttgcctttctttggcgacaccctgttgctccagattttcctgatgaattagaaataaaaagtttagctagtaaacagggatggaatttagctcttgttacaattcctgaagtcccttctgtggagagtatttcatggctaaaatcttttacataccttcctgttgttcctgccagaacatctattacagcaatttggccgttcctaaatcaaaaaacaagtattaatcatgtcgaatgtgttcattctgacacaatattgttgtcagcaaatatggcaccaacatcatcagaaaatgttggaccaactatgtacgcacaaggttcctctttattactttcagcggttggtgttgaaaaatcacctgctttcttcattcttaatcctggagaaaatgactttgtgggcgtttctggctcaattgagcaggacgtaaacttatttttttctttctataaaaaaaacgtttctgtacccagaaaatatccctcaatagatttggtttttactaagaggaataaagaaaagaccatcgtttccttacatcaaagaagatgcattgaagttatgatggaagcacgaatgtttggccataaattagaatacatgtctatgccttctggtgttgaaggagtggcaagaattcaaagacaaactgaaagtagtgttattaagttagtttctaatgatgacattgcagctcatgataagagcatgcggttactatctcctgttgcgttatctcaattatctgattgcttagcaaacttaacatgtcatgtagaaatagattttttaggtcttggtaaaatatttttacctagttcttctatgttatcattagatgacggggaatttattgaattatctcctaatcttcgctcacggatattaagttttatacttcaaatggggcacaccctccatggttttagtttaaataatgattttttattagttgagaaattagtggatttgcagccggaaccacacttattaccgcattatagggcattggtaaaagaagttaagaccaatggatttgaatgtaaccgctttagataaggtgccttcgaatgagttaccaatatagccaagaggcaaaggaacggatctctaagttgggacaatccgaaattgttaactttatcaatgagatttctccaactttacgacgtaaagcttttggttgtttaccaaaagtaccgggattcagggcaggacatcccactgaaattaaagaaaaacagaaaagattgattgggtatatgttccagtcacatccttcctctgaggagagaaaagcatggaaaagtttttctcttttttggcagttttgggctgaagagaaaattgacaaatcatttagtatgattgataatttaggattaaaagaaaactctggctctatttttattagagagcttgctaaaaactttcctaaagttgctagagagaatatcgagcgcctgtttatctttagtgggtttgctgatgatccagacgttataaatgcatttaacctttttcctcctgcagttgttcttgcccgcgatatcgtggttgatactcttccaattcgtttagatgagcttgaagcacgtattagtttaattgccgataatgtggagaaaaaaaataaccatattaaagagcttgagttaaaaatagatgctttttccgaacggttcgataattactttaataatgaaaagagcaatttaaaaataattaacgaactacaatccttaataaactcagagactaaacaatctgatattgctaataaatctattgacgagctttatcattttaatgaaaaaaacaaacagctaatattatctcttcaagagaaattagattttaatgctctggctatgaatgacatttctgagcatgaaaaattgataaaaagtatggctaatgaaatttcagagttaaaaaatgcattaactatcttgtgtgataataaaagaaagaataacgagttagattatatcaatgaattaaaaaaactcactgaacgaatagatacacttgaaataaacacatctcaagctagcaaagtgagtgtcaccaatagatttacaaaattccatgaaatagcgcactatgaaaattatgaatatctttcatcctccgaagacatatctaatagaatttctttaaatttacaggctgttgggttaacaaaaaattcagcagaaacattggctagattgacattagctaccttcgtttctggacaaatcattcaattcagtggctctttggcagatattatcgcggatgcaattgccattgctattggtgcaccacgttatcacatatggagagttccagttggtattatttctgacatggattcttttgattttatagagactatagctgaatcatctcgctgtctccttttgaaaggggccaatctttcagcatttgagatttatggagcggcaattagagatatagttgttcaacggcaaatacatccaacaaattatgaccatctggcattgatagctacttggaaacaaggccctgctacattccctgatggaggaatgttggccgagttgggaccagttattgatactgatacattaaaaatgcgtggtttatctgctattttaccccaattgaaaccaggttgtcttgccaaggataaatggacaaatattgatggactacagcttgatagtgttgatgattatgtagatgaattaagagcattactggacgaagctggatttgatgggggaactttgtggaagagaatggttcatattttctatacttcactcataagagtccctaatggaaattatatttatgatctttattctgtcttgtctttttatactcttacatgggcaaaaattaaaggtggccccgtccaaaagatagaagatattgccaatcgtgaattaaaaaattatagtgcaaaaatatcttcttgaggaggtggttaatggagtggagagcagtatcacgagacaaagcactggatatgttatcaactgcattaaattgtcgatttgatgatgaagggttgagaatttcagcagtttcagaatgcttaaggagcgtattatatcaatattctatatctgaaacagaagaagctaggcaaactgtaacctcgcttcgactcactagtgcagtaaggcgaaaattggtacctttatggccagacattgctgatattgataatgctatacatccgggcattatgtctatattgaacagcttggctgaattgggtgacatgattaagttagaaggtggtaattggctcacagctcccccacatgcagtacgaattgacaataagatggctgttttttttggtggagagccttcctgtacattttcaacgggcgtggtagctaaatctgctggaagagttcgcttggttgaagaaaaagtgtgtactggaagtgttgaaatctgggatgcaaatgagtggattggtgccccagcagaaggcaatgaagaatggtcatccagactactatctggaactatttccggctttatcgatgcgcctagcaatatgagtgaaacgactgcatatgtgcggggaaaatggctccatttgtcagaactttcttttaataaaaagcaaatctacttatgcagaatgtccgttgataatcacttttcctattatttaggagaaattgaagctggacgcttatgtagaatgaattcgttagaatcgtctgatgatgtcagaagattacgtttttttctcgatacaaaagataattgtccgctaaagatccgtatcaaaatatctaatgggctagcaagattaagattaaccagaagattaccaagacgagaaacgaaggtactcctgctaggctggagagaatcaggttttgaaaatgaacattcaggaataacacaccatgtattccccgaggaaatattacccatagtgcgtagcgcttttgaagggcttggtattatttggattaacgaattcacgcgacggaatgaaatatgattaataaaaataaagtaactgaacgttcaggtatacatgataccgtgaaaagccttagtgagaatctgagaaaatacattgaggcacaatatcatatccgggatgaagggttaattgctgagcgacgagcgcttttacagcaaaatgaaactattgctcaagctccttatatagaagcaaccccaatttatgaacctggtgcgccatacagtgaattacctattcccgaagcagcaagtaatgtgctaactcaactatcagaacttggaattggcctctatcaacgcccctataaacaccaatcacaggcacttgagtcatttcttggcgaagacgcttctgatctggtcattgcaacaggtacaggctccggtaagactgaaagctttctaatgccaattattggtaaattggcgattgaatcttccgagagacctaaatctgcatcccttccaggttgtagagcaattttattatatccaatgaatgcattagttaacgatcaacttgctcgtatcagacgtctttttggtgattctgaagcctctaaaatactgagatctggaagatgtgcccctgtacgctttggcgcttatacgggaagaacgccttaccctggtcgtcgtagctctagacgagacgagctttttatcaaaccccttttcgatgagttttacaataaactcgcaaataacgcccctgtacgtgcggaactgaaccgcattggtcgctggccaagtaaagatcttgatgctttttatgggcaaagcgcatctcaggctaaaacctacgtctcaggcaaaaaaacgggtaagcaatttgttttgaacaattggggggagaggctaattacccagcctgaggatcgtgagctaatgacccggcatgaaatgcagaatcgctgtccagaattactgataacgaactactccatgcttgagtatatgctgatgcgacctatcgagcgtaatatttttgagcagactaaggaatggctcaaagctgatgagatgaatgagcttatcttagtgcttgatgaagcgcatatgtatagaggagcagggggagcagaggtagcccttttaatacgtcgcctctgtgctcggttggatattccccgggaacgtatgcgctgcatccttaccagtgctagtctagggtccattgaggatggagaacgttttgcccaagacttaactggcttatcaccaacctcttcgaggaaatttcgaattattgagggtacaagggaatcgcgtcctgagtcacaaattgttaccagtaaagaagctaatgcactggctgaattcgacctaaattcatttcagtgcgtagctgaggatcttgaatctgcatatgcagcaatagagtctcttgccgaacgaatgggctggcaaaagccgatgataaaagatcatagtacactacgtaattggttatttgataatttgactggttttggtcctattgaaacgcttattgaaatagtttcaggtaaagcggttaagctaaatatcttgagtgaaaacctttttccagactctccacagcaaattgcagagcgagcgacagatgcattactcgcattgggttgctatgctcagagggcatccgatggcagagtgcttattccaactcgcatgcatcttttttatcggggattaccaggtctttatgcctgtatagatcccgattgtaatcaacgtttgggtaaccatagtgggccaactatacttggccgcctttatacgaaaccactggatcaatgtaaatgcgcttcaaaagggcgagtctacgaattatttacccaccgtgactgcggtgcggcttttattcgtggatacgttagttccgaaatggactttgtatggcaccagccgaacggaccattatcagaagatgaggatatcgatcttgttcccatagatatattggtcgaggaaacacctcatgtacatagtgattaccaggacagatggctacatatagcaacaggacgcctttctaaacagtgtcaagatgaggattctggttatcgtaaagtctttatacctgaccgagttaagtctggatctgaaattacatttgatgaatgccctgtttgtatgcgtaagacaagaagtgctcagaatgaaccgtctaaaattatggatcatgttacaaaaggggaagcaccttttacaacgttagtacgtacacagatatctcaccagccagcgagtcgtcctattgatggtaaacatcccaatgggggaaaaaaagtacttattttttctgatggccgacaaaaagcagctcggcttgcacgtgatattcctagagatattgagcttgatttgtttcggcaatccattgctctcgcctgttctaaactgaaagatatcaatcgggaacccaaaccaacatcagtactttaccttgctttcctatcagtcctttctgaacatgacttgcttatttttgatggggaagattcacgaaaagttgtaatggcccgtgatgaattttatcgtgattataatagcgatctggctcaagcttttgatgataacttcagtccccaagagtcaccgtcacgatataaaatagcgttgcttaaacttttatgtagcaattactattctctttccggaacaacagttggttttgttgaaccatcgcagcttaaatcaaaaaaaatgtgggaagatgtgcagtccaagaagctaaatattgagagcaaggatgttcatgctttagctgttgcttggattgataccttactcactgaatttgcttttgatgaatctattgattcgacactacgaatcaaagccgctggattctacaaacccacttggggtagtcaaggacggtttggaaaagctcttaggaaaaccctgatacagcatcctgctatgggggagctttatgtggaagttttggaggagatttttcgtactcatctgacattaggaaaagatggtgtctactttcttgctccaaatgcactacgtctgaaaatagatctcttgcatgtctggaaacaatgtaatgactgcacggcactaatgccatttgctttagaacattctacttgccttgcttgtggtagtaacagtgtcaaaacagtcgagccgtcggaaagcagctatattaatgcacgaaaaggattctggcgttcgccggtagaagaagttttggtttcaaattcgcggcttctaaaccttagcgttgaagagcatactgctcaactctcacatagagatagggccagcgttcatgccactacagaactctacgaactgagattccaagatgttcttattaatgataacgacaagcccattgatgtacttagttgtacgacgacgatggaagtgggggttgatattggatctctggttgctgttgctttaagaaacgtccctccgcaacgagaaaattatcagcaacgtgctgggcgagcaggccgccgtggcgcatctgtttcaacggtggttacatattctcaaaatggccctcatgatagttattatttccttaatcctgaacgcattgttgcaggttctcctcgtacacctgaagtgaaagtaaataatcccaaaatagccagaagacacgttcattcttttttagttcagaccttttttcacgagttaatggaacaaggaatttataatcccacagagaaaactgccatacttgagaaagcacttggtactacacgagatttttttcatggagcaaaagatactggcctaaatctcgatagctttaataattgggttaaaaaccgtattctatctactaatggtgatttgagaacaagtgttgcagcatggcttcctcctgttcttgaaactggagggctttctgccagtgactggtttgctaaggtagcagaggaatttttaaatacactccatgggctggctgaaattgttccacaaattgccgctcttgttgatgaggaaaatgaagatgatgagcagacttctggtggaatgaaatttgcacaagaagaattacttgagttcctgttttaccatggtttattaccaagttatgcatttcctacaagcctctgtagtttcttggtagaaaaaattgtaaagaatattagaggttcttttgaggtgcgaacagtacaacagcctcagcaatcaatttctcaggctctgagtgaatatgccccgggacgtttgattgttattgataggaaaacctatcgctctggtggtgttttttctaatgcattgaaaggcgaactaaaccgggcaagaaagcttttcaataatcccaaaaagtttattcattgcgataagtgctcttttgtccgcgatcctcataataatcagaatagcgaaaatacttgtccgatctgtggtggcattctaaaagtagaaataatgattcagcccgaagtctttggacctgaaaatgccaaggaacttaatgaggacgacagagagcaagaaatcacctatgtaactgcggcacaatatccacaacctgttgatcctgaagattttaagttcaataatggaggtgctcatattgtttttactcacgcaatagatcagaaactggtgacggtgaaccgagggaaaaatgagggggggtccagtggtttttcagtatgttgcgaatgtggtgcggcctccgtttatgattcctactcaccggcaaagggggcacatgaaagaccgtataaatatatagcaactaaggaaacgcctcgcttatgctctggcgagtataaacgcgtttttctcggacatgatttccgtactgatttgcttttattacgaataaccgttgggtctccgcttgtaactgatacttcaaatgctatcgttttacggatgtatgaagatgcattatatacaatagcggaagcactaaggcttgcagctagtcgccataaacaactggatcttgatcctgctgagtttggctctggtttcagaattttacccactatagaggaagatactcaggcattggatctcttcctttatgatactttatctggcggtgcgggttatgcggaagtagcagcagcgaatctagatgacattcttactgcaacactcgcattgttagaaggttgtgagtgcgatacctcctgtacagattgtctcaatcatttccacaaccagcatatacaaagccgtctcgataggaaactaggtgcatctttacttcgttatgctctatacggaatggttcctcgttgtgcttcacctgatattcaggtagaaaaattgtctcaattgagggcaagtctggaattggatggttttcaatgcctaattaagggaactcaggaggcacctatgattgtgagtttgaatgaccgttctgttgcagtgggaagttaccctggtcttattgatcgacccgactttcaacacgacgtatataagtcaaagaatactaatgctcatatagcctttaatgaatatcttcttcgttcaaatctgccacaagcgcatcaaaatattagaaaattgttgcgctgatagcagtattgagtgccctaaagtcctatagggcactcaaggttattctcttttaatatttgttaatagcatgtattttaaggctttcagtccttgagctggcttttacacaacgagaaagaggtaattataataccagccggatatggcgagaaatggtggcccgggggtgtaagtatcccgcataatcgtgccattcatatttagagatcatccggcataatcaatctgctaacgaaggagatcgcta

SEQ ID NO: 17 - DNA, 7050 bp, Bacillus cereus
gttgatcaagaaacaacttatagcgtgtagtttttgttggataaaattttaaaagttatgtaatttgatgcaggggaattgaaacgtaatatagaaatttataattataattatagagttaaatgatggtgcttaatggaagacgatgatagcgaaaaaggaggctgaaatgaaaaaactatttgaatgcattccggaaaattatttcaatttgtttgctgggaaaaatcgggggttttatgctgaagttgcttttttactatatgaacaattccatatcaatcgagctggtattttatacagtttgatgaaagatgaggttcaagaattaatagaaacgaaagaagagttaggagaatgtattgatatagaagatgaaatagaagaaaaagagcaagacagtgctgggagagcaaatgaggtgcttcgacgtttaaagaaacttaaatggattgatgtagaagtacgtgatcaatttgaagagtttatagtgcttccagtgtattctagccgtattttggctgtgctaaaggaaatttgtgaaaatagaacaattgaatatcaaagatattgttttacgacatatcaattattaacaggagtggaggcggaggagcgcccagcttcagctattttggagtctgaaaaatatagtgagcaactttatgatgaattaacaattttactgcacaatatgaaaaatcatatggaaacaattgcagctaaagatgatatacaacaagtgttagagcatcattttggagaatataaaaaagatataattgataaaagttaccatcgtttaaggacatcggatcatgtgtcgagatatcgaaataaaatattggagcgtatacagacttggtttttagatgataaattcatgaaacgtgctgccgaagatgctgtagaaagtggatattctgctaactgggaagaagcaatggatggattaagtaagaaaatgtatagggttgaagaaatttatagtaatttagatgaaatttgtaatcaaattgatgcacgccattatcaatatttacgagcagttttagatcgttctagatatttaagtacttataatgacagtatcaattacaaaatatcttatattttagaacatatagggcaaatggacgagaatatactcgattcttctctgtttcgtttagtacagttgcggcaacttcaagaagcgtcactgttatccccacgtaagaaaaaaggtgtatatgaaccagaacagcatgaggttaatgaaattagtgatgagatgcgagaggagctaaaggctgaaaatataagacgtatggaaaaggttatgaatcgaaagaaaatccaaaaatttgtgttagaagcaatgaaggggcgtcaagagatagagatgagtgaattgaatttgcaaaatgaggatgacgctttgtatttaatttacgtttatttgtatggttatagtaagggaactggatacaagcttagtgaagagccacctgaatttattacacaaaaggggtatacattttctaatcgtacgataaaacgagaaaattagggggaagttatgcaaaatgtatcggaaagagaaagagaagagatggggattgttgttaattatttattctcccataattttttattgaaagaatttgaacgtgagaagtatcacctggcagtacggaataaagatattattaagcaatatttacaggtaattggttgggattttattgtggatgaaaagcatgggtgtattgttattgtttcgccacattacgagcatcgtttgaaattgaagaaagacgaaacgatttggttgttagtattaagacttatttatgaggaaaagcgtagcgctctatctattagtcaatatccctttaccactcttcaagaaatcaaggggaaatatgagacgtttcgattaccgtttgtatcaaaaacaaaattacgtgaacttgtgcagattggaaagcaaaatcaacttttgagaccaattgataatgacatagagtcggatgattgtcgttttcagcttttccattcatgcattcatgtgctgcaacaaggagatttaaatgtattgtatgaaaaaataaaatcttatagtgagggtggggatcacagtgaaatggatgaagaaactacgattaattaattggcattattatagtgatgaaacaattttatttggaaaacaaacagtgatatctggacatacaggagcagggaaatcgactgttattgatgctttacaagtcctatttatttccgatgagcggaagattaaatttaattcagcagcatatgaggaggccaatcgtactttaattaattatttgcgggggaagataggtacagaagaaaaaccttttgtaagagaagggtattttacaacatatattgttgctgagttttatgatgagaaggcaggagagagttttgtaattggtatttcaattgatgtatttaaagatgatgaaaaagtaaaagagtattttattataccgaaatctgagattaatatgatttcgttttttagtacaaaagacgagaaacgttatgtggaaaagcaagcagacttttgtaaaaaaataagagaacaatttccagaggctataattgaaaaaagttcaaatcaatatcaaaaggctttattacaacgttttggtggattacatgaaagatttgttaaaacgtttgcaagagcattatcgtttaaaccaatcgataacatgaaagattttgtatataaaaatatattggacgaaaaagaattaaaaatcgacgttatgaggaatatttttcaaacacatgaagaattgcaaagagaattagaagaattaaaagaacgaaaggaagagctggagcgaatagataatatttatttggaatgtgtaaagctggaagcggatatttccatacaagaatatgttcttagagggctagagtatttattaatacaagaagaaaagagcatgtgtaaaaaaagtattgaacagagagaaaaagaattaagaaaatgtgaatcagatcaaaaaaagacagcggaacaaaaagagcatgctagaaaaaaagagactgagtatgaaattaagattaaggatagtgctgaacaaaaaagacaaaaacaattacaagaacaaatagctcaagcgaaaaaagaatgtggtgatttagagtgtaccaaaaacatatatgttcatagtttagcaagagaagaaaaggatgtttctagtcttttaaattatcaaggtaatgaatatttctctttaagcaaggacgagaagcatgcattggaaataggaagagattgtctagccttcttgtcacataatgatggtactggagggaatagggaagagcaaacattaaataaacttggagagagtttaaaaagaattagtgggcgtttttataagagtacagcagaattggaacacagatctgctgaattgaaaacagaagagaaagaattactttctgatatagagaatttaaaaagaaggaagcgtccttatcccatgtctgttgaaaagttgaagggattactagaaaaacatttagaggatcaatcgaaggtatggattctttgtgaagagttagaaataaaaaatgataaatggcgaaatgccctagaagggtatttgaatactcaaagatttgatattttggtagaaccacatatgtttgcgactgcactgtctatctacgaaaaggaaaagtggaatcttggtcttgaaggtgttggacttgttgatactgaaaaagaacaaacatatttagggaaagttgagaagggttctttagctgaagagatagtaggtggtaacccaatagtacaggctcgaattcatcatttattaggtagggttataaaggcagacaatgaacaagaattacgaaagtataaaacagctgttactgcgacatgtatgagttatcaacgtcttgtagcacgccaaattcctagaaaagtatatgaaaccccatatataggtgcacatgctattcaaaagcaattagaaattaaagaagaaaacttaaaggaaattcaaacagaactgcaaatagtaggatactatattaaagactttaagaaatggattgaaattttagaagataagcaatcggattataagaattatatattaaatttctcattaaacgatagtatcttggagtttaataagaacataaataaatggaagagtgaactaaatactcttgatttgtcacgtttagaaagtttacgccaaaagttgaaagagtggaatggaaaatataatcaatttaatggagaagaaggtagactgtttgaacaaattgggaaggtgaaggaagaacttcaaagagtgaatgctgagttatggaaaaaggaaaaggccgcaacagagattttagagaagtggaaaaattggaagtttgaatatagaatcgaattattacaagaggctgagcaaaggtacgagcaagctatttctacaaataaagcttatggtgctataaaaaataaatacgaaaataataaaaaagaaaatcaaaataaatacgaagaaaaaaggggttttctagaaagtgaacgtaagtcttataatgaagcgcgaactttccaaggaattatacaggctaaagataataagcagtacgaagaagcgctccggaaaattgcaaacctcgatatcccaaagtttgaacaagagatcaaggaaacgttgcagcaagctgaagaggaatttcagtctcactttatttacaagatgcgtgaggctattcaagcggcgcgtagagaatttaatcaattgaaccatgcgttaggaagatttaaattccgaaatgacacgtatcgatttgtaataaagccaagtgaacaatataaaaaattttatgatgtaattatggatgaaagagtacagccggagatatctctatttgattttggtgatgaagatagggcggagattttaaaggacttatttggtagattagtggtgggcgagtatggtgaaaacgaagagtttgtggactatcgtaattatctcgattttgatttaagcattaataatgaaaatggaacaagatttatgtctaacttattacgtgagcaatctggtggagagacgcaaacacctttttatattgccatcctagcatcatttcaacacctttatcgaaataaaaataccattcgtttagtagtgtttgatgaggcttttaataaaatggatgaagagcggattcaaattagtttacgtcttattaaacagttggacttgcaattaattgcagctgtgccagatgagaaaatggctcatatggcagctgaggcagatacagctataataattaaccgaatagggcattcatgttttactgacatattatcttatccaagggaggacgaggcaattggattacaagagcaagattctttcagtcttattgaataaatatgaaaatagtaaaactgctcatacaggtgagagaagtgctcagcgccctcaattttcatttcggcaaaaacatgaactttctaaagcatataatgatgaaatggattatacgaaccgattagaaattaatactgcattaaaggacttaattcgtaaaaaaattattgaagtgaaatgggaaaagtgggaagagaatcgaattgctgaaaaggtttatttacagtatgattttattccacaagcttatagagaagctggtatagaaccaaaaattgaaaagatgaataggattttaaaagtgttagaaccacttgctgttcattcatgggagtgggttcgacaatggtataaagaagtacaacagtcgtttcaaaataataaaacggcacgaattaatttaaacgatgttaaaggatatgaactacttgtaaaagcactttctagattagaaggtttggaagatagtataccgaaaaggacctttagccaattagtattcggggatacaaaactttttgaaactacgatacaaaaccgattattaataatatataaaaggtacggagatatagaatatgaaagtgataaagaatatttagagagtattgggattttagagaatatccaacctgtctatataaaaggaaatgttgatattcgtgttagaggagagaagattgctctcggttcctttcctggtgggttcggtttaatggatgaaacaataaaagaactagaaattcagtatgtacacgatgaaagtataatgcttattgaaaacatgaccacatactatgaacaaattaaaaaaaataataatattttatttatctatacaggtgggtttcctaagaagaatgtacagcaattgttaaaaaagttgaatatatatttggaaaatcatccagttccagtatatcactatggagatctggactacggaggaatccaaatatttgagtacattaagcgttcgtttttttcagggcttgagccgtatatgatggatgtagctacctacaggcaatttgtaaagtacgggatggaatttggtgaagggtatgaagaaaaattactgaagatgttagagaatgagcagtattctttatggcatgagttaattaaagaaatgcttaaagaaaagaagcgtgttgagcaggaagtgatagttagaaacgtaatttagtgtatttatataaatttaaaaaggatgtctatagaccaggataacggtttatgggcattttttattaggttttgtataaaagagatttagttagaggaaatgagatttaatatgttttgtaaacgccataatattaacgcctgaatttttttaggagaggaaagtagagtgttggctttgtttttcgtaattaactaagtaatgtgagaagttttttatatggggttatttatataattattaagtgctagataatgaattgttagtccatccttattttggaggcatgttctaattaaataaactggttggatgtaataagtgaattcctggtaatttatcgttggaaaaaaatatatattatgtataattagtgtataaataaaattctctgaaatttgaaaggtgataaaa

SEQ ID NO: 18 - DNA, 8334 bp, Bacillus vireti
tctttgggttcctttactttttgtaaaaaatttaattctttgcctgaagtatttcgaaaaactgaaagcctttaaaaagaatttcaccaatcagtttaattacagaccaagattacaataaatttaaaaccattcgatgtcaatgtttaaatggaaaaacgtaagtataggaatccttagttcaatattatacaatgggaataatagacaaaaaataggatgatgatccatggattcaacaatgaaaaaaataatagaggccagttatttaacagccgactccgcggcacactatcgaacgattcttcgctatttttatcaccagcacgaaagaatgagagattttattgcaccggaagagttattggaacatatgcgttcgatacctgccttcgcggactttcaagaggaccagctccaccagcaattagcgcagcttgtaaaatggaataatttaattgccaggcaggatatgacaaacgcaaaaacaattgaagaatataaaaagaaacggttccgttatcaatgtacaccctacacggttgagattgagagaatgattgtgcaactagaaaaattaggagatacgttccaagggtcgttagaacgctcccaatttgatcgccttttccaagcaataaccagccttcaaaatgaactagagaatgacctaaacaaatcggcagaagaatatatgcggatttgggaggacgtatttcgctattttcaaacgattcgtaccagcactgctgattatattgcttatattaatagtgaacaaaccgatcaacgaatgcaaacagaggcatttctagtctataaaaatcagtttacaacatatttgcgagattttattgtatccttgcaaaaaacatcgctgcaaatccagcattcattatcagaattaaccttggaacggttacagcatttttttcaaaaattaatcgagcatcgcggggcaattccccgtcttgaggatgtttcgtcatctacaaacgattggcttactgaatatgaggaatattggttttcattacggcagtggtttttagggtcggctgttcagcaaagtgaactagatatccttcagtggcagaccaatgaaatgattcgccggatgacaagatacgttcagcgcatcggtgaaaggcagcagcattttcgcagccgaaaaaaggactatctgcaattatcaaaatggtttgttgaatgcagggatagtgaggaagctcataaactttcagcagttgtattcggctcgatgacgattcaacatctccagcttgaggaagcgaccactgaaaaccttcatgtcgatacatgggatgaggcaccgactgaattaacgataaaaccgagaacggtccgctaccgtgaaaaaacaaaaccgggatcgtttaactcgaatgaacagaagaaaaaagagcagcgagaactctatttaaaggaaagagaacaagagaaaaagttaatcgaaaaatatatgacccaaggtaaaattacgctttcagcactctcgacagttgaaccattcatccgcaaggttttgttaagctggattgggaaatcaatggcggccaaaaatcgcatggtcaagactgattacgggcttcacgtaaaggtaatgcttgattatgagaaaactattaccttacaagctgaggatggcaatttactaatgcctgatgcgacattcttgtttgaggagactaggtgatgataatggaacaaacgcaattattcgatgaaaaggcaatccaaggaatggacatcttgtttcatcattactggatcttacgtgccgaacaacctgaatggtatcagctgattcgtgagcgggagaaggtattgcgccgctatcttgatgaaaagttcggcctgcggctaattgttcatcaacattttattaaactggaaaaaattcctgttgaaccggaaggctggatgggcatccaagatttccaagagccaatggactatgcgattttttgctgcgcacttgcctttttagaggggaaagcagtggatgaacagtttttgctttccgaactatgtcaagagattcaagccgattatcctggagattttccgcttgattggacgctctatacccaccggaaatcattgataagagctgtaaaagttttgatggaatttcagctcatacgaaccattgatggggatatcggccgcttcgatcaaaatgaagagcaggaagttttatatgaagctagcacctatagtcgatatttcatgagaacatatccagatgatttttcgagctatcagcactggagcgagttactaaaagaagattggaaattgaaccaagaggatgaacgtaggaagcgggtgtaccgcaagctgttcttttcacctggtttgcatcggctagatcaacaggatcctgattttctctatatccggaactatcgtaaccgcttagcagaagatattgaaaagcacagtgagtataaactccatgtctataaaaatacggcatttttatcgattgcggagccaaggcaatatcaacaggtttttcctaattccaaggcatccactgacattatccttcagttgtcaaagtacattcatggggagcctgagcgcttcaaagcaaacgaaaatggtgaaatactgatgacggaaggtgagtttgaacaagttgtggatgatttacggcagcaatttggaacaggctgggcaaagtattttcgcgatatgagtacaaaaggaattcgaacggaactgcttcgtgccatgaaggattggatgatggcggaagtggattcagaaacttctcttattcggattaagtcattaacaggggtcatgacgggggaatatccgagtgattttcaaacaggaggaacagaatgatgacagaggcaaaatgggtgatgaaccgtgcggggttattgaatttttggtattacgatgatgaaatttttcctttctcggatggaaagctactgcttaggggaacgaacggctccgggaaatctgtaaccatgcaaagcttcctgcctgttttgttagacgggaaaaaatcacctgaccgactcgatccatttggatctaaagcccgcagaatggaagattatttactcggggaaaaagaggtggtcgatcgtgatgagcgtacagggtatctttttatcgaatataaaaaggccggcgtagagcgatacattacaactgggatcgggatgcaagccaagcggcataaaggaattaagtcttggtattttgtgattaccgataatcgcagaattggatatgattttgaacttgcacattcgcaactaggagaccgagttcctttttccgcaaaggaactggaaaatcggatcggagagggcggctatgttgttcatacccagcgcgaatatatggagctggtgaataaatatatttttggtttccaatcaaatgaagcttatgaagacttgatcaagcttttaatccaattacgaagtcctaaactttcgaaggattttaaaccgacagtgatttatgaaatattagagtcggccttgcctcctttgaccgatgatgagttaaggcatctatctgataccattgaaagtatggatcaaacccagcagcagctcgaacagttggaacgggaatttgcctctagcagcaggctggttaaccagtatcattcctataatcaatatattttggccgaacgggcagggaagtggcaggatgccttaaaaaggtacactgttgctgaggaacatgtaaaaggtttaacagcccaagacgaagaattgactcaagaaattaaacaagaagaggaacagaagcagcaatttgcccagcagcaagaaattgccttagaagaaaaaaagcggttggagcgccatgaggtttggaatctggaagaggataagcgtaagaaaatagaaaatacaaaatctttaagtagtgaaataaattccttacaaaagaaatgggaccacaaaaacagtcagtacaatcgtctatggcaggagcgggagcagagtcaaaaccagataaggcagcatgaaagcggcatggaagatttattaggggagctgcaatttgatgcggaagaggctgctttttcagagcatgaggttaacgtccatgatttcgaacgtcatcaggaggaggagtttgatttttccatctggattggtgagattggcagtcatgaacaattacttgcgaatttaaatcaattagctgatgaggaaaatcgtctgtcagaagagcataaccggctccaacggcaatcctctgagaaaaagaaagaggtagatgcaatccgcaagaatctcgatcatttagccgattggtttacggaagagaagcaaaggttggagcatcaggtatttacttggattgagcagcatccaaagcttattttttcaaatgaaagacgccaagaaatcgcccgatcaatcgaaggtttatatgaagaaaatcggtacgagcaagtgagggaaaaactccttgctgtggttaatgattatattaccgatatcagtacgaagaaaaagctcatggagacaaaaatagaagataaaaagcacgaattggaagcagcacgagcagaattgcatcactggaagacattaaaaatgccaaacccggatcgtgctaaggatacagaggcatttcgcttgcagctgctagaagacgggcaggcatttattccgttttatgcggccgttgagttccaagatgatgtgaccgaagaacagaaagagcggattgaatctgcgttaaaacaaacgggcatattggacagcttgatcactgaaaatgcccttgccccaacccatgatcgggtaattcgtcctgagccgcaattactcggatatacgttagcagattatttgcgtccggatttagaggcagacagtcttatttcaaacaaacttgttgatgaaatattacggagcatctcccttgaacaggaaggggcaggttttcatgtggatgtcgatggatcatattcacttggttgtttagtggggcatgcaccaaatgaagggccgtctaaatatatcggccgctcatcccgcaaacgataccagcaagagaaaatcaaagaatgtcaggaaaccattgagcaactccaattagagttagaggagctaaaggtgcaactcagtcaatacgaagagaatctcctccaagcagcacaatggaagcagaccatgccaacagatcaggaacttaatgacttgaatgttcagattgaaaagaccggccatcaattggaggagcaaaaaaaggttctttttcagctggatgaacagtggaagcaagtacacggtcacctccaagtgattaaaatacagctccatcaagaaggccgccagctaaatctttctttaactaaagaagtcttagggcaagcattaatctcagctaaaaactatcgtgatcaactctatagctttaaagatctttttcaaaaatgtttatttgcccggaaaagaatagaggatttaactcatcgcttatttgaaatggaaacggaactggacgatcttaaaggggatcaaaatgtcaaggaatcacagttgcggaaagaaaaggctgaaattgagtcaattgagcaacagctgaagctaaaagggatcgaggaagtaagacttcggattcaacaagtgcagcaggagctaagggaagcaacagaaggcatcaatcatctacttgaaaccattcctcagaagaaagcaaaacaagaaacctgtcaaaatgaattagcagcagctaaaacaagtgcggaattctggtcaaatatggcggacgaatgggaacagatggtgagagcggatatcgcccgtggttttgtagaagttgttgaaatggatcctgttaaaatcgttaaacagctggaatccattttaggaaaatatgaccgttcgaagctaaatgaacagctaacaaagacgttcatcaatgaacagatatttttaacggagtacaggatgtttgaatacccggaagagaccgagcgtccagagtggttttcgaaggaatggggcgaatactatgaaccatttatgaatgaatggaatcagcttcaaagccgccgtttaattctaatggaatataaaggccagcgtgtcagtccgtattttgtgttcacatcactggaaaaagagttagaagaccaaaaaggttggcttgatgaacaagaccgccaactctatgaggatattatcgtcaatacagttggagtaatcttacgaaatcgaatcaaacgtgccgaaaaatgggtgagtgagatggacaaaatcatggaaagccgtgataattcatctggattaacgttctcgattgcatggaaaccattaacggccgaatcggaacaagaattggatacaaaagacttggttaagcttttgcagcggaatagtaagtttttgaacgaggatgatttaaatcggattacaaaacacttccaatcgagaataggaaaagcgaaggaattaattcagttacggaatgaaggatcgacgcttcatcaagtgttaaaagaagtgttggattatcggaagtggttcacttttgttctttcatttaaacgtgtaaatgaaccgaaacgagaattgacgaacaatgccttctttaaatttagcggcggcgagaaggcaatggcgatgtatattccgttgtttacggcggcctattcaagatataaagaagcaggagagatggcgccgtatatcatttcactcgatgaggcctttgccggggtcgatgagaataatatccgtgacatgtttgaagtggtggaacagcttggctttaactatataatgaactcacaagccttatggggagattatgacaccatttcaagtctatcaatttgcgagttagtacggccaaagaatgccgactttgttactgtgattcgctatcaatgggacgggaaacagcgcacctttgtggtggacgatgagcacgttgaggagctagtgacacatgattgacaaagtacaggtgtttagggacgaaccaggttttgttaaattgtttaccctatttaaagaaaaataccgttcaatcgggagaatcggcggcatggtgagtttggatggcttttcctatgatgaggtggaatcaattgccggctttttgggacagtctgttgaagcgctccttgaaaaagggaaggtttcattactttcttttgaaaaagaattaccgttgaccggttttgcagagtattcccttattgaattgcttgaagaagtgctcggggagtcgatacttactaaacatgaggaaagtggcattgaagaagagaaagaaaagaggtttttacaagagttatcttttatatgtcctgagggaagttggtggtgggactggattgagtcgaaaccgccggattcccggtggatttggtcgctttataagcaggatgcggttggtttaatggaaaaattcatcaccgtttttaaagcatatcaagatcttccctgtaaggagaataagtatgaaagactgccgctgtttgcccaacgaacaacgggaaatccacatattttcgataataatcaactaactgggaaattgctcgtcaattgcctgcaggtagatcaacagcttaaggggcgacgcgtaccgggaatgccgaaaacaacagaggatctaaatgatttgctaggtttgtatggtttgatgagggatgatttgtggagttttgtttcctgccgcggattacttgcggaaggtgaaatggggattcatcctgtttggaaagccgcagctgaaactgacacagttctaaacgttccgcttaaggaattactgaaaataaaaagaatctggcccgctgcaggaaaaaaggtttggattgttgaaaattcaagtgtttgttcgacgattgttgatgaggttgctgatgctcctgtaatctgcacccacgggcaatttcgggctgcgagctggatattgttggagttattagtggaagcgggctgtcacctttactattcgggtgacctagatccggaaggggtatcgatggcacagcggcttttcgatcgttatcagggtcatgtaacttgttggaggatggatgttgaatcctatgataaaaccatttcagatgaggatatttctggcaggctttctaaattggagtcaataactgcacctgaacttcttgaagtagtgaatgtccttaaaatgcggcaaaaagcgggctatcaagaaggtttagttgagcaacttgttcaggatattaaaaacgagtttaatgtgttactttaggttgaatcaaatatagtaggaatccagttggatccccaccacaaaaagcgctat

SEQ ID NO: 19 - DNA, 7016 bp, Bacillus thuringiensis
ttccgatactctttagccataaagcgatgaattctgctgttccgccgaatatcgcaacggttagtgcatatggtaaacctacgcctagtgcacggatttcagttggaaagagttctgcttttacattgcgttaatcgatgtgtaaccagtaacgatgatgaggccgaccatcatgagtgaaaatgctaccatgggttctatatccatcatttttaaaacttggtggatatggagggacctggtactgttttggttttgtgatgtctgtgggatttcttgctagcttctgcatgatttgtcggtaagtcgatatattcggagttgcggtcgatataattggataatcgttgatatattttttaaaggtatggcattcattggtagaaagagtgatgcgagcttatgttacaatggaaatagcttgtaagtaaggaagtgacagtatgaatggtatacaatttgttcaattgtatgtaatgaaaagtgctgaaaagattgatgagttgtatataaaaaaagaacaaggtatcacaactctccccattataaagcagaccccgcgtaagattataaaaacagcggaacttctttttagtgaagaagaggtttcggatgtttctactactattacaaaaaacttttattcacctaatgtaaggaaaagagaaagtgatgttttaaagtggttaacgatacatgaaatgatagattgtatagaacgagggattttaattaaggaagttcgttttgagaaggatgggaaaactgtgcattccattttctatcgaatggggtacggtttgtttacatatatggaaaagaaacaacagctagaaaaggtaagagaggaagaggctttacagcaatggatgaagcgcaagcagtctatgccgaagtacataaatgagtatacggaaagattgtggcatgttttgtgcaatattgaaagtgatttgtcttctatagatgaaaaacgttggtcgtttcagaagacgtttttatttttagagtttttacttgctacatataaaatgagttgtgaaaagcgtacgtttgattggaaagagattggtgcggcgtattatgaagtgattggtggttctaaaaagtttgatcaacataaaaaagagtttcttaataagctggaagatttgttagatgctccgccgcattgtttaggtttagtgagcttagggacagtgacgcctatctttttttgcgggaatttatatgaaggtaatacgcgttatgagtgtgacacagtgcgttctttaacggatttagttgtatttcgtcatgcgtataaaacggatgcgaaggtgttatggctcgttgaaaatagagcggtattaacgaggattgccgcagaggatgattttatttcaagtacaggtagtctcgttatcggagtggatgggcaattacgtagtgggcataaaaggttgattcaaagcgtattggaccactcaaaatctattacgaaaattattatttggacggattatgatggggcaggagagattattagtgataagttattcgaactagttgctccatatgaacagtatacaagatggatttcttcagaaggtaaggcgttaaataaagatgaatttgagcaatccgttcgtttacgcgaaagtgaacaagaagagagtttaggaggtgtggatgcttggaaggaatggatcagtcagtaatttcgattttgcaaacagatccgtcgcatatgggagtacgaaatgcgatgaaagatttaaataaattatcaggtgttatttcagagcttggagagagtgagtattttaatgatccattgaaaacgtatgagtttctactattattaaatattttaaatgaagaagcgcttggattgacgtcttctattgaagatgtgcgtacgttgaaattccgttaccgtaatatgtacggcggggatccgtcaattcgtttagagcatttcattaatattttagataaatatggatggatctcaaaagggaaaagcaagattacgatgatggacgttgggaagcgaatgattgatgtgttaattcgcctagcaaacgattcgttagcgtattacatgcaagatgaaataacgaggtctttatatcaagcaaaccgtgatgcggatttaagtgaagcgtatgatgataaaggtgtatcgggcggaaataaattagcgagtatgataaaaaatgtagaagaagcggtagaaagactgaaagagagagaactcgaatatttagcggaccgctatgcgttgccgcaagtgcagattattcatcgtttaatgaatgaattaaatgttcgttttgaagaaaggttccaaaagtttcaaacgtttgaagaaagtcttgtgttagagcctcttgtgaaaagaggaacgagcgttatgtttgaaggttcacaggttagtcttggaacgattaagaagattttacattttacacatattcagcagtctacagtcggagcgaatattcgtcatgatgcgcttcgtcgttttattgaaaattgttttacgaagcaaaatatggaattgccagatgcacatgaaattttaagttttatggagcaagaccgtagagaaggcgagagacaagatgggttatggatgccagtacagtttgcggcgccgttatcaagtgctgcgatttctagtggtattcagtttttagaagagtacgagccatatacggatcatatagaagaagttgtgcaggaagaatatgaagagatagaagaaatgtcagaagcagaagtgaagaagctaatggcagatcagcagtggagtatgacgaaagagcaaattcaaacggaacgattagaagagtttcttatggaacaagaagaagtcgatatggaagagcttgtgcttgaagccggttctaatacgtggggagatgcggtaaatgcattaatcgcactgtcagctttaaccgctaataataaggcggatattatcgataatcaaaatgtaaaagaaagaaacatagaaaaagaatgggaatggggcagtgacgatgataaaagaaaacgagttcgaagccgagaaaggaattaatccgctcgcgaaattaggagaacttcggtacatattgtctcgtgatgaagagcatacgtttatgcaacttttattttcatcttcagcgcgtatgagagcaacaaattttggattgcgccgcaaagaagtaatgaaaatgcttgggttaaatagtgaggatatagaagggtttgagtcatttgtaatgcgaataaatggtgcgctaagtggctattttcagtgtgtatatgatgagagacgtgatcaagtcattgtgatgatgcgagtaccagcaaaacaagcgagagaagtattatcttcagaaagtttaggattacttatgtttattttctaccatcaagaagtgttgcaaaatgaatttacattatttaatcaattacttagtgcgcttggacatgaaacgttgcaagcacgtagaaaagtacaaacaaatttagatccacttttaaaaattggggctattacgaaatatgattctccgtcccaagaagaagcatatgcgttaactgccattggaagtagaatgttttcagattcgttcttacatagggcggctgagtttagtcagtcacaacaacttcatatggatgatgttttaaaattctttaagcgttataacgtaggaggtggagagacgatatgattccataccgtatttctttttctggtatacgtgattataagccgagaacgatttctttaatggggaagcgtgatcacattttaatttcaggtgcaaatggtgccgggaaatcgacgctgacattttgctggggcgctgttatggcgtctacgaaagtaaatgtggaagggcttcgttcgaaaaatcttccagacaatagagtatggcgagcgaaaattgaacttatatatgaaaatgatggatttgtagatgcagcaagatttgtgagatttacgcttgatttagaacaagagccaggtcatccattgaaaaaagaatattatattgcagaaggcgatcgggtagatgagtgggagcaagaaacgcgtttctcatcttcagataagcattttaactttagagagtataaaagaatgcttcttcaaaaatataaaattgatccagatgcgttctatttaatttggtaccaacaagatgtaaatcaatttgcagtgatgaagcctgaagagaggttccgtatttttagcgagatgacaggaattgaaagtattcaaaagtcttgggagtctttcaaagaacaagaacgtgataaggaagcgattttgcaaacggctcgtaataaccaaattcaatataagttcgaacttgagcgttgggagaaagagaaaaatcgttatgaagatcaacaaagccgtataaaacgagggattctgcaatataaaacagcgttatgtacactagaagatcattattatacagaacgtatgaagtataaggatgagctagaagatgtgaaagagaatcttgatgagaagtatgaagaagctcagcaaggagaaaaacagtttgcacaattagaggcggagttactagcgaaacaagctgagtttcaaagtgcagaaaaagagcgtgaaattgccgaggaacgacaactacagtgcaaaaaggaaagtaaagataaagagcgagaatggaatgcaatgaaagaagagataaaagacgtaacagatcgcgtgaaaaatataggaattagtgaagatgttgtaagagcagaaaagagtagtaaagagcagcaattgcaagaagctgaaaaggaaaaggtatatacagagcagcttattagtgagacaagttataatttaaatgaattaaggtcagaagttgcgaagctagaagtgcaagtagataatgatgaagcagctgtcgtttctgcaaagaattacatagtgcaatataagtctagtttctatatggaagaaaagcatacaaaagtagaaagtatgatgagacagacgaaagatcttgttgaaacggtgaagaaagatcttcagcaaaaatacgaagagaaaaagcagctagagctaaatcgttacgtcagtccgaggcaagaagaaggacttagatacttaagaagggaagggttacaagcttatccgcttcgagacttaatagaattagaaggcgacgcagaatttcgtcatgaagatattttaaatacaattaaatatgcgatcttcgtagaatcaaaagaattcagaccaccgaatgatttgtattacgtaccgttgccactcattgttccaactgaaagtgttatttccttaccgcagtataagctgagaattaaagaaggagacaacgaaaaacttgtttctgtagcaatgaaagctttatggtgggtaaaacaattctttacaggtgagcagccatgtattcaaaagaatagtttaattgatataagaggattccgtggggaacaagaaaaaacggaatacattttaagtgaaaaagcaattatgcaacgtttagaagagacaggaaaatggattgaagaacatgaaaaacagctcatccaatatgagcgtgatattcaaacactggaagaaaaagaaagaaaacttcacgacattgtatataaactaagagatgcagaagccgttttacaaaaagctgccgaacgcacatttagaatcgaacagttagggcgaaaaacggaagagaaacaaaggctagaacaggaaatacaaaggctatatgcaattaaccaagaattgcatacgcgcatatctcgcttaagagagcgtcttgaaacgttagaacagtacgaaatgatatatgaagaactgcataaggaaaaagaaaaaattgcacatatgcaaaagcttgaacaaattcatagagagttattggatgagctcaagagagtagtagagcaaagagatatactggatgagacttgtaatagattggaaattgaatgtaataaagcgagtcaaaaaacgaaacaacaaaaacaagaagtagaagaactacgcgcgtatattcagcgtttagaaaagaaaaaacaagatgttcaagagcatttcataacgacagaagaaaaactaattagcatacaaagagaaaaccaggatgcgaatgacacgtatggaaaattattagagcaactaggttgggaaaaacaaatagaagagtggtctgaagcgaaagcactttctcaaaaacaaagcgcagagattacactagaaggagcactcggtgaaacagttgatccactagcgccagaaaattacgcgaagatgaaagaagaaaatgaaaaaagtaatgcagaactgcataacgcagaacaaattttgaacgaacttcgcgaaaatatagcacttatgagagaacgtctcgaaacgacgatccaaatgaatgctcataaaatccataaaaagtttgaacagtacatggaacaattccacttcgaaggaaaagtagaatggaacatggacacaaacaaacacggtgacatgcgttactatctctacataaaagcgcgtaaaaaaggtcaccgtggcaaaatggaagacattagcgccaaaggacgcggaggcaaagtaggaagcggcgtatcaggaggagaagaatccctttcatctctactattcgcactagccttactacaaacaatcgaagcatccccaggctacatcatcctagacgaatacgacagcgccctagacgacagccgaaaagaaaaagtcttcaccctattcgaagaggaactaaatcggaaaatgatcatcgtctcaccaaaaagtcatgatccaaactacttacaacacttctcgcaagcattaacagttatgcacgatgcgagtgtgccggttagtcgaattttgcagattaagagggcggtagaagaaactgaaactgtaatcaaggataactaatttaaaacgtccatatcaaattttgatatggacgttttattgctgtttaatatggagataaagaaaataaggatgtgattgtaaa

SEQ ID NO: 20 - DNA, 34 bp, Artificial Sequence
  source: /note="Description of Artificial Sequence: Synthetic oligonucleotide"
aaaggatccctctagagttaacaagagtttgtag

SEQ ID NO: 21 - DNA, 70 bp, Artificial Sequence
  source: /note="Description of Artificial Sequence: Synthetic oligonucleotide"
aaaggcgcgccataaaaaacgcccggcggcaaccgagcgttctgaatcgatcagaccagtttttaatttg

SEQ ID NO: 22 - DNA, 18 bp, Artificial Sequence
  source: /note="Description of Artificial Sequence: Synthetic oligonucleotide"
ctgatcggatcctagaag

SEQ ID NO: 23 - DNA, 25 bp, Artificial Sequence
  source: /note="Description of Artificial Sequence: Synthetic oligonucleotide"
aaaggcgcgcccccttttttgccgg

SEQ ID NO: 24 - DNA, 17 bp, Artificial Sequence
  source: /note="Description of Artificial Sequence: Synthetic oligonucleotide"
ggcgcgccataaaaaac

SEQ ID NO: 25 - DNA, 14 bp, Artificial Sequence
  source: /note="Description of Artificial Sequence: Synthetic oligonucleotide"
gcggccgcgaattc

SEQ ID NO: 26 - DNA, 48 bp, Artificial Sequence
  source: /note="Description of Artificial Sequence: Synthetic oligonucleotide"
gttgccgccgggcgttttttatggcgcgccgggaatgcaaaaaggagg

SEQ ID NO: 27 - DNA, 51 bp, Artificial Sequence
  source: /note="Description of Artificial Sequence: Synthetic oligonucleotide"
atcctagaagcttatcgaattcgcggccgcatatcatccctcgttttcgtc

SEQ ID NO: 28 - DNA, 51 bp, Artificial Sequence
  source: /note="Description of Artificial Sequence: Synthetic oligonucleotide"
atcctagaagcttatcgaattcgcggccgcagtggatacaaagagtgaacg

SEQ ID NO: 29 - DNA, 55 bp, Artificial Sequence
  source: /note="Description of Artificial Sequence: Synthetic oligonucleotide"
gttgccgccgggcgttttttatggcgcgccattcattcttattccgctaactttg

SEQ ID NO: 30 - DNA, 51 bp, Artificial Sequence
  source: /note="Description of Artificial Sequence: Synthetic oligonucleotide"
atcctagaagcttatcgaattcgcggccgcgagtttgatcaaagatttgcc

SEQ ID NO: 31 - DNA, 53 bp, Artificial Sequence
  source: /note="Description of Artificial Sequence: Synthetic oligonucleotide"
gttgccgccgggcgttttttatggcgcgccatttaattctgcttatctccaag

SEQ ID NO: 32 - DNA, 55 bp, Artificial Sequence
  source: /note="Description of Artificial Sequence: Synthetic oligonucleotide"
atcctagaagcttatcgaattcgcggccgctgcatatttataattgtgtgttgag

SEQ ID NO: 33 - DNA, 53 bp, Artificial Sequence
  source: /note="Description of Artificial Sequence: Synthetic oligonucleotide"
gttgccgccgggcgttttttatggcgcgccagaatggaaagttgaatcaactc

SEQ ID NO: 34 - DNA, 52 bp, Artificial Sequence
  source: /note="Description of Artificial Sequence: Synthetic oligonucleotide"
atcctagaagcttatcgaattcgcggccgcacgataaactcggtgtattgac

SEQ ID NO: 35 - DNA, 50 bp, Artificial Sequence
  source: /note="Description of Artificial Sequence: Synthetic oligonucleotide"
gttgccgccgggcgttttttatggcgcgccaaaagctttcggcatcaaag

SEQ ID NO: 36 - DNA, 53 bp, Artificial Sequence
  source: /note="Description of Artificial Sequence: Synthetic oligonucleotide"
atcctagaagcttatcgaattcgcggccgctgaccatttcccttcttttttac

SEQ ID NO: 37 - DNA, 53 bp, Artificial Sequence
  source: /note="Description of Artificial Sequence: Synthetic oligonucleotide"
gttgccgccgggcgttttttatggcgcgcctataaccaactcccaatatatgg

SEQ ID NO: 38 - DNA, 57 bp, Artificial Sequence
  source: /note="Description of Artificial Sequence: Synthetic oligonucleotide"
atcctagaagcttatcgaattcgcggccgcaactaatagtttaaaactttacggatg

SEQ ID NO: 39 - DNA, 50 bp, Artificial Sequence
  source: /note="Description of Artificial Sequence: Synthetic oligonucleotide"
gttgccgccgggcgttttttatggcgcgcctatcaagccccctcatttca

SEQ ID NO: 40 - DNA, 50 bp, Artificial Sequence
  source: /note="Description of Artificial Sequence: Synthetic oligonucleotide"
atcctagaagcttatcgaattcgcggccgcttcgttacttctgggatggg

SEQ ID NO: 41 - DNA, 53 bp, Artificial Sequence
  source: /note="Description of Artificial Sequence: Synthetic oligonucleotide"
gttgccgccgggcgttttttatggcgcgcctgaaaaagactcctccgtatttg

SEQ ID NO: 42 - DNA, 50 bp, Artificial Sequence
  source: /note="Description of Artificial Sequence: Synthetic oligonucleotide"
atcctagaagcttatcgaattcgcggccgctaactggacagtgctcttgg

SEQ ID NO: 43 - DNA, 51 bp, Artificial Sequence
  source: /note="Description of Artificial Sequence: Synthetic oligonucleotide"
gttgccgccgggcgttttttatggcgcgccatgccgatagaagatattgcg

SEQ ID NO: 44 - DNA, 52 bp, Artificial Sequence
  source: /note="Description of Artificial Sequence: Synthetic oligonucleotide"
atcctagaagcttatcgaattcgcggccgcttccgatactctttagccataa

SEQ ID NO: 45 - DNA, 52 bp, Artificial Sequence
  source: /note="Description of Artificial Sequence: Synthetic oligonucleotide"
gttgccgccgggcgttttttatggcgcgccacaatcacatccttattttctt

SEQ ID NO: 46 - DNA, 55 bp, Artificial Sequence
  source: /note="Description of Artificial Sequence: Synthetic oligonucleotide"
atcctagaagcttatcgaattcgcggccgcatctttttgaatagtttcaatgatg

SEQ ID NO: 47 - DNA, 50 bp, Artificial Sequence
  source: /note="Description of Artificial Sequence: Synthetic oligonucleotide"
gttgccgccgggcgttttttatggcgcgccagtgtggtatggagattagc

SEQ ID NO: 48 - DNA, 48 bp, Artificial Sequence
  source: /note="Description of Artificial Sequence: Synthetic oligonucleotide"
atcctagaagcttatcgaattcgcggccgcgtgcttagatacgaaggg

SEQ ID NO: 49 - DNA, 22 bp, Artificial Sequence
  source: /note="Description of Artificial Sequence: Synthetic oligonucleotide"
tagctcattctctacaaaatcc

SEQ ID NO: 50 - DNA, 21 bp, Artificial Sequence
  source: /note="Description of Artificial Sequence: Synthetic oligonucleotide"
tcgatagaggattttgtagag

SEQ ID NO: 51 - DNA, 19 bp, Artificial Sequence
  source: /note="Description of Artificial Sequence: Synthetic oligonucleotide"
tttttgacgaccgtctgaa

SEQ ID NO: 52 - DNA, 19 bp, Artificial Sequence
  source: /note="Description of Artificial Sequence: Synthetic oligonucleotide"
agttttgctattttcagac

SEQ ID NO: 53 - DNA, 56 bp, Artificial Sequence
  source: /note="Description of Artificial Sequence: Synthetic oligonucleotide"
gttgccgccgggcgttttttatggcgcgcctggttatggttagtattatctaaatt

SEQ ID NO: 54 - DNA, 21 bp, Artificial Sequence
  source: /note="Description of Artificial Sequence: Synthetic oligonucleotide"
tagagcaaatacctgatctgg

SEQ ID NO: 55 - DNA, 52 bp, Artificial Sequence
  source: /note="Description of Artificial Sequence: Synthetic oligonucleotide"
gttgccgccgggcgttttttatggcgcgccagcggtaagttttatagaaaat

SEQ ID NO: 56 - DNA, 20 bp, Artificial Sequence
  source: /note="Description of Artificial Sequence: Synthetic oligonucleotide"
tctcttagatccagatcagg

SEQ ID NO: 57 - DNA, 56 bp, Artificial Sequence
  source: /note="Description of Artificial Sequence: Synthetic oligonucleotide"
atcctagaagcttatcgaattcgcggccgcaggggggatatagatttatatataat

SEQ ID NO: 58 - DNA, 52 bp, Artificial Sequence
  source: /note="Description of Artificial Sequence: Synthetic oligonucleotide"
atcctagaagcttatcgaattcgcggccgcacaagatacatcacattgaagg

SEQ ID NO: 59 - DNA, 55 bp, Artificial Sequence
  source: /note="Description of Artificial Sequence: Synthetic oligonucleotide"
gttgccgccgggcgttttttatggcgcgcccaatatatgcgatatacgcaaaaac

SEQ ID NO: 60 - DNA, 48 bp, Artificial Sequence
  source: /note="Description of Artificial Sequence: Synthetic oligonucleotide"
atcctagaagcttatcgaattcgcggccgcacaaatgggcagagagag

SEQ ID NO: 61 - DNA, 57 bp, Artificial Sequence
  source: /note="Description of Artificial Sequence: Synthetic oligonucleotide"
gttgccgccgggcgttttttatggcgcgccgatatttcattttcttcttcctctcac

SEQ ID NO: 62 - DNA, 55 bp, Artificial Sequence
  source: /note="Description of Artificial Sequence: Synthetic oligonucleotide"
atcctagaagcttatcgaattcgcggccgcggtgaatgtaaaaatattgatacag

SEQ ID NO: 63 - DNA, 48 bp, Artificial Sequence
  source: /note="Description of Artificial Sequence: Synthetic oligonucleotide"
gttgccgccgggcgttttttatggcgcgccaatttagtcctcctgggg

SEQ ID NO: 64 - DNA, 23 bp, Artificial Sequence
  source: /note="Description of Artificial Sequence: Synthetic oligonucleotide"
tgagttgattgcagtccagttac

SEQ ID NO: 65 - DNA, 24 bp, Artificial Sequence
  source: /note="Description of Artificial Sequence: Synthetic oligonucleotide"
gttaccacctactatctcttcagc

SEQ ID NO: 66 - DNA, 25 bp, Artificial Sequence
  source: /note="Description of Artificial Sequence: Synthetic oligonucleotide"
tctttagctgaagagatagtaggtg

SEQ ID NO: 67 - DNA, 26 bp, Artificial Sequence
  source: /note="Description of Artificial Sequence: Synthetic oligonucleotide"
tatggaggtcaggtatgatttaaatg

SEQ ID NO: 68 - DNA, 58 bp, Artificial Sequence
  source: /note="Description of Artificial Sequence: Synthetic oligonucleotide"
catcactgaccatttaaatcatacctgacctccatacgaatggcgattttcgttcgtg

SEQ ID NO: 69 - DNA, 56 bp, Artificial Sequence
  source: /note="Description of Artificial Sequence: Synthetic oligonucleotide"
gcttgactccagcgtaactggactgcaatcaactcacgatcagaccagtttttaat

SEQ ID NO: 70 - DNA, 22 bp, Artificial Sequence
  source: /note="Description of Artificial Sequence: Synthetic oligonucleotide"
atcctagaagcttatcgaattc

SEQ ID NO: 71 - DNA, 20 bp, Artificial Sequence
  source: /note="Description of Artificial Sequence: Synthetic oligonucleotide"
atgtcattcatagccagagc

SEQ ID NO: 72 - DNA, 20 bp, Artificial Sequence
  source: /note="Description of Artificial Sequence: Synthetic oligonucleotide"
agattttaatgctctggcta

SEQ ID NO: 73 - DNA, 21 bp, Artificial Sequence
  source: /note="Description of Artificial Sequence: Synthetic oligonucleotide"
ctcatcttctgataatggtcc

SEQ ID NO: 74 - DNA, 17 bp, Artificial Sequence
  source: /note="Description of Artificial Sequence: Synthetic oligonucleotide"
cagccgaacggaccatt

SEQ ID NO: 75 - DNA, 15 bp, Artificial Sequence
  source: /note="Description of Artificial Sequence: Synthetic oligonucleotide"
gttgccgccgggcgt

SEQ ID NO: 76 - DNA, 54 bp, Artificial Sequence
  source: /note="Description of Artificial Sequence: Synthetic oligonucleotide"
atcctagaagcttatcgaattcgcggccgcacctgccttcctttgatacaattc

SEQ ID NO: 77 - DNA, 59 bp, Artificial Sequence
  source: /note="Description of Artificial Sequence: Synthetic oligonucleotide"
gttgccgccgggcgttttttatggcgcgcctcaatttattgctttattcattgtgactg

SEQ ID NO: 78 - protein, 704 aa, Xanthobacter autotrophicus Py2; identical to SEQ ID NO: 1

SEQ ID NO: 79 - protein, 296 aa, Xanthobacter autotrophicus Py2
MAITEDTEHAGSEEGENYFISMTDMMVGVLFIFIIMLMVFALDFRSKTDVQEDAIEVAREVARKLDAMSGQVRSAIATVDASQQVRRQLLQDIESQLRAEGLNVQIDEQNGVLRLTEDAVRFEPSRSDLAGRARSNVDKIARVLDRVLPAYTACHVAEGAAGGTACQPGAGPSLETVFIEGHTDSTGEDGTNWQLSTERAVNTYRAIVAGAPRLRGLRNLRGEEILSVSGYASTRPIDPTESREAWARNRRIDLRFVMEVDNRRRLEEIRTLTDEMKQQIDRLTAASAARAGKGAP

SEQ ID NO: 80 - protein, 469 aa, Xanthobacter autotrophicus Py2
MNEVPTRLKDALRAVGRRSAPTALLPREPAVARALARIPVDMLGFSAPAKGRNYNQIAEAIAAACRAGRPLDRTDLRAAPWCLWQTRPALAQDPACLEAVLGAVAASPRRRSLRSLASAWMMSFDPGQPGMAEAARLLRNSASLMGSPWDRLAATYGLFHEVEGPRRVAEAALSGRVTPVAVLKQSGIGSLDATSGYAKACLALLLGLIETGQVRDAMDRLKLVRDVAVRPDGRLVFQELGPQTCRALLRPFRDAMPERAVRDAYLDLLLMLFGDPRLRPAAWARMVEEGEMVRRWLTEQSLRQFLDVADRAAGAHDFGSMWPARRRFWEAVYDAGLVSEAWVVFGPLGLDLAKRLFGEHASFGRFSHGGRTQVATGHTVLLLRVGLRGLVADWSFGGKCNIWFDYEAPDAPRLYKANYSTDELGVRDPGAGGAQQETVSFMHSGNWQARVADEIRKITGVHIPPSSYL

SEQ ID NO: 81 - protein, 705 aa, Comamonas testosteroni
MVDARIGTEFFKHLPGILTGIGIIGTFFGLILGLQGFDLSALEKVGGDVADASAQAAQQITESVGKLLTDVKYAFYGSIVSIIASIVVTALEKQRLNACYQQLGELVENIDGLFDSGVTEEYLAELVQAGVESATQTRQLKDSLVTDLREMLQNLVDTQVRESLKLADTLSVAYRDSGQQLAEQVSGAIVGSLAEPLKSIAGAVQQASGDQSSQVQGLLQEVLMAFMSKLENTFGQQFSGLSQMMGQSVGAMQSMQQGFNELLMKLESAGQASTDHNAKATAQMLSDMQAGQNAMQASMNEMLGSLQQAVVEIGNAGQGGAERMAKQLEALFAQSEQRQQVMAESLQAFVASVQSSVGQGQQEILDRLGSAVDRLSEQLESMFAQTGALQKQAQEDSKQSTRAVHASTQAAMAGISEQLQQIFLQSGTLQKQAHADAEQSAQAVQASAQAAIGGLSSQLQGVFEQTEALRKQAQTDARETALAMQSSSQQAVAGLELQVQTLLKAVATQHDAVHERAVQLSTQTAQNIQQMQQGADKMRLAAERFDTAGEGVTKAGQATVSAMGAFQGTSNALVTAGQELSSVVSDYRNHRDAVGKTLAVLQTVMASTEGESAGRQQYLRDLQTHAERLQVINRDASNYLDQVNEVLGRGFGEFSDNMNRTLTKTMGSLDAELGKAITQLGGGVEVVRDSLEQLSEALDTVRRGG

SEQ ID NO: 82 - protein, 248 aa, Comamonas testosteroni
MLRHAVARRAKEEGEKPFWISYADLMSAMMVLFLVVMVVSIVMLVIAVKPKPADGPTPAQLRYLAIQDMCKDLQQKANALNQTIKVECSDHRIEFGEAGRFPHNSYSLNPEGRKALQEVVPLILQAADSQNGKDWFKQVVIEGFTDTEGSYLYNLHLSLQRSEWVMCSLLDARSPLQHGLSEAHQQQIRKLFLAGGVSFNNQKKDAAASRRVELSMQFYGLDEKEKNARSISAHFDTSVLEKCQLEMR

SEQ ID NO: 83 - protein, 575 aa, Comamonas testosteroni
MAGVDHLRALLKNVLLRQGGDNAVNDTEPHFAQVRMAGLELKAKFDGLEAVVPPPEEKRRRALQKFSRALDLSPVEWRYVFAGLSDDDTAGGTLLQNDDGFRRVHAEVDRRISQQCLVRRDWLALCFSYFSCAEEKPELNQNWQTLRADIDRGFDAVCAREGREKTWMQVVREHRDLFGQKPGERLADEMLGGRANDLSKLESIAQVSGTSWLWRSIFAVVLSRIFMLDEAQFLLRLPQLIKLTEINPLHESSVLGACLTRYAQTKLRAEPHADLLDIALERWGNPQVRTRQNLWLHHVDEPVCTMAVAWLAKQDLNHFFTLLKGEAGVDQSRLFYWLRYAEQMTFTRIVLGRDALYDRSTDFVEFRAKNRMRLSNLGNATAANNAVIMQIGSYYFVEFSATGNACYVYEVDKAPFDPTQRELSLTLDLKRGTLRWKHAPAPYKQGVVDGWLNTFDGNMRALGLSINARGGLASLPVAQGRERFNVPANGGSEIVASPVAQNSGLANKGDTQRALAIKELLRARLGALQVEVLDQSHRGGTLQVQLLEMHPQTDHVLRALGFKPKHSNPLIYWKS

SEQ ID NO: 84 - protein, 1089 aa, Comamonas testosteroni
MFKSIWSKFKAVDVQVDGGESALVAPAYDEHGLSYAIDQLESNAPWQQTSYLEQLEEEDFVTRLNECWLLPWDSLYQLQSDEEHAASVGLLGVMPFASLQPQLASHGSLAEDSFRIFIKSWLQEDGRELHQLDRRGPVVELDKGAKLLQQETWQLLCALKDLAREQHESPGMATNQLGWAKVRKLAKKCNAGMDEFLEKTVVLKPERLKLGLSKRLVGGTPVIELHPTFEEEPTGWTDHFDGYQAVQNTYRIAGDDGSITHVVIPPEVKEVLERVRLLPGRRVAADDALSFIRNPYTVIGEAADQVVDEVEYQQEREKAGIYFHRFQVIPQLAGEGALLTAVRLVLEPISPVPMEAVEILLTHAGELAGFVRELEVKLAAGLPAGLWQGYELELSDFDLHQFQGLKELLDCWKAAEAGQQFKQVLDLSAYGARVIGIGEAERITSPFLVKDQTENWLPEAINPDKGGQSMEASGWEPRSQEQFDAFEHVLDQAQAAAEPTVVLPWSGEMLSIAQAQELYNSWKKRLKQTKEVTDAGDGKDAAGKDKRAVLQIELNIDDANYATARNSALLGAHKAKADLPILLRPEIELREHQLKGVSWMQHLFQLSPQHVGGCLLADDMGLGKTIQLLTFMVRYLELNPDGPPVLVVAPVSLLDNWERELQRFFYADELKVLKLYGTALAAVKYRKEEIPQDVRAQGISNLLRPDWIGQNRVVLTTYETLRDQEFSLARKQWAIMVCDEAQKIKNPAAMITQAAKAIPTRFRVACTGTPVENTLMDLWSLFDFIQPGLLGALNHFGKTYQRPIEAHEKRDDKALSQLRRLIEPQTLRRTKQDVAKDLPQKLEDQGCRSLKMESLQRSLYVASINEYRERCQIQAQMEQRENGMLTLLHRLKMLCAHPYGVQPDIRLKDSSPKMIWLLEQLQKISTHGDKVIVFTELREVQREIQHSIEQRFGFKPTVINGDTSTNGQSANSRQRLIDRFQEASGFSVIILSTVAVGFGVNVQAANHVIHFTRCWNPAKEDQATDRAYRIGQEKDVYVYYPTIRDAEMVTFESTLDDLLSKRRSLARDMLHGSSDISASDFASMTRSAG

SEQ ID NO: 85 - protein, 708 aa, Pseudomonas aeruginosa PA7
MMDLLKHLIPDFAHMFSANPNGISAWFWSATALIFGLSLYFLFVHFRRFRTRLRALRSLLEGQSKETLALSRRETMQKAQGLDAPNVGMLWREFDESLVLSSDQKHLFNTLDAEHFFNARTLAPGLTASRLLAAAPSFLVAIGVLGTFVGLTVGLEGLVGTSDEIEALKGGINKLISGAAVAFMTSVWGVFFSLLLNFVEKMFERSALGQIQQLQHDIDFLYPRIPAEQSLVHIAEYGKESKEALQELHERIGDRLQETLNGMSEAMQTALTDALNNIMAPAIQTLVSTTSQQSTQVLEKLVGNFMDGMTSVGREQGLQMQQAAADVNAAVSGMSERLNQLFSSLNEQQGRQMEVAQQQSAAFETQLQRISGSAEERQAQMEQRFAELMSGLTNQLQTQLGTAQQRDEERQVLFERLLGQASSSQTAMLEQFSSSTREQMQAMAEAGNERHSNLEKVFSRLMMNLNTQLDSQMGAAEQREQARQQRFQEQLDQVSTHQQELLSGLASAVQATQQQSRLMADQHQQLLGQLKQVSDATAQSSKHMDSSANQLGLLSANLRQAADSLGQRLEAVSHSIERAGQQNAELATQLQSQAATLAQLQATLLEGAQRFEQAAGEARNGFGEMKSAQQEFLSSVRHEFTALGEKLREQVEAVEKQAEEWLRSYAGEVRVQTDERMNQWNEVSLKYADQMHRVVQNMSSILDELEAR

SEQ ID NO: 86 - protein, 254 aa, Pseudomonas aeruginosa PA7
MRLGKSKEVSVDEENPYWMSFSDIMSALLVIFILASVILILQLMEIQKELKERQVQFEQELVELKKAEQVRRTILDEAVEALRKRGIKVEVSENHTVLSIPNDLLGFDTGAYDIHAAYQARALEIGKVINEVISREDRVEFLDTIFIEGHTDNRPLQGFMGKGNWGLSTFRAISLWQFWGSALSPDEQLARLKNKDGKPLFSVSGYGETRPVLVDQQTEDDFKRNRRIDIRFTIRRPDSAQYEQVRERLEELKP

SEQ ID NO: 87 - protein, 648 aa, Pseudomonas aeruginosa PA7
MLVEKVARMKAASGKSDAFEAMLARLRDMASTGRFDGLPELLKRRLTARALTWLWLNDETMGRRLLSSRLLSVLVDAQQPRLTRITLQQLAQFYFRRFDKLDEHDGLRKQLEQILLQQLHLLPEPKVSGPQADPLVTLKRDAHWLLPPDGPVQLVERVRDSGHELGETFEVMGLQGFDDGRYGDICRAHFYLETLRGLAPGEYDPVLDELQKPAVSKAPYEGERRIGHVALEILIDRAGQEPGEVWQNFILNLAGDPRISRNSPNYREWWQFLGEERVQKVRGWLSKEDLRLFLQAVEQFGIETQNDDLQRMFPARKQFLEGLFKLKLIRNTRLLLGGRAQHSVKRILGKDVQTSFASMDGQMNDKAVIYLDCGDFHLVEGSHSFKIWVYLAAPGEALRSYERSSFSHSDLTTAVPKAYKRLYPELPYDAFTHHPPLSWQNRVFSFLADNGIALDIEQLLNRSDYQPYLRKFGMPVVNAKRTPVPPPSQTDFPAEPARSRVGKTGATTMSAPQGRKPAEMIARDSRAIPREEAATVRRSNQQHDPVVSHSVSSPDAAAPATARPSLVGEGLLTGLKPSALKILRYFVDNPGDKVRYAANVFGVDSREINQILYGPLKDMCTRDEQFGWTVNEAARLALEALDEQDRAE

SEQ ID NO: 88 - protein, 1010 aa, Pseudomonas aeruginosa PA7
MDIFRSLIGERDGALSTQQGFQSQPDSNGLNFYLPLPAFKALQTGQGSALEKIQLIVLNMLVEQGIAENTANGFHIGAEDIAGMDLEQAEILRLPRRLPGHFLTSISGRTGNSGFRVAITLEMPDGPASFSRKGPYLYLTSSECYWLTPAEIMGLQAWELHESLGPEQRGEAANLRLMAELQTAARSGMRIDLSHFERLDVVVPQNIGVIATRLPDGSLQLCPSLGDGSSADQLEKRWSQLDMTADGGVLRIDNRVLLLDQARMDGIRNVLANKRIPADQVNEFIATPTAFLDAALVNLEVGFSARVAGIGKLQHMDFGVLDATKNDWFALDKRPAPAAILSKLIQSPEDLQRFEEVLQAANEQGATSLSFAGEVIDISDAPTVQQELARARQNMAHVSDSEPHSEEGVLPGEDKEKVGVILKDADEINSALLRKAAAAKPLVVPDWSAYAREPFPHQREGIEWMLKLMGAALQDETDDLYRLQGGLLADDMGLGKTYMSLVAVGEYLASQRAADKPQKPVLVVAPLSLLENWEDEVGKTFASIPFRDVVVLQSGRSLRDYRVKGAERESVQLASMIDDSSGMMDEQSIRYALHVGPEAGVHRLDMDRRLVLTTYQTLRDYQFSLCRIDWGMVIFDEAQNIKNPNALQTIAAKGLKADFKLLATGTPVENSLGDFWCLMHTVQPGLLGGWESFRDTWIKPILAASDEERDEVRARLGEQLRRAVGIFMLRRVKEDQLKGLPAKTILSGVEQADHGLQRYAAQLGVVMKGIQLQAYDEVLDSYRARRASAEDMRGTALAALTQLRSISLHPRLENESALYCEDGKHARQLMMESGKLAVLLQLLDEIRSKGEKVILFMMTKRLQRVLKLWLDQIYDLNVAVINGDTQAVATRAEDMTRKKLIAEFEAKSGFNILIMSPVAAGVGLTVIGANHVVHLERHWNPAKEAQASDRVYRIGQTKPVFIHLPAVTHPQFDSFDVHLDRLLRGKLMLKDAVVTPEAVSESEMIQSMGL

SEQ ID NO: 89 - protein, 708 aa, Pseudomonas aeruginosa PADK2_CF510
MMDLLKHLIPDFAHMFSANPNGISAWFWSATALIFVLSLYFLSVHFRHFRTRLRALRSLLDGQSKETLALSRRETMQKAQGLDAPNVGMLWREFDESLVLSSDQKHLFNTLDAEHFFNARTLAPGLTASRLLAAAPSFLVAIGVLGTFVGLTVGLEGLVGTSDEIESLKGGINKLISGAAVAFMTSVWGVFFSLLLNFLEKMFERNALNAIQKLQHDIDSLYTRTPAEQSLVLIAEYGKESKEALQELHERIGDRLQETLNGMSEAMQTALTDALNNIMAPAIQTLVSTTSQQSTQVLEKLVGNFMDGMTSVGREQGLQMQQAAADVNAAVSGMSERLNQLFSSLNEQQGRQMEVAQQQSAAFETQLQRISGSAEERQAQMEQRFAELMSGLTNQLQTQLGTAQQRDEERQVLFERLLGQASSSQTAMLEQFSSSTREQMQAMAEAGNERHSNLEKVFSRLMMNLNTQLDSQMGAAEQREQARQQRFQEQLDQVSTHQQELLSGLASAVQATQQQSRLMADQHQQLLGQLKQVSEATAQSSKHLDSSANQLGLLSANLRQAADTLGQRLEAVTHGVEKAGQQNAELAAQLQSQASTLAQLQATLLEGAQRFEQAAGEARNGFGEMKSAQQEFLSGVRHEFTALGEKLREQVEAVEKQAEEWLRSYAGEVRTQIDDRMNKWNEVSLSYADQMHRTVQALSSILDELEAR

SEQ ID NO: 90 - protein, 254 aa, Pseudomonas aeruginosa PADK2_CF510
MRLGKSKEVSVDEENPYWMSFSDIMSALLVIFILASVILILQLMEIQKELKERQVQFEQELVELKKAEQVRRTILDEAVEALRERGIKVEVSENHTVLSIPNDLLGFDTGAYDIHAAYQARALEIGKVINEVISREDRVEFLDTIFIEGHTDNRPLQGFMGKGNWGLSTFRAISLWQFWGSALSAEEQLARLKNKDGKPLFSVSGYGETRPVLVDQQTEDDFKRNRRIDIRFTIRRPDSAQYEQVRERLEEVKP

SEQ ID NO: 91 - protein, 670 aa, Pseudomonas aeruginosa PADK2_CF510
MKLPPVHMPVAEWPATTIEHWQILIEKGARMVTEAGQGDAFEAMLELLRRMANTGRFEGLPALLTRRLTARALTWLWLNDDAVGRRLLSSRMLSVLIDAQQPRFTRITLQQLAQFYFRRFDELDEHEGLREQLEQVLLQQLQLLPDPKVTGPQVDPLVTLKRDGHWLLPLDGPVQLVGRVRDRGHELGATFEVMGLQGFDDGRYGDICRAHFYLETLRELSPGEYDPVLDELQKPAVSKAPYEGERRIGHIALEILIDRAGQEPGEVWQNFILNLAGDPRISRNSPNYREWWQFLGEERVQKVRGWLSKEDLRLFLQAVEQFGIETQNDDLQRMFPARKQFLEGLFKLKLIRNTRLLLGGRAQHSVKRILGKDVQTSFASMDGQMNDKAVIYLDCGDFHLVEGSHSFKIWVYLAAPGEALRSYERSSFSHSDLTTAVPKAYKRLYPELPYDAFTHHPPLSWQNRVFSFLADNGIALDIEQLLNRSDYQPYLRKFGMPVVNAKRTPVPPPSQTDFPAEPARSRVGKTGATTMSAPQGRKPAEMIARDSRAIPREEAATVRRGNQQHDPVVSHSVSSPDAAAPATARPSLVGEGLLTGLKPSALKILRYFVDNPGDKVRYAANVFGVDSREINQILYGPLKDMCTRDEQFGWTVNEAARLALEALDEQDRTE

SEQ ID NO: 92 - protein, 1013 aa, Pseudomonas aeruginosa PADK2_CF510
MSLMDIFRSLIGERDGALSTQQGFQSQPDSNGLNFYLPLPAFKALQTGQGSALEKIQLIVLNMLAEQGIAENTANGFHIGAEDIAGMDLEQAEILRLPRRLPGRFLTSISGRTGNSGFRVAIMLEMPDGPASFSRKGPYLYLTSSECYWLTPAEMMGLQAWERHESLGPEQRGEAANLRLMAELQTAARSGMRIDLRHFERLDVVVPQNIGVIATRLPDGSLQLCPSLGDGSSADQLEKRWSQLDMTADGGVLRIDNRVLLLDQARMDGIRNVLANKRIPADQVNEFIATPTAFLDAALVNLEVGFSTRVAGIGKLQHMDFGVLDATKNDWFALDKRPAPAAILSKLIQSPEDLQRFEEVLQAANEQGATSLSFAGEVIDISDAPTVQQELARARQNMAPVSDSEPHSEADVLQGEDKEKVGVILKDADEINSALLRKAAAAKPLVVPDWSAYAREPFPHQREGIEWMLKLMGAALQDETDDLYRLQGGLLADDMGLGKTYMSLVAVGEYLASQRAADKPQKPVLVVAPLSLLENWEDEVGKTFASIPFRDVVVLQSGRSLRDYRVKGAERESVQLASMIDDSSGMLDEQSIRYALHVGPEAGVHRLDMDRRLVLTTYQTLRDYQFSLCRIDWGMVIFDEAQNIKNPNALQTIAAKGLKADFKLLATGTPVENSLGDFWCLMHTVQPGLLGGWESFRDTWIKPILAASDEERDGVRARLGEQLRRAVGIFMLRRVKEDQLKGLPAKTILSGVEQADHGLQRYAAQLGVVMKGIQLQAYDEVLDSYRARRASAEDMRGTALAALTQLRSISLHPRLENESALYSEDGKQARQLMIESGKLAVLLQLLDEIHSKGEKVILFMMTKRLQRVLKLWLDQIYDLNVAVINGDTQAVATRAEDMTRKKLIAEFEAKSGFNILIMSPVAAGVGLTVIGANHVVHLERHWNPAKEAQASDRVYRIGQTKPVFIHLPAVTHPQFDSFDVHLDRLLRGKLMLKDAVVTPEAVSESEMMQSMGL

SEQ ID NO: 93 - protein, 731 aa, Pseudomonas aeruginosa ATCC 700888
MDYSKWLDLWDKATPEQLIAPVFVFSLVTVLCLWYLLRYFVRSFALSRRLKKLTRQVRAIKELPPAKRRSELEQLFQEHTLGHAWQEYAETLHDQFEVREGEQRMLCSRATAGAGHFFTAQTVVETPLGTEFYKHLPGILTGIGIVGTFFGLMLGLQHFDPSTPEQVSSSVDQLLKDVLFAFLGSFFSIFASIGVTLTEKWRLGRCYKHLETLTESIDGLFDSGVGEEYLAELVKSSNESSIQTRQLKDSLVTDLREMLQNLVDTQVRENLKLADTLSASYRDSGQVLAERIGGAIENSLKSPLEAIAGAVNTASGDQSNQVQSLLTDVLTAFMSKLESTFGQQFNGLHEMLGQSVAAMQSMQHGFNELVGDMRSASEASSQNSAKMIAQLLADMQAGQNSMQAGMNEMLANLQASIARIGSEGEGAGERMAKQLEKLFADSEARQQAMAANLQAFVESMQQSMGQGQQETMAKIASSVDVLGEQLGGLFKQLEHNRTQMDQASKVAQVELHRGTREMVGGLEEQVKTLLDAVADQQGAMQDSLKLLGAQTEQHLQSMQQGAEKMRLAAERFDSAGQSVSKAGEATAGVLGALQGTSSDLVGASRELTSVVADYRNNREALNQTLGVIQGVVATTQGESAGRSQYLQDLKQQGERLQALNREVNDYLEQISAVLGKGFNEFSEGVDRSLRQTLGSLDAELHKAMTSLAGGVEGVKESLEDFSDIMERVQRR

SEQ ID NO: 94 - protein, 245 aa, Pseudomonas aeruginosa ATCC 700888
MFGKSAAPARARDEGEKPFWISFADLMTAMMILFLVVMVASLSSVTQRIQQAEQGEKQRGKDIAKLCHDLRLRAGDLNSTIVVDCRDNRISFGEAGRFGHNQYFLNSQGQQALQDVVPLILDAADSEEGRKWLKQVVIEGFTDTDGSYLYNLHLSLQRSEWVMCSLLDSRSPVQKGLSAERQQQIRSMFLAGGVSFNNAKESKEESRRVELRMQFFGLKDQEHEGQEPALEFAYAANEKCQLEMR

SEQ ID NO: 95 - protein, 528 aa, Pseudomonas aeruginosa ATCC 700888
MVALKRASTELSRRFDQVEKALAPPREKRLLALGKFKREQALTSSEWRLVFAGLADDDEVSVPVLEDDQLFDRVHREVAGRIEQRSLSRRDWLALCFSYFAYDEHKPDDNANWRVLRDDIDRGFDAVRQRIGREKEWMRIVAEHRELFGAQAGARLAEEIFEGRARDLSSLQAIAQVPDGSWLWQRIFAVLLSRIFLLDDETFLKRLRELVALGQLNTRYLNQVLSACLTRYHRSRYREQSSSLLKQVALEHWGSPQMRSKQNAWLQYVEQPVCAMVVAWFAKEDLEHFFTLLKGEAEVDQSRLFYWLRFTNQMSYTRIVMGSDAWHDRSSDFVAFREKNKGRLSQLTGGSSHINAVVMQIGNYFFVEFSGTGHACYVYRADRLPFNPDQQVLGLNTELKQKGHKPAPMRHSPAPRRPNVVEGWLEKFDDELRALGIVAQRPASYTQPRGSEDKPAAHSAASASVAGDSLDVQVKSMLGSVPYKTFDHRSTSGVYQVLLARDDAAAKTALLRLGFKAVKNNALMFWRL

SEQ ID NO: 96 - protein, 1083 aa, Pseudomonas aeruginosa ATCC 700888
MLGRFFSGKDRSQPTKGAVPGAYQIEEEGLCYALSLADDDASWPVAAYLDQLFEEDYASQLSDRWLLPWESIYQLLDDPEHASSLPLLGLPAIANLQPQLASTGGLSDPDFKVFIRSWRNPQTGNLITFERVGAVARYAETTELLSRAVWELLKAIRDLHATQQQAPGEVANQIGWANIRKLAKRAGAGLDGFLDKTVVVKPEHLRLKPRKAVVAGTPIIELDVAFDGQPDNWLASFDGYKQVQDKYRVPGADGTVTHVLIEPDVKAVLESVRALPGRRVAGDEALSLVRNPYSVIGDAAEKVVDADEYEEQLADAGIYFHRFRLEPCLGEDGKHIQSIGLFLEPISSKPLPEIELRFDFAHEFAPFVNELQMKLAAGMPAGFWQGYELELSDFDLAQLAGVNELLRHWQRQEAGQTFEAVLDLASYGDRVVGIGEAERITSPFLVKEATENWLPADVKELGVDSELLSQWDPASREDFEEFEHRIDQARMAGDEQVCLPGTETPLPFQVAEQLYEAWSKKLNPVEPKPPVVTEPVAGRAVLHIEHNIEEATYAQRREAALLAGRHANADIPELLRPEVQLRDHQMKGVAWMQHLFGLSPDHVAGCLLADDMGLGKTIQLLTFVVWYLEQNPQGKPVLIVAPVSLLDNWERELQRFFYADALPVLKLYGGALSAVKFKKDEIPGDLQAKGIKNLLRPGWMGDARIVLTTYETLRDQELSLARQQWAIVICDEAQKIKNPAALITQAAKAIPSRFRIACTGTPVENTLIDLWCLFDFIQPGFLGGLNQFGREYQRPIEAGLERDTAALERLRGLIEPQTLRRTKQDVAKDLPAKIEDQGCRKLLMHTLQRNLYLSEVAQYTQKQQMQEQLEQRESGMLGLLHKLKLVCAHPFSVQPDPRLREHSPKLQWLLSTLDNIARSDSGDKVILFTELRDIQRELQHAIQERFGFKPTVINGDTSTSSQSAQSRQRLIDRFQGQPGFSVIILSTVAVGFGVNVQAANHVIHFTRCWNPAKEDQATDRAYRIGQEKDVYVYYPTVRDAGMPTFEATLDELLQKRRALARDMLHGASELQVSEFGELLRAQG

SEQ ID NO: 97 - protein, 731 aa, Pseudomonas aeruginosa E2
MDYSKWLDLWDKATPEQLIAPVFVFSLVTVLCLWYLLRYFLRSFALSLRLKKLTRQVRAIKELQPAKRRSELEQLFQEHTLGHAWQEYAETLHDQFEVREGEQRLLCSRATAGAGHFFTAQTVVETPLGTEFYKHLPGILTGIGIVGTFFGLMLGLQHFDPSTPEQVSSSVDQLLKDVLFAFLGSFFSIFASIGVTLTEKWRLGRCYKHLEALTESIDGLFGSGVGEEYLAELVKSSNESSIQTRQLKDSLVTDLREMLQNLVDTQVRENLKLADTLSASYRDSGQVLAEQIGGAIENSLKSPLEAIAGAVNTASGDQSNQVQSLLTDVLTAFMSKLESTFGQQFNGLHEMLGQSVAAMQSMQQGFNELVGDMRSASEASSQNSAKMITQLLADMQAGQNSMQAGMNEMLANLQTSIARIGSEGEGAGERMAKQLEKLFADSEARQQAMAANLQAFVESMQQSMGQGQQETMAKIANSVDVLGEQLGGLFKQLEHNRTQMDQASKVAQVELHRGTREMVGGLEEQVKTLLDAVADQQGAMQDSLKLLGAQTEQHLQSMQQGAEKMRLAAERFDSAGQSVSKAGEATAGVLGALQGTSGDLVGASRELTSVVADYRNNREALNQTLAVIQGVVATTQGESAGRSQYLQDLKQQGERLQALNREVNDYLEQISAVLGKGFNEFSEGVDRSLRQTLGSLDAELHKAMTSLAGGVEGVKESLEDFSDIMERVQRR

SEQ ID NO: 98 - protein, 245 aa, Pseudomonas aeruginosa E2
MFGKSAAPARARDEGEKPFWISFADLMTAMMILFLVVMVASLSSVTQRIQQAEQGEKQRGKDIAKLCQDLKLRAGDLNSTIVVDCRDNRISFGEAGRFGHNQYFLNSQGQQALQDVVPLILDAADSEEGRKWLKQVVIEGFTDTDGSYLYNLHLSLQRSEWVMCSLLDSRSPVQKGLSAERQQQIRSMFLAGGVSFNNAKESKEESRRVELRMQFFGLKDQGHEGQEPALEFAYAANEKCQLEMR

SEQ ID NO: 99 - protein, 528 aa, Pseudomonas aeruginosa E2
MPSLKRASTELSRRFDQVEKALAPPREKRLLALGKFKREQALTSSEWRLVFAGLADDDEVSVPVLEDDQLFDRVHREVAGRIEQRSLSRRDWLALCFSYFAYDEHKPDDNVNWRVLRGDIDRGFDAVRQRIGREKEWMRIVAEHRELFGAQAGTRLAEEIFEGRARDLSSLQAIAQVPDGSWLWQRIFAVLLSRIFLLDDETFLKRLPELVALGQLNTRYLNRVLSACLTRYHRSRYREQSSSLLKQAALEHWGSPQMRSKQNAWLQYVEQPVCAMVVAWFAKEDLEHFFTLLKGEAEVDQSRLFYWLRFANQMSYTRIVMGGDAWHDRGSDFVAFREKNKGRLSQLTGGPSHNNAVVMQIGNYFFVEFSGTGNACYVYRADAAPFNPDKKVLGLATELKQQGRALKRMSHSPAPRRPNVVEGWLDKFDDELRALGIVAQRPASYTQPRVSEDKPAAHSAAYASVAGDSLDVQVKSMLGSVPYKTFDHRSTSGVYQVLLARDDAAAKTALLRLGFKAVKNNALMFWRL

SEQ ID NO: 100 - protein, 1083 aa, Pseudomonas aeruginosa E2
MLGRFFSGKDRSQSAKGAAPGAYQIEELGLCYALSLAGDDASWPVAAYLDQLFEEDYASQLSDRWLLPWESIYQLLDDPEHASSLPLLGLPAISELQPQLASTGGLSDPDFKVFIQSWRNPQTGNPITFERVGAVVRYASTTELLPRAVWELLKAIRDLHATQQQAPGEVANQIGWANIRKLAKRAGAGLDGFLDKTVVVKPEHLKLKPRKAVVAGTPIIELDVAFDGQPDNWLASFDGYKQVQDKYRVPGADGTVTHVLIEPDVKAVLESVRALPGRRVAGDEALSLVRNPYSVIGDAAEKVVDADEYEEQLADAGIYFHRFRLEPCLGEDGKHIRSIGLFLEPISSKPLPEIELRFDFAHEFAPFVNELQVKLAAGMPAGFWQGYELELSDFDLAQLAGVNELLRHWQRQEAGQTFEAVLDLASYGDRVVGIGEAERITSPFLVKEATENWLPADVKELGVDSELLSQWDPASREDFEEFEHRIDQARMAGDEQVCLPGTETPLPFQVAEQLYEAWSKKLNPVEPKPPVVTEPVAGRAVLHIEHNIEEATYAQRREAALLAGRHANADIPELLRPEVQLRDHQMKGVAWMQHLFGLSPDHVAGCLLADDMGLGKTIQLLTFVVWYLEQNPQGKPVLIVAPVSLLDNWERELQRFFYADSLPVLKLYGGALSAVKFKKDEIPGDLQAKGIKNLLRPGWMGDARIVLTTYETLRDQELSLARQQWAIVICDEAQKIKNPAALITQAAKAIPSRFRIACTGTPVENTLIDLWCLFDFIQPGFLGGLNQFGREYQRPIEAGLERDTGALERLRGLIEPQTLRRTKQDVAKDLPAKIEDQGCRKLQMHTLQRNLYLSEVAQYTQKQQMQEQLEQRESGMLGLLHKLKLVCAHPFGVQPDPRLREHSPKLQWLLGTLDNIARSGNGDKVILFTELRDIQRELQHAIQERFGFKPTVINGDTSTSSQSAQSRQRLIDRFQEQPGFSVIILSTVAVGFGVNVQAANHVIHFTRCWNPAKEDQATDRAYRIGQEKDVYVYYPTVRDAGMPTFEATLDELLQKRRALARDMLHGASELQVSEFGELLRAQG

SEQ ID NO: 101 - protein, 714 aa, Pseudomonas aeruginosa VRFPA02
MTAPAFVVSLVTLLCLWYGVRYFLYSFVLSRRIKRVSKEVRAVGELQPAKRRGALEQVFQKPPLQHAWQEYAETLHDQFEVRDGERQLLRSRATAGAGHFFTSQTVVETPLGTEFYKHLPGILTGIGIVGTFFGLMLGLQHFNPGTPEQVNASVDQLLKDVLFAFLGSFFSIFASIAVTLTEKWRLGRCYKHLEKLTEAIDGLFDSGVGEEYLAELVKSSNESSIQTRQLKDSLVTDLREMLQNLVDTQVRESLKLADTLSASYRDSGQVLAEQIGGAIESSLKAPLEQIAGAVQSASGDQSNQVQSLLQDVLVAFMNKLESTFGQQFNGLHEMMGQSVAAMQSMQQGFNSLVDDMRSASESSTQNSAKMIAQLLADMQAGQNSMQASMNEMLANLQASIARIGSEGEGAGERMAQQLEKLFAESEARQQAMAENLQAFIETMKQNIGQGQQETMAKIAGSVDVLGEQLGAMFKQMEQGRAQMDQATKVAQVELHRGTREMVGDLEKQVNDLLDAVAEQSGSMQDTVKLLSAQTEQHLQSMQAGAEKMRVAAERFETAGLSVTKAGEATANVLGAMQGTGTELVGASRELSSIVADYRNNRDALAQTLSVIQGVVASAQSEASGRTQYLLDMKQQSERLQALNREVHDYLEQISGVLGKGFGEFTEGVDRSLRQTLGSLDAELHKAMTSLAGGVEGVKESLEDFSDIMESIQKK

SEQ ID NO: 102 - protein, 245 aa, Pseudomonas aeruginosa VRFPA02
MFGKSAAPARARDEGEKPFWISFADLMTAMMILFLVVMVASLSSVTQRIQQVEQGEKQRGSEIKRLCEGLKLKAGNLNSTIVVDCHDNRISFGEAGRFGHNQYLLNAQGQKALQDVVSLILDAADSEEGRKWLKQVVIEGFTDTDGSYLYNLHLSLQRSEWVMCSLLDSRSPVQQGLSAERQQQIRSMFLAGGVSFNSARETKEASRRVELRMQFFGLKDKEQQAKEEQPIFTTTALEKCQLEMR

SEQ ID NO: 103 - protein, 547 aa, Pseudomonas aeruginosa VRFPA02
MSRALSSLSDAIARSLQRQQERTADTGLNRFVDLQRANDELTRRFNQVEKALPPPQEKRREALRKFRRDKQLSSTPSEYRPVFAGLADKDDGGLPVLEDDVLFELVHREVSIRSDQQKLSRKDWLALCYSYFFYDHAKPADNSNWRVLRSDIDQGLDAVKRRIGREKEWMRIVQQHRELFGDQAGKQLAEEIFAGRAKDLSALQTIAQVPDSSWLWKRIFDVLLSCIDDLDDDTFVQRLPELTELGQLNNRYMDKVLSACLTRYYRSRFREQSSSLLKQAALEHWGSPQLRSDQNRWLNHVEQPVCAMVMAWFAKEDLEHFFRLLKGEAEVDHSRLFYWLRFANQMSYTRIVMGNDAWNDRGSDFVAFREKNKGRLSQLTGASRHVSAVVMQIGQFFFVEFSGTGHACYVYKADQAPFNPDRIKLDLTTELKQQGRELKRMSHSPAPRRPNLVEGWLEKFDTELRELGIVPQSPSGHNEPRKAGSQSSIEIQVAAQLRHVNYQLMDNRSKGGALMVKLARDDARARVALARLGFKEMNKNPLTFWRS

SEQ ID NO: 104 - protein, 1083 aa, Pseudomonas aeruginosa VRFPA02
MLGRFFSRNERNAQKSNEVFKPQVDELGLCYPLSLAQSEVHWPLAAYLDQLFEEDFASQLSDRWLLPWDALYQLLDDPEHQTSLPLLGIPPEANFQPLLASSGSLAEAGFMVFIQGWRDPKTGAAVNIDLLGPVVRQRERTELLPQAVWSLLQAVRRLSTAQKEAPGEATNQIGWANIRKQAKKANAGMDGFLDKTFVVKPERLQLKPRKSMVGGTPVIELEASFDGQPANWMASFDGYKQVQDRYRVTGDDGTVTHVLIEPEVKAVLESVRALPGRRVAGDEALSLIRNPYSVIGDAAQKVVDPEEYEAGLAEAGIHFHRFRIEPALSADGRQIESVGLYLDPITASPEPEVEFRFTAAHELAPFVHELQIKLAAGLPAGLWQGYELELSDFDLAQLAGISGLLSDWQRQEVGQTFEAVLDLASYGDRVIGIGEAERITSPFLVKESTENWLPDDVKALGIDGELLNSWDPANREHFNEFEHRLDQAREAGDEQVHLPGSETPLPLKAAEQLYDAWSRKLNPGEANATGSEKADKPPRAVLQIEHNIEDAAYAQTREAALMAAHNANADLPELLRPEIQLREHQLKGVAWMQHLFKLAPDRVAGCLLADDMGLGKTIQLLTFVTRYLEQQSEGEPVLIVAPVSLLDNWERELQRFFYADALPVLKLYGSALSAVKFRKEEIPNELQAKGIKNLLRPGWMADARIVLTTYETLRDQEFSLARQQWAIVICDEAQKIKNPAALITQAAKAIPARFRVACTGTPVENTLIDLWCLFDFIQPGFLGGLNQFGREYQRPIESGVDRDTEALERLRGLIEPQTLRRTKQDVAKDLPAKIEDQASRSLPMHALQRNLYLSEVAQYSQKQQMQEQLEQRESGMLGLLHRLKLVCAHPFSVQPDPRLREHSPKLQWMLAQLGRIKRSGNGDKVILFTELRDIQRELQHAIQERFGFKPTVINGDTSTSSQSAQSRQRLIDRFQEEPGFSVIILSTVAVGFGVNVQAANHVIHFTRCWNPAKEDQATDRAYRIGQEKDVYVYYPTIRDPSMPTFEATLDELLQKRRALARDMLHGASEIKAAEFGEVLRAQG

SEQ ID NO: 105 - protein, 708 aa, Pseudomonas aeruginosa VRFPA03; identical to SEQ ID NO: 85

SEQ ID NO: 106 - protein, 254 aa, Pseudomonas aeruginosa VRFPA03; identical to SEQ ID NO: 86

SEQ ID NO: 107 - protein, 417 aa, Pseudomonas aeruginosa VRFPA03
MPVAEWAPVVRERWTVLVEKVARMKAASGKSDAFEAMLARLRDMASTGRFDGLPELLKRRLTARALTWLWLNDETMGRRLLSSRLLSVLVDAQQPRLTRITLQQLAQFYFRRFDKLDEHDGLRKQLEQILLQQLHLLPEPKVSGPQADPLVTLKRDAHWLLPPDGPVQLVERVRDSGHELGETFEVMGLQGFDDGRYGDICRAHFYLETLRGLAPGEYDPVLDELQKPAVSKAPYEGERRIGHVALEILIDRAGQEPGEVWQNFILNLAGDPRISRNSPNYREWWQFLGEERVQKVRGWLSKEDLRLFLQAVEQFGIETQNDDLQRMFPARKQFLEGLFKLKLIRNTRLLLGGRAQHSVKRILGKDVQTSFASMDGQMNDKAVIYLDCGDFHLVEGSHSFKIWVYLGGCPKFCVTGS

SEQ ID NO: 108 - protein, 708 aa, Pseudomonas aeruginosa BL22; identical to SEQ ID NO: 85

SEQ ID NO: 109 - protein, 254 aa, Pseudomonas aeruginosa BL22; identical to SEQ ID NO: 86

SEQ ID NO: 110 - protein, 670 aa, Pseudomonas aeruginosa BL22
MKLPPVHMPVAEWAPVVRERWTVLVEKVARMKAASGKSDAFEAMLARLRDMASTGRFDGLPELLKRRLTARALTWLWLNDETMGRRLLSSRLLSVLVDAQQPRLTRITLQQLAQFYFRRFDKLDEHDGLRKQLEQILLQQLHLLPEPKVSGPQADPLVTLKRDAHWLLPPDGPVQLVERVRDSGHELGETFEVMGLQGFDDGRYGDICRAHFYLETLRGLAPGEYDPVLDELQKPAVSKAPYEGERRIGHVALEILIDRAGQEPGEVWQNFILNLAGDPRISRNSPNYREWWQFLGEERVQKVRGWLSKEDLRLFLQAVEQFGIETQNDDLQRMFPARKQFLEGLFKLKLIRNTRLLLGGRAQHSVKRILGKDVQTSFASMDGQMNDKAVIYLDCGDFHLVEGSHSFKIWVYLAAPGEALRSYERSSFSHSDLTTAVPKAYKRLYPELPYDAFTHHPPLSWQNRVFSFLADNGIALDIEQLLNRSDYQPYLRKFGMPVVNAKRTPVPPPSQTDFPAEPARSRVGKTGVTTMSAPQGRKPAEMIARDSRAIPREEAATVRRSNQQHDPVVSHSVSSPDAAAPATARPSLVGEGLLTGLKPSALKILRYFVDNPGDKVRYAANVFGVDSREINQILYGPLKDMCTRDEQFGWTVNEAARLALEALDEQDRAE

SEQ ID NO: 111 - protein, 1013 aa, Pseudomonas aeruginosa BL22
MSLMDIFRSLIGERDGALSTQQGFQSQPDSNGLNFYLPLPAFKALQTGQGSALEKIQLIVLNMLVEQGIAENTANGFHIGAEDIAGMDLEQAEILRLPRRLPGHFLTSISGRTGNSGFRVAITLEMPDGPASFSRKGPYLYLTSSECYWLTPAEIMGLQAWELHESLGPEQRGEAANLRLMAELQTAARSGMRIDLSHFERLDVVVPQNIGVIATRLPDGSLQLCPSLGDGSSADQLEKRWSQLDMTADGGVLRIDNRVLLLDQARMDGIRNVLANKRIPADQVNEFIATPTAFLDAALVNLEVGFSARVAGIGKLQHMDFGVLDATKNDWFALDKRPAPAAILSKLIQSPEDLQRFEEVLQAANEQGATSLSFAGEVIDISDAPTVQQELARARQNMAHVSDSEPHSEEGVLPGEDKEKVGVILKDADEINSALLRKAAAAKPLVVPDWSAYAREPFPHQREGIEWMLKLMGAALQDETDDLYRLQGGLLADDMGLGKTYMSLVAVGEYLASQRAADKPQKPVLVVAPLSLLENWEDEVGKTFASIPFRDVVVLQSGRSLRDYRVKGAERESVQLASMIDDSSGMMDEQSIRYALHVGPEAGVHRLDMDRRLVLTTYQTLRDYQFSLCRIDWGMVIFDEAQNIKNPNALQTIAAKGLKADFKLLATGTPVENSLGDFWCLMHAVQPGLLGGWESFRDTWIKPILAASDEERDEVRARLGEQLRRAVGIFMLRRVKEDQLKGLPAKTILSGVEQADHGLQRYAAQLGVVMKGIQLQAYDEVLDSYRARRASAEDMRGTALAALTQLRSISLHPRLENESALYCEDGKHARQLMMESGKLAVLLQLLDEIRSKGEKVILFMMTKRLQRVLKLWLDQIYDLNVAVINGDTQAVATRAEDMTRKKLIAEFEAKSGFNILIMSPVAAGVGLTVIGANHVVHLERHWNPAKEAQASDRVYRIGQTKPVFIHLPAVTHPQFDSFDVHLDRLLRGKLMLKDAVVTPEAVSESEMIQSMGL

SEQ ID NO: 112 - protein, 731 aa, Pseudomonas aeruginosa BL21; identical to SEQ ID NO: 93

SEQ ID NO: 113 - protein, 245 aa, Pseudomonas aeruginosa BL21; identical to SEQ ID NO: 94

SEQ ID NO: 114 - protein, 558 aa, Pseudomonas aeruginosa BL21
MSRALSFLSAAIASGLQRQNERSGDVGLSGLVALKRASTELSRRFDQVEKALAPPREKRLLALGKFKREQALTSSEWRLVFAGLADDDEVSVPVLEDDQLFDRVHREVAGRIEQRSLSRRDWLALCFSYFAYDEHKPDDNANWRVLRDDIDRGFDAVRQRIGREKEWMRIVAEHRELFGAQAGARLAEEIFEGRARDLSSLQAIAQVPDGSWLWQRIFAVLLSRIFLLDDETFLKRLRELVALGQLNTRYLNQVLSACLTRYHRSRYREQSSSLLKQVALEHWGSPQMRSKQNAWLQYVEQPVCAMVVAWFAKEDLEHFFTLLKGEAEVDQSRLFYWLRFTNQMSYTRIVMGSDAWHDRSSDFVAFREKNKGRLSQLTGGSSHINAVVMQIGNYFFVEFSGTGHACYVYRADRLPFNPDQQVLGLNTELKQKGHKPAPMRHSPAPRRPNVVEGWLEKFDDELRALGIVAQRPASYTQPRGSEDKPAAHSAASASVAGDSLDVQVKSMLGSVPYKTFDHRSTSGVYQVLLARDDAAAKTALLRLGFKAVKNNALMFWRL

SEQ ID NO: 115 - protein, 1083 aa, Pseudomonas aeruginosa BL21; identical to SEQ ID NO: 96

SEQ ID NO: 116 - protein, 708 aa, Pseudomonas aeruginosa BL20; identical to SEQ ID NO: 85

SEQ ID NO: 117 - protein, 254 aa, Pseudomonas aeruginosa BL20; identical to SEQ ID NO: 86

SEQ ID NO: 118 - protein, 670 aa, Pseudomonas aeruginosa BL20
MKLPPVHMPVAEWAPVVRERWTVLVEKVARMKAASGKSDAFEAMLARLRDMASTGRFDGLPELLKRRLTARALTWLWLNDETMGRRLLSSRLLSVLVDAQQPRLTRITLQQLAQFYFRRFDKLDEHDGLRKQLEQILLQQLHLLPEPKVSGPQADPLVTLKRDAHWLLPPDGPVQLVERVRDSGHELGETFEVMGLQGFDDGRYGDICRAHFYLETLRGLAPGEYDPVLDELQKPAVSKAPYEGERRIGHVALEILIDRAGQEPGEVWQNFILNLAGDPRISRNSPNYREWWQFLGEERVQKVRGWLSKEDLRLFLQAVEQFGIETQNDDLQRMFPARKQFLEGLFKLKLIRNTRLLLGGRAQHSVKRILGKDVQTSFASMDGQMNDKAVIYLDCGDFHLVEGSHSFKIWVYLAAPGEALRSYERSSFSHSDLTTAVPKAYKRLYPELPYDAFTHHPPLSWQNRVFSFLADNGIALDIEQLLNRSDYQPYLRKFGMPVVNAKRTPVPPPSQTDFPAEPARSRVGKTGATTMSAPQGRKPAEMIARDSRAIPREEAATVRRSNQQHDPVVSHSVSSPDAAAPATARPSLVGEGLLTGLKPSALKILRYFVDNPGDKVRYAANVFGVDSREINQILYGPLKDMCTRDEQFGWTVNEAARLALEALDEQDRAE

SEQ ID NO: 119 - protein, 1013 aa, Pseudomonas aeruginosa BL20; identical to SEQ ID NO: 111

SEQ ID NO: 120 - protein, 708 aa, Pseudomonas aeruginosa BL09; identical to SEQ ID NO: 85

SEQ ID NO: 121 - protein, 254 aa, Pseudomonas aeruginosa BL09; identical to SEQ ID NO: 86

SEQ ID NO: 122 - protein, 670 aa, Pseudomonas aeruginosa BL09; identical to SEQ ID NO: 118

SEQ ID NO: 123 - protein, 1013 aa, Pseudomonas aeruginosa BL09; identical to SEQ ID NO: 111

SEQ ID NO: 124 - protein, 731 aa, Pseudomonas aeruginosa X13273; identical to SEQ ID NO: 93

SEQ ID NO: 125 - protein, 245 aa, Pseudomonas aeruginosa X13273; identical to SEQ ID NO: 94

SEQ ID NO: 126 - protein, 558 aa, Pseudomonas aeruginosa X13273; identical to SEQ ID NO: 114

SEQ ID NO: 127 - protein, 1083 aa, Pseudomonas aeruginosa X13273; identical to SEQ ID NO: 96

SEQ ID NO: 128 - protein, 731 aa, Pseudomonas aeruginosa 19660; identical to SEQ ID NO: 97

SEQ ID NO: 129 - protein, 245 aa, Pseudomonas aeruginosa 19660; identical to SEQ ID NO: 98

SEQ ID NO: 130 - protein, 558 aa, Pseudomonas aeruginosa 19660
MNRALSSLSAAIASGLERQSERSGDVGLSALPSLKRASTELSRRFDQVEKALAPPREKRLLALGKFKREQALTSSEWRLVFAGLADDDEVSVPVLEDDQLFDRVHREVAGRIEQRSLSRRDWLALCFSYFAYDEHKPDDNVNWRVLRGDIDRGFDAVRQRIGREKEWMRIVAEHRELFGAQAGTRLAEEIFEGRARDLSSLQAIAQVPDGSWLWQRIFAVLLSRIFLLDDETFLKRLPELVALGQLNTRYLNRVLSACLTRYHRSRYREQSSSLLKQAALEYWGSPQMRSKQNAWLQYVEQPVCAMVVAWFAKEDLEHFFTLLKGEAEVDQSRLFYWLRFANQMSYTRIVMGGDAWHDRGSDFVAFREKNKGRLSQLTGGPSHNNAVVMQIGNYFFVEFSGTGNACYVYRADAAPFNPDKKVLGLATELKQQGRALKRMSHSPAPRRPNVVEGWLDKFDDELRALGIVAQRPASYTQPRVSEDKPAAHSAAYASVAGDSLDVQVKSMLGSVPYKTFDHRSTSGVYQVLLARDDAAAKTALLRLGFKAVKNNALMFWRL

SEQ ID NO: 131 - protein, 1083 aa, Pseudomonas aeruginosa 19660; identical to SEQ ID NO: 100

SEQ ID NO: 132 - protein, 731 aa, Pseudomonas aeruginosa S54485; identical to SEQ ID NO: 93

SEQ ID NO: 133 - protein, 245 aa, Pseudomonas aeruginosa S54485; identical to SEQ ID NO: 94

SEQ ID NO: 134 - protein, 558 aa, Pseudomonas aeruginosa S54485; identical to SEQ ID NO: 114

SEQ ID NO: 135 - protein, 1083 aa, Pseudomonas aeruginosa S54485; identical to SEQ ID NO: 96

SEQ ID NO: 136 - protein, 731 aa, Pseudomonas aeruginosa E2; identical to SEQ ID NO: 97

SEQ ID NO: 137 - protein, 245 aa, Pseudomonas aeruginosa E2; identical to SEQ ID NO: 98

SEQ ID NO: 138 - protein, 558 aa, Pseudomonas aeruginosa E2
MNRALSSLSAAIASGLERQSERSGDVGLSALPSLKRASTELSRRFDQVEKALAPPREKRLLALGKFKREQALTSSEWRLVFAGLADDDEVSVPVLEDDQLFDRVHREVAGRIEQRSLSRRDWLALCFSYFAYDEHKPDDNVNWRVLRGDIDRGFDAVRQRIGREKEWMRIVAEHRELFGAQAGTRLAEEIFEGRARDLSSLQAIAQVPDGSWLWQRIFAVLLSRIFLLDDETFLKRLPELVALGQLNTRYLNRVLSACLTRYHRSRYREQSSSLLKQAALEHWGSPQMRSKQNAWLQYVEQPVCAMVVAWFAKEDLEHFFTLLKGEAEVDQSRLFYWLRFANQMSYTRIVMGGDAWHDRGSDFVAFREKNKGRLSQLTGGPSHNNAVVMQIGNYFFVEFSGTGNACYVYRADAAPFNPDKKVLGLATELKQQGRALKRMSHSPAPRRPNVVEGWLDKFDDELRALGIVAQRPASYTQPRVSEDKPAAHSAAYASVAGDSLDVQVKSMLGSVPYKTFDHRSTSGVYQVLLARDDAAAKTALLRLGFKAVKNNALMFWRL

SEQ ID NO: 139 - protein, 1083 aa, Pseudomonas aeruginosa E2; identical to SEQ ID NO: 100

SEQ ID NO: 140 - protein, 731 aa, Pseudomonas aeruginosa VRFPA05
MDYSKWLDLWDKATPEQLIAPVFVFSLVTVLCLWYLLRYFLRSFALSLRLKKLTRQVRAIKELQPAKRRSELEQLFQEHTLGHAWQEYAETLHDQFEVREGEQRLLCSRATAGAGHFFTAQTVVETPLGTEFYKHLPGILTGIGIVGTFFGLMLGLQHFDPSTPEQVSSSVDQLLKDVLFAFLGSFFSIFASIGVTLTEKWRLGRCYKHLEALTESIDGLFGSGVGEEYLAELVKSSNESSIQTRQLKDSLVTDLREMLQNLVDTQVRENLKLADTLSASYRDSGQVLAEQIGGAIENSLKSPLEAIAGAVNTASGDQSNQVQSLLTDVLTAFMSKLESTFGQQFNGLHEMLGQSVAAMQSMQQGFNELVGDMRSASEASSQNSAKMITQLLADMQAGQNSMQAGMNEMLANLQTSIARIGSEGEGAGERMAKQLEKLFADSEARQQAMAANLQAFVESMQQSMGQGQQETMAKIANSVDVLGEQLGGLFKQLEHNRTQMDQASKVAQVELHRGTREMVGGLEEQVKTLLDAVADQQGAMQDSLKLLGAQTEQHLQSMQQGAEKMRLAAERFDSAGQSVSKAGEATAGVLGALQGTSSDLVGASRELTSVVADYRNNREALNQTLAVIQGVVATTQGESAGRSQYLQDLKQQGERLQALNREVNDYLEQISAVLGKGFNEFSEGVDRSLRQTLGSLDAELHKAMTSLAGGVEGVKESLEDFSDIMERVQRR

SEQ ID NO: 141 - protein, 245 aa, Pseudomonas aeruginosa VRFPA05
MFGKSAAPARARDEGEKPFWISFADLMTAMMILFLVVMVASLSSVTQRIQQAEQGEKQRGKDIAKLCHDLRLRAGDLNSTIVVDCRDNRISFGEAGRFGHNQYFLNSQGQQALQDVVPLILDAADSEEGRKWLKQVVIEGFTDTDGSYLYNLHLSLQRSEWVMCSLLDSRSPVQKGLSAERQQQIRSMFLAGGVSFNNAKESKEESRRVELRMQFFGLKDQGHEGQEPALEFAYAANEKCQLEMR

SEQ ID NO: 142 - protein, 558 aa, Pseudomonas aeruginosa VRFPA05
MNRALSSLSAAIASGLERQSERSGDVGLSALPSLKRASTELSRRFDQVEKALAPPREKRLLALGKFKREQALTSSEWRLVFAGLADDDEVSVPVLEDDQLFDRVHREVAGRIEQRSLSRRDWLALCFSYFAYDEHKPDDNANWRVLRDDIDRGFDAVRQRIGREKEWMRIVAEHRELFGAQAGARLAEEIFEGRARDLSSLQAIAQVPDGSWLWQRIFAVLLSRIFLLDDETFLKRLRELVALGQLNTRYLNQVLSACLTRYHRSRYREQSSSLLKQVALEHWGSPQMRSKQNAWLQYVEQPVCAMVVAWFAKEDLEHFFTLLKGEAEVDQSRLFYWLRFTNQMSYTRIVMGSDAWHDRSSDFVAFREKNKGRLSQLTGGSSHINAVVMQIGNYFFVEFSGTGHACYVYRADRLPFNPDQQVLGLNTELKQKGHKPAPMRHSPAPRRPNVVEGWLEKFDDELRALGIVAQRPASYTQPRGSEDKPAAHSAASASVAGDSLDVQVKSMLGSVPYKTFDHRSTSGVYQVLLARDDAAAKTALLRLGFKAVKNNALMFWRL

SEQ ID NO: 143 - protein, 1083 aa, Pseudomonas aeruginosa VRFPA05
MLGRFFSGKDRSQPTKGAVPGAYQIEEEGLCYALSLADDDASWPVAAYLDQLFEEDYASQLSDRWLLPWESIYQLLDDPEHASSLPLLGLPAIANLQPQLASTGGLSDPDFKVFIRSWRNPQTGNLITFERVGAVARYAETTELLPRAVWELLKAIRDLHATQQQAPGEVANQIGWANIRKLAKRAGAGLDGFLDKTVVVKPEHLRLKPRKAVVAGTPIIELDVAFDGQPDNWLASFDGYKQVQDKYRVPGADGTVTHVLIEPDVKAVLESVRALPGRRVAGDEALSLVRNPYSVIGDAAEKVVDADEYEEQLADVGIYFHRFRLEPCLGEDGKHIQSIGLFLEPISSKPLPEIELRFDFAHEFAPFVNELQVKLAAGMPAGFWQGYELELSDFDLAQLAGVNELLRHWQRQEAGQTFEAVLDLASYGDRVVGIGEAERITSPFLVKEATENWLPADVKELGVDSELLSQWDPASREDFEEFEHRIDQARMAGDEQVCLPGTETPLPFQVAEQLYEAWSKKLNPVEPKPPVVTEPVAGRAVLHIEHNIEEATYAQRREAALLAGRHANADIPELLRPEVQLRDHQMKGVAWMQHLFGLSPDHVAGCLLADDMGLGKTIQLLTFVVWYLEQNPQGKPVLIVAPVSLLDNWERELQRFFYADALPVLKLYGGALSAVKFKKDEIPGDLQAKGIKNLLRPGWMGDARIVLTTYETLRDQELSLARQQWAIVICDEAQKIKNPAALITQAAKAIPSRFRIACTGTPVENTLIDLWCLFDFIQPGFLGGLNQFGREYQRPIEAGLERDTAALERLRGLIEPQTLRRTKQDVAKDLPAKIEDQGCRKLLMHTLQRNLYLSEVAQYTQKQQMQEQLEQRESGMLGLLHKLKLVCAHPFSVQPDPRLREHSPKLQWLLSTLDNIARSDSGDKVILFTELRDIQRELQHAIQERFGFKPTVINGDTSTSSQSAQSRQRLIDRFQEQPGFSVIILSTVAVGFGVNVQAANHVIHFTRCWNPAKEDQATDRAYRIGQEKDVYVYYPTVRDAGMPTFEATLDELLQKRRALARDMLHGASELQVSEFGELLRAQG

SEQ ID NO: 144 - protein, 708 aa, Pseudomonas aeruginosa PS42; identical to SEQ ID NO: 85

SEQ ID NO: 145 - protein, 254 aa, Pseudomonas aeruginosa PS42; identical to SEQ ID NO: 86

SEQ ID NO: 146 - protein, 670 aa, Pseudomonas aeruginosa PS42; identical to SEQ ID NO: 118

SEQ ID NO: 147 - protein, 1013 aa, Pseudomonas aeruginosa PS42
MSLMDIFRSLIGERDGALSTQQGFQSQPDSNGLNFYLPLPAFKALQTGQGSALEKIQLIVLNMLVEQGIAENTANGFHIGAEDIAGMDLEQAEILRLPRRLPGHFLTSISGRTGNSGFRVAITLEMPDGPASFSRKGPYLYLTSSECYWLTPAEIMGLQAWELHESLGPEQRGEAANLRLMAELQTAARSGMRIDLSHFERLDVVVPQNIGVIATRLPDGSLQLCPSLGDGSSADQLEKRWSQLDMTADGGVLRIDNRVLLLDQARMDGIRNVLANKRIPADQVNEFIATPTAFLDAALVNLEVGFSARVAGIGKLQHMDFGVLDATKNDWFALDKRPAPAAILSKLIQSPEDLQRFEEVLQAANEQGATSLSFAGEVIDISDAPTVQQELARARQNMAHVSDSEPHSEEGVLPGEDKEKVGVILKDADEINSALLRKAAAAKPLVVPDWSAYAREPFPHQREGIEWMLKLMGAALQDETDDLYRLQGGLLADDMGLGKTYMSLVAVGEYLASQRAADKPQKPVLVVAPLSLLENWEDEVGKTFASIPFRDVVVLQSGRSLRDYRVKGAERESVQLASMIDDSSGMMDEQSIRYALHVGPEAGVHRLDMDRRLVLTTYQTLRDYQFSLCRIDWGMVIFDEAQNIKNPNALQTIAAKGLKADFKLLATGTPVENSLGDFWCLMHTVQPGLLGGWESFRDTWIKPILAASDEERDEVRARLGEQLRRAVGIFMLRRVKEDQLKGLPAKTILSGVEQADHGLQRYAAQLGVVMKGIQLQAYDEVLDSYRARRASAEDMRGTALAALTQLRSISLHPRLENESALYCEDGKHARQLMMESGKLAVLLQLLDEIRSKGEKVILFMMTKRLQRVLKLWLDQIYDLNVAVINGDTQAVATRAEDMTRKKLIAEFEAKSGFNILIMSPVAAGVGLTVIGANHVVHLERHWNPAKEAQASDRVYRIGQTKPVFIHLPAVTHPQFDSFDVHLDRLLRGKLMLKDAVVTPEAVSESEMIQSMGL

SEQ ID NO: 148 - protein, 708 aa, Pseudomonas aeruginosa PA38182; identical to SEQ ID NO: 85

SEQ ID NO: 149 - protein, 254 aa, Pseudomonas aeruginosa PA38182; identical to SEQ ID NO: 86

SEQ ID NO: 150 - protein, 255 aa, Pseudomonas aeruginosa PA38182
MKLPPVHMPVAEWAPVVRERWTVLVEKVARMKAASGKSDAFEAMLARLRDMASTGRFDGLPELLKRRLTARALTWLWLNDETMGRRLLSSRLLSVLVDAQQPRLTRITLQQLAQFYFRRFDKLDEHDGLRKQLEQILLQQLHLLPEPKVSGPQADPLVTLKRDAHWLLPPDGPVQLVERVRDSGHELGETFEVMGLQGFDDGRYGDICRAHFYLETLRGLRPVSTTPCWMSCRSPLCPRLRTRASVVSAMLRWRF

SEQ ID NO: 151 - protein, 1028 aa, Pseudomonas aeruginosa PA38182
MSLMDIFRSLIGERDGALSTQQGFQSQPDSNGLNFYLPLPAFKALQTGQGSALEKIQLIVLNMLVEQGIAENTANGFHIGAEDIAGMDLEQAEILRLPRRLPGHFLTSISGRTGNSGFRVAITLEMPDGPASFSRKGPYLYLTSSECYWLTPAEIMGLQAWELHESLGPEQRGEAANLRLMAELQTAARSGMRIDLSHFERLDVVVPQNIGVIATRLPDGSLQLCPSLGDGSSADQLEKRWSQLDMTADGGVLRIDNRVLLLDQARMDGIRNVLANKRIPADQVNEFIATPTAFLDAALVNLEVGFSARVAGIGKLQHMDFGVLDATKNDWFALDKRPAPAAILSKLIQSPEDLQRFEEVLQAANEQGATSLSFAGEVIDISDAPTVQQELARARQNMAHVSDSEPHSEEGVLPGEDKEKVGVILKDADEINSALLRKAAAAKPLVVPDWSAYAREPFPHQREGIEWMLKLMGAALQDETDDLYRLQGGLLADDMGLGKTYMSLVAVGEYLASQRAADKPQKPVLVVAPLSLLENWEDEVGKTFASIPFRDVVVLQSGRSLRDYRVKGAERESVQLASMIDDSSGMMDEQSIRYALHVGPEAGVHRLDMDRRLVLTTYQTLRDYQFSLCRIDWGMVIFDEAQNIKNPNALQTIAAKGLKADFKLLATGTPVENSLGDFWCLMHTVQPGLLGGWESFRDTWIKPILAASDEERDEVRARLGEQLRRAVGIFMLRRVKEDQLKGLPAKTILSGVEQADHGLQRYAAQLGVVMKGIQLQAYDEVLDSYRARRASAEDMRGTALAALTQLRSISLHPRLENESALYCEDGKHARQLMMESGKLAVLLQLLDEIRSKGEKVILFMMTKRLQRVLKLWLDQIYDLNVAVINGDTQAVATRAEDMTRKKLIAEFEAKSGFNILIMSPVAAGVGLTVIGANHVVHLERHWNPAKEAQASDRVYRIGQTKPVFIHLPAVTHPQFDSFDVHLDRLLRGKLMLKDAVVTPEAVSESEMIQSMGLMLARRRSLAQPAKPA

SEQ ID NO: 152 - protein, 731 aa, Pseudomonas aeruginosa PA38182
MDFTNWLDLLGKATHEQLTAPAFVVSLVTLLCLWYGVRYFLYSFVLSRRIKRVSKEVRAVGELQPAKRRGALEQVFQKPPLQHAWQEYAETLHDQFEVRDGERQLLRSRATAGAGHFFTSQTVVETPLGTEFYKHLPGILTGIGIVGTFFGLMLGLQHFNPGTPEQVNASVDQLLKDVLFAFLGSFFSIFASIAVTLTEKWRLGRCYKHLEKLTEAIDGLFDSGVGEEYLAELVKSSNESSIQTRQLKDSLVTDLREMLQNLVDTQVRESLKLADTLSASYRDSGQVLAEQIGGAIESSLKAPLEQIAGAVQSASGDQSNQVQSLLQDVLVAFMNKLESTFGQQFNGLHEMMGQSVAAMQSMQQGFNSLVDDMRSASESSTQNSAKMIAQLLADMQAGQNSMQASMNEMLANLQASIARIGSEGEGAGERMAQQLEKLFAESEARQQAMAENLQAFIETMKQNIGQGQQETMAKIAGSVDVLGEQLGAMFKQMEQGRAQMDQATKVAQVELHRGTREMVGDLEKQVNDLLDAVAEQSGSMQDTVKLLSAQTEQHLQSMQAGAEKMRVAAERFETAGLSVTKAGEATANVLGAMQGTGTELVGASRELSSIVADYRNNRDALAQTLSVIQGVVASAQSEASGRTQYLLDMKQQSERLQALNREVHDYLEQISGVLGKGFGEFTEGVDRSLRQTLGSLDAELHKAMTSLAGGVEGVKESLEDFSDIMESIQKK

SEQ ID NO: 153 - protein, 245 aa, Pseudomonas aeruginosa PA38182; identical to SEQ ID NO: 102

SEQ ID NO: 154 - protein, 547 aa, Pseudomonas aeruginosa PA38182; identical to SEQ ID NO: 103

SEQ ID NO: 155 - protein, 1083 aa, Pseudomonas aeruginosa PA38182; identical to SEQ ID NO: 104

SEQ ID NO: 156 - protein, 708 aa, Pseudomonas aeruginosa VRFPA09; identical to SEQ ID NO: 85

SEQ ID NO: 157 - protein, 254 aa, Pseudomonas aeruginosa VRFPA09; identical to SEQ ID NO: 86

SEQ ID NO: 158 - protein, 663 aa, Pseudomonas aeruginosa VRFPA09
MPVAEWAPVVRERWTVLVEKVARMKAASGKSDAFEAMLARLRDMASTGRFDGLPELLKRRLTARALTWLWLNDETMGRRLLSSRLLSVLVDAQQPRLTRITLQQLAQFYFRRFDKLDEHDGLRKQLEQILLQQLHLLPEPKVSGPQADPLVTLKRDAHWLLPPDGPVQLVERVRDSGHELGETFEVMGLQGFDDGRYGDICRAHFYLETLRGLAPGEYDPVLDELQKPAVSKAPYEGERRIGHVALEILIDRAGQEPGEVWQNFILNLAGDPRISRNSPNYREWWQFLGEERVQKVRGWLSKEDLRLFLQAVEQFGIETQNDDLQRMFPARKQFLEGLFKLKLIRNTRLLLGGRAQHSVKRILGKDVQTSFASMDGQMNDKAVIYLDCGDFHLVEGSHSFKIWVYLAAPGEALRSYERSSFSHSDLTTAVPKAYKRLYPELPYDAFTHHPPLSWQNRVFSFLADNGIALDIEQLLNRSDYQPYLRKFGMPVVNAKRTPVPPPSQTDFPAEPARSRVGKTGATTMSAPQGRKPAEMIARDSRAIPREEAATVRRSNQQHDPVVSHSVSSPDAAAPATARPSLVGEGLLTGLKPSALKILRYFVDNPGDKVRYAANVFGVDSREINQILYGPLKDMCTRDEQFGWTVNEAARLALEALDEQDRAE

SEQ ID NO: 159 - protein, 782 aa, Pseudomonas aeruginosa VRFPA09
MSLMDIFRSLIGERDGALSTQQGFQSQPDSNGLNFYLPLPAFKALQTGQGSALEKIQLIVLNMLVEQGIAENTANGFHIGAEDIAGMDLEQAEILRLPRRLPGHFLTSISGRTGNSGFRVAITLEMPDGPASFSRKGPYLYLTSSECYWLTPAEIMGLQAWELHESLGPEQRGEAANLRLMAELQTAARSGMRIDLSHFERLDVVVPQNIGVIATRLPDGSLQLCPSLGDGSSADQLEKRWSQLDMTADGGVLRIDNRVLLLDQARMDGIRNVLANKRIPADQVNEFIATPTAFLDAALVNLEVGFSARVAGIGKLQHMDFGVLDATKNDWFALDKRPAPAAILSKLIQSPEDLQRFEEVLQAANEQGATSLSFAGEVIDISDAPTVQQELARARQNMAHVSDSEPHSEEGVLPGEDKEKVGVILKDADEINSALLRKAAAAKPLVVPDWSAYAREPFPHQREGIEWMLKLMGAALQDETDDLYRLQGGLLADDMGLGKTYMSLVAVGEYLASQRAADKPQKPVLVVAPLSLLENWEDEVGKTFASIPFRDVVVLQSGRSLRDYRVKGAERESVQLASMIDDSSGMMDEQSIRYALHVGPEAGVHRLDMDRRLVLTTYQTLRDYQFSLCRIDWGMVIFDEAQNIKNPNALQTIAAKGLKADFKLLATGTPVENSLGDFWCLMHTVQPGLLGGWESFRDTWIKPILAASDEERDEVRARLGEQLRRAVGIFMLRRVKEDQLKGLPAKTILSGVEQADHGLQRYAAQLGVVMKGIQLQAYDEVL

SEQ ID NO: 160 - protein, 731 aa, Pseudomonas aeruginosa PA99
MDYSKWLDLWDKATPEQLIAPVFVFSLVTVLCLWYLLRYFLRSFALSRRLKKLTRQVRAIKELQPAKRRSELEQLFQEHTLGHAWQEYAETLHDQFEVREGEQRMLCSRATAGAGHFFTAQTVVETPLGTEFYKHLPGILTGIGIVGTFFGLMLGLQHFDPSTPEQVSSSVDQLLKDVLFAFLGSFFSIFASIGVTLTEKWRLGRCYKHLEALTESIDGLFGSGVGEEYLAELVKSSNESSIQTRQLKDSLVTDLREMLQNLVDTQVRENLKLADTLSASYRDSGQVLAQQIGGAIENSLKSPLEAIAGAVNTASGDQSNQVQSLLTDVLTAFMSKLESTFGQQFNGLHEMLGRSVAAMQSMQQGFNELVGDMRSASEASSHNSAKMIAQLLADMQAGQNSMQAGMNEMLANLQTSIARIGSEGEGAGERMAKQLEKLFADSEARQQAMAANLQAFVESMQQSMGQGQQETMAKIASSVDVLGEQLGGLFKQLEHNRTQMDQASKVAQVELHRGTREMVGGLEEQVKTLLDAVADQQGAMQDSLKLLGAQTEQHLQSMQQGAEKMRLAAERFDSAGQSVSKAGEATAGVLGALQGTSGDLVGASRELTSVVADYRNNREALNQTLAVIQGVVATTQGESAGRSQYLQDLKQQGERLQALNREVNDYLEQISAVLGKGFNEFSEGVDRSLRQTLGSLDAELHKAMTSLAGGVEGVKESLEDFSDIMERVQRR

SEQ ID NO: 161 - protein, 245 aa, Pseudomonas aeruginosa PA99
MFGKSAAPARARDEGEKPFWISFADLMTAMMILFLVVMVASLSSVTQRIQQAEQGEKQRGKDIAKLCQHLKLRAGDLNSTIVVDCRDNRISFGEAGRFGHNQYFLNSQGQQALQDVVPLILDAADSEEGRKWLKQVVIEGFTDTDGSYLYNLHLSLQRSEWVMCSLLDSRSPVQKGLSAERQQQIRSMFLAGGVSFNNAKESKEESRRVELRMQFFGLKDQGHEGQEPALEFAYAANEKCQLEMR

SEQ ID NO: 162 - protein, 558 aa, Pseudomonas aeruginosa PA99
MNRALSSLSAAIASGLERQSERSGDVGLSALPSLKRASTELSRRFDQVEKALAPPREKRLLALGKFKREQALTSSEWRLVFAGLADDDEVSVPVLEDDQLFDRVHREVAGRIEQRSLSRRDWLALCFSYFAYDEHKPDDNVNWRVLRDDIDRGFDAVRQRIGREKEWMRIVAEHRELFGAQAGTRLAEEIFEGRARDLSSLQAIAQVPDGSWLWQRIFAVLLSRIFLLDDETFLKRLPELVALGQLNTRYLNRVLSACLTRYHRSRYREQSSSLLKQAALEHWGSPQMRSKQNAWLQYVEQPVCAMVVAWFAKEDLEHFFTLLKGEAEVDQSRLFYWLRFANQMSYTRIVMGGDAWHDRGSDFVAFREKNKGRLSQLTGGPSHNNAVVMQIGNYFFVEFSGTGNACYVYRADAAPFNPDKQVLGLATELKQQGRALKRMSHSPAPRRPNVVEGWLDKFDDELRALGIVAQRPASYTQPRVSEDKPAAHSAAYASVAGDSLDVQVKSMLGSVPYKTFDHRSTSGVYQVLLARDDAAAKTALLRLGFKAVKNNALMFWRL

SEQ ID NO: 163 - protein, 1082 aa, Pseudomonas aeruginosa PA99
MLGRFFSGKDRSQSAKGAAPGAYQIEEQGLCYALSLAGDDASWPVAAYLDQLFEEDYASQLSDRWLLPWESIYQLLDDPEHASSLPLLGLPAISELQPQLASTGGLSDPDFKVFIQSWRNPQTGNPITFERVGAVVRYASATELLPRAVWELLKAIRDLHAIQQQAPGEVTNQIGWANIRKLAKRAGAGLDGFLDKTVVVKPEHLKLKPRKAVVAGTPIIELDVAFDGQPDNWLASFDGYKQVQDKYRVPGADGTVTHVLIEPDVKAVLESVRALPGRRVAGDEALSLVRNPYSVIGDAAEKVVNADEYEEQLADAGIYFHRFRLEPCLGEDGKHIQSIGLFLEPISAKPLPEVELRFDFAHEFTPFVNELQVKLAAGMPAGFWQGYELELSDFDLAQLAGVNELLRHWQRQEAGQTFEAVLDLASYGDRVVGIGEAERITSPFLVKEATENWLPADVKELGVDSELLSQWDPASREDFEEFEHRIDQARMAGDEQVCLPGTETPLPIQVAEQLYEAWSKKINPVEPKSSAAEPAAGRAVLHIEHNIEEATYAQHREAALLAGRHANADLPELLRPEVQLRDHQMKGVAWMQHLFGLSPDHVAGCLLADDMGLGKTIQLLTFVVWYLEQNPQGKPVLIVAPVSLLDNWERELQRFFYADALPVLKLYGGALSAVKFKKDEIPEDLQAKGIKNLLRPGWMGDARIVLTTYETLRDQELSLARQQWAIVICDEAQKIKNPAALITQAAKAIPSRFRIACTGTPVENTLIDLWCLFDFIQPGFLGGLNQFGREYQRPIEAGMQRDTAALERLRGLIEPQTLRRTKQDVAKDLPAKIEDQGCRKLQMHTLQRNLYLSEVAQYTQKQQMQEQLEQRESGMLGLLHKLKLVCAHPFGVQPDPRLREHSPKLQWLLGTLDNIARSGNGDKVILFTELRDIQRELQHAIQERFGFKPTVINGDTSTSSQSAQSRQRLIDRFQEQPGFSVIILSTVAVGFGVNVQAANHVIHFTRCWNPAKEDQATDRAYRIGQEKDVYVYYPTVRDAGMPTFEATLDELLQKRRALARDMLHGASELQTAEFGELLRAQG

SEQ ID NO: 164 - protein, 781 aa, Pseudomonas aeruginosa BWH033
MEFLYHLLPNFSLLKGGSTEALGVIFWLVMATLFGYSLVSLVMSSIRFRVRVRALNSLVTGQNRENLALSRREILQKALSLKDQRIGALWREFDDSLVSSSDHKQLFNTLDAEHFFNVRTLAHGLSGSRFFSSLPGLLVGLGVLATFVGLTIGLSKLKLDSTAGVDQLREGISVMIQGAAVAFMASVWGVGFSLILNLIEKIAERWALGRVQDLQHRIDTLYPLIPAEQSLVHIADYSRESKEALQELHERIGDRLQESLVGMNEAMQAALTDALNNIMAPAIQTLVSTTSQQSTQVLERLVSNFTDGLTSAGREQGSLMQQAAADVNAAVGGMTDRLNQLFQTLSDQQGRQQEAARQQSGEFQAQMERISSSADQRQQQLESRFSELLSGLTGQLDTQLGSAQRRDEERQALFERTLVEAGASQSALLEKFASASSEQLQAMAEAGNERHGNLEKVFSRLMMTLNSQLDSQMGAAEKREQDRALRHDQQQAAVLAQQQQLIGSLGQTSQQQIGAIAEAAAAQQRALEESVSKLLGNFNEQMSGHGQQAEQREHSRQQRFNEQLESMAAQQHALLEGIATAVQATQQQSRQMAEQHQQLMGRLQQASDAAATSSRHMDSSANQLGLLSTNVRQAAELLGQRLESVTQRIESAGEQNAELAGQLRQQATALAQLQGALLDGAQRFEQAAAEARSGFGEMRSHQQEFLTGVRGEFTALGEALRSQVQGVEQQAEQWLRSYSTEVRDQVHERMDQWNKETLSFAGQMHAAVQAISNVVDELEAR

SEQ ID NO: 165 - protein, 247 aa, Pseudomonas aeruginosa BWH033
MRWRKSHDVPMEDEDPYWKSFVDIMSALLVLFILASVVLILQLMEKSADFDQQVEQLKKAETVRQQILDEAVEKLRQRGIKVEVSENHTVLRIPNELLGFDTGAFEIQPRYQPTALEIGEVINQVISREDRVNYLDTIFIEGHTDNRPFQGFMGKGNWGLSTFRAISLWQFWSTEMPEAERLNRLSNQDGEPLFSVSGYAETRPVSKRQDGEEDYRLNRRIDIRFTIRRPQSSEYEAVKSLLGNSTK

SEQ ID NO: 166 - protein, 723 aa, Pseudomonas aeruginosa BWH033
MKLPPIDNRPGEWSPTVIEGWSRLVEKASRMKAKVGSGDAFERAIARLRSMATSGRFDGLVELLSRRLGARALTWLWLHDDFAGARLFNGRMLEALLENQQPRLSRLTLIQLLQLYFIVFDRLDERDKQAETSLRGRLEWHLLDQLKRLPERARPQSFVADPLTTLKTEGDWLLALDGPLRLAQAVRQRGKELAQTFEEMGLSGFDVGRYGDICRAHFYLERLRQLRPGEWDEVLEELLKPSVSKAPYEADRRIGHAALEIMIDRAGDDPGDAWQNFILSLAGDPRIASSAPNFREWWKPLGEERIGRVRGWLSKEDLRLFLQAVEQYGVESGKEDLQRMFPARKLFLEGLFKLGLIRYTRLMLGNSAKLSVKRILGGEVKTSFASLDSAMNDKAVIYLDCGDFHLVEGSHSFKIWAYLGQPSHWVKSYERNHFSHYDLTTSLPSQYKAAYPALPYEAVVHNGPWQYKVFEFLAKNGIALDIEKLLSRSDYKAYLSRYGMPVVGQKKARVEPLVQASTDLGAGKGRGPETMSSAESNPVKLEAARRVAPSAGAPNPSQIELNKTQRSILTYLASNPDRSMGEIRRAMDGDEALLYEIQESLRGRLAAYVQQNDVFQWSLSEAGRNLLGDVPSPARTKSPSTGSSNSAAQLKRLGAFELQVLWYFKSNPGDRVRSAANVLDVEAREINRVLYGALKNMCEQGRNFGWAVKADISDALEQLPTES

SEQ ID NO: 167 - protein, 1009 aa, Pseudomonas aeruginosa BWH033
MGLADIFKSLLGEGRATLSTQQGFAYAADSDGVNFYLDKTVYAALATGQGNALQKVQLIVLRMLQEQGLAEPLANGFHVAAEDVAGMDDEQAEILRLPRRLSMSFVSRISGRTGHSGFCVDLAIQSKAGEVPFTRKGPLLYLTSTECYRLTPAELMGLMAWEYHQNLPAQQRGEASNLRMMAELQTAARSGMRVDLSHFERLDVVVPENIGVIATRLADGSLMLSPSLGDGSTPDQLEKRWSQLDMGADGGVLRIDNRVVLLEPQKMAAIKEVLGSKRIPADRVAEFIATPSAFLDAALVNLDLGFSVRVAGIGKLQHMEFGDLDNQKNDWFALDSRPAPAEIIPKLVQSEEDLQHFNELYKAAIEQGATSMTFGGEMIDISDPALVEQQLKRIEASLRDPALDEVPGDSLSVEPKERVSVLLRDADEISSTLLRKASEAKPAHEPEWSAYARQPFPHQREGVEWMLGLLESAVCDDHDDLYRLQGGLLADDMGLGKTYMSLVTVGEYLAQQKASGRAQKPVLVVAPLSLLENWEDEVAQTFRSIPFRDIVVLQSGRDLSRFRVKGAERESAQLASLINDDGEMDDDSIRYALTIGPEVGVHRLDMDRRLVLTTYQTLRDYQFSLCRIDWGLVIFDEAQNIKNPNAAQTRAAKGLKADFKLLATGTPVENSLGDFWCLMDTAQPGILGGWSQFRDNWIKPILAAADDEKDEVRRRVGADLREAVGRFILRRIKEDQLKGLPSKTIHSGVAQPQGGLQLHAAHLAVSMKGLQLQAYDAVLEGFRARRATEDMRGAALAALSQLREISLHPRLREEAALMAGSASEARAHMAQSGKLVVLLDLLDGIRQGEEKVILFMVTKRLQRILKLWLDQIYGLDVAIINGETAAVAKKSDELTRRKLIGVFESKPGFNIMIMSPVAAGVGLTVVGANHVVHLERHWNPAKEAQASDRVYRIGQKKDVHIHLPAVLHPQFDSFDVHLDRLLRGKLMLKDAVVTPEVVSEGEIIRSMGL

SEQ ID NO: 168 - protein, 708 aa, Pseudomonas aeruginosa 3575
MMDLLKHLIPDFAHMFSANPNGISAWFWSATALIFGLSLYFLFVHFRRFRTRLRALRSLLEGQSKETLALSRRETMQKAQGLDAPNVGMLWREFDESLVLSTDQKHLFNTLDAEHFFNARTLAPGLTASRLLAAAPSFLVAIGVLGTFVGLTVGLEGLVGTSDEIESLKGGINKLISGAAVAFMTSVWGVFFSLLLNFVEKMFERSALGQIQQLQHDIDFLYPRIPAEQSLVHIAEYGKESKEALQELHERIGDRLQETLNGMSEAMQTALTDALNNIMAPAIQTLVSTTSQQSTQVLEKLVGNFMDGMTSVGREQGLQMQQAAADVNAAVSGMSERLNQLFSSLNEQQGRQMEVAQQQSAAFETQLQRITGSAEERQAQMEQRFAELMSGLTNQLQTQLGTAQQRDEERQVLFERLLGQASSSQTAMLEQFSSSTREQMQAMAEAGNERHSNLEKVFSRLMMNLNTQLDSQMGAAEQREQARQQRFQEQLDQVSTHQQELLSGLASAVQATQQQSRLMADQHQQLLGQLKQVSDATAQSSKHLDSSANQLGLLSANLRQAADTLGQRLEAVTHGVEKAGQQNAELAAQLQSQAATLAQLQATLLEGAQRFEQAAGEARNGFGEMKSAQQEFLSGVRHEFTALGEKLREQVEAVEKQAEEWLRSYAGEVRTQIDDRMNKWNEVSLSYADQMHRTVQAMSSILDELEAR

SEQ ID NO: 169 - protein, 254 aa, Pseudomonas aeruginosa 3575
MRLGKSKEVSVDEENPYWMSFSDIMSALLVIFILASVILILQLMEIQKELKERQVQFEQELVELKKAEQVRRTILDEAVEALRERGIKVEVSENHTVLSIPNDLLGFDTGAYDIHAAYQARALEIGKVINEVISREDRVEFLDTIFIEGHTDNRPLQGFMGKGNWGLSTFRAISLWQFWGSALSADEQLARLKNKDGKPLFSVSGYGETRPVLVDQQTEDDFKRNRRIDIRFTIRRPDSAQYEQVRERLEEVKP

SEQ ID NO: 170 - protein, 640 aa, Pseudomonas aeruginosa 3575
MKLPPVHMPVAEWAPVVRERWAVLVEKVARMKAASGKSDAFDAMLARLRDMASTGRFDGLPELLKRRLTARALTWLWLNDEVMASRLLNPRMLSVLLEAQQPRLTRITLQQLAQLYFRRFDLLDAREGLRELLEHSLLQQLEKMPSPRIVGPWPDPLVTLQREGHWLLTLDGPGQLVEKVRSEGRELGATFSEMGLQGFDDGRYADLCRAHFYLETLRHLPLDASDPVLDELLKPSVAKAPFEGERRIGHVALEILIDRAGQEPGEVWQNFILNLAGDPRIARNAPNYREWWQPLGEARIQKVRGWLSKEDLRLFLQAVEQFGIETQNSELQRMFPARKRFLEGLFKLKLIRNTRLLLGGKAQQSVKRILGEEVKTSFARMDGQMNDKAVIYLDCGDFHLVEGSHNFKIWVYLAAPGELLRSYERSSFSQRDLNVTIPQTYKKLYPMLPCDAFTHYPPLAWQNKVFTFLASNGVGLDIEKLLSPEDYQLQLRKYGIPVVNVHRTMVPSPADISVAPVEAEVVPPGSPAASGRTPANRVVTAGADIADRSSDQHPTGASAAAGRLASLKPSALKLLRYFRDNPGDRVRYAANVFGVETREINQILYGPLKGMLTQDGNFGWRLTDAISRELDALDEQERDS

SEQ ID NO: 171 - protein, 1014 aa, Pseudomonas aeruginosa 3575
MRLMNILRSLIGEPDTELASLEGFRATADSSGVNFYLPQPVFNALQAGTGNALQKIQLIALNMLLEQGIAEPTANGFHVSAEDVSGMDLEQADILRLPRRFNGRFITQISGRTGHSSFQVGLMVQMPGDSSPVPFQRKGPYLYLTGLEHYRLAPAELMGLQACETHQSLTPELRGEAANLRLMAELQTAARSGMAVDLSHFERLDVVIPENIGVTATRLPDGSLLLCPSLGDGSSADQLEKRWSQLEMSADGGVMRIDNRVVLLDKEKMEGIRNVLSNKRIPVDKVAEFIATPTAFLDAALVNLDVGFSVRVAGIGKLQHMDFGTLDATRNDWFALDKRPAPPEIIPKLVQSPEELQRFEEMLKAANEQGASSLAFGGEVIDIADAQKVQEQLGIAKAVFSEEKEADASTPAESGGEETKEKVAVILKEAEAINNALLRKAGSACLAVEPDWAAYARQPFIHQREGIEWMLRLIGAALKEDPADLYRLQGGLLADDMGLGKTYMSLVAVGEYLKGQRLVGQSQKPILVVAPLSLLENWEDEVEKTFASIPFRDVVVLQSGRDLSRFRVKGADRESVQLTSLADEEGLMDEQSIRYALSVGPEAGVHRLDMDRRLVLTTYQTLRDYQFSLCRIDWGMVIFDEAQNIKNPNALQTRAAKGLKADFKLLATGTPVENSLGDFWCLVDTAQPGLLGGWEAYRDTWIKPILAAADDERDVVRTELGRRLRDAVGIFMLRRVKEDQLKGLPKKTIRSGVEQASQGIQEHASELGACMRGPQLQAYDDVLSDYRSRRAIAEDMRGAALSALTQLRTISLHPRLDDEAALYSHDAQHARKLMMESGKLSVTLALLDEIRSKGEKVILFMMTKRLQRALKLWLDQIYGLDVAIINGDTKAVATKAEDMTRKRLIGAFEARPGFHILIMSPVAAGVGLTVVGANHVIHLERHWNPAKEAQASDRVYRIGQQKDVYIHLPVVTHPQYDSFDVHLDRLLRGKLMLKDAVVTPEAVAESEMIQSMGL

SEQ ID NO: 172 - protein, 708 aa, Pseudomonas aeruginosa BWH054
MMDLLKHLIPDFAHMFSANPNGISAWFWSATAVIFVLSLYFLFVHFRRFRTRLRALRSLLEGQSKETLALSRRETMQKAQGLDAPNVGMLWREFDESLVLSSDQKHLFNTLDAEHFFNARTLAPGLTASRLLAAAPSFLVAIGVLGTFVGLTVGLEGLVGTSDEIESLKGGINKLISGAAVAFMTSVWGVFFSLLLNFVEKMFERSALGQIQQLQHDIDFLYPRIPAEQSLVHIAEYGKESKEALQELHERIGDRLQETLNGMSEAMQTALTDALNNIMAPAIQTLVSTTSQQSTQVLEKLVGNFMDGMTSVGREQGLQMQQAAADVNAAVSGMSERLNQLFSSLNEQQGRQMEVAQQQSEAFETQLQRISGSAEERQAQMEQRFAELMSGLTNQLQTQLGAAQQRDEERQVLFERLLGQANSSQTAMLEQFSSSTREQMQAMAEAGNERHSNLEKVFSRLMMNLNTQLDSQMGAAEQREQARQQRFQEQLDQVSTHQQELLTSLATAVQATQQQSRLMADQHQQLLGQLKQVSEATAQSSKHLDSSANQLGLLSANLRQAADTLGQRLEAVTHGVEKAGQQNAELAAQLQSQAATLAQLQATLLEGAQRFEQAAGEARNGFGEMKSAQQEFLSGVRHEFTALGEKLREQVEAVEKQAEEWLRSYAGEVRTQIDDRMNKWNEVSLSYADQMHRTVQAMSSILDELEAR

SEQ ID NO: 173 - protein, 254 aa, Pseudomonas aeruginosa BWH054
MRLGKSKEVSVDEENPYWMSFSDIMSALLVIFILASVILILQLMEIQKELKERQVQFEQELVELKKAEQVRRTILDEAVEALRERGIKVEVSENHTVLSIPNDLLGFDTGAYDIHAAYQARALEIGKVINEVISREDRVEFLDTIFIEGHTDNRPLQGFMGKGNWGLSTFRAISLWQFWGSALSPDEQLARLKNKDGKPLFSVSGYGETRPVLVDQQTEDDFKRNRRIDIRFTIRRPDSAQYEQVRERLEEVKP

SEQ ID NO: 174 - protein, 640 aa, Pseudomonas aeruginosa BWH054
MKLPPVHMPVAEWAPVVRERWTVLVEKVARMKAASGKSNAFDAMLARLRDMASTGRFDGLPELLKRRLTARALTWLWLNDEVMASRLLNPRMLSALLEAQQPRLTRITLQQLAQLYFRRFDLLDAREGLRELLEHSLLQQLEKMPSPRIVGPWPDPLVTLQREGHWLLTLDGPGQLVEKVRSEGRELGATFSEMGLQGFDDGRYADLCRAHFYLETLRHLPLDASDPVLDELLKPSVAKAPFEGERRIGHVALEILIDRTGQEPGEVWQNFILNLAGDPRIARNAPNYREWWQPLGEARIQKVRGWLSKEDLRLFLQAVEQFGIETQNSELQRMFPARKRFLEGLFKLKLIRNTRLLLGGKAQQSVKRILGEEVKTSFARMDGQMNDKAVIYLDCGDFHLVEGSHNFKIWVYLAAPGELLRSYERSSFSQRDLNVTIPQTYKKLYPMLPCDAFTHYPPLTWQNKVFTFLASNGVGLDIEKLLSPEDYQLQLRKYGIPVVNVHRTMVPSPADISVAPVEAEVVPPGSPAASGRTPASRVVTAGADIADRSSDQHPTGASAAAGRLASLKPSALKLLRYFRDNPGDRVRYAANVFGVETREINQILYGPLKGMLTQDGNFGWRLTDAISRELDALDEQERDS

SEQ ID NO: 175 - protein, 1014 aa, Pseudomonas aeruginosa BWH054
MRLMNILRSLIGEPDTELASLEGFRATADSSGVNFYLPQPVFKALQAGTGNALQKIQLIALNMLLEQGIAESTANGFHVSAEDVSGMDLEQADILRLPRRFNGRFITQISGRTGHSSFQVGLMVQMPGDSSPVPFQRKGPYLYLTASEHYRLTPAELMGLQACESHQSLTPELRGEAANLRLMAELQTAARSGMAVDLSHFERLDVVIPENIGVTATRLPDGSLLLCPSLGDGSSVDQLEKRWSQLEMSADGGVMRIDNRVVLLDKEKMAGIRNVLANKRIPADKVVEFIATPTAFLDAALVNLDVGFSVRVAGIGKLQHMDFGALDATRNDWFALDKRPAPPEIIPKLVQSAEELQRFEEMLKAANEQGASSLAFGGEVIDIADAPKVQEQLGIAKAVFSEEKEADASTPAESGGEETKEKVAVILKEAEAINNALLRKAGSACLAVEPDWAAYLRQPFTHQREGIEWMLRLIGAALKEDPADLYRLQGGLLADDMGLGKTYMSLVAVGEYLKGQRLAGQSQKPILVVAPLSLLENWEDEVEKTFASIPFRDVVVLQSGRDLSRFRVKGADRESVQLTSLADEEGLMDEQSIRYALSVGPEAGVHRLDMDRRLVLTTYQTLRDYQFSLCRIDWGMVIFDEAQNIKNPNALQTRAAKGLKADFKLLATGTPVENSLGDFWCLVDTAQPGLLGGWEAYRDTWIKPILAAADDERDVVRTELGRRLRDAVGIFMLRRVKEDQLKGLPKKTIRSGVEQASQDIQEHASELGACMRGPQLQAYDDVLSDYRSRRAIAEDMRGAALSALTQLRTISLHPRLDDEAALYSHDAQHARKLMMESGKLSVTLALLDEIRSKGEKVILFMMTKRLQRVLKLWLDQIYGLDVAIINGDTKAVATKAEDMTRKRLIGAFEARPGFHILIMSPVAAGVGLTVVGANHVIHLERHWNPAKEAQASDRVYRIGQQKDVYIHLPVVTHPQYDSFDVHLDRLLRGKLMLKDAVVTPEAVAESEMIQSMGL

SEQ ID NO: 176 - protein, 708 aa, Pseudomonas aeruginosa MH38; identical to SEQ ID NO: 85

SEQ ID NO: 177 - protein, 254 aa, Pseudomonas aeruginosa MH38; identical to SEQ ID NO: 86

SEQ ID NO: 178 - protein, 670 aa, Pseudomonas aeruginosa MH38; identical to SEQ ID NO: 118

SEQ ID NO: 179 - protein, 1028 aa, Pseudomonas aeruginosa MH38; identical to SEQ ID NO: 151

SEQ ID NO: 180 - protein, 731 aa, Pseudomonas aeruginosa MH38; identical to SEQ ID NO: 152

SEQ ID NO: 181 - protein, 245 aa, Pseudomonas aeruginosa MH38; identical to SEQ ID NO: 102

SEQ ID NO: 182 - protein, 547 aa, Pseudomonas aeruginosa MH38; identical to SEQ ID NO: 103

SEQ ID NO: 183 - protein, 1083 aa, Pseudomonas aeruginosa MH38; identical to SEQ ID NO: 104

SEQ ID NO: 184 - protein, 708 aa, Pseudomonas aeruginosa C2773C; identical to SEQ ID NO: 85

SEQ ID NO: 185 - protein, 254 aa, Pseudomonas aeruginosa C2773C; identical to SEQ ID NO: 86

SEQ ID NO: 186 - protein, 670 aa, Pseudomonas aeruginosa C2773C; identical to SEQ ID NO: 118

SEQ ID NO: 187 - protein, 1013 aa, Pseudomonas aeruginosa C2773C; identical to SEQ ID NO: 147

SEQ ID NO: 188 - protein, 731 aa, Pseudomonas aeruginosa; identical to SEQ ID NO: 152

SEQ ID NO: 189 - protein, 245 aa, Pseudomonas aeruginosa; identical to SEQ ID NO: 102

SEQ ID NO: 190 - protein, 547 aa, Pseudomonas aeruginosa; identical to SEQ ID NO: 103

SEQ ID NO: 191 - protein, 1083 aa, Pseudomonas aeruginosa; identical to SEQ ID NO: 104

SEQ ID NO: 192 - protein, 731 aa, Pseudomonas aeruginosa; identical to SEQ ID NO: 152

SEQ ID NO: 193 - protein, 245 aa, Pseudomonas aeruginosa; identical to SEQ ID NO: 102

SEQ ID NO: 194 - protein, 547 aa, Pseudomonas aeruginosa; identical to SEQ ID NO: 103

SEQ ID NO: 195 - protein, 1083 aa, Pseudomonas aeruginosa; identical to SEQ ID NO: 104

SEQ ID NO: 196 - protein, 708 aa, Pseudomonas aeruginosa; identical to SEQ ID NO: 85

SEQ ID NO: 197 - protein, 254 aa, Pseudomonas aeruginosa; identical to SEQ ID NO: 86

SEQ ID NO: 198 - protein, 670 aa, Pseudomonas aeruginosa; identical to SEQ ID NO: 118

SEQ ID NO: 199 - protein, 1028 aa, Pseudomonas aeruginosa; identical to SEQ ID NO: 151

SEQ ID NO: 200 - protein, 708 aa, Pseudomonas aeruginosa; identical to SEQ ID NO: 85

SEQ ID NO: 201 - protein, 254 aa, Pseudomonas aeruginosa; identical to SEQ ID NO: 86

SEQ ID NO: 202 - protein, 670 aa, Pseudomonas aeruginosa; identical to SEQ ID NO: 118

SEQ ID NO: 203 - protein, 1028 aa, Pseudomonas aeruginosa; identical to SEQ ID NO: 151

SEQ ID NO: 204 - protein, 731 aa, Pseudomonas aeruginosa; identical to SEQ ID NO: 152

SEQ ID NO: 205 - protein, 245 aa, Pseudomonas aeruginosa; identical to SEQ ID NO: 102

SEQ ID NO: 206 - protein, 547 aa, Pseudomonas aeruginosa; identical to SEQ ID NO: 103

SEQ ID NO: 207 - protein, 1083 aa, Pseudomonas aeruginosa; identical to SEQ ID NO: 104

SEQ ID NO: 208 - protein, 708 aa, Pseudomonas aeruginosa; identical to SEQ ID NO: 85

SEQ ID NO: 209 - protein, 254 aa, Pseudomonas aeruginosa; identical to SEQ ID NO: 86

SEQ ID NO: 210 - protein, 670 aa, Pseudomonas aeruginosa; identical to SEQ ID NO: 118

SEQ ID NO: 211 - protein, 1028 aa, Pseudomonas aeruginosa; identical to SEQ ID NO: 151

SEQ ID NO: 212 - protein, 731 aa, Pseudomonas aeruginosa; identical to SEQ ID NO: 152

SEQ ID NO: 213 - protein, 245 aa, Pseudomonas aeruginosa; identical to SEQ ID NO: 102

SEQ ID NO: 214 - protein, 547 aa, Pseudomonas aeruginosa; identical to SEQ ID NO: 103

SEQ ID NO: 215 - protein, 1083 aa, Pseudomonas aeruginosa; identical to SEQ ID NO: 104

SEQ ID NO: 216 - protein, 731 aa, Pseudomonas aeruginosa; identical to SEQ ID NO: 152

SEQ ID NO: 217 - protein, 245 aa, Pseudomonas aeruginosa; identical to SEQ ID NO: 102

SEQ ID NO: 218 - protein, 547 aa, Pseudomonas aeruginosa; identical to SEQ ID NO: 103

SEQ ID NO: 219 - protein, 1083 aa, Pseudomonas aeruginosa; identical to SEQ ID NO: 104

SEQ ID NO: 220 - protein, 708 aa, Pseudomonas aeruginosa; identical to SEQ ID NO: 85

SEQ ID NO: 221 - protein, 254 aa, Pseudomonas aeruginosa; identical to SEQ ID NO: 86

SEQ ID NO: 222 - protein, 670 aa, Pseudomonas aeruginosa; identical to SEQ ID NO: 118

SEQ ID NO: 223 - protein, 1028 aa, Pseudomonas aeruginosa; identical to SEQ ID NO: 151

SEQ ID NO: 224 - protein, 708 aa, Pseudomonas aeruginosa; identical to SEQ ID NO: 85

SEQ ID NO: 225 - protein, 254 aa, Pseudomonas aeruginosa; identical to SEQ ID NO: 86

SEQ ID NO: 226 - protein, 670 aa, Pseudomonas aeruginosa; identical to SEQ ID NO: 118

SEQ ID NO: 227 - protein, 1028 aa, Pseudomonas aeruginosa; identical to SEQ ID NO: 151

SEQ ID NO: 228 - protein, 731 aa, Pseudomonas aeruginosa; identical to SEQ ID NO: 152

SEQ ID NO: 229 - protein, 245 aa, Pseudomonas aeruginosa; identical to SEQ ID NO: 102

SEQ ID NO: 230 - protein, 547 aa, Pseudomonas aeruginosa; identical to SEQ ID NO: 103

SEQ ID NO: 231 - protein, 1083 aa, Pseudomonas aeruginosa; identical to SEQ ID NO: 104

SEQ ID NO: 232 - protein, 708 aa, Pseudomonas aeruginosa; identical to SEQ ID NO: 85

SEQ ID NO: 233 - protein, 254 aa, Pseudomonas aeruginosa; identical to SEQ ID NO: 86

SEQ ID NO: 234 - protein, 670 aa, Pseudomonas aeruginosa; identical to SEQ ID NO: 118

SEQ ID NO: 235 - protein, 1028 aa, Pseudomonas aeruginosa; identical to SEQ ID NO: 151

SEQ ID NO: 236 - protein, 708 aa, Pseudomonas aeruginosa; identical to SEQ ID NO: 85

SEQ ID NO: 237 - protein, 254 aa, Pseudomonas aeruginosa; identical to SEQ ID NO: 86

SEQ ID NO: 238 - protein, 670 aa, Pseudomonas aeruginosa; identical to SEQ ID NO: 118

SEQ ID NO: 239 - protein, 1028 aa, Pseudomonas aeruginosa; identical to SEQ ID NO: 151

SEQ ID NO: 240 - protein, 731 aa, Pseudomonas aeruginosa; identical to SEQ ID NO: 152

SEQ ID NO: 241 - protein, 245 aa, Pseudomonas aeruginosa; identical to SEQ ID NO: 102

SEQ ID NO: 242 - protein, 547 aa, Pseudomonas aeruginosa; identical to SEQ ID NO: 103

SEQ ID NO: 243 - protein, 1083 aa, Pseudomonas aeruginosa; identical to SEQ ID NO: 104

SEQ ID NO: 244 - protein, 731 aa, Pseudomonas aeruginosa; identical to SEQ ID NO: 152

SEQ ID NO: 245 - protein, 245 aa, Pseudomonas aeruginosa; identical to SEQ ID NO: 102

SEQ ID NO: 246 - protein, 547 aa, Pseudomonas aeruginosa; identical to SEQ ID NO: 103

SEQ ID NO: 247 - protein, 1083 aa, Pseudomonas aeruginosa; identical to SEQ ID NO: 104

SEQ ID NO: 248 - protein, 731 aa, Pseudomonas aeruginosa; identical to SEQ ID NO: 152

SEQ ID NO: 249 - protein, 245 aa, Pseudomonas aeruginosa; identical to SEQ ID NO: 102

SEQ ID NO: 250 - protein, 547 aa, Pseudomonas aeruginosa; identical to SEQ ID NO: 103

SEQ ID NO: 251 - protein, 1083 aa, Pseudomonas aeruginosa; identical to SEQ ID NO: 104

SEQ ID NO: 252 - protein, 708 aa, Pseudomonas aeruginosa; identical to SEQ ID NO: 85

SEQ ID NO: 253 - protein, 254 aa, Pseudomonas aeruginosa; identical to SEQ ID NO: 86

SEQ ID NO: 254 - protein, 670 aa, Pseudomonas aeruginosa; identical to SEQ ID NO: 118

SEQ ID NO: 255 - protein, 1028 aa, Pseudomonas aeruginosa; identical to SEQ ID NO: 151

SEQ ID NO: 256 - protein, 708 aa, Pseudomonas aeruginosa; identical to SEQ ID NO: 85

SEQ ID NO: 257 - protein, 254 aa, Pseudomonas aeruginosa; identical to SEQ ID NO: 86

SEQ ID NO: 258 - protein, 670 aa, Pseudomonas aeruginosa; identical to SEQ ID NO: 118

SEQ ID NO: 259 - protein, 1028 aa, Pseudomonas aeruginosa; identical to SEQ ID NO: 151

SEQ ID NO: 260 - protein, 731 aa, Pseudomonas aeruginosa; identical to SEQ ID NO: 152

SEQ ID NO: 261 - protein, 245 aa, Pseudomonas aeruginosa; identical to SEQ ID NO: 102

SEQ ID NO: 262 - protein, 547 aa, Pseudomonas aeruginosa; identical to SEQ ID NO: 103

SEQ ID NO: 263 - protein, 1083 aa, Pseudomonas aeruginosa; identical to SEQ ID NO: 104

SEQ ID NO: 264 - protein, 708 aa, Pseudomonas aeruginosa; identical to SEQ ID NO: 85

SEQ ID NO: 265 - protein, 254 aa, Pseudomonas aeruginosa; identical to SEQ ID NO: 86

SEQ ID NO: 266 - protein, 670 aa, Pseudomonas aeruginosa; identical to SEQ ID NO: 118

SEQ ID NO: 267 - protein, 1028 aa, Pseudomonas aeruginosa; identical to SEQ ID NO: 151

SEQ ID NO: 268 - protein, 731 aa, Pseudomonas aeruginosa; identical to SEQ ID NO: 152

SEQ ID NO: 269 - protein, 245 aa, Pseudomonas aeruginosa; identical to SEQ ID NO: 102

SEQ ID NO: 270 - protein, 547 aa, Pseudomonas aeruginosa; identical to SEQ ID NO: 103

SEQ ID NO: 271 - protein, 1083 aa, Pseudomonas aeruginosa; identical to SEQ ID NO: 104

SEQ ID NO: 272 - protein, 731 aa, Pseudomonas aeruginosa; identical to SEQ ID NO: 152

SEQ ID NO: 273 - protein, 245 aa, Pseudomonas aeruginosa; identical to SEQ ID NO: 102

SEQ ID NO: 274 - protein, 547 aa, Pseudomonas aeruginosa; identical to SEQ ID NO: 103

SEQ ID NO: 275 - protein, 1083 aa, Pseudomonas aeruginosa; identical to SEQ ID NO: 104

SEQ ID NO: 276 - protein, 708 aa, Pseudomonas aeruginosa; identical to SEQ ID NO: 85

SEQ ID NO: 277 - protein, 254 aa, Pseudomonas aeruginosa; identical to SEQ ID NO: 86

SEQ ID NO: 278 - protein, 670 aa, Pseudomonas aeruginosa; identical to SEQ ID NO: 118

SEQ ID NO: 279 - protein, 1028 aa, Pseudomonas aeruginosa; identical to SEQ ID NO: 151

SEQ ID NO: 280 - protein, 731 aa, Pseudomonas aeruginosa; identical to SEQ ID NO: 152

SEQ ID NO: 281 - protein, 245 aa, Pseudomonas aeruginosa; identical to SEQ ID NO: 102

SEQ ID NO: 282 - protein, 547 aa, Pseudomonas aeruginosa; identical to SEQ ID NO: 103

SEQ ID NO: 283 - protein, 1083 aa, Pseudomonas aeruginosa; identical to SEQ ID NO: 104

SEQ ID NO: 284 - protein, 708 aa, Pseudomonas aeruginosa; identical to SEQ ID NO: 85

SEQ ID NO: 285 - protein, 254 aa, Pseudomonas aeruginosa; identical to SEQ ID NO: 86

SEQ ID NO: 286 - protein, 670 aa, Pseudomonas aeruginosa; identical to SEQ ID NO: 118

SEQ ID NO: 287 - protein, 1028 aa, Pseudomonas aeruginosa; identical to SEQ ID NO: 151

SEQ ID NO: 288 - protein, 731 aa, Pseudomonas aeruginosa; identical to SEQ ID NO: 152

SEQ ID NO: 289 - protein, 245 aa, Pseudomonas aeruginosa; identical to SEQ ID NO: 102

SEQ ID NO: 290 - protein, 547 aa, Pseudomonas aeruginosa; identical to SEQ ID NO: 103

SEQ ID NO: 291 - protein, 1083 aa, Pseudomonas aeruginosa; identical to SEQ ID NO: 104

SEQ ID NO: 292 - protein, 708 aa, Pseudomonas aeruginosa; identical to SEQ ID NO: 85

SEQ ID NO: 293 - protein, 254 aa, Pseudomonas aeruginosa; identical to SEQ ID NO: 86

SEQ ID NO: 294 - protein, 670 aa, Pseudomonas aeruginosa; identical to SEQ ID NO: 118

SEQ ID NO: 295 - protein, 1028 aa, Pseudomonas aeruginosa; identical to SEQ ID NO: 151

SEQ ID NO: 296 - protein, 708 aa, Pseudomonas aeruginosa; identical to SEQ ID NO: 85

SEQ ID NO: 297 - protein, 254 aa, Pseudomonas aeruginosa; identical to SEQ ID NO: 86

SEQ ID NO: 298 - protein, 670 aa, Pseudomonas aeruginosa; identical to SEQ ID NO: 118

SEQ ID NO: 299 - protein, 1028 aa, Pseudomonas aeruginosa; identical to SEQ ID NO: 151

SEQ ID NO: 300 - protein, 731 aa, Pseudomonas aeruginosa; identical to SEQ ID NO: 152

SEQ ID NO: 301 - protein, 245 aa, Pseudomonas aeruginosa; identical to SEQ ID NO: 102

SEQ ID NO: 302 - protein, 547 aa, Pseudomonas aeruginosa; identical to SEQ ID NO: 103

SEQ ID NO: 303 - protein, 1083 aa, Pseudomonas aeruginosa; identical to SEQ ID NO: 104

SEQ ID NO: 304 - protein, 708 aa, Pseudomonas aeruginosa; identical to SEQ ID NO: 85

SEQ ID NO: 305 - protein, 254 aa, Pseudomonas aeruginosa; identical to SEQ ID NO: 86

SEQ ID NO: 306 - protein, 670 aa, Pseudomonas aeruginosa; identical to SEQ ID NO: 118

SEQ ID NO: 307 - protein, 1028 aa, Pseudomonas aeruginosa; identical to SEQ ID NO: 151

SEQ ID NO: 308 - protein, 731 aa, Pseudomonas aeruginosa; identical to SEQ ID NO: 152

SEQ ID NO: 309 - protein, 245 aa, Pseudomonas aeruginosa; identical to SEQ ID NO: 102

SEQ ID NO: 310 - protein, 547 aa, Pseudomonas aeruginosa; identical to SEQ ID NO: 103

SEQ ID NO: 311 - protein, 1083 aa, Pseudomonas aeruginosa; identical to SEQ ID NO: 104

SEQ ID NO: 312 - protein, 731 aa, Pseudomonas aeruginosa; identical to SEQ ID NO: 152

SEQ ID NO: 313 - protein, 245 aa, Pseudomonas aeruginosa; identical to SEQ ID NO: 102

SEQ ID NO: 314 - protein, 547 aa, Pseudomonas aeruginosa; identical to SEQ ID NO: 103

SEQ ID NO: 315 - protein, 1083 aa, Pseudomonas aeruginosa; identical to SEQ ID NO: 104

SEQ ID NO: 316 - protein, 708 aa, Pseudomonas aeruginosa; identical to SEQ ID NO: 85

SEQ ID NO: 317 - protein, 254 aa, Pseudomonas aeruginosa; identical to SEQ ID NO: 86

SEQ ID NO: 318 - protein, 670 aa, Pseudomonas aeruginosa; identical to SEQ ID NO: 118

SEQ ID NO: 319 - protein, 1028 aa, Pseudomonas aeruginosa; identical to SEQ ID NO: 151

SEQ ID NO: 320 - protein, 731 aa, Pseudomonas aeruginosa; identical to SEQ ID NO: 152

SEQ ID NO: 321 - protein, 245 aa, Pseudomonas aeruginosa; identical to SEQ ID NO: 102

SEQ ID NO: 322 - protein, 547 aa, Pseudomonas aeruginosa; identical to SEQ ID NO: 103

SEQ ID NO: 323 - protein, 1083 aa, Pseudomonas aeruginosa; identical to SEQ ID NO: 104

SEQ ID NO: 324 - protein, 708 aa, Pseudomonas aeruginosa; identical to SEQ ID NO: 85

SEQ ID NO: 325 - protein, 254 aa, Pseudomonas aeruginosa; identical to SEQ ID NO: 86

SEQ ID NO: 326 - protein, 670 aa, Pseudomonas aeruginosa; identical to SEQ ID NO: 118

SEQ ID NO: 327 - protein, 1028 aa, Pseudomonas aeruginosa; identical to SEQ ID NO: 151

SEQ ID NO: 328 - protein, 708 aa, Pseudomonas aeruginosa; identical to SEQ ID NO: 85

SEQ ID NO: 329 - protein, 254 aa, Pseudomonas aeruginosa; identical to SEQ ID NO: 86

SEQ ID NO: 330 - protein, 670 aa, Pseudomonas aeruginosa; identical to SEQ ID NO: 118

SEQ ID NO: 331 - protein, 1028 aa, Pseudomonas aeruginosa; identical to SEQ ID NO: 151

SEQ ID NO: 332 - protein, 731 aa, Pseudomonas aeruginosa; identical to SEQ ID NO: 152

SEQ ID NO: 333 - protein, 245 aa, Pseudomonas aeruginosa; identical to SEQ ID NO: 102

SEQ ID NO: 334 - protein, 547 aa, Pseudomonas aeruginosa; identical to SEQ ID NO: 103

SEQ ID NO: 335 - protein, 1083 aa, Pseudomonas aeruginosa; identical to SEQ ID NO: 104

SEQ ID NO: 336 - protein, 708 aa, Pseudomonas aeruginosa; identical to SEQ ID NO: 85

SEQ ID NO: 337 - protein, 254 aa, Pseudomonas aeruginosa; identical to SEQ ID NO: 86

SEQ ID NO: 338 - protein, 670 aa, Pseudomonas aeruginosa; identical to SEQ ID NO: 118

SEQ ID NO: 339 - protein, 1028 aa, Pseudomonas aeruginosa; identical to SEQ ID NO: 151

SEQ ID NO: 340 - protein, 731 aa, Pseudomonas aeruginosa; identical to SEQ ID NO: 152

SEQ ID NO: 341 - protein, 245 aa, Pseudomonas aeruginosa; identical to SEQ ID NO: 102

SEQ ID NO: 342 - protein, 547 aa, Pseudomonas aeruginosa
MSRALSSLSDAIARSLQRQQERTADTGLNRFVDLQRANDELTRRFNQVEKALPPPQEKRREALRKFRRDKQLSSTPSEYRPVFAGLADKDDGGLPVLEDDVLFELVHREVSIRSDQQKLSRKDWLALCYSYFFYDHAKPADNSNWRVLRSDIDQGLDAVKRRIGREKEWMRIVQQHRELFGDQAGKQLAEEIFAGRAKDLSALQTIAQVPDSSWLWKRIFDVLLSCIDDLDDDTFVQRLPELTELGQLNNRYMDKVLSACLTRYYRSRFREQSSSLLKQAALEHWGSPQLRSDQNRWLNHVEQPVCAMVMAWFAKEDLEHFFRLLKGEAEVDHSRLFYWLRFANQMSYTRIVMGNDAWNDRGSDFVAFREKNKGRLSQLTGASRHVSAVVMQIGQFFFVEFSGTGHACYVYKADQAPFNPDRIKLDLTTELKQQGRELKRMSHSPAPRRPNLVEGWLEKFDTELRELGIVPQSPSGHNEPRKAGSQSSIEIQVAAKLRHVNYQLMDNRSKGGALMVKLARDDARARVALARLGFKEMNKNPLTFWRS

SEQ ID NO: 343 - protein, 1083 aa, Pseudomonas aeruginosa; identical to SEQ ID NO: 104

SEQ ID NO: 344 - protein, 731 aa, Pseudomonas aeruginosa; identical to SEQ ID NO: 152

SEQ ID NO: 345 - protein, 245 aa, Pseudomonas aeruginosa; identical to SEQ ID NO: 102

SEQ ID NO: 346 - protein, 547 aa, Pseudomonas aeruginosa; identical to SEQ ID NO: 103

SEQ ID NO: 347 - protein, 1083 aa, Pseudomonas aeruginosa; identical to SEQ ID NO: 104

SEQ ID NO: 348 - protein, 708 aa, Pseudomonas aeruginosa; identical to SEQ ID NO: 85

SEQ ID NO: 349 - protein, 254 aa, Pseudomonas aeruginosa; identical to SEQ ID NO: 86

SEQ ID NO: 350 - protein, 670 aa, Pseudomonas aeruginosa; identical to SEQ ID NO: 118

SEQ ID NO: 351 - protein, 1028 aa, Pseudomonas aeruginosa; identical to SEQ ID NO: 151

SEQ ID NO: 352 - protein, 731 aa, Pseudomonas aeruginosa; identical to SEQ ID NO: 152

SEQ ID NO: 353 - protein, 245 aa, Pseudomonas aeruginosa; identical to SEQ ID NO: 102

SEQ ID NO: 354 - protein, 547 aa, Pseudomonas aeruginosa; identical to SEQ ID NO: 103

SEQ ID NO: 355 - protein, 1083 aa, Pseudomonas aeruginosa; identical to SEQ ID NO: 104

SEQ ID NO: 356 - protein, 708 aa, Pseudomonas aeruginosa; identical to SEQ ID NO: 85

SEQ ID NO: 357 - protein, 254 aa, Pseudomonas aeruginosa; identical to SEQ ID NO: 86

SEQ ID NO: 358 - protein, 670 aa, Pseudomonas aeruginosa; identical to SEQ ID NO: 118

SEQ ID NO: 359 - protein, 1028 aa, Pseudomonas aeruginosa; identical to SEQ ID NO: 151

SEQ ID NO: 360 - protein, 731 aa, Pseudomonas aeruginosa; identical to SEQ ID NO: 152

SEQ ID NO: 361 - protein, 245 aa, Pseudomonas aeruginosa; identical to SEQ ID NO: 102

SEQ ID NO: 362 - protein, 547 aa, Pseudomonas aeruginosa; identical to SEQ ID NO: 103

SEQ ID NO: 363 - protein, 708 aa, Pseudomonas aeruginosa; identical to SEQ ID NO: 85

SEQ ID NO: 364 - protein, 254 aa, Pseudomonas aeruginosa; identical to SEQ ID NO: 86

SEQ ID NO: 365 - protein, 670 aa, Pseudomonas aeruginosa; identical to SEQ ID NO: 118

SEQ ID NO: 366 - protein, 1028 aa, Pseudomonas aeruginosa; identical to SEQ ID NO: 151

SEQ ID NO: 367 - protein, 708 aa, Pseudomonas aeruginosa; identical to SEQ ID NO: 85

SEQ ID NO: 368 - protein, 254 aa, Pseudomonas aeruginosa; identical to SEQ ID NO: 86

SEQ ID NO: 369 - protein, 670 aa, Pseudomonas aeruginosa; identical to SEQ ID NO: 118

SEQ ID NO: 370 - protein, 1028 aa, Pseudomonas aeruginosa; identical to SEQ ID NO: 151

SEQ ID NO: 371 - protein, 731 aa, Pseudomonas aeruginosa; identical to SEQ ID NO: 152

SEQ ID NO: 372 - protein, 245 aa, Pseudomonas aeruginosa; identical to SEQ ID NO: 102

SEQ ID NO: 373 - protein, 547 aa, Pseudomonas aeruginosa; identical to SEQ ID NO: 103

SEQ ID NO: 374 - protein, 1083 aa, Pseudomonas aeruginosa; identical to SEQ ID NO: 104

SEQ ID NO: 375 - protein, 708 aa, Pseudomonas aeruginosa; identical to SEQ ID NO: 85

SEQ ID NO: 376 - protein, 254 aa, Pseudomonas aeruginosa; identical to SEQ ID NO: 86

SEQ ID NO: 377 - protein, 670 aa, Pseudomonas aeruginosa; identical to SEQ ID NO: 118

SEQ ID NO: 378 - protein, 1028 aa, Pseudomonas aeruginosa; identical to SEQ ID NO: 151

SEQ ID NO: 379 - protein, 731 aa, Pseudomonas aeruginosa; identical to SEQ ID NO: 152

SEQ ID NO: 380 - protein, 245 aa, Pseudomonas aeruginosa; identical to SEQ ID NO: 102

SEQ ID NO: 381 - protein, 547 aa, Pseudomonas aeruginosa; identical to SEQ ID NO: 103

SEQ ID NO: 382 - protein, 1083 aa, Pseudomonas aeruginosa; identical to SEQ ID NO: 104

SEQ ID NO: 383 - protein, 731 aa, Pseudomonas aeruginosa; identical to SEQ ID NO: 152

SEQ ID NO: 384 - protein, 245 aa, Pseudomonas aeruginosa; identical to SEQ ID NO: 102

SEQ ID NO: 385 - protein, 547 aa, Pseudomonas aeruginosa; identical to SEQ ID NO: 103

SEQ ID NO: 386 - protein, 1083 aa, Pseudomonas aeruginosa; identical to SEQ ID NO: 104

SEQ ID NO: 387 - protein, 708 aa, Pseudomonas aeruginosa; identical to SEQ ID NO: 85

SEQ ID NO: 388 - protein, 254 aa, Pseudomonas aeruginosa; identical to SEQ ID NO: 86

SEQ ID NO: 389 - protein, 670 aa, Pseudomonas aeruginosa; identical to SEQ ID NO: 118

SEQ ID NO: 390 - protein, 1028 aa, Pseudomonas aeruginosa; identical to SEQ ID NO: 151

SEQ ID NO: 391 - protein, 708 aa, Pseudomonas aeruginosa; identical to SEQ ID NO: 85

SEQ ID NO: 392 - protein, 254 aa, Pseudomonas aeruginosa; identical to SEQ ID NO: 86

SEQ ID NO: 393 - protein, 670 aa, Pseudomonas aeruginosa; identical to SEQ ID NO: 118

SEQ ID NO: 394 - protein, 1028 aa, Pseudomonas aeruginosa; identical to SEQ ID NO: 151

SEQ ID NO: 395 - protein, 731 aa, Pseudomonas aeruginosa; identical to SEQ ID NO: 152

SEQ ID NO: 396 - protein, 245 aa, Pseudomonas aeruginosa; identical to SEQ ID NO: 102

SEQ ID NO: 397 - protein, 547 aa, Pseudomonas aeruginosa; identical to SEQ ID NO: 103

SEQ ID NO: 398 - protein, 1083 aa, Pseudomonas aeruginosa; identical to SEQ ID NO: 104

SEQ ID NO: 399 - protein, 708 aa, Pseudomonas aeruginosa; identical to SEQ ID NO: 85

SEQ ID NO: 400 - protein, 254 aa, Pseudomonas aeruginosa; identical to SEQ ID NO: 86

SEQ ID NO: 401 - protein, 670 aa, Pseudomonas aeruginosa; identical to SEQ ID NO: 118

SEQ ID NO: 402 - protein, 1028 aa, Pseudomonas aeruginosa; identical to SEQ ID NO: 151

SEQ ID NO: 403 - protein, 731 aa, Pseudomonas aeruginosa; identical to SEQ ID NO: 152

SEQ ID NO: 404 - protein, 245 aa, Pseudomonas aeruginosa; identical to SEQ ID NO: 102

SEQ ID NO: 405 - protein, 547 aa, Pseudomonas aeruginosa; identical to SEQ ID NO: 103

SEQ ID NO: 406 - protein, 1083 aa, Pseudomonas aeruginosa; identical to SEQ ID NO: 104

SEQ ID NO: 407 - protein, 731 aa, Pseudomonas aeruginosa; identical to SEQ ID NO: 152

SEQ ID NO: 408 - protein, 245 aa, Pseudomonas aeruginosa; identical to SEQ ID NO: 102

SEQ ID NO: 409 - protein, 547 aa, Pseudomonas aeruginosa; identical to SEQ ID NO: 103

SEQ ID NO: 410 - protein, 1083 aa, Pseudomonas aeruginosa; identical to SEQ ID NO: 104

SEQ ID NO: 411 - protein, 708 aa, Pseudomonas aeruginosa; identical to SEQ ID NO: 85

SEQ ID NO: 412 - protein, 254 aa, Pseudomonas aeruginosa; identical to SEQ ID NO: 86

SEQ ID NO: 413 - protein, 670 aa, Pseudomonas aeruginosa; identical to SEQ ID NO: 118

SEQ ID NO: 414 - protein, 1028 aa, Pseudomonas aeruginosa; identical to SEQ ID NO: 151

SEQ ID NO: 415 - protein, 731 aa, Pseudomonas aeruginosa; identical to SEQ ID NO: 152

SEQ ID NO: 416 - protein, 245 aa, Pseudomonas aeruginosa; identical to SEQ ID NO: 102

SEQ ID NO: 417 - protein, 547 aa, Pseudomonas aeruginosa; identical to SEQ ID NO: 103

SEQ ID NO: 418 - protein, 1083 aa, Pseudomonas aeruginosa; identical to SEQ ID NO: 104

SEQ ID NO: 419 - protein, 708 aa, Pseudomonas aeruginosa; identical to SEQ ID NO: 85

SEQ ID NO: 420 - protein, 254 aa, Pseudomonas aeruginosa; identical to SEQ ID NO: 86

SEQ ID NO: 421 - protein, 670 aa, Pseudomonas aeruginosa; identical to SEQ ID NO: 118

SEQ ID NO: 422 - protein, 1028 aa, Pseudomonas aeruginosa; identical to SEQ ID NO: 151

SEQ ID NO: 423 - protein, 731 aa, Pseudomonas aeruginosa; identical to SEQ ID NO: 152

SEQ ID NO: 424 - protein, 245 aa, Pseudomonas aeruginosa; identical to SEQ ID NO: 102

SEQ ID NO: 425 - protein, 547 aa, Pseudomonas aeruginosa; identical to SEQ ID NO: 103

SEQ ID NO: 426 - protein, 1083 aa, Pseudomonas aeruginosa; identical to SEQ ID NO: 104

SEQ ID NO: 427 - protein, 708 aa, Pseudomonas aeruginosa; identical to SEQ ID NO: 85

SEQ ID NO: 428 - protein, 254 aa, Pseudomonas aeruginosa; identical to SEQ ID NO: 86

SEQ ID NO: 429 - protein, 670 aa, Pseudomonas aeruginosa; identical to SEQ ID NO: 118

SEQ ID NO: 430 - protein, 1028 aa, Pseudomonas aeruginosa; identical to SEQ ID NO: 151

SEQ ID NO: 431 - protein, 708 aa, Pseudomonas aeruginosa; identical to SEQ ID NO: 85

SEQ ID NO: 432 - protein, 254 aa, Pseudomonas aeruginosa; identical to SEQ ID NO: 86

SEQ ID NO: 433 - protein, 670 aa, Pseudomonas aeruginosa; identical to SEQ ID NO: 118

SEQ ID NO: 434 - protein, 1028 aa, Pseudomonas aeruginosa; identical to SEQ ID NO: 151

SEQ ID NO: 435 - protein, 731 aa, Pseudomonas aeruginosa; identical to SEQ ID NO: 152

SEQ ID NO: 436 - protein, 245 aa, Pseudomonas aeruginosa; identical to SEQ ID NO: 102

SEQ ID NO: 437 - protein, 547 aa, Pseudomonas aeruginosa; identical to SEQ ID NO: 103

SEQ ID NO: 438 - protein, 1083 aa, Pseudomonas aeruginosa; identical to SEQ ID NO: 104

SEQ ID NO: 439 - protein, 731 aa, Pseudomonas aeruginosa; identical to SEQ ID NO: 152

SEQ ID NO: 440 - protein, 245 aa, Pseudomonas aeruginosa; identical to SEQ ID NO: 102

SEQ ID NO: 441 - protein, 547 aa, Pseudomonas aeruginosa; identical to SEQ ID NO: 103

SEQ ID NO: 442 - protein, 1083 aa, Pseudomonas aeruginosa; identical to SEQ ID NO: 104

SEQ ID NO: 443 - protein, 708 aa, Pseudomonas aeruginosa; identical to SEQ ID NO: 85

SEQ ID NO: 444 - protein, 254 aa, Pseudomonas aeruginosa; identical to SEQ ID NO: 86

SEQ ID NO: 445 - protein, 670 aa, Pseudomonas aeruginosa; identical to SEQ ID NO: 118

SEQ ID NO: 446 - protein, 1028 aa, Pseudomonas aeruginosa; identical to SEQ ID NO: 151

SEQ ID NO: 447 - protein, 731 aa, Pseudomonas aeruginosa; identical to SEQ ID NO: 152

SEQ ID NO: 448 - protein, 245 aa, Pseudomonas aeruginosa; identical to SEQ ID NO: 102

SEQ ID NO: 449 - protein, 547 aa, Pseudomonas aeruginosa; identical to SEQ ID NO: 103

SEQ ID NO: 450 - protein, 1083 aa, Pseudomonas aeruginosa; identical to SEQ ID NO: 104

SEQ ID NO: 451 - protein, 708 aa, Pseudomonas aeruginosa; identical to SEQ ID NO: 85

SEQ ID NO: 452 - protein, 254 aa, Pseudomonas aeruginosa; identical to SEQ ID NO: 86

SEQ ID NO: 453 - protein, 670 aa, Pseudomonas aeruginosa; identical to SEQ ID NO: 118

SEQ ID NO: 454 - protein, 1028 aa, Pseudomonas aeruginosa; identical to SEQ ID NO: 151

SEQ ID NO: 455 - protein, 708 aa, Pseudomonas aeruginosa; identical to SEQ ID NO: 85

SEQ ID NO: 456 - protein, 254 aa, Pseudomonas aeruginosa; identical to SEQ ID NO: 86

SEQ ID NO: 457 - protein, 670 aa, Pseudomonas aeruginosa; identical to SEQ ID NO: 118

SEQ ID NO: 458 - protein, 1028 aa, Pseudomonas aeruginosa; identical to SEQ ID NO: 151

SEQ ID NO: 459 - protein, 731 aa, Pseudomonas aeruginosa; identical to SEQ ID NO: 152

SEQ ID NO: 460 - protein, 245 aa, Pseudomonas aeruginosa; identical to SEQ ID NO: 102

SEQ ID NO: 461 - protein, 547 aa, Pseudomonas aeruginosa; identical to SEQ ID NO: 103

SEQ ID NO: 462 - protein, 1083 aa, Pseudomonas aeruginosa; identical to SEQ ID NO: 104

SEQ ID NO: 463 - protein, 708 aa, Pseudomonas aeruginosa; identical to SEQ ID NO: 85

SEQ ID NO: 464 - protein, 254 aa, Pseudomonas aeruginosa; identical to SEQ ID NO: 86

SEQ ID NO: 465 - protein, 670 aa, Pseudomonas aeruginosa; identical to SEQ ID NO: 118

SEQ ID NO: 466 - protein, 1028 aa, Pseudomonas aeruginosa; identical to SEQ ID NO: 151

SEQ ID NO: 467 - protein, 731 aa, Pseudomonas aeruginosa; identical to SEQ ID NO: 152

SEQ ID NO: 468 - protein, 245 aa, Pseudomonas aeruginosa; identical to SEQ ID NO: 102

SEQ ID NO: 469 - protein, 547 aa, Pseudomonas aeruginosa; identical to SEQ ID NO: 103

SEQ ID NO: 470 - protein, 1083 aa, Pseudomonas aeruginosa; identical to SEQ ID NO: 104

SEQ ID NO: 471 - protein, 731 aa, Pseudomonas aeruginosa; identical to SEQ ID NO: 152

SEQ ID NO: 472 - protein, 245 aa, Pseudomonas aeruginosa; identical to SEQ ID NO: 102

SEQ ID NO: 473 - protein, 547 aa, Pseudomonas aeruginosa; identical to SEQ ID NO: 103

SEQ ID NO: 474 - protein, 1083 aa, Pseudomonas aeruginosa; identical to SEQ ID NO: 104

SEQ ID NO: 475 - protein, 708 aa, Pseudomonas aeruginosa; identical to SEQ ID NO: 85

SEQ ID NO: 476 - protein, 254 aa, Pseudomonas aeruginosa; identical to SEQ ID NO: 86

SEQ ID NO: 477 - protein, 670 aa, Pseudomonas aeruginosa; identical to SEQ ID NO: 118

SEQ ID NO: 478 - protein, 1028 aa, Pseudomonas aeruginosa; identical to SEQ ID NO: 151

SEQ ID NO: 479 - protein, 708 aa, Pseudomonas aeruginosa; identical to SEQ ID NO: 85

SEQ ID NO: 480 - protein, 254 aa, Pseudomonas aeruginosa; identical to SEQ ID NO: 86

SEQ ID NO: 481 - protein, 670 aa, Pseudomonas aeruginosa; identical to SEQ ID NO: 118

SEQ ID NO: 482 - protein, 1028 aa, Pseudomonas aeruginosa; identical to SEQ ID NO: 151

SEQ ID NO: 483 - protein, 731 aa, Pseudomonas aeruginosa; identical to SEQ ID NO: 152

SEQ ID NO: 484 - protein, 245 aa, Pseudomonas aeruginosa; identical to SEQ ID NO: 102

SEQ ID NO: 485 - protein, 547 aa, Pseudomonas aeruginosa; identical to SEQ ID NO: 103

SEQ ID NO: 486 - protein, 1083 aa, Pseudomonas aeruginosa; identical to SEQ ID NO: 104

SEQ ID NO: 487 - protein, 731 aa, Pseudomonas aeruginosa; identical to SEQ ID NO: 152

SEQ ID NO: 488 - protein, 245 aa, Pseudomonas aeruginosa; identical to SEQ ID NO: 102

SEQ ID NO: 489 - protein, 547 aa, Pseudomonas aeruginosa; identical to SEQ ID NO: 103

SEQ ID NO: 490 - protein, 1083 aa, Pseudomonas aeruginosa; identical to SEQ ID NO: 104

SEQ ID NO: 491 - protein, 708 aa, Pseudomonas aeruginosa; identical to SEQ ID NO: 85

SEQ ID NO: 492 - protein, 254 aa, Pseudomonas aeruginosa; identical to SEQ ID NO: 86

SEQ ID NO: 493 - protein, 670 aa, Pseudomonas aeruginosa; identical to SEQ ID NO: 118

SEQ ID NO: 494 - protein, 1028 aa, Pseudomonas aeruginosa; identical to SEQ ID NO: 151

SEQ ID NO: 495 - protein, 731 aa, Pseudomonas aeruginosa; identical to SEQ ID NO: 152

SEQ ID NO: 496 - protein, 245 aa, Pseudomonas aeruginosa; identical to SEQ ID NO: 102

SEQ ID NO: 497 - protein, 547 aa, Pseudomonas aeruginosa; identical to SEQ ID NO: 103

SEQ ID NO: 498 - protein, 1083 aa, Pseudomonas aeruginosa; identical to SEQ ID NO: 104

SEQ ID NO: 499 - protein, 708 aa, Pseudomonas aeruginosa; identical to SEQ ID NO: 85

SEQ ID NO: 500 - protein, 254 aa, Pseudomonas aeruginosa; identical to SEQ ID NO: 86

SEQ ID NO: 501 - protein, 670 aa, Pseudomonas aeruginosa; identical to SEQ ID NO: 118

SEQ ID NO: 502 - protein, 1028 aa, Pseudomonas aeruginosa; identical to SEQ ID NO: 151

SEQ ID NO: 503 - protein, 708 aa, Pseudomonas aeruginosa; identical to SEQ ID NO: 85

SEQ ID NO: 504 - protein, 254 aa, Pseudomonas aeruginosa; identical to SEQ ID NO: 86

SEQ ID NO: 505 - protein, 670 aa, Pseudomonas aeruginosa; identical to SEQ ID NO: 118

SEQ ID NO: 506 - protein, 1028 aa, Pseudomonas aeruginosa; identical to SEQ ID NO: 151

SEQ ID NO: 507 - protein, 731 aa, Pseudomonas aeruginosa; identical to SEQ ID NO: 152

SEQ ID NO: 508 - protein, 245 aa, Pseudomonas aeruginosa; identical to SEQ ID NO: 102

SEQ ID NO: 509 - protein, 547 aa, Pseudomonas aeruginosa; identical to SEQ ID NO: 103

SEQ ID NO: 510 - protein, 1083 aa, Pseudomonas aeruginosa; identical to SEQ ID NO: 104

SEQ ID NO: 511 - protein, 708 aa, Pseudomonas aeruginosa; identical to SEQ ID NO: 85

SEQ ID NO: 512 - protein, 254 aa, Pseudomonas aeruginosa; identical to SEQ ID NO: 86

SEQ ID NO: 513 - protein, 670 aa, Pseudomonas aeruginosa; identical to SEQ ID NO: 118

SEQ ID NO: 514 - protein, 1028 aa, Pseudomonas aeruginosa; identical to SEQ ID NO: 151

SEQ ID NO: 515 - protein, 731 aa, Pseudomonas aeruginosa; identical to SEQ ID NO: 152

SEQ ID NO: 516 - protein, 245 aa, Pseudomonas aeruginosa; identical to SEQ ID NO: 102

SEQ ID NO: 517 - protein, 547 aa, Pseudomonas aeruginosa; identical to SEQ ID NO: 103

SEQ ID NO: 518 - protein, 1083 aa, Pseudomonas aeruginosa; identical to SEQ ID NO: 104

SEQ ID NO: 519 - protein, 731 aa, Pseudomonas aeruginosa; identical to SEQ ID NO: 152

SEQ ID NO: 520 - protein, 245 aa, Pseudomonas aeruginosa; identical to SEQ ID NO: 102

SEQ ID NO: 521 - protein, 547 aa, Pseudomonas aeruginosa; identical to SEQ ID NO: 103

SEQ ID NO: 522 - protein, 1083 aa, Pseudomonas aeruginosa; identical to SEQ ID NO: 104

SEQ ID NO: 523 - protein, 708 aa, Pseudomonas aeruginosa; identical to SEQ ID NO: 85

SEQ ID NO: 524 - protein, 254 aa, Pseudomonas aeruginosa; identical to SEQ ID NO: 86

SEQ ID NO: 525 - protein, 670 aa, Pseudomonas aeruginosa; identical to SEQ ID NO: 118

SEQ ID NO: 526 - protein, 1028 aa, Pseudomonas aeruginosa; identical to SEQ ID NO: 151

SEQ ID NO: 527 - protein, 708 aa, Pseudomonas aeruginosa; identical to SEQ ID NO: 85

SEQ ID NO: 528 - protein, 254 aa, Pseudomonas aeruginosa; identical to SEQ ID NO: 86

SEQ ID NO: 529 - protein, 670 aa, Pseudomonas aeruginosa; identical to SEQ ID NO: 118

SEQ ID NO: 530 - protein, 1028 aa, Pseudomonas aeruginosa; identical to SEQ ID NO: 151

SEQ ID NO: 531 - protein, 731 aa, Pseudomonas aeruginosa; identical to SEQ ID NO: 152

SEQ ID NO: 532 - protein, 245 aa, Pseudomonas aeruginosa; identical to SEQ ID NO: 102

SEQ ID NO: 533 - protein, 547 aa, Pseudomonas aeruginosa; identical to SEQ ID NO: 103

SEQ ID NO: 534 - protein, 1083 aa, Pseudomonas aeruginosa; identical to SEQ ID NO: 104

SEQ ID NO: 535 - protein, 731 aa, Pseudomonas aeruginosa; identical to SEQ ID NO: 152

SEQ ID NO: 536 - protein, 245 aa, Pseudomonas aeruginosa; identical to SEQ ID NO: 102

SEQ ID NO: 537 - protein, 547 aa, Pseudomonas aeruginosa; identical to SEQ ID NO: 103

SEQ ID NO: 538 - protein, 1083 aa, Pseudomonas aeruginosa; identical to SEQ ID NO: 104

SEQ ID NO: 539 - protein, 708 aa, Pseudomonas aeruginosa; identical to SEQ ID NO: 85

SEQ ID NO: 540 - protein, 254 aa, Pseudomonas aeruginosa; identical to SEQ ID NO: 86

SEQ ID NO: 541 - protein, 670 aa, Pseudomonas aeruginosa; identical to SEQ ID NO: 118

SEQ ID NO: 542 - protein, 1028 aa, Pseudomonas aeruginosa; identical to SEQ ID NO: 151

SEQ ID NO: 543 - protein, 731 aa, Pseudomonas aeruginosa; identical to SEQ ID NO: 152

SEQ ID NO: 544 - protein, 245 aa, Pseudomonas aeruginosa; identical to SEQ ID NO: 102

SEQ ID NO: 545 - protein, 547 aa, Pseudomonas aeruginosa; identical to SEQ ID NO: 103

SEQ ID NO: 546 - protein, 1083 aa, Pseudomonas aeruginosa; identical to SEQ ID NO: 104

SEQ ID NO: 547 - protein, 708 aa, Pseudomonas aeruginosa; identical to SEQ ID NO: 85

SEQ ID NO: 548 - protein, 254 aa, Pseudomonas aeruginosa; identical to SEQ ID NO: 86

SEQ ID NO: 549 - protein, 670 aa, Pseudomonas aeruginosa; identical to SEQ ID NO: 118

SEQ ID NO: 550 - protein, 1028 aa, Pseudomonas aeruginosa; identical to SEQ ID NO: 151

SEQ ID NO: 551 - protein, 731 aa, Pseudomonas aeruginosa; identical to SEQ ID NO: 152

SEQ ID NO: 552 - protein, 245 aa, Pseudomonas aeruginosa; identical to SEQ ID NO: 102

SEQ ID NO: 553 - protein, 547 aa, Pseudomonas aeruginosa; identical to SEQ ID NO: 103

SEQ ID NO: 554 - protein, 1083 aa, Pseudomonas aeruginosa; identical to SEQ ID NO: 104

SEQ ID NO: 555 - protein, 708 aa, Pseudomonas aeruginosa; identical to SEQ ID NO: 85

SEQ ID NO: 556 - protein, 254 aa, Pseudomonas aeruginosa; identical to SEQ ID NO: 86

SEQ ID NO: 557 - protein, 670 aa, Pseudomonas aeruginosa; identical to SEQ ID NO: 118

SEQ ID NO: 558 - protein, 1028 aa, Pseudomonas aeruginosa; identical to SEQ ID NO: 151

SEQ ID NO: 559 - protein, 731 aa, Pseudomonas aeruginosa; identical to SEQ ID NO: 152

SEQ ID NO: 560 - protein, 245 aa, Pseudomonas aeruginosa; identical to SEQ ID NO: 102

SEQ ID NO: 561 - protein, 547 aa, Pseudomonas aeruginosa; identical to SEQ ID NO: 103

SEQ ID NO: 562 - protein, 1083 aa, Pseudomonas aeruginosa; identical to SEQ ID NO: 104

SEQ ID NO: 563 - protein, 708 aa, Pseudomonas aeruginosa; identical to SEQ ID NO: 85

SEQ ID NO: 564 - protein, 254 aa, Pseudomonas aeruginosa; identical to SEQ ID NO: 86

SEQ ID NO: 565 - protein, 670 aa, Pseudomonas aeruginosa; identical to SEQ ID NO: 118

SEQ ID NO: 566 - protein, 1028 aa, Pseudomonas aeruginosa; identical to SEQ ID NO: 151

SEQ ID NO: 567 - protein, 731 aa, Pseudomonas aeruginosa; identical to SEQ ID NO: 152

SEQ ID NO: 568 - protein, 245 aa, Pseudomonas aeruginosa; identical to SEQ ID NO: 102

SEQ ID NO: 569 - protein, 547 aa, Pseudomonas aeruginosa; identical to SEQ ID NO: 103

SEQ ID NO: 570 - protein, 1083 aa, Pseudomonas aeruginosa; identical to SEQ ID NO: 104

SEQ ID NO: 571 - protein, 708 aa, Pseudomonas aeruginosa; identical to SEQ ID NO: 85

SEQ ID NO: 572 - protein, 254 aa, Pseudomonas aeruginosa; identical to SEQ ID NO: 86

SEQ ID NO: 573 - protein, 670 aa, Pseudomonas aeruginosa; identical to SEQ ID NO: 118

SEQ ID NO: 574 - protein, 1028 aa, Pseudomonas aeruginosa; identical to SEQ ID NO: 151

SEQ ID NO: 575 - protein, 731 aa, Pseudomonas aeruginosa; identical to SEQ ID NO: 152

SEQ ID NO: 576 - protein, 245 aa, Pseudomonas aeruginosa; identical to SEQ ID NO: 102

SEQ ID NO: 577 - protein, 547 aa, Pseudomonas aeruginosa; identical to SEQ ID NO: 103

SEQ ID NO: 578 - protein, 1083 aa, Pseudomonas aeruginosa; identical to SEQ ID NO: 104

SEQ ID NO: 579 - protein, 708 aa, Pseudomonas aeruginosa; identical to SEQ ID NO: 85

SEQ ID NO: 580 - protein, 254 aa, Pseudomonas aeruginosa; identical to SEQ ID NO: 86

SEQ ID NO: 581 - protein, 670 aa, Pseudomonas aeruginosa; identical to SEQ ID NO: 118

SEQ ID NO: 582 - protein, 1028 aa, Pseudomonas aeruginosa; identical to SEQ ID NO: 151

SEQ ID NO: 583 - protein, 708 aa, Pseudomonas aeruginosa; identical to SEQ ID NO: 85

SEQ ID NO: 584 - protein, 254 aa, Pseudomonas aeruginosa; identical to SEQ ID NO: 86

SEQ ID NO: 585 - protein, 670 aa, Pseudomonas aeruginosa; identical to SEQ ID NO: 118

SEQ ID NO: 586 - protein, 1028 aa, Pseudomonas aeruginosa; identical to SEQ ID NO: 151

SEQ ID NO: 587 - protein, 731 aa, Pseudomonas aeruginosa; identical to SEQ ID NO: 152

SEQ ID NO: 588 - protein, 547 aa, Pseudomonas aeruginosa; identical to SEQ ID NO: 103

SEQ ID NO: 589 - protein, 1083 aa, Pseudomonas aeruginosa; identical to SEQ ID NO: 104

SEQ ID NO: 590 - protein, 731 aa, Pseudomonas aeruginosa; identical to SEQ ID NO: 152

SEQ ID NO: 591 - protein, 245 aa, Pseudomonas aeruginosa; identical to SEQ ID NO: 102

SEQ ID NO: 592 - protein, 547 aa, Pseudomonas aeruginosa; identical to SEQ ID NO: 103

SEQ ID NO: 593 - protein, 1083 aa, Pseudomonas aeruginosa; identical to SEQ ID NO: 104

SEQ ID NO: 594 - protein, 708 aa, Pseudomonas aeruginosa; identical to SEQ ID NO: 85

SEQ ID NO: 595 - protein, 254 aa, Pseudomonas aeruginosa; identical to SEQ ID NO: 86

SEQ ID NO: 596 - protein, 670 aa, Pseudomonas aeruginosa; identical to SEQ ID NO: 118

SEQ ID NO: 597 - protein, 1028 aa, Pseudomonas aeruginosa; identical to SEQ ID NO: 151

SEQ ID NO: 598 - protein, 731 aa, Pseudomonas aeruginosa; identical to SEQ ID NO: 152

SEQ ID NO: 599 - protein, 245 aa, Pseudomonas aeruginosa; identical to SEQ ID NO: 102

SEQ ID NO: 600 - protein, 547 aa, Pseudomonas aeruginosa; identical to SEQ ID NO: 103

SEQ ID NO: 601 - protein, 1083 aa, Pseudomonas aeruginosa; identical to SEQ ID NO: 104

SEQ ID NO: 602 - protein, 708 aa, Pseudomonas aeruginosa; identical to SEQ ID NO: 85

SEQ ID NO: 603 - protein, 254 aa, Pseudomonas aeruginosa; identical to SEQ ID NO: 86

SEQ ID NO: 604 - protein, 670 aa, Pseudomonas aeruginosa; identical to SEQ ID NO: 118

SEQ ID NO: 605 - protein, 1028 aa, Pseudomonas aeruginosa; identical to SEQ ID NO: 151

SEQ ID NO: 606 - protein, 731 aa, Pseudomonas aeruginosa; identical to SEQ ID NO: 152

SEQ ID NO: 607 - protein, 245 aa, Pseudomonas aeruginosa; identical to SEQ ID NO: 102

SEQ ID NO: 608 - protein, 547 aa, Pseudomonas aeruginosa; identical to SEQ ID NO: 103

SEQ ID NO: 609 - protein, 1083 aa, Pseudomonas aeruginosa; identical to SEQ ID NO: 104

SEQ ID NO: 610 - protein, 708 aa, Pseudomonas aeruginosa; identical to SEQ ID NO: 85

SEQ ID NO: 611 - protein, 254 aa, Pseudomonas aeruginosa; identical to SEQ ID NO: 86

SEQ ID NO: 612 - protein, 670 aa, Pseudomonas aeruginosa; identical to SEQ ID NO: 118

SEQ ID NO: 613 - protein, 1028 aa, Pseudomonas aeruginosa; identical to SEQ ID NO: 151

SEQ ID NO: 614 - protein, 708 aa, Pseudomonas aeruginosa; identical to SEQ ID NO: 85

SEQ ID NO: 615 - protein, 254 aa, Pseudomonas aeruginosa; identical to SEQ ID NO: 86

SEQ ID NO: 616 - protein, 670 aa, Pseudomonas aeruginosa; identical to SEQ ID NO: 118

SEQ ID NO: 617 - protein, 1028 aa, Pseudomonas aeruginosa; identical to SEQ ID NO: 151

SEQ ID NO: 618 - protein, 731 aa, Pseudomonas aeruginosa; identical to SEQ ID NO: 152

SEQ ID NO: 619 - protein, 245 aa, Pseudomonas aeruginosa; identical to SEQ ID NO: 102

SEQ ID NO: 620 - protein, 547 aa, Pseudomonas aeruginosa; identical to SEQ ID NO: 103

SEQ ID NO: 621 - protein, 1083 aa, Pseudomonas aeruginosa; identical to SEQ ID NO: 104

SEQ ID NO: 622 - protein, 731 aa, Pseudomonas aeruginosa; identical to SEQ ID NO: 152

SEQ ID NO: 623 - protein, 245 aa, Pseudomonas aeruginosa; identical to SEQ ID NO: 102

SEQ ID NO: 624 - protein, 547 aa, Pseudomonas aeruginosa; identical to SEQ ID NO: 103

SEQ ID NO: 625 - protein, 1083 aa, Pseudomonas aeruginosa; identical to SEQ ID NO: 104

SEQ ID NO: 626 - protein, 708 aa, Pseudomonas aeruginosa; identical to SEQ ID NO: 85

SEQ ID NO: 627 - protein, 254 aa, Pseudomonas aeruginosa; identical to SEQ ID NO: 86

SEQ ID NO: 628 - protein, 670 aa, Pseudomonas aeruginosa; identical to SEQ ID NO: 118

SEQ ID NO: 629 - protein, 1028 aa, Pseudomonas aeruginosa; identical to SEQ ID NO: 151

SEQ ID NO: 630 - protein, 731 aa, Pseudomonas aeruginosa; identical to SEQ ID NO: 152

SEQ ID NO: 631 - protein, 245 aa, Pseudomonas aeruginosa; identical to SEQ ID NO: 102

SEQ ID NO: 632 - protein, 547 aa, Pseudomonas aeruginosa; identical to SEQ ID NO: 103

SEQ ID NO: 633 - protein, 1083 aa, Pseudomonas aeruginosa; identical to SEQ ID NO: 104

SEQ ID NO: 634 - protein, 708 aa, Pseudomonas aeruginosa; identical to SEQ ID NO: 85

SEQ ID NO: 635 - protein, 254 aa, Pseudomonas aeruginosa; identical to SEQ ID NO: 86

SEQ ID NO: 636 - protein, 670 aa, Pseudomonas aeruginosa; identical to SEQ ID NO: 118

SEQ ID NO: 637 - protein, 1028 aa, Pseudomonas aeruginosa; identical to SEQ ID NO: 151

SEQ ID NO: 638 - protein, 731 aa, Pseudomonas aeruginosa; identical to SEQ ID NO: 152

SEQ ID NO: 639 - protein, 245 aa, Pseudomonas aeruginosa; identical to SEQ ID NO: 102

SEQ ID NO: 640 - protein, 547 aa, Pseudomonas aeruginosa; identical to SEQ ID NO: 103

SEQ ID NO: 641 - protein, 1083 aa, Pseudomonas aeruginosa; identical to SEQ ID NO: 104

SEQ ID NO: 642 - protein, 708 aa, Pseudomonas aeruginosa; identical to SEQ ID NO: 85

SEQ ID NO: 643 - protein, 254 aa, Pseudomonas aeruginosa; identical to SEQ ID NO: 86

SEQ ID NO: 644 - protein, 670 aa, Pseudomonas aeruginosa; identical to SEQ ID NO: 118

SEQ ID NO: 645 - protein, 1028 aa, Pseudomonas aeruginosa; identical to SEQ ID NO: 151

SEQ ID NO: 646 - protein, 731 aa, Pseudomonas aeruginosa; identical to SEQ ID NO: 152

SEQ ID NO: 647 - protein, 245 aa, Pseudomonas aeruginosa; identical to SEQ ID NO: 102

SEQ ID NO: 648 - protein, 547 aa, Pseudomonas aeruginosa; identical to SEQ ID NO: 103

SEQ ID NO: 649 - protein, 1083 aa, Pseudomonas aeruginosa; identical to SEQ ID NO: 104

SEQ ID NO: 650 - protein, 708 aa, Pseudomonas aeruginosa; identical to SEQ ID NO: 85

SEQ ID NO: 651 - protein, 254 aa, Pseudomonas aeruginosa; identical to SEQ ID NO: 86

SEQ ID NO: 652 - protein, 670 aa, Pseudomonas aeruginosa; identical to SEQ ID NO: 118

SEQ ID NO: 653 - protein, 1028 aa, Pseudomonas aeruginosa; identical to SEQ ID NO: 151

SEQ ID NO: 654 - protein, 731 aa, Pseudomonas aeruginosa; identical to SEQ ID NO: 152

SEQ ID NO: 655 - protein, 245 aa, Pseudomonas aeruginosa; identical to SEQ ID NO: 102

SEQ ID NO: 656 - protein, 547 aa, Pseudomonas aeruginosa; identical to SEQ ID NO: 103

SEQ ID NO: 657 - protein, 708 aa, Pseudomonas aeruginosa; identical to SEQ ID NO: 85

SEQ ID NO: 658 - protein, 254 aa, Pseudomonas aeruginosa; identical to SEQ ID NO: 86

SEQ ID NO: 659 - protein, 670 aa, Pseudomonas aeruginosa; identical to SEQ ID NO: 118

SEQ ID NO: 660 - protein, 1028 aa, Pseudomonas aeruginosa; identical to SEQ ID NO: 151

SEQ ID NO: 661 - protein, 708 aa, Pseudomonas aeruginosa; identical to SEQ ID NO: 85

SEQ ID NO: 662 - protein, 254 aa, Pseudomonas aeruginosa; identical to SEQ ID NO: 86

SEQ ID NO: 663 - protein, 670 aa, Pseudomonas aeruginosa; identical to SEQ ID NO: 118

SEQ ID NO: 664 - protein, 1028 aa, Pseudomonas aeruginosa; identical to SEQ ID NO: 151

SEQ ID NO: 665 - protein, 731 aa, Pseudomonas aeruginosa; identical to SEQ ID NO: 152

SEQ ID NO: 666 - protein, 245 aa, Pseudomonas aeruginosa; identical to SEQ ID NO: 102

SEQ ID NO: 667 - protein, 547 aa, Pseudomonas aeruginosa; identical to SEQ ID NO: 103

SEQ ID NO: 668 - protein, 1083 aa, Pseudomonas aeruginosa; identical to SEQ ID NO: 104

SEQ ID NO: 669 - protein, 708 aa, Pseudomonas aeruginosa; identical to SEQ ID NO: 85

SEQ ID NO: 670 - protein, 254 aa, Pseudomonas aeruginosa; identical to SEQ ID NO: 86

SEQ ID NO: 671 - protein, 670 aa, Pseudomonas aeruginosa; identical to SEQ ID NO: 118

SEQ ID NO: 672 - protein, 1028 aa, Pseudomonas aeruginosa; identical to SEQ ID NO: 151

SEQ ID NO: 673 - protein, 731 aa, Pseudomonas aeruginosa; identical to SEQ ID NO: 152

SEQ ID NO: 674 - protein, 245 aa, Pseudomonas aeruginosa; identical to SEQ ID NO: 102

SEQ ID NO: 675 - protein, 547 aa, Pseudomonas aeruginosa; identical to SEQ ID NO: 103

SEQ ID NO: 676 - protein, 1083 aa, Pseudomonas aeruginosa; identical to SEQ ID NO: 104

SEQ ID NO: 677 - protein, 708 aa, Pseudomonas aeruginosa; identical to SEQ ID NO: 85

SEQ ID NO: 678 - protein, 254 aa, Pseudomonas aeruginosa; identical to SEQ ID NO: 86

SEQ ID NO: 679 - protein, 670 aa, Pseudomonas aeruginosa; identical to SEQ ID NO: 118

SEQ ID NO: 680 - protein, 1028 aa, Pseudomonas aeruginosa; identical to SEQ ID NO: 151

SEQ ID NO: 681 - protein, 731 aa, Pseudomonas aeruginosa; identical to SEQ ID NO: 152

SEQ ID NO: 682 - protein, 245 aa, Pseudomonas aeruginosa; identical to SEQ ID NO: 102

SEQ ID NO: 683 - protein, 547 aa, Pseudomonas aeruginosa; identical to SEQ ID NO: 103

SEQ ID NO: 684 - protein, 1083 aa, Pseudomonas aeruginosa; identical to SEQ ID NO: 104

SEQ ID NO: 685 - protein, 731 aa, Pseudomonas aeruginosa; identical to SEQ ID NO: 152

SEQ ID NO: 686 - protein, 245 aa, Pseudomonas aeruginosa; identical to SEQ ID NO: 102

SEQ ID NO: 687 - protein, 547 aa, Pseudomonas aeruginosa; identical to SEQ ID NO: 103

SEQ ID NO: 688 - protein, 1083 aa, Pseudomonas aeruginosa; identical to SEQ ID NO: 104

SEQ ID NO: 689 - protein, 708 aa, Pseudomonas aeruginosa; identical to SEQ ID NO: 85

SEQ ID NO: 690 - protein, 254 aa, Pseudomonas aeruginosa; identical to SEQ ID NO: 86

SEQ ID NO: 691 - protein, 670 aa, Pseudomonas aeruginosa; identical to SEQ ID NO: 118

SEQ ID NO: 692 - protein, 1028 aa, Pseudomonas aeruginosa; identical to SEQ ID NO: 151

SEQ ID NO: 693 - protein, 708 aa, Pseudomonas aeruginosa; identical to SEQ ID NO: 85

SEQ ID NO: 694 - protein, 254 aa, Pseudomonas aeruginosa; identical to SEQ ID NO: 86

SEQ ID NO: 695 - protein, 670 aa, Pseudomonas aeruginosa; identical to SEQ ID NO: 118

SEQ ID NO: 696 - protein, 1028 aa, Pseudomonas aeruginosa; identical to SEQ ID NO: 151

SEQ ID NO: 697 - protein, 731 aa, Pseudomonas aeruginosa; identical to SEQ ID NO: 152

SEQ ID NO: 698 - protein, 245 aa, Pseudomonas aeruginosa; identical to SEQ ID NO: 102

SEQ ID NO: 699 - protein, 547 aa, Pseudomonas aeruginosa; identical to SEQ ID NO: 103

SEQ ID NO: 700 - protein, 708 aa, Pseudomonas aeruginosa; identical to SEQ ID NO: 85

SEQ ID NO: 701 - protein, 254 aa, Pseudomonas aeruginosa; identical to SEQ ID NO: 86

SEQ ID NO: 702 - protein, 670 aa, Pseudomonas aeruginosa; identical to SEQ ID NO: 118

SEQ ID NO: 703 - protein, 1028 aa, Pseudomonas aeruginosa; identical to SEQ ID NO: 151

SEQ ID NO: 704 - protein, 731 aa, Pseudomonas aeruginosa; identical to SEQ ID NO: 152

SEQ ID NO: 705 - protein, 245 aa, Pseudomonas aeruginosa; identical to SEQ ID NO: 102

SEQ ID NO: 706 - protein, 547 aa, Pseudomonas aeruginosa; identical to SEQ ID NO: 103

SEQ ID NO: 707 - protein, 1083 aa, Pseudomonas aeruginosa; identical to SEQ ID NO: 104

SEQ ID NO: 708 - protein, 708 aa, Pseudomonas aeruginosa; identical to SEQ ID NO: 85

SEQ ID NO: 709 - protein, 254 aa, Pseudomonas aeruginosa; identical to SEQ ID NO: 86

SEQ ID NO: 710 - protein, 670 aa, Pseudomonas aeruginosa; identical to SEQ ID NO: 118

SEQ ID NO: 711 - protein, 1028 aa, Pseudomonas aeruginosa; identical to SEQ ID NO: 151

SEQ ID NO: 712 - protein, 731 aa, Pseudomonas aeruginosa; identical to SEQ ID NO: 152

SEQ ID NO: 713 - protein, 245 aa, Pseudomonas aeruginosa; identical to SEQ ID NO: 102

SEQ ID NO: 714 - protein, 547 aa, Pseudomonas aeruginosa; identical to SEQ ID NO: 103

SEQ ID NO: 715 - protein, 1083 aa, Pseudomonas aeruginosa; identical to SEQ ID NO: 104

SEQ ID NO: 716 - protein, 708 aa, Pseudomonas aeruginosa; identical to SEQ ID NO: 85

SEQ ID NO: 717 - protein, 254 aa, Pseudomonas aeruginosa; identical to SEQ ID NO: 86

SEQ ID NO: 718 - protein, 670 aa, Pseudomonas aeruginosa; identical to SEQ ID NO: 118

SEQ ID NO: 719 - protein, 1028 aa, Pseudomonas aeruginosa; identical to SEQ ID NO: 151

SEQ ID NO: 720 - protein, 731 aa, Pseudomonas aeruginosa; identical to SEQ ID NO: 152

SEQ ID NO: 721 - protein, 245 aa, Pseudomonas aeruginosa; identical to SEQ ID NO: 102

SEQ ID NO: 722 - protein, 547 aa, Pseudomonas aeruginosa; identical to SEQ ID NO: 103

SEQ ID NO: 723 - protein, 1083 aa, Pseudomonas aeruginosa; identical to SEQ ID NO: 104

SEQ ID NO: 724 - protein, 708 aa, Pseudomonas aeruginosa; identical to SEQ ID NO: 85

SEQ ID NO: 725 - protein, 254 aa, Pseudomonas aeruginosa; identical to SEQ ID NO: 86

SEQ ID NO: 726 - protein, 670 aa, Pseudomonas aeruginosa; identical to SEQ ID NO: 118

SEQ ID NO: 727 - protein, 1028 aa, Pseudomonas aeruginosa; identical to SEQ ID NO: 151

SEQ ID NO: 728 - protein, 731 aa, Pseudomonas aeruginosa; identical to SEQ ID NO: 152

SEQ ID NO: 729 - protein, 245 aa, Pseudomonas aeruginosa; identical to SEQ ID NO: 102

SEQ ID NO: 730 - protein, 547 aa, Pseudomonas aeruginosa; identical to SEQ ID NO: 103

SEQ ID NO: 731 - protein, 1083 aa, Pseudomonas aeruginosa; identical to SEQ ID NO: 104

SEQ ID NO: 732 - protein, 708 aa, Pseudomonas aeruginosa; identical to SEQ ID NO: 85

SEQ ID NO: 733 - protein, 254 aa, Pseudomonas aeruginosa; identical to SEQ ID NO: 86

SEQ ID NO: 734 - protein, 670 aa, Pseudomonas aeruginosa; identical to SEQ ID NO: 118

SEQ ID NO: 735 - protein, 1028 aa, Pseudomonas aeruginosa; identical to SEQ ID NO: 151

SEQ ID NO: 736 - protein, 731 aa, Pseudomonas aeruginosa; identical to SEQ ID NO: 152

SEQ ID NO: 737 - protein, 245 aa, Pseudomonas aeruginosa; identical to SEQ ID NO: 102

SEQ ID NO: 738 - protein, 547 aa, Pseudomonas aeruginosa; identical to SEQ ID NO: 103

SEQ ID NO: 739 - protein, 1083 aa, Pseudomonas aeruginosa; identical to SEQ ID NO: 104

SEQ ID NO: 740 - protein, 708 aa, Pseudomonas aeruginosa; identical to SEQ ID NO: 85

SEQ ID NO: 741 - protein, 254 aa, Pseudomonas aeruginosa; identical to SEQ ID NO: 86

SEQ ID NO: 742 - protein, 670 aa, Pseudomonas aeruginosa; identical to SEQ ID NO: 118

SEQ ID NO: 743 - protein, 1028 aa, Pseudomonas aeruginosa; identical to SEQ ID NO: 151

SEQ ID NO: 744 - protein, 731 aa, Pseudomonas aeruginosa; identical to SEQ ID NO: 152

SEQ ID NO: 745 - protein, 245 aa, Pseudomonas aeruginosa; identical to SEQ ID NO: 102

SEQ ID NO: 746 - protein, 547 aa, Pseudomonas aeruginosa; identical to SEQ ID NO: 103

SEQ ID NO: 747 - protein, 1083 aa, Pseudomonas aeruginosa; identical to SEQ ID NO: 104

SEQ ID NO: 748 - protein, 731 aa, Pseudomonas aeruginosa; identical to SEQ ID NO: 152

SEQ ID NO: 749 - protein, 245 aa, Pseudomonas aeruginosa; identical to SEQ ID NO: 102

SEQ ID NO: 750 - protein, 547 aa, Pseudomonas aeruginosa; identical to SEQ ID NO: 103

SEQ ID NO: 751 - protein, 1083 aa, Pseudomonas aeruginosa; identical to SEQ ID NO: 104

SEQ ID NO: 752 - protein, 708 aa, Pseudomonas aeruginosa; identical to SEQ ID NO: 85

SEQ ID NO: 753 - protein, 254 aa, Pseudomonas aeruginosa; identical to SEQ ID NO: 86

SEQ ID NO: 754 - protein, 670 aa, Pseudomonas aeruginosa; identical to SEQ ID NO: 118

SEQ ID NO: 755 - protein, 1028 aa, Pseudomonas aeruginosa; identical to SEQ ID NO: 151

SEQ ID NO: 756 - protein, 731 aa, Pseudomonas aeruginosa; identical to SEQ ID NO: 152

SEQ ID NO: 757 - protein, 245 aa, Pseudomonas aeruginosa; identical to SEQ ID NO: 102

SEQ ID NO: 758 - protein, 547 aa, Pseudomonas aeruginosa; identical to SEQ ID NO: 103

SEQ ID NO: 759 - protein, 1083 aa, Pseudomonas aeruginosa; identical to SEQ ID NO: 104

SEQ ID NO: 760 - protein, 708 aa, Pseudomonas aeruginosa; identical to SEQ ID NO: 85

SEQ ID NO: 761 - protein, 254 aa, Pseudomonas aeruginosa; identical to SEQ ID NO: 86

SEQ ID NO: 762 - protein, 670 aa, Pseudomonas aeruginosa; identical to SEQ ID NO: 118

SEQ ID NO: 763 - protein, 1028 aa, Pseudomonas aeruginosa; identical to SEQ ID NO: 151

SEQ ID NO: 764 - protein, 708 aa, Pseudomonas aeruginosa; identical to SEQ ID NO: 85

SEQ ID NO: 765 - protein, 254 aa, Pseudomonas aeruginosa; identical to SEQ ID NO: 86

SEQ ID NO: 766 - protein, 670 aa, Pseudomonas aeruginosa; identical to SEQ ID NO: 118

SEQ ID NO: 767 - protein, 1028 aa, Pseudomonas aeruginosa; identical to SEQ ID NO: 151

SEQ ID NO: 768 - protein, 731 aa, Pseudomonas aeruginosa; identical to SEQ ID NO: 152

SEQ ID NO: 769 - protein, 245 aa, Pseudomonas aeruginosa; identical to SEQ ID NO: 102

SEQ ID NO: 770 - protein, 547 aa, Pseudomonas aeruginosa; identical to SEQ ID NO: 103

SEQ ID NO: 771 - protein, 1083 aa, Pseudomonas aeruginosa; identical to SEQ ID NO: 104

SEQ ID NO: 772 - protein, 708 aa, Pseudomonas aeruginosa; identical to SEQ ID NO: 85

SEQ ID NO: 773 - protein, 254 aa, Pseudomonas aeruginosa; identical to SEQ ID NO: 86

SEQ ID NO: 774 - protein, 670 aa, Pseudomonas aeruginosa; identical to SEQ ID NO: 118

SEQ ID NO: 775 - protein, 1028 aa, Pseudomonas aeruginosa; identical to SEQ ID NO: 151

SEQ ID NO: 776 - protein, 731 aa, Pseudomonas aeruginosa; identical to SEQ ID NO: 152

SEQ ID NO: 777 - protein, 245 aa, Pseudomonas aeruginosa; identical to SEQ ID NO: 102

SEQ ID NO: 778 - protein, 547 aa, Pseudomonas aeruginosa; identical to SEQ ID NO: 103

SEQ ID NO: 779 - protein, 1083 aa, Pseudomonas aeruginosa; identical to SEQ ID NO: 104

SEQ ID NO: 780 - protein, 731 aa, Pseudomonas aeruginosa; identical to SEQ ID NO: 152

SEQ ID NO: 781 - protein, 245 aa, Pseudomonas aeruginosa; identical to SEQ ID NO: 102

SEQ ID NO: 782 - protein, 547 aa, Pseudomonas aeruginosa; identical to SEQ ID NO: 103

SEQ ID NO: 783 - protein, 1083 aa, Pseudomonas aeruginosa; identical to SEQ ID NO: 104

SEQ ID NO: 784 - protein, 708 aa, Pseudomonas aeruginosa; identical to SEQ ID NO: 85

SEQ ID NO: 785 - protein, 254 aa, Pseudomonas aeruginosa; identical to SEQ ID NO: 86

SEQ ID NO: 786 - protein, 670 aa, Pseudomonas aeruginosa; identical to SEQ ID NO: 118

SEQ ID NO: 787 - protein, 1028 aa, Pseudomonas aeruginosa; identical to SEQ ID NO: 151

SEQ ID NO: 788 - protein, 708 aa, Pseudomonas aeruginosa; identical to SEQ ID NO: 85

SEQ ID NO: 789 - protein, 254 aa, Pseudomonas aeruginosa; identical to SEQ ID NO: 86

SEQ ID NO: 790 - protein, 670 aa, Pseudomonas aeruginosa; identical to SEQ ID NO: 118

SEQ ID NO: 791 - protein, 1028 aa, Pseudomonas aeruginosa; identical to SEQ ID NO: 151

SEQ ID NO: 792 - protein, 731 aa, Pseudomonas aeruginosa; identical to SEQ ID NO: 152

SEQ ID NO: 793 - protein, 245 aa, Pseudomonas aeruginosa; identical to SEQ ID NO: 102

SEQ ID NO: 794 - protein, 547 aa, Pseudomonas aeruginosa; identical to SEQ ID NO: 103

SEQ ID NO: 795 - protein, 1083 aa, Pseudomonas aeruginosa; identical to SEQ ID NO: 104

SEQ ID NO: 796 - protein, 708 aa, Pseudomonas aeruginosa; identical to SEQ ID NO: 85

SEQ ID NO: 797 - protein, 254 aa, Pseudomonas aeruginosa; identical to SEQ ID NO: 86

SEQ ID NO: 798 - protein, 670 aa, Pseudomonas aeruginosa; identical to SEQ ID NO: 118

SEQ ID NO: 799 - protein, 1028 aa, Pseudomonas aeruginosa; identical to SEQ ID NO: 151

SEQ ID NO: 800 - protein, 731 aa, Pseudomonas aeruginosa; identical to SEQ ID NO: 152

SEQ ID NO: 801 - protein, 245 aa, Pseudomonas aeruginosa; identical to SEQ ID NO: 102

SEQ ID NO: 802 - protein, 547 aa, Pseudomonas aeruginosa; identical to SEQ ID NO: 103

SEQ ID NO: 803 - protein, 1083 aa, Pseudomonas aeruginosa; identical to SEQ ID NO: 104

SEQ ID NO: 804 - protein, 731 aa, Pseudomonas aeruginosa; identical to SEQ ID NO: 152

SEQ ID NO: 805 - protein, 245 aa, Pseudomonas aeruginosa; identical to SEQ ID NO: 102

SEQ ID NO: 806 - protein, 547 aa, Pseudomonas aeruginosa; identical to SEQ ID NO: 103

SEQ ID NO: 807 - protein, 1083 aa, Pseudomonas aeruginosa; identical to SEQ ID NO: 104

SEQ ID NO: 808 - protein, 708 aa, Pseudomonas aeruginosa; identical to SEQ ID NO: 85

SEQ ID NO: 809 - protein, 254 aa, Pseudomonas aeruginosa; identical to SEQ ID NO: 86

SEQ ID NO: 810 - protein, 670 aa, Pseudomonas aeruginosa; identical to SEQ ID NO: 118

SEQ ID NO: 811 - protein, 1028 aa, Pseudomonas aeruginosa; identical to SEQ ID NO: 151

SEQ ID NO: 812 - protein, 731 aa, Pseudomonas aeruginosa; identical to SEQ ID NO: 152

SEQ ID NO: 813 - protein, 245 aa, Pseudomonas aeruginosa; identical to SEQ ID NO: 102

SEQ ID NO: 814 - protein, 547 aa, Pseudomonas aeruginosa; identical to SEQ ID NO: 103

SEQ ID NO: 815 - protein, 1083 aa, Pseudomonas aeruginosa; identical to SEQ ID NO: 104

SEQ ID NO: 816 - protein, 708 aa, Pseudomonas aeruginosa; identical to SEQ ID NO: 85

SEQ ID NO: 817 - protein, 254 aa, Pseudomonas aeruginosa; identical to SEQ ID NO: 86

SEQ ID NO: 818 - protein, 670 aa, Pseudomonas aeruginosa; identical to SEQ ID NO: 118

SEQ ID NO: 819 - protein, 1028 aa, Pseudomonas aeruginosa; identical to SEQ ID NO: 151

SEQ ID NO: 820 - protein, 708 aa, Pseudomonas aeruginosa; identical to SEQ ID NO: 85

SEQ ID NO: 821 - protein, 254 aa, Pseudomonas aeruginosa; identical to SEQ ID NO: 86

SEQ ID NO: 822 - protein, 670 aa, Pseudomonas aeruginosa; identical to SEQ ID NO: 118

SEQ ID NO: 823 - protein, 1028 aa, Pseudomonas aeruginosa; identical to SEQ ID NO: 151

SEQ ID NO: 824 - protein, 731 aa, Pseudomonas aeruginosa; identical to SEQ ID NO: 152

SEQ ID NO: 825 - protein, 245 aa, Pseudomonas aeruginosa; identical to SEQ ID NO: 102

SEQ ID NO: 826 - protein, 547 aa, Pseudomonas aeruginosa; identical to SEQ ID NO: 103

SEQ ID NO: 827 - protein, 1083 aa, Pseudomonas aeruginosa; identical to SEQ ID NO: 104

SEQ ID NO: 828 - protein, 708 aa, Pseudomonas aeruginosa; identical to SEQ ID NO: 85

SEQ ID NO: 829 - protein, 254 aa, Pseudomonas aeruginosa; identical to SEQ ID NO: 86

SEQ ID NO: 830 - protein, 670 aa, Pseudomonas aeruginosa; identical to SEQ ID NO: 118

SEQ ID NO: 831 - protein, 617 aa, Pseudomonas aeruginosa
MSLMDIFRSLIGERDGALSTQQGFQSQPDSNGLNFYLPLPAFKALQTGQGSALEKIQLIVLNMLVEQGIAENTANGFHIGAEDIAGMDLEQAEILRLPRRLPGHFLTSISGRTGNSGFRVAITLEMPDGPASFSRKGPYLYLTSSECYWLTPAEIMGLQAWELHESLGPEQRGEAANLRLMAELQTAARSGMRIDLSHFERLDVVVPQNIGVIATRLPDGSLQLCPSLGDGSSADQLEKRWSQLDMTADGGVLRIDNRVLLLDQARMDGIRNVLANKRIPADQVNEFIATPTAFLDAALVNLEVGFSARVAGIGKLQHMDFGVLDATKNDWFALDKRPAPAAILSKLIQSPEDLQRFEEVLQAANEQGATSLSFAGEVIDISDAPTVQQELARARQNMAHVSDSEPHSEEGVLPGEDKEKVGVILKDADEINSALLRKAAAAKPLVVPDWSAYAREPFPHQREGIEWMLKLMGAALQDETDDLYRLQGGLLADDMGLGKTYMSLVAVGEYLASQRAADKPQKPVLVVAPLSLLENWEDEVGKTFASIPFRDVVVLQSGRSLRDYRVKGAERESVQLASMIDDSSGMMDEQSIRYALHVGPEAGVHRLDVAADRKLTQ

SEQ ID NO: 832 - protein, 731 aa, Pseudomonas aeruginosa; identical to SEQ ID NO: 152

SEQ ID NO: 833 - protein, 245 aa, Pseudomonas aeruginosa; identical to SEQ ID NO: 102

SEQ ID NO: 834 - protein, 547 aa, Pseudomonas aeruginosa; identical to SEQ ID NO: 103

SEQ ID NO: 835 - protein, 1083 aa, Pseudomonas aeruginosa; identical to SEQ ID NO: 104

SEQ ID NO: 836 - protein, 731 aa, Pseudomonas aeruginosa; identical to SEQ ID NO: 152

SEQ ID NO: 837 - protein, 245 aa, Pseudomonas aeruginosa; identical to SEQ ID NO: 102

SEQ ID NO: 838 - protein, 547 aa, Pseudomonas aeruginosa; identical to SEQ ID NO: 103

SEQ ID NO: 839 - protein, 1083 aa, Pseudomonas aeruginosa; identical to SEQ ID NO: 104

SEQ ID NO: 840 - protein, 708 aa, Pseudomonas aeruginosa; identical to SEQ ID NO: 85

SEQ ID NO: 841 - protein, 254 aa, Pseudomonas aeruginosa; identical to SEQ ID NO: 86

SEQ ID NO: 842 - protein, 670 aa, Pseudomonas aeruginosa; identical to SEQ ID NO: 118

SEQ ID NO: 843 - protein, 1028 aa, Pseudomonas aeruginosa; identical to SEQ ID NO: 151

SEQ ID NO: 844 - protein, 731 aa, Pseudomonas aeruginosa; identical to SEQ ID NO: 152

SEQ ID NO: 845 - protein, 245 aa, Pseudomonas aeruginosa; identical to SEQ ID NO: 102

SEQ ID NO: 846 - protein, 547 aa, Pseudomonas aeruginosa; identical to SEQ ID NO: 103

SEQ ID NO: 847 - protein, 1083 aa, Pseudomonas aeruginosa; identical to SEQ ID NO: 104

SEQ ID NO: 848 - protein, 708 aa, Pseudomonas aeruginosa; identical to SEQ ID NO: 85

SEQ ID NO: 849 - protein, 254 aa, Pseudomonas aeruginosa; identical to SEQ ID NO: 86

SEQ ID NO: 850 - protein, 670 aa, Pseudomonas aeruginosa; identical to SEQ ID NO: 118

SEQ ID NO: 851 - protein, 1028 aa, Pseudomonas aeruginosa; identical to SEQ ID NO: 151

SEQ ID NO: 852 - protein, 731 aa, Pseudomonas aeruginosa; identical to SEQ ID NO: 152

SEQ ID NO: 853 - protein, 245 aa, Pseudomonas aeruginosa; identical to SEQ ID NO: 102

SEQ ID NO: 854 - protein, 547 aa, Pseudomonas aeruginosa; identical to SEQ ID NO: 103

SEQ ID NO: 855 - protein, 1083 aa, Pseudomonas aeruginosa; identical to SEQ ID NO: 104

SEQ ID NO: 856 - protein, 731 aa, Pseudomonas aeruginosa; identical to SEQ ID NO: 152

SEQ ID NO: 857 - protein, 245 aa, Pseudomonas aeruginosa; identical to SEQ ID NO: 102

SEQ ID NO: 858 - protein, 547 aa, Pseudomonas aeruginosa; identical to SEQ ID NO: 103

SEQ ID NO: 859 - protein, 1083 aa, Pseudomonas aeruginosa; identical to SEQ ID NO: 104

SEQ ID NO: 860 - protein, 708 aa, Pseudomonas aeruginosa; identical to SEQ ID NO: 85

SEQ ID NO: 861 - protein, 254 aa, Pseudomonas aeruginosa; identical to SEQ ID NO: 86

SEQ ID NO: 862 - protein, 670 aa, Pseudomonas aeruginosa; identical to SEQ ID NO: 118

SEQ ID NO: 863 - protein, 1028 aa, Pseudomonas aeruginosa; identical to SEQ ID NO: 151

SEQ ID NO: 864 - protein, 731 aa, Pseudomonas aeruginosa; identical to SEQ ID NO: 152

SEQ ID NO: 865 - protein, 245 aa, Pseudomonas aeruginosa; identical to SEQ ID NO: 102

SEQ ID NO: 866 - protein, 547 aa, Pseudomonas aeruginosa; identical to SEQ ID NO: 103

SEQ ID NO: 867 - protein, 1083 aa, Pseudomonas aeruginosa; identical to SEQ ID NO: 104

SEQ ID NO: 868 - protein, 708 aa, Pseudomonas aeruginosa; identical to SEQ ID NO: 85

SEQ ID NO: 869 - protein, 254 aa, Pseudomonas aeruginosa; identical to SEQ ID NO: 86

SEQ ID NO: 870 - protein, 670 aa, Pseudomonas aeruginosa; identical to SEQ ID NO: 118

SEQ ID NO: 871 - protein, 1028 aa, Pseudomonas aeruginosa; identical to SEQ ID NO: 151

SEQ ID NO: 872 - protein, 708 aa, Pseudomonas aeruginosa; identical to SEQ ID NO: 85

SEQ ID NO: 873 - protein, 254 aa, Pseudomonas aeruginosa; identical to SEQ ID NO: 86

SEQ ID NO: 874 - protein, 670 aa, Pseudomonas aeruginosa
MKLPPVHMPVAEWAPVVRERWTVLVEKVARMKAASGKSDAFEAMLARLRDMASTGRFDGLPELLKRRLTARALTWLWLNDETMGRRLLSSRLLSVLVDAQQPRLTRITLQQLAQFYFRRFDKLDEHDGLRKQLEQILLQQLHLLPEPKVSGPQADPLVTLKRDAHWLLPPDGPVQLVERVRDSGHELGETFEVMGLQGFDDGRYGDICRAHFYLETLRGLAPGEYDPVLDELQKPAVSKAPYEGERRIGHVALEILIDRAGQEPGEVWQNFILNLAGDPRISRNSPNYREWWQFLGEERVQKVRGWLSKEDLRLFLQAVEQFGIETQNDDLQRMFPARKQFLEGLFKLKLIRNTRLLLGGRAQHSVKRILGKDVQTSFASMDGQMNDKAVIYLDCGDFHLVEGSHSFKIWVYLAAPGEALRSYERSSFSHSDLTAAVPKAYKRLYPELPYDAFTHHPPLSWQNRVFSFLADNGIALDIEQLLNRSDYQPYLRKFGMPVVNAKRTPVPPPSQTDFPAEPARSRVGKTGATTMSAPQGRKPAEMIARDSRAIPREEAATVRRSNQQHDPVVSHSVSSPDAAAPATARPSLVGEGLLTGLKPSALKILRYFVDNPGDKVRYAANVFGVDSREINQILYGPLKDMCTRDEQFGWTVNEAARLALEALDEQDRAE

SEQ ID NO: 875 - protein, 1012 aa, Pseudomonas aeruginosa
MSLMDIFRSLIGERDGALSTQQGFQSQPDSNGLNFYLPLPAFKALQTGQGSALEKIQLIVLNMLVEQGIAENTANGFHIGAEDIAGMDLEQAEILRLPRRLPGHFLTSISGRTGNSGFRVAITLEMPDGPASFSRKGPYLYLTSSECYWLTPAEIMGLQAWELHESLGPEQRGEAANLRLMAELQTAARSGMRIDLSHFERLDVVVPQNIGVIATRLPDGSLQLCPSLGDGSSADQLEKRWSQLDMTADGGVLRIDNRVLLLDQARMDGIRNVLANKRIPADQVNEFIATPTAFLDAALVNLEVGFSARVAGIGKLQHMDFGVLDATKNDWFALDKRPAPAAILSKLIQSPEDLQRFEEVLQAANEQGATSLSFAGEVIDISDAPTVQQELARARQNMAHVSDSEPHSEEGVLPGEDKEKVGVILKDADEINSALLRKAAAAKPLVVPDWSAYAREPFPHQREGIEWMLKLMGAALQDETDDLYRLQGGLLADDMGLGKTYMSLVAVGEYLASQRAADKPQKPVLVVAPLSLLENWEDEVGKTFASIPFRDVVVLQSGRSLRDYRVKGAERESVQLASMIDDSSGMMDEQSIRYALHVGPEAGVHRLDMDRRLVLTTYQTLRDYQFSLCRIDWGMVIFDEAQNIKNPNALQTIAAKGLKADFKLLATGTPVENSLGDFWCLMHTVQPGLLGGWESFRDTWIKPILAASDEERDEVRARLGEQLRRAVGIFMLRRVKEDQLKGLPAKTILSGVEQADHGLQRYAAQLGVVMKGIQLQAYDEVLDSYRARRASAEDMRGTALAALTQLRSISLHPRLENESALYCEDGKHARQLMMESGKLAVLLQLLDEIRSKGEKVILFMMTKRLQRVLKLWLDQIYDLNVAVINGDTQAVATRAEDMTRKKLIAEFEAKSGFNILIMSPVAAGVGLTVIGANHVVHLERHWNPAKEAQASDRVYRIGQTKPVFIHLPAVTHPQFDSFDVHLDRLLRGKLMLKDAVVTPEAVSESEMIQSMG

SEQ ID NO: 876 - protein, 731 aa, Pseudomonas aeruginosa
MDYSKWLDLWDKATPEQLIAPVFVFSLVTVLCLWYLLRYFLRSFALSRRLKKLARQVRALKEQQPAKRRSELEQLFQEHTLGHAWQEYAETLHDQFEVREGEQRMLCSRATAGAGHFFTAQTVVETPLGTEFYKHLPGILTGIGIVGTFFGLMLGLQHFDPSTPEQVSSSVDQLLKDVLFAFLGSFFSIFASIGVTLTEKWRLGRCYKHLETLTESIDGLFDSGVGEEYLAELVKSSNESSIQTRQLKDSLVTDLREMLQNLVDTQVRENLKLADTLSASYRDSGQVLAEQIGGAIENSLKSPLEAIAGAVNTASGDQSNQVQSLLTDVLTAFMSKLESTFGQQFNGLHEMLGQSVAAMQSMQQGFNELVGDMRSASEASSQNSAKMIAQLLADMQAGQNSMQAGMNEMLANLQTSIARIGSEGEGAGERMAKQLEKLFADSEARQQAMAANLQAFVESMQQSIGQGQQETMAKIAGSVDVLGEQLGGLFKQLEQNRTQMDQASKVAQVELHRGTREMVGGLEEQVKTLLDAVADQQGAMQDSLKLLGAQTEQHLQSMQQGAEKMRLAAERIDSAGQSVSKAGEATAGVLGALQGTSGDLVGASRELTSVVADYRNNREALSQTLAVIQGVVATTQGESAGRSQYLQDLKQQGERLQALNREVNDYLEQISAVLGKGFNEFSEGVDRSLRQTLGSLDAELHKAMTSLAGGVEGVKESLEDFSDIMERVQRR

SEQ ID NO: 877 - protein, 245 aa, Pseudomonas aeruginosa
MFGKSAAPARARDEGEKPFWISFADLMTAMMILFLVVMVASLSSVTQRIQQAEQGEKQRGKDIAKLCQELKLRAGDLNSTIVVDCRDNRISFGEAGRFGHNQYFLNSQGQQALQDVVPLILDAADSEEGRKWLKQVVIEGFTDTDGSYLYNLHLSLQRSEWVMCSLLDSRSPVQKGLSAERQQQIRSMFLAGGVSFNNAKESKEESRRVELRMQFFGLKDQGHEGQEPALEFAYAANEKCQLEMR

SEQ ID NO: 878 - protein, 558 aa, Pseudomonas aeruginosa
MSRALSSLSAAIASGLQRQNERSGDVGLSGLVALKRASSELSRRFDQVEKALAPPREKRLLALGKFKREQALTSSEWRLVFAGLADDDEVSVPVLEDDQLFDRVHREVAGRIEQRSLSRRDWLALCFSYFAYDEHKPDDNANWRVLRDDIDRGFDAVRQRIGREKEWMRIVAEHRELFGAQAGTRLAEEIFEGRVRDLSSLQAIAQVPDGSWLWQRIFAVLLSRIFLLDDETFLKRLPELVALGQLNTRYLNQVLSACLTRYHRSRYREQSSSLLKQAALEHWGSPQMRSKQNAWLQYVEQPVCAMVVAWFAKEDLEHFFTLLKGEAEVDQSRLFYWLRFTNQMSYTRIVMGSDAWHDRSSDFVAFREKNKGRLSQLTGGSSHINAVVMQIGSYFFVEFSGTGHACYVYRADRLPFNPDQQVLGLNTELKQKGHKPAPMRHSPAPRRPNVVEGWLEKFDDELRALGIIAQRPASYTQPRGSEDKPAAHSAASAPVAGDSLDVQVKSMLGNVPYKTFDHRSTSGVYQVLLARDDAAAKTALLRLGFKAVKNNALMFWRL

SEQ ID NO: 879 - protein, 1083 aa, Pseudomonas aeruginosa
MLGRFFPRKDRSQPAKGAAPGAYQIEEQGLCYALSLAGDDASWPVAAYLDQLFEEDYASQLSDRWLLPWESIYQLLDDPEHASSLPLLGLPAIANLQPQLASTGGLSDQDFKVFVQSWRNLETGSPVTFERVGAVARHSGTTELLPRAVWELLKAIRDLHATQQQAPGEVANQIGWANIRKLAKRAGAGLDGFLDKTVVVKPEYLKLKPRKAVVAGTPIIELDVAFDGQPDNWLASFDGYKQVQDKYRVPGADGTVTHVLIEPDVKAVLESVRALPGRRVAGDEALSLVRNPYSVIGDAAEKVVDADEYEEQLADAGIYFHRFRLEPCIGEDGKHIRSIGLFLEPISSKPLPEVELRFDFAHEFAPFVNELQVKLAAGMPAGFWQGYELELSDFDLAQLAGVNELLRHWQRQEAGQTFEAVLDLASYGDRVVGIGEAERITSPFLVKEATENWLPTDVKELGVDSELLSQWDPASREDFEEFEHRIDQARMAGDEQVCLPGTEIPLPFQVAEQLYEAWSKKLNPVEPKPPVVTEPVAGRAVLHIEHNIEEATYAQRREAALLAGRHANADIPELLRPDVQLRDHQMKGVAWMQHLFGLSPDHVAGCLLADDMGLGKTIQLLTFVVWYLEQNPQGKPVLIVAPVSLLDNWERELQRFFYADALPVLKLYGGALSAVKFKKDEIPGDLQAKGIKNLLRPGWMGDARIVLTTYETLRDQELSLARQQWAIVICDEAQKIKNPAALITQAAKAIPSRFRIACTGTPVENTLIDLWCLFDFIQPGFLGGLNQFGREYQRPIEAGMERDTAALERLRGLIEPQTLRRTKQDVAKDLPAKIEDQGCRKLLMHTLQRNLYLSEVAQYTQKQQMQEQLEQRESGMLGLLHRLKLVCAHPFSVQPDPRLREHSPKLQWLLSTLDNIARSGSGDKVILFTELRDIQRELQHAIQERFGFKPTVINGDTSTSSQSAHSRQRLIDRFQEQPGFSVIILSTVAVGFGVNVQAANHVIHFTRCWNPAKEDQATDRAYRIGQEKDVYVYYPTVRDAGMPTFEATLDELLQKRRALARDMLHGASELQVSEFGELLRAQG

SEQ ID NO: 880 - protein, 731 aa, Pseudomonas aeruginosa; identical to SEQ ID NO: 97

SEQ ID NO: 881 - protein, 245 aa, Pseudomonas aeruginosa; identical to SEQ ID NO: 98

SEQ ID NO: 882 - protein, 558 aa, Pseudomonas aeruginosa; identical to SEQ ID NO: 138

SEQ ID NO: 883 - protein, 1083 aa, Pseudomonas aeruginosa; identical to SEQ ID NO: 100

SEQ ID NO: 884 - protein, 731 aa, Pseudomonas aeruginosa
MDYSKWLDLWDKATPEQLIAPVFVFSLVTVLCLWYLLRYFVRSFALSRRLKKLTRQVRAIKELQPAKRRSELEQLFQEHTLWHAWQEYAETLHDQFEVREGEQRLLCSRATAGAGHFFTAQTVVETPLGTEFYKHLPGILTGIGIVGTFFGLMLGLQHFDPSTPEQVSSSVDQLLKDVLFAFLGSFFSIFASIGVTLTEKWRLGRCYKHLETLTESIDGLFGSGVGEEYLAELVKSSNESAIQTRQLKDSLVTDLREMLQNLVDTQVRESLKLADTLSASYRDSGQALAEQIGGAIENSLKSPLEVIAGAVNTASGDQSNQVQSLLTDVLTAFMSKLESTFGQQFNGLHEMLGQSVAAMQSMQQGFNELVGDMRSASEASSQNSAKMIAQLLADMQAGQNSMQAGMNEMLANLQTSIARIGSEGEGAGERMAKQLEKLFADSEARQQAMAANLQAFVESMQQSMGQGQQETMAKIAGSVDVLGEQLGGLFKQLEHNRTQMDQASKVAQVELHRGTREMVGGLEEQVKTLLDAVADQQGAMQDSLKLLGAQTEQHLQSMQQGAEKMRLAAERFDSAGQSVSKAGEATAGVLGALQGTSGDLIGASRELTSVVADYRNNREALNQTLAVIQGVVATTQGESAGRSQYLQDLKQQGERLQALNREVNDYLEQISAVLGKGFNEFSEGVDRSLRQTLGSLDAELHKAMTSLAGGVEGVKESLEDFSDIMERVQRR

SEQ ID NO: 885 - protein, 245 aa, Pseudomonas aeruginosa; identical to SEQ ID NO: 877

SEQ ID NO: 886 - protein, 558 aa, Pseudomonas aeruginosa
MNRALSSLSAAIASGLERQSERSGDVGLSALPSLKRASSELSRRFDQVEKALAPPHEKRLLALGKFKREQALTSSEWRLVFAGLADDDEVSVPVLEDDQLFGRVHREVAGRIEQRSLSRRDWLALCFSYFAYDEHKPDDNANWRMLRDDIDRGFDAVRQRIGREKEWMRIVAEHRELFGVQAGARLAEEIFEGRARDLSSLQAIAQVPDGSWLWQRIFAVLLSRIFLLDDETFLKRLRELVALGQLNTRYLNQVLSACLTRYHRSRYREQSSSLLKQVALDHWGSPQMRSRQNAWLQYVEQPVCAMVVAWFAKEDLEHFFTLLKGEAEVDQSRLFYWLRFTNQMSYTRIVMGSDAWHDRSSDFVAFREKNKGRLSQLTGGSSYINAVVMQIGDYFFVEFSGTGHACYVYRADRLPFNPDQQVLGLNTELKQKGHKPAPMRHSPAPRRPNVVEGWLEKFDDELRALGIIAQRPASYTQPRGSEDKPAAHSAASAPVAGDSLDVQVKSMLGSVPYKTFDHRSTSGVYQVLLARDDAAAKTALLRLGFKAVKNNALMFWRL

SEQ ID NO: 887 - protein, 1083 aa, Pseudomonas aeruginosa
MLGRFFSGKDRSQPTKGAVPGAYQIEEEGFCYALSLADDDASWPVAAYLDQLFEEDYASQLSDRWLLPWESIYQLLDDPEHASSLPLLGLPAIANLQPQLASTGGLSDPDFKVFIRSWRNPQTGNPITFERVGAVARHAGTTELLPRAVWELLKAIRDLHATQQQAPGEVANQIGWANIRKLAKRAGAGLDGFLDKTVVVKPEHLRLKPRKAVVAGTPIIELDVAFVGQPDNWLASFDGYKQVQDKYRVLGADGTVTHVLIEPDVKAVLESVRALPGRRVAGDEALSLVRNPYSVIGDAAEKVVDADEYEEQLADAGIYFHRFRLEPFLGEDGKHIQSISLFLEPISSKPLPEIELRFDFAHEFAPFVNELQVKLAAGMPAGFWQGYELELSDFDLAQLAGVNELLRHWQRQEAGQTFEAVLDLASYGDRVVGIGEAERITSPFLVKEATENWLPADVKALGVDAELLSQWDPASREDFEEFEHRLDQARVAGDEQVCLPGTETPLPFQVAEQLYEAWSKKLNPVEPKPPVVTEPVAGRAVLHIEHNIEEATYAQRREAALLAGRHANADIPELLRPEVQLRDHQMKGVAWMQHLFGLSPDHVAGCLLADDMGLGKTIQLLTFVVWYLEQNPQGKPVLIVAPVSLLDNWERELQRFFYADALPVLKLYGGALSAVKFKKDEIPGDLQAKGIKNLLRPGWMGDARIVLTTYETLRDQELSLARQQWAIVICDEAQKIKNPAALITQAAKAIPSRFRIACTGTPVENTLIDLWCLFDFIQPGFLGGLNQFGREYQRPIEAGMERDTARLERLRGLIEPQTLRRTKQDVAKDLPAKIEDQGCRKLLMHTLQRNLYLSEVAQYTQKQQMQEQLEQRESGMLGLLHRLKLVCAHPFSVQPDPRLREHSPKLQWLLSTLDNIARSGSGDKVILFTELRDIQRELQHAIQERFGFKPTVINGDTSTSSQSAHSRQRLIDRFQEQPGFSVIILSTVAVGFGVNVQAANHVIHFTRCWNPAKEDQATDRAYRIGQEKDVYVYYPTVRDAGMPTFEATLDELLQKRRALARDMLHGASELQVSEFGELLRAQG

SEQ ID NO: 888 - protein, 731 aa, Pseudomonas aeruginosa; identical to SEQ ID NO: 876

SEQ ID NO: 889 - protein, 245 aa, Pseudomonas aeruginosa; identical to SEQ ID NO: 877

SEQ ID NO: 890 - protein, 558 aa, Pseudomonas aeruginosa; identical to SEQ ID NO: 878

SEQ ID NO: 891 - protein, 1083 aa, Pseudomonas aeruginosa; identical to SEQ ID NO: 879

SEQ ID NO: 892 - protein, 708 aa, Pseudomonas aeruginosa; identical to SEQ ID NO: 85

SEQ ID NO: 893 - protein, 254 aa, Pseudomonas aeruginosa; identical to SEQ ID NO: 86

SEQ ID NO: 894 - protein, 670 aa, Pseudomonas aeruginosa; identical to SEQ ID NO: 118

SEQ ID NO: 895 - protein, 1013 aa, Pseudomonas aeruginosa; identical to SEQ ID NO: 147

SEQ ID NO: 896 - protein, 708 aa, Pseudomonas aeruginosa
MMDLLKHLIPDFAHMFSANPNGISAWFWSATALIFGLSLYFLFVHFRRFRTRLRALRSLLEGQSKETLALSRRETMQKAQGLDAPNVGMLWREFDESLVLSSDQKHLFNTLDAEHFFNARTLAPGLTASRLLAAAPSFLVAIGVLGTFVGLTVGLEGLVGTSDEIESLKGGINKLISGAAVAFMTSVWGVFFSLLLNFVEKMFERSALGQIQQLQHDIDFLYPRIPAEQSLVHIAEYGKESKEALQELHERIGDRLQETLNGMSEAMQTALTDALNNIMAPAIQTLVSTTSQQSTQVLEKLVGNFMDGMTSVGREQGLQMQQAAADVNAAVSGMSERLNQLFSSLNEQQGRQMEVAQQQSAAFETQLQRISGSAEERQAQMEQRFAELMSGLTNQLQTQLGAAQQRDEERQVLFERVLGQASSSQTAMLEQFSNSTREQMQAMAEAGNERHNNLEKVFSRLMMNLNTQLDSQMGAAEQREQARQQRFQEQLDQVSTHQQELLSGLASAVQATQQQSRLMADQHQQLLGQLKQVSEATAQSSKHLDSSANQLGLLSANLRQAADTLGQRLEAVTHGVEKAGQQNAELAAQLQSQAATLAQLQATLLEGAQRFEQAAGEARNGFGEMKSAQQEFLSGVRHEFTALGEKLREQVEAVEKQAEEWLRSYAGEVRTQIDDRMNKWNEVSLSYADQMHRTVQAMSSILDELEAR

SEQ ID NO: 897 - protein, 254 aa, Pseudomonas aeruginosa
MRLGKSKEVSVDEENPYWMSFSDIMSALLVIFILASVILILQLMEIQKELQERQVQFEQELVELKKAEQVRRTILDEAVEALRERGIKVEVSENHTVLSIPNDLLGFDTGAYDIHAAYQARALEIGKVINEVISREDRVEFLDTIFIEGHTDNRPLQGFMGKGNWGLSTFRAISLWQFWGSALSADEQLARLKNKDGKPLFSVSGYGETRPVLVDQQTEDDFKRNRRIDIRFTIRRPDSAQYEQVRERLEEVKP

SEQ ID NO: 898 - protein, 721 aa, Pseudomonas aeruginosa
MKLPPVHMPVAEWAPVVRERWTVLVEKVARMKAASGKSDAFDAMLARLRDMASTGRFDGLPELLKRRLTARALTWLWLNDEAMGRRLLSSRLLSVLVDAQQPRLTRITLQQLAQFYFRRFDKLDEHDGLREQLEQILLQQLHLMPEPKVSGPQTDPLVTLKRDGHWLLPPDGPVQLVERVRDSGHELGQTFEVMGLQGFDDGRYGDICRAHFYLETLRGLAPGEYDPVLDELQKPAVSKAPYEGERRIGHVALEILIDRAGQEPGEVWQNFILNLAGDPRIASTAANYREWWQPLGEARIQKVRGWLSKEDLRLFLQAVEQYGLESGKEDLKRMFPARKLFLEGLFALGLIRHTRLMLGRNAKLSVKRILGSEVKTSFAGMDSAMSDKAVIYLDCGDFHLVEGSHSFKIWVYLGQPGHWVKSYERNQFSHFDLTTSLPNQYKAAYPSLPYEAVTHNGSWQRKVFDFLADNGIALDIEKLLSRSEYKAYLSKYGLPVVRGKKARVEPLVQQSAKSDSAPVSQGGATGSVSAHRMAEPRPPAVDAFASEAPRASGTELTDTQLSILAYLSKHPESLMGDIRQALEGDEALFYEIQDALRGSISSYVQQNEVFQWSLSSKGEALLRKADLDPAPNTSDADQQPLKATLQHLGTFDLQVLWYFKNNPGDKVRHAANVFGVEARVINQVLYGSLKGMCVQDKQFGWSVNETTRLSLEALDKQDRAE

SEQ ID NO: 899 - protein, 1013 aa, Pseudomonas aeruginosa
MGLMDIFRSLIGERDGALSTQQGFQSQPDSNGLNFYLPLPAFKALQAGQGSALEKIQLIVLNMLVEQGIAENTANGFHIGAEDIAGMDLEQAEILRLPRRLPGHFLTSISGRTGNSGFRVAITLEMPDGPASFSRKGPYLYLTSSECYWLTPAEIMGLQAWELHESLGPEQRGEAANLRLMAELQTAARSGMRIDLSHFERLDVVVPQNIGVIATRLPDGSLQLCPSLGDGSSADQLEKRWSQLDMTADGGVLRIDNRVLLLDQARMDGIRNVLANKRIPADQVNEFIATPTAFLDAALVNLEVGFSARVAGIGKLQHMDFGVLDATKNDWFALDKRPAPAAILSKLIQSPEDLQRFEEVLQAANEQGATSLSFAGEVIDISDAPAVQQELARARQNMTDVSDSEPHSEEGVLPGEDKEKVGVILKDADEINSALLRKAAAATPLVVPDWSAYAREPFPHQREGIEWMLKLMGAALQDETDDLYRLQGGLLADDMGLGKTYMSLVAVGEYLASQRAAGKPQKPVLVVAPLSLLENWEDEVGKTFASIPFRDVVVLQSGRSLRDYRVKGAERESVQLASMIDDSSGMMDEQSIRYALHVGPEAGVHRLDMDRRLVLTTYQTLRDYQFSLCRIDWGMVIFDEAQNIKNPNALQTIAAKGLKADFKLLATGTPVENSLGDFWCLMHTVQPGLLGGWESFRDTWIKPILAASDEERDEVRARLGEQLRRAVGIFMLRRVKEDQLKGLPAKTILSGVEQADHGLQRYAAQLGVVMKGIQLQAYDEVLDSYRARRASAEDMRGTALAALTQLRSISLHPRLENESALYSEDGKQARQLMMESGKLAVLLQLLDEIRSKGEKVILFMMTKRLQRVLKLWLDQIYDLNVAVINGDTQAVATRAEDMTRKKLIAEFEAKSGFNILIMSPVAAGVGLTVIGANHVVHLERHWNPAKEAQASDRVYRIGQTKPVFIHLPAVTHPQFDSFDVHLDRLLRGKLMLKDAVVTPEAVSESEMMQSMGL

SEQ ID NO: 900 - protein, 708 aa, Pseudomonas aeruginosa; identical to SEQ ID NO: 85

SEQ ID NO: 901 - protein, 254 aa, Pseudomonas aeruginosa; identical to SEQ ID NO: 86

SEQ ID NO: 902 - protein, 670 aa, Pseudomonas aeruginosa; identical to SEQ ID NO: 118

SEQ ID NO: 903 - protein, 1028 aa, Pseudomonas aeruginosa; identical to SEQ ID NO: 151

SEQ ID NO: 904 - protein, 731 aa, Pseudomonas aeruginosa; identical to SEQ ID NO: 152

SEQ ID NO: 905 - protein, 245 aa, Pseudomonas aeruginosa; identical to SEQ ID NO: 102

SEQ ID NO: 906 - protein, 547 aa, Pseudomonas aeruginosa; identical to SEQ ID NO: 103

SEQ ID NO: 907 - protein, 1083 aa, Pseudomonas aeruginosa; identical to SEQ ID NO: 104

SEQ ID NO: 908 - protein, 708 aa, Pseudomonas aeruginosa; identical to SEQ ID NO: 85

SEQ ID NO: 909 - protein, 254 aa, Pseudomonas aeruginosa; identical to SEQ ID NO: 86

SEQ ID NO: 910 - protein, 670 aa, Pseudomonas aeruginosa; identical to SEQ ID NO: 118

SEQ ID NO: 911 - protein, 1028 aa, Pseudomonas aeruginosa; identical to SEQ ID NO: 151

SEQ ID NO: 912 - protein, 731 aa, Pseudomonas aeruginosa; identical to SEQ ID NO: 152

SEQ ID NO: 913 - protein, 245 aa, Pseudomonas aeruginosa; identical to SEQ ID NO: 102

SEQ ID NO: 914 - protein, 547 aa, Pseudomonas aeruginosa; identical to SEQ ID NO: 103

SEQ ID NO: 915 - protein, 1083 aa, Pseudomonas aeruginosa; identical to SEQ ID NO: 104

SEQ ID NO: 916 - protein, 708 aa, Pseudomonas aeruginosa; identical to SEQ ID NO: 85

SEQ ID NO: 917 - protein, 254 aa, Pseudomonas aeruginosa; identical to SEQ ID NO: 86

SEQ ID NO: 918 - protein, 670 aa, Pseudomonas aeruginosa; identical to SEQ ID NO: 118

SEQ ID NO: 919 - protein, 1028 aa, Pseudomonas aeruginosa; identical to SEQ ID NO: 151

SEQ ID NO: 920 - protein, 708 aa, Pseudomonas aeruginosa; identical to SEQ ID NO: 85

SEQ ID NO: 921 - protein, 254 aa, Pseudomonas aeruginosa; identical to SEQ ID NO: 86

SEQ ID NO: 922 - protein, 670 aa, Pseudomonas aeruginosa; identical to SEQ ID NO: 118

SEQ ID NO: 923 - protein, 1028 aa, Pseudomonas aeruginosa; identical to SEQ ID NO: 151

SEQ ID NO: 924 - protein, 731 aa, Pseudomonas aeruginosa; identical to SEQ ID NO: 152

SEQ ID NO: 925 - protein, 245 aa, Pseudomonas aeruginosa; identical to SEQ ID NO: 102

SEQ ID NO: 926 - protein, 547 aa, Pseudomonas aeruginosa; identical to SEQ ID NO: 103

SEQ ID NO: 927 - protein, 1083 aa, Pseudomonas aeruginosa; identical to SEQ ID NO: 104

SEQ ID NO: 928 - protein, 731 aa, Pseudomonas aeruginosa; identical to SEQ ID NO: 152

SEQ ID NO: 929 - protein, 245 aa, Pseudomonas aeruginosa; identical to SEQ ID NO: 102

SEQ ID NO: 930 - protein, 547 aa, Pseudomonas aeruginosa; identical to SEQ ID NO: 103

SEQ ID NO: 931 - protein, 1083 aa, Pseudomonas aeruginosa; identical to SEQ ID NO: 104

SEQ ID NO: 932 - protein, 708 aa, Pseudomonas aeruginosa; identical to SEQ ID NO: 85

SEQ ID NO: 933 - protein, 254 aa, Pseudomonas aeruginosa; identical to SEQ ID NO: 86

SEQ ID NO: 934 - protein, 670 aa, Pseudomonas aeruginosa; identical to SEQ ID NO: 118

SEQ ID NO: 935 - protein, 1028 aa, Pseudomonas aeruginosa; identical to SEQ ID NO: 151

SEQ ID NO: 936 - protein, 731 aa, Pseudomonas aeruginosa; identical to SEQ ID NO: 152

SEQ ID NO: 937 - protein, 245 aa, Pseudomonas aeruginosa; identical to SEQ ID NO: 102

SEQ ID NO: 938 - protein, 547 aa, Pseudomonas aeruginosa; identical to SEQ ID NO: 103

SEQ ID NO: 939 - protein, 1083 aa, Pseudomonas aeruginosa; identical to SEQ ID NO: 104

SEQ ID NO: 940 - protein, 731 aa, Pseudomonas aeruginosa; identical to SEQ ID NO: 152

SEQ ID NO: 941 - protein, 245 aa, Pseudomonas aeruginosa; identical to SEQ ID NO: 102

SEQ ID NO: 942 - protein, 547 aa, Pseudomonas aeruginosa; identical to SEQ ID NO: 103

SEQ ID NO: 943 - protein, 1083 aa, Pseudomonas aeruginosa; identical to SEQ ID NO: 104

SEQ ID NO: 944 - protein, 708 aa, Pseudomonas aeruginosa; identical to SEQ ID NO: 85

SEQ ID NO: 945 - protein, 254 aa, Pseudomonas aeruginosa; identical to SEQ ID NO: 86

SEQ ID NO: 946 - protein, 670 aa, Pseudomonas aeruginosa; identical to SEQ ID NO: 118

SEQ ID NO: 947 - protein, 1028 aa, Pseudomonas aeruginosa; identical to SEQ ID NO: 151

SEQ ID NO: 948 - protein, 708 aa, Pseudomonas aeruginosa; identical to SEQ ID NO: 85

SEQ ID NO: 949 - protein, 254 aa, Pseudomonas aeruginosa; identical to SEQ ID NO: 86

SEQ ID NO: 950 - protein, 670 aa, Pseudomonas aeruginosa; identical to SEQ ID NO: 118

SEQ ID NO: 951 - protein, 1013 aa, Pseudomonas aeruginosa; identical to SEQ ID NO: 147

SEQ ID NO: 952 - protein, 708 aa, Pseudomonas aeruginosa; identical to SEQ ID NO: 85

SEQ ID NO: 953 - protein, 254 aa, Pseudomonas aeruginosa; identical to SEQ ID NO: 86

SEQ ID NO: 954 - protein, 670 aa, Pseudomonas aeruginosa; identical to SEQ ID NO: 118

SEQ ID NO: 955 - protein, 1013 aa, Pseudomonas aeruginosa; identical to SEQ ID NO: 147

SEQ ID NO: 956 - protein, 731 aa, Pseudomonas aeruginosa
MDYSKWLDLWDKATPEQLIAPVFVFSLVTVLCLWYLLRYFVRSFALSRRLKKLTRQVRAIKELQPAKRRSELEQLFQEHTLWHAWQEYAETLHDQFEVREGEQRLLCSRATAGAGHFFTAQTVVETPLGTEFYKHLPGILTGIGIVGTFFGLMLGLQHFDPSTPEQVSSSVDQLLKDVLFAFLGSFFSIFASIGVTLTEKWRLGRCYKHLETLTESIDGLFGSGVGEEYLAELVKSSNESAIQTRQLKDSLVTDLREMLQNLVDTQVRESLKLADTLSASYRDSGQVLAEQIGGAIENSLKSPLEVIAGAVNTASGDQSNQVQSLLTDVLTAFMSKLESTFGQQFNGLHEMLGQSVAAMQSMQQGFNELVGDMRSASEASSQNSAKMIAQLLADMQAGQNSMQAGMNEMLANLQTSIARIGSEGEGAGERMAKQLEKLFADSEARQQAMAANLQAFVESMQQSMGQGQQETMAKIAGSVDVLGEQLGGLFKQLEHNRTQMDQASKVAQVELHRGTREMVGGLEEQVKTLLDAVADQQGAMQDSLKLLGAQTEQHLQSMQQGAEKMRLAAERFDSAGQSVSKAGEATAGVLGALQGTSGDLIGASRELTSVVADYRNNREALNQTLAVIQGVVATTQGESAGRSQYLQDLKQQGERLQALNREVNDYLEQISAVLGKGFNEFSEGVDRSLRQTLGSLDAELHKAMTSLAGGVEGVKESLEDFSDIMERVQRR

SEQ ID NO: 957 - protein, 245 aa, Pseudomonas aeruginosa; identical to SEQ ID NO: 877

SEQ ID NO: 958 - protein, 558 aa, Pseudomonas aeruginosa
MNRALSSLSAAIASGLERQIERSGDVGLSALPSLKRASSELSRRFDQVEKALAPPHEKRLLALGKFKREQALTSSEWRLVFAGLADDDEVSVPVLEDDQLFGRVHREVAGRIEQRSLSRRDWLALCFSYFAYDEHKPDDNANWRMLRDDIDRGFDAVRQRIGREKEWMRIVAEHRELFGVQAGARLAEEIFEGRARDLSSLQAIAQVPDGSWLWQRIFAVLLSRIFLLDDETFLKRLRELVALGQLNTRYLNQVLSACLTRYHRSRYREQSSSLLKQVALDHWGSPQMRSRQNAWLQYVEQPVCAMVVAWFAKEDLEHFFTLLKGEAEVDQSRLFYWLRFTNQMSYTRIVMGSDAWHDRSSDFVAFREKNKGRLSQLTGGSSHINAVVMQIGDYFFVEFSGTGHACYVYRADRLPFNPDQQVLGLNTELKQKGHKPAPMRHSPAPRRPNVVEGWLEKFDDELRALGIIAQRPASYTQPRGSEDKPAAHSAASAPVAGDSLDVQVKSMLGSVPYKTFDHRSTSGVYQVLLARDDAAAKTALLRLGFKAVKNNALMFWRL

SEQ ID NO: 959 - protein, 1083 aa, Pseudomonas aeruginosa
MLGRFFSGKDRSQPTKGAVPGAYQIEEEGFCYALSLADDDASWPVAAYLDQLFEEDYASQLSDRWLLPWESIYQLLDDPEHASSLPLLGLPAIANLQPQLASTGGLSDPDFKVFIRSWRNPQTGNPITFERVGAVARHAGTTELLPRAVWELLKAIRDLHATQQQAPGEVANQIGWANIRKLAKRAGAGLDGFLDKTVVVKPEHLRLKPRKAVVAGTPIIELDVAFVGQPDNWLASFDGYKQVQDKYRVLGADGTVTHVLIEPDVKAVLESVRALPGRRVAGDEALSLVRNPYSVIGDAAEKVVDADEYEEQLADAGIYFHRFRLEPFLGEDGKHIQSISLFLEPISSKPLPEIELRFDFAHEFAPFVNELQVKLAAGMPAGFWQGYELELSDFDLAQLAGVNELLRHWQRQEAGQTFEAVLDLASYGDRVVGIGEAERITSPFLVKEATENWLPADVKALGVDAELLSQWDPASREDFEEFEHRLDQARVAGDEQVCLPGTETPLPFQVAEQLYEAWSKKLNPVEPKPPVVTEPVAGRAVLHIEHNIEEATYAQRREAALLAGRHANADIPELLRPEVQLRDHQMKGVAWMQHLFGLSPDHVAGCLLADDMGLGKTIQLLTFVVWYLEQNPQGKPVLIVAPVSLLDNWERELQRFFYADALPVLKLYGGALSAVKFKKDEIPGDLQAKGIKNLLRPGWMGDARIVLTTYETLRDQELSLARQQWAIVICDEAQKIKNPAALITQAAKAIPSRFRIACTGTPVENTLIDLWCLFDFIQPGFLGGLNQFGREYQRPIEAGMERDTAKLERLRGLIEPQTLRRTKQDVAKDLPAKIEDQGCRKLLMHTLQRNLYLSEVAQYTQKQQMQEQLEQRESGMLGLLHRLKLVCAHPFSVQPDPRLREHSPKLQWLLSTLDNIARSGSGDKVILFTELRDIQRELQHAIQERFGFKPTVINGDTSTSSQSAHSRQRLIDRFQEQPGFSVIILSTVAVGFGVNVQAANHVIHFTRCWNPAKEDQATDRAYRIGQEKDVYVYYPTVRDAGMPTFEATLDELLQKRRALARDMLHGASELQVSEFGELLRAQG

SEQ ID NO: 960 - protein, 731 aa, Pseudomonas aeruginosa; identical to SEQ ID NO: 152

SEQ ID NO: 961 - protein, 245 aa, Pseudomonas aeruginosa; identical to SEQ ID NO: 102

SEQ ID NO: 962 - protein, 547 aa, Pseudomonas aeruginosa; identical to SEQ ID NO: 103

SEQ ID NO: 963 - protein, 1083 aa, Pseudomonas aeruginosa; identical to SEQ ID NO: 104

SEQ ID NO: 964 - protein, 708 aa, Pseudomonas aeruginosa; identical to SEQ ID NO: 85

SEQ ID NO: 965 - protein, 254 aa, Pseudomonas aeruginosa; identical to SEQ ID NO: 86

SEQ ID NO: 966 - protein, 670 aa, Pseudomonas aeruginosa; identical to SEQ ID NO: 118

SEQ ID NO: 967 - protein, 1013 aa, Pseudomonas aeruginosa; identical to SEQ ID NO: 147

SEQ ID NO: 968 - protein, 708 aa, Pseudomonas aeruginosa; identical to SEQ ID NO: 85

SEQ ID NO: 969 - protein, 254 aa, Pseudomonas aeruginosa; identical to SEQ ID NO: 86

SEQ ID NO: 970 - protein, 670 aa, Pseudomonas aeruginosa; identical to SEQ ID NO: 118

SEQ ID NO: 971 - protein, 1028 aa, Pseudomonas aeruginosa; identical to SEQ ID NO: 151

SEQ ID NO: 972 - protein, 731 aa, Pseudomonas aeruginosa; identical to SEQ ID NO: 152

SEQ ID NO: 973 - protein, 245 aa, Pseudomonas aeruginosa; identical to SEQ ID NO: 102

SEQ ID NO: 974 - protein, 547 aa, Pseudomonas aeruginosa; identical to SEQ ID NO: 103

SEQ ID NO: 975 - protein, 1083 aa, Pseudomonas aeruginosa; identical to SEQ ID NO: 104

SEQ ID NO: 976 - protein, 708 aa, Pseudomonas aeruginosa; identical to SEQ ID NO: 85

SEQ ID NO: 977 - protein, 254 aa, Pseudomonas aeruginosa; identical to SEQ ID NO: 86

SEQ ID NO: 978 - protein, 670 aa, Pseudomonas aeruginosa; identical to SEQ ID NO: 118

SEQ ID NO: 979 - protein, 1013 aa, Pseudomonas aeruginosa; identical to SEQ ID NO: 147

SEQ ID NO: 980 - protein, 731 aa, Pseudomonas aeruginosa; identical to SEQ ID NO: 152

SEQ ID NO: 981 - protein, 245 aa, Pseudomonas aeruginosa; identical to SEQ ID NO: 102

SEQ ID NO: 982 - protein, 547 aa, Pseudomonas aeruginosa; identical to SEQ ID NO: 103

SEQ ID NO: 983 - protein, 1083 aa, Pseudomonas aeruginosa; identical to SEQ ID NO: 104

SEQ ID NO: 984 - protein, 731 aa, Pseudomonas aeruginosa; identical to SEQ ID NO: 152

SEQ ID NO: 985 - protein, 245 aa, Pseudomonas aeruginosa; identical to SEQ ID NO: 102

SEQ ID NO: 986 - protein, 547 aa, Pseudomonas aeruginosa; identical to SEQ ID NO: 103

SEQ ID NO: 987 - protein, 1083 aa, Pseudomonas aeruginosa; identical to SEQ ID NO: 104

SEQ ID NO: 988 - protein, 708 aa, Pseudomonas aeruginosa; identical to SEQ ID NO: 85

SEQ ID NO: 989 - protein, 254 aa, Pseudomonas aeruginosa; identical to SEQ ID NO: 86

SEQ ID NO: 990 - protein, 670 aa, Pseudomonas aeruginosa; identical to SEQ ID NO: 118

SEQ ID NO: 991 - protein, 1028 aa, Pseudomonas aeruginosa; identical to SEQ ID NO: 151

SEQ ID NO: 992 - protein, 708 aa, Pseudomonas aeruginosa; identical to SEQ ID NO: 85

SEQ ID NO: 993 - protein, 254 aa, Pseudomonas aeruginosa; identical to SEQ ID NO: 86

SEQ ID NO: 994 - protein, 670 aa, Pseudomonas aeruginosa; identical to SEQ ID NO: 118

SEQ ID NO: 995 - protein, 1013 aa, Pseudomonas aeruginosa; identical to SEQ ID NO: 147

SEQ ID NO: 996 - protein, 731 aa, Pseudomonas aeruginosa; identical to SEQ ID NO: 97

SEQ ID NO: 997 - protein, 245 aa, Pseudomonas aeruginosa; identical to SEQ ID NO: 98

SEQ ID NO: 998 - protein, 558 aa, Pseudomonas aeruginosa; identical to SEQ ID NO: 138

SEQ ID NO: 999 - protein, 1083 aa, Pseudomonas aeruginosa; identical to SEQ ID NO: 100

SEQ ID NO: 1000 - protein, 731 aa, Pseudomonas aeruginosa; identical to SEQ ID NO: 152

SEQ ID NO: 1001 - protein, 245 aa, Pseudomonas aeruginosa; identical to SEQ ID NO: 102

SEQ ID NO: 1002 - protein, 547 aa, Pseudomonas aeruginosa
MSRALSSLSDAIARSLQRQQERTADTGLNRFVDLQRANDELTRRFNQVEKALPPPQEKRREALRKFRRDKQLSSTPSEYRPVFAGLADKDDGGLPVLEDDVLFELVHREVSIRSDQQKLSRKDWLALCYSYFFYDHAKPADNSNWRVLRSDIDQGLDAVKRRIGREKEWMRIVQQHRELFGDQAGKQLAEEIFAGRAKDLSALQTIAQVPDSSWLWKRIFDVLLSCIDDLDDDTFVQRLPELTELGQLNNRYMDKVLSACLTRYYRSRFREQSSSLLKQAALEHWGSPQLRSDQNRWLNHVEQPVCAMVMAWFAKEDLEHFFRLLKGEAEVDHSRLFYWLRFANQMSYTRIVMGNDAWNDRGSDFVAFREKNKGRLSQLTGASRHVSAVVMQIGQFFFVEFSGTGHACYVYKADQAPFNPDRIKLDLTTELKQQGRELKRMSHSPAPRRPNLVEGWLEKFDTELRELGIVPQSPSGHNEPRKPGSQSSIEIQVAAQLRHVNYQLMDNRSKGGALMVKLARDDARARVALARLGFKEMNKNPLTFWRS

SEQ ID NO: 1003 - protein, 1083 aa, Pseudomonas aeruginosa; identical to SEQ ID NO: 104

SEQ ID NO: 1004 - protein, 731 aa, Pseudomonas aeruginosa; identical to SEQ ID NO: 956

SEQ ID NO: 1005 - protein, 245 aa, Pseudomonas aeruginosa; identical to SEQ ID NO: 877

SEQ ID NO: 1006 - protein, 558 aa, Pseudomonas aeruginosa; identical to SEQ ID NO: 958

SEQ ID NO: 1007 - protein, 1083 aa, Pseudomonas aeruginosa; identical to SEQ ID NO: 959

SEQ ID NO: 1008 - protein, 731 aa, Pseudomonas aeruginosa; identical to SEQ ID NO: 97

SEQ ID NO: 1009 - protein, 245 aa, Pseudomonas aeruginosa; identical to SEQ ID NO: 98

SEQ ID NO: 1010 - protein, 558 aa, Pseudomonas aeruginosa; identical to SEQ ID NO: 130

SEQ ID NO: 1011 - protein, 1083 aa, Pseudomonas aeruginosa; identical to SEQ ID NO: 100

SEQ ID NO: 1012 - protein, 708 aa, Pseudomonas aeruginosa
MMDLLQHLIPDFAHMFSANPNGISAWFWSATAVIFVLSLYFLFVHFRRFRTRLRALRSLLEGQSKETLALSRRETMQKAQGLDAPNVGMLWREFDESLVLSSDQKHLFNTLDAEHFFNARTLAPGLTASRLLAAAPSFLVAIGVLGTFVGLTVGLEGLVGTSDEIEALKGGINKLISGAAVAFMTSVWGVFFSLLLNFVEKMFERSALGQIQQLQHDIDFLYPRIPAEQSLVHIAEYGKESKEALQELHERIGDRLQETLNGMSEAMQTALTDALNNIMAPAIQTLVSTTSQQSTQVLEKLVGNFMDGMTSVGREQGLQMQQAAADVNAAVSGMSERLNQLFSSLNEQQGRQMEVAQQQSAAFETQLQRISGSAEERQAQMEQRFAELMSGLTNQLQTQLGTAQQRDEERQVLFERLLGQASSSQTAMLEQFSSSTREQMQAMAEAGNERHSNLEKVFSRLMMNLNTQLDSQMGAAEQREQARQQRFQEQLDQVSTHQQELLTSLATAVQATQQQSRLMADQHQQLLGQLKQVSEATAQSSKHLDSSANQLGLLSANLRQAADTLGQRLEAVTHGVEKAGQQNAELAAQLQGQAATLAQLQATLLEGAQRFEQAASEARNGFGEMKSAQQEFLSGVRHEFTALGEKLREQVEAVEKQAEEWLRSYAGEVRVQTDERMNQWNEVSLKYADQMHRVVQNMSSILDELEAR

SEQ ID NO: 1013 - protein, 254 aa, Pseudomonas aeruginosa
MRLGKSKEVSVDEENPYWMSFSDIMSALLVIFILASVILILQLMEIQKKLKEREVQFEQELVELKKAEQVRRTILDEAVEALRKRGIKVEVSENHTVLSIPNDLLGFDTGAYDIHAAYQARALEIGKVINEVISREDRVEFLDTIFIEGHTDNRPLQGFMGKGNWGLSTFRAISLWQFWGSALSADEQLARLKNKDGKPLFSVSGYGETRPVLVDQQTEDDFKRNRRIDIRFTIRRPDSAQYEQVRERLEEVKP

SEQ ID NO: 1014 - protein, 721 aa, Pseudomonas aeruginosa; identical to SEQ ID NO: 898

SEQ ID NO: 1015 - protein, 1013 aa, Pseudomonas aeruginosa; identical to SEQ ID NO: 899

SEQ ID NO: 1016 - protein, 731 aa, Pseudomonas aeruginosa; identical to SEQ ID NO: 152

SEQ ID NO: 1017 - protein, 245 aa, Pseudomonas aeruginosa; identical to SEQ ID NO: 102

SEQ ID NO: 1018 - protein, 547 aa, Pseudomonas aeruginosa; identical to SEQ ID NO: 103

SEQ ID NO: 1019 - protein, 1083 aa, Pseudomonas aeruginosa; identical to SEQ ID NO: 104

SEQ ID NO: 1020 - protein, 708 aa, Pseudomonas aeruginosa; identical to SEQ ID NO: 85

SEQ ID NO: 1021 - protein, 254 aa, Pseudomonas aeruginosa; identical to SEQ ID NO: 86

SEQ ID NO: 1022 - protein, 670 aa, Pseudomonas aeruginosa; identical to SEQ ID NO: 118

SEQ ID NO: 1023 - protein, 1028 aa, Pseudomonas aeruginosa; identical to SEQ ID NO: 151

SEQ ID NO: 1024 - protein, 731 aa, Pseudomonas aeruginosa; identical to SEQ ID NO: 152

SEQ ID NO: 1025 - protein, 245 aa, Pseudomonas aeruginosa; identical to SEQ ID NO: 102

SEQ ID NO: 1026 - protein, 547 aa, Pseudomonas aeruginosa; identical to SEQ ID NO: 103

SEQ ID NO: 1027 - protein, 1083 aa, Pseudomonas aeruginosa; identical to SEQ ID NO: 104

SEQ ID NO: 1028 - protein, 708 aa, Pseudomonas aeruginosa; identical to SEQ ID NO: 172

SEQ ID NO: 1029 - protein, 254 aa, Pseudomonas aeruginosa; identical to SEQ ID NO: 173

SEQ ID NO: 1030 - protein, 640 aa, Pseudomonas aeruginosa; identical to SEQ ID NO: 174

SEQ ID NO: 1031 - protein, 1014 aa, Pseudomonas aeruginosa; identical to SEQ ID NO: 175

SEQ ID NO: 1032 - protein, 731 aa, Pseudomonas aeruginosa; identical to SEQ ID NO: 93

SEQ ID NO: 1033 - protein, 245 aa, Pseudomonas aeruginosa; identical to SEQ ID NO: 94

SEQ ID NO: 1034 - protein, 558 aa, Pseudomonas aeruginosa; identical to SEQ ID NO: 114

SEQ ID NO: 1035 - protein, 1083 aa, Pseudomonas aeruginosa; identical to SEQ ID NO: 96

SEQ ID NO: 1036 - protein, 708 aa, Pseudomonas aeruginosa; identical to SEQ ID NO: 85

SEQ ID NO: 1037 - protein, 254 aa, Pseudomonas aeruginosa; identical to SEQ ID NO: 86

SEQ ID NO: 1038 - protein, 670 aa, Pseudomonas aeruginosa; identical to SEQ ID NO: 118

SEQ ID NO: 1039 - protein, 1028 aa, Pseudomonas aeruginosa; identical to SEQ ID NO: 151

SEQ ID NO: 1040 - protein, 731 aa, Pseudomonas aeruginosa; identical to SEQ ID NO: 152

SEQ ID NO: 1041 - protein, 245 aa, Pseudomonas aeruginosa; identical to SEQ ID NO: 102

SEQ ID NO: 1042 - protein, 547 aa, Pseudomonas aeruginosa; identical to SEQ ID NO: 103

SEQ ID NO: 1043 - protein, 1083 aa, Pseudomonas aeruginosa; identical to SEQ ID NO: 104

SEQ ID NO: 1044 - protein, 731 aa, Pseudomonas aeruginosa; identical to SEQ ID NO: 93

SEQ ID NO: 1045 - protein, 245 aa, Pseudomonas aeruginosa; identical to SEQ ID NO: 94

SEQ ID NO: 1046 - protein, 558 aa, Pseudomonas aeruginosa; identical to SEQ ID NO: 114

SEQ ID NO: 1047 - protein, 1083 aa, Pseudomonas aeruginosa; identical to SEQ ID NO: 96

SEQ ID NO: 1048 - protein, 731 aa, Pseudomonas aeruginosa; identical to SEQ ID NO: 152

SEQ ID NO: 1049 - protein, 245 aa, Pseudomonas aeruginosa; identical to SEQ ID NO: 102

SEQ ID NO: 1050 - protein, 547 aa, Pseudomonas aeruginosa; identical to SEQ ID NO: 103

SEQ ID NO: 1051 - protein, 1083 aa, Pseudomonas aeruginosa; identical to SEQ ID NO: 104

SEQ ID NO: 1052 - protein, 708 aa, Pseudomonas aeruginosa; identical to SEQ ID NO: 85

SEQ ID NO: 1053 - protein, 254 aa, Pseudomonas aeruginosa; identical to SEQ ID NO: 86

SEQ ID NO: 1054 - protein, 670 aa, Pseudomonas aeruginosa; identical to SEQ ID NO: 118

SEQ ID NO: 1055 - protein, 1028 aa, Pseudomonas aeruginosa; identical to SEQ ID NO: 151

SEQ ID NO: 1056 - protein, 708 aa, Pseudomonas aeruginosa; identical to SEQ ID NO: 85

SEQ ID NO: 1057 - protein, 254 aa, Pseudomonas aeruginosa; identical to SEQ ID NO: 86

SEQ ID NO: 1058 - protein, 670 aa, Pseudomonas aeruginosa; identical to SEQ ID NO: 118

SEQ ID NO: 1059 - protein, 1028 aa, Pseudomonas aeruginosa; identical to SEQ ID NO: 151

SEQ ID NO: 1060 - protein, 731 aa, Pseudomonas aeruginosa; identical to SEQ ID NO: 152

SEQ ID NO: 1061 - protein, 245 aa, Pseudomonas aeruginosa; identical to SEQ ID NO: 102

SEQ ID NO: 1062 - protein, 547 aa, Pseudomonas aeruginosa; identical to SEQ ID NO: 103

SEQ ID NO: 1063 - protein, 1083 aa, Pseudomonas aeruginosa; identical to SEQ ID NO: 104

SEQ ID NO: 1064 - protein, 708 aa, Pseudomonas aeruginosa; identical to SEQ ID NO: 85

SEQ ID NO: 1065 - protein, 254 aa, Pseudomonas aeruginosa; identical to SEQ ID NO: 86

SEQ ID NO: 1066 - protein, 670 aa, Pseudomonas aeruginosa; identical to SEQ ID NO: 874

SEQ ID NO: 1067 - protein, 1028 aa, Pseudomonas aeruginosa; identical to SEQ ID NO: 151

SEQ ID NO: 1068 - protein, 782 aa, Pseudomonas aeruginosa
MTELLHHLWPNFALLKQGSTEALGAFFWIVMATIFVGSLLALLRSWLHFKGRMGSLSKLLAGQTRENLAINRREMLQKADALKDKRIASLWYEFDDSLVASSDQKKLFNTLDADHFFNARTLATGLTASRLLGALPGLLVGLGVLATFVGLTIGLSKLKLDSHAGVEQLRAGIDVMIQGAAVAFMASVWGVFFSLVLNLIEKLVERRALGQILDLQHRIDALYPLIPAEQSLVHIADYSRESKEALQELHERIGDRLQESLVGMNEAMQAALTDALNNIMAPAIQTLVSTTSQQSTQVLERLVSNFTDGLTSAGREQGSLMQQAAADVNAAVGGMTDRLNQLFQTLSDQQGRQQEAARQQSGEFQAQMERISSSADQRQQQLESRFSELLSGLTGQLDTQLGSAQRRDEERQALFERTLVEAGASQSALLEKFASASREQLQAMAEAGNERHGNLEKVFSRLMMTLNSQLDSQMGAAETREQERALRHDQQQAAVLAQQQQLIGSLGQTSQQQIGAIAEAAAAQQRALEESVSKLLGNFNEQMSGHGQQAEQREHSRQQRFNEQLESMAAQQHALLEGIATAVQATQQQSRQMAEQHQQLMGRLQQASDAAATSSRHMDSSANQLGLLSTNVRQAAELLGQRLESVTQRIESAGEQNAELAGQLRQQATALAQLQGALLDGAQRFEQAAAEARNGFGEMRSHQQEFLTGVRGEFTALGEALRSQVQGVEQQAEQWLRSYSTEVRDQVHERMDQWNKETLSFAGQMHAAVQAISNVVDELEAR

SEQ ID NO: 1069 - protein, 247 aa, Pseudomonas aeruginosa
MRWRKSHDVPMEDEDPYWKSFVDIMSALLVLFILASVVLILQLMEKSADFDQQVEQLKKAETVRQQILDEAVEKLRQRGIKVEVSENHTVLRIPNELLGFDTGAFEIQPRYQPTALEIGEVINQVISREDRVNYLDTIFIEGHTDNRPFPGFMGKGNWGLSTFRAISLWQFWSTEIPEAERLNRLSNQDGEPLFSVSGYAETRPVSKRQDGEEDYRLNRRIDIRFTIRRPQSSEYEAVKSLLGNSTK

SEQ ID NO: 1070 - protein, 723 aa, Pseudomonas aeruginosa
MKLPPIDNRPGEWSPTVIEGWSRLVEKASRMKAKVGSGDAFERAIARLRSMASSGRFDGLVELLSRRLGARALTWLWLHDDFAGTRLFNGRMLEALLEYQQPRLSRLTLIQLLQLYFIVFDRLDERDKQAETSLRGRLEWHLLDQLKRLPEKARPQSFVADPLTTLKTEGDWLLALDGPLRLAQAVRQRGKELAQTFEEMGLSGFDVGRYGDICRAHFYLERLRQLRPGEWDEVLEELLKPSVSKAPYEADRRIGHAALEIMIDRAGDDPGDTWQNFILSLAGDPRIASSAPNFREWWKPLGEERIGKVRGWLSKEDLRLFLQAVEQYGVESGKEDLQRMFPARKLFLEGLFKLGLIRYTRLMLGNSATHSVKRILGGEVKTSFASMDSVMNDKAVIYLDCGDFHLVEGSHSFRIWAYLGQPGHWIKSYERNHFSHHDLTISLPREYKAAYPGLPYEAVVHNGSWQHKVFEFLAENGIALDIEKLLSRSDYKAYLSRYGMPVVGLKKARVEPLVPPTAESGISKDRELGAMSSAESNLIKLQAARRVAPPAGAPGPSQIELNKTQRSILTYLASHSDRSMGEIRRAMDGDEALLYEIQESLRGRLAAYVQQNDVFQWSLSEAGRNLLGDVPSPARTKSPSAGSSNSAAQLKRLGAFELQVLWYFKSNPGDRVRSAANVLDVEAREINRVLYGALKNMCEQGRNFGWAVKADISDALEQLPTES

SEQ ID NO: 1071 - protein, 1009 aa, Pseudomonas aeruginosa
MGLADIFKSLLGEGRATLSTQQGFAYAADSDGVNFYLDKKVYAALAAGEGNALQKVQLIVLRMLQEQGLAEPLANGFHVAAEDVAGMDDEQAEILRLPRRLSMSFVSRISGRTGHSGFRVDLTIQSKAGEVPFTRKGPLLYLTSTECYRLTPAELMGLMAWEYHQNLPAQLRGEASNLRMMAELQTAARSGMRVDLSHFERLDVVVPENIGVIATRLADGSLMLSPSLGDGSTPDQLEKRWSQLDMGADGGVLRIDNRVVLLEPQKMAAIKEVLGSKRIPADRVAEFIATPSAFLDAALVNLDLGFSVRVAGIGKLQHMEFGDLDNQKNDWFALDSRPAPAEIIPKLVQSEEDLQHFNELYKAAIEQGATSMTFGGETIDISDPVLVEQQLKRIEVSLRDPALDEVPGDSLSVEPKERVSVLLRDADEISSTLLRKASEAKPAHEPEWSAYARQPFPHQREGVEWMLGLLESAVCDDHDDLYRLQGGLLADDMGLGKTYMSLVTVGEYLAQQKASGRAQKPVLVVAPLSLLENWEDEVAQTFRSIPFRDIVVLQSGRDLSRFRVKGAERESAQLASLINDDGEMDDESIRYALTIGPEVGVHRLDMDRRLVLTTYQTLRDYQFSLCRIDWGLVIFDEAQNIKNPNAAQTRAAKGLKADFKLLATGTPVENSLGDFWCLMDTAQPGILGGWSQFRDNWIKPILAAADDEKDEVRRRVGADLREAVGRFMLRRIKEDQLKGLPSKTIHSGVAQPQGGLQLHAAHLAVSMKGMQLQAYDAVLEDFRARRATEDMRGAALAALSQLREISLHPRLREEAALMAGTASEARAHMAQSGKLVVLLDLLDRIRRGEEKVILFMVTKRLQRILKLWLDQIYGLDVAIINGETAAVAKKSDELTRKKLIGVFESKPGFNIMIMSPVAAGVGLTVVGANHVVHLERHWNPAKEAQASDRVYRIGQKKDVYIHLPAVLHPQFDSFDVHLDRLLRGKLMLKDAVVTPEMVSEGEIIRSMGL

SEQ ID NO: 1072 - protein, 731 aa, Pseudomonas aeruginosa; identical to SEQ ID NO: 140

SEQ ID NO: 1073 - protein, 245 aa, Pseudomonas aeruginosa; identical to SEQ ID NO: 141

SEQ ID NO: 1074 - protein, 558 aa, Pseudomonas aeruginosa; identical to SEQ ID NO: 142

SEQ ID NO: 1075 - protein, 1083 aa, Pseudomonas aeruginosa; identical to SEQ ID NO: 143

SEQ ID NO: 1076 - protein, 731 aa, Pseudomonas aeruginosa; identical to SEQ ID NO: 93

SEQ ID NO: 1077 - protein, 245 aa, Pseudomonas aeruginosa; identical to SEQ ID NO: 94

SEQ ID NO: 1078 - protein, 558 aa, Pseudomonas aeruginosa; identical to SEQ ID NO: 114

SEQ ID NO: 1079 - protein, 1083 aa, Pseudomonas aeruginosa; identical to SEQ ID NO: 96

SEQ ID NO: 1080 - protein, 708 aa, Pseudomonas aeruginosa
MMDLLQHLIPDFAHMFSANPNGISAWFWSATAVIFVLSLYFLFVHFRRFRTRLRALRSLLEGQSKETLALSRRETMQKAQGLDAPNVGMLWREFDESLVLSSDQKHLFNTLDAEHFFNARTLAPGLTASRLLAAAPSFLVAIGVLGTFVGLTVGLEGLVGTSDEIESLKGGINKLISGAAVAFMTSVWGVFFSLLLNFVEKMFERSALGQIQQLQHDIDSLYTRIPAEQSLVHIAEYGKESKEALQELHERIGDRLQETLNGMSEAMQTALTDALNNIMAPAIQTLVSTTSQQSTQVLEKLVGNFMDGMTSVGREQGLQMQQAAADVNAAVSGMSERLNQLFSSLNEQQGRQMEVAQQQSAAFETQLQRISGSAEERQAQMEQRFAELMSGLTNQLQTQLGTAQQRDEERQVLFERLLGQASSSQTAMLEQFSSSTREQMQAMAEAGNERHSNLEKVFSRLMMNLNTQLDSQMGAAEQREQARQQRFQEQLDQVSTHQQELLSGLASAVQATQQQSRLMADQHQQLLGQLKQVSDATAQSSKHLDSSANQLGLLSANLRQAADTLGQRLEAVTHGVEKAGQQNAELAAQLQGQAATLAQLQATLLEGAQRFEQAAGEARNGFGEMKSAQQEFLSGVRHEFTALGEKLREQVEAVEKQAEEWLRSYAGEVRTQIDDRMNKWNEVSLSYADQMHRTVQAMSSILDELEAR

SEQ ID NO: 1081 - protein, 254 aa, Pseudomonas aeruginosa
MRLGKSKEVSVDEENPYWMSFSDIMSALLVIFILASVILILQLMEKETELDRRQDQFKQELEELKAAEQVRRTILDEAVEALRKRGIKVEVSENHTVLSIPDDLLGFKSGVFEIDTAYQMDALQIGKVINEVISREDRVEFLDTIFIEGHTDNRPLQGFMGKGNWGLSTFRAISLWQFWGSALSPNEQLARLKNKDGKPLFSVSGYGETRPVLVDQQTEDDFKRNRRIDIRFTIRRPDSAQYEQVRERLEEVKP

SEQ ID NO: 1082 - protein, 721 aa, Pseudomonas aeruginosa
MKLPPVHMPVAEWAPVVRERWTVLVEKGARMKAASGKSDAFDAMLARLRDMASTGRFDGLPELLKRRLTARALTWLWLNDETMGRRLLSSRLLSVLVDAQQPRLTRITLQQLAQFYFRRFDKLDEHDGLRKQLEQILLQQLHLLPEPKVSGPQADPLVTLKRDGHWLLPPDGPVQLVERVRDSGHELGQTFEVMGLQGFDDGRYGDICRAHFYLETLRGLSPGEYDPVLDELQKPAVSKAPYEGERRIGHVALEILIDRAGQEPGEVWQNFILNLAGDPRIASTAANYREWWQPLGEARIQKVRGWLSKEDLRLFLQAVEQYGLESGKEDLKRMFPARKLFLEGLFALGLIRHTRLMLGRNAKQSVKRILGSEVKTSFAGMDSAMSDKAVIYLDCGDFHLVEGSHSFKIWVYLGQPGHWVKSYERNQFSHLDLTTSLPSQYKAAYPSLPYEAVTHNGSWQRKVFDFLADNGIALDIEKLLSRSEYKAYLSKYGLPAVSGKKARVEPLVQQSAKSDSAPVSQIGATGFVAAHRMAEPRPPAVDVFASEAPRASGTELTDTQLSILAYLSKHPESLMGDIRRALEGDEALFYEIQDALRGSISSYVQQNEVFQWSLSSKGEALLRRADLDPAPNTSDADQQPLMATLQRLGTFDLQVLWYFKNNPGDKVRHAANVFGVEARVINQVLYGSLKGMCVQDKQFGWSVNETTRLSLEALDKQDRAE

SEQ ID NO: 1083 - protein, 1013 aa, Pseudomonas aeruginosa
MGLMDIFRSLIGERDGALSTQQGFQSQPDSNGLNFYLPLPAFKALQAGQGSALEKIQLIVLNMLVEQGIAENTANGFHIGAEDIAGMDLEQAEILRLPRRLPGRFLTSISGRTGNSGFRVAITLEMPDGPASFSRKGPYLYLTSSECYWLTPAEMMGLQAWELHESLGPEQRGEAANLRLMAELQTAARSGMRIDLSHFERLDVVVPQNIGVIATRLPDGSLQLCPSLGDGSSVDQLEKRWSQLDMTADGGVLRIDNRLLLLDQARMDGIRNVLANKRIPADQVNEFIATPTAFLDAALVNLEVGFSARVAGIGKLQHMDFGVLDATKNDWFALDKRPAPVAILSKLIQSPDDLQRFEEVLQAANEQGATSLSFAGEVIDISDAPAVQQELARARQNMTDVSDSEPHSEEGVLPGEDKEKVGVILKDADEINSALLRKAAAATPLVVPDWSAYAREPFPHQREGIEWMLKLMGAALQDETDDLYRLQGGLLADDMGLGKTYMSLVAVGEYLASQRAADKPQKPVLVVAPLSLLENWEDEVGKTFASIPFRDVVVLQSGRSLRDYRVKGAERESVQLASMIDDSSGMMDEQSIRYALHVGPEAGVHRLDMDRRLVLTTYQTLRDYQFSLCRIDWGMVIFDEAQNIKNPNALQTIAAKGLKADFKLLATGTPVENSLGDFWCLMHTVQPGLLGGWESFRDTWIKPILAASDEERDEVRARLGEQLRRAVGIFMLRRVKEDQLKGLPAKTILSGVEQADHGLQRYAAQLGVVMKGIQLQAYDEVLDSYRARRASAEDMRGTALAALTQLRSISLHPRLENESALYCEDGKQARQLMMESGKLAVLLQLLDEIRSKGEKVILFMMTKRLQRVLKLWLDQIYDLNVAVINGDTQAVATRAEDMTRKKLIAEFEAKSGFNILIMSPVAAGVGLTVIGANHVVHLERHWNPAKEAQASDRVYRIGQTKPVFIHLPAVTHPQYDSFDVHLDRLLRGKLMLKDAVVTPEAVAESEMIQSMGL

SEQ ID NO: 1084 - protein, 708 aa, Pseudomonas aeruginosa; identical to SEQ ID NO: 85

SEQ ID NO: 1085 - protein, 254 aa, Pseudomonas aeruginosa; identical to SEQ ID NO: 86

SEQ ID NO: 1086 - protein, 670 aa, Pseudomonas aeruginosa; identical to SEQ ID NO: 118

SEQ ID NO: 1087 - protein, 1028 aa, Pseudomonas aeruginosa; identical to SEQ ID NO: 151

SEQ ID NO: 1088 - protein, 731 aa, Pseudomonas aeruginosa; identical to SEQ ID NO: 152

SEQ ID NO: 1089 - protein, 245 aa, Pseudomonas aeruginosa; identical to SEQ ID NO: 102

SEQ ID NO: 1090 - protein, 547 aa, Pseudomonas aeruginosa; identical to SEQ ID NO: 103

SEQ ID NO: 1091 - protein, 1083 aa, Pseudomonas aeruginosa; identical to SEQ ID NO: 104

SEQ ID NO: 1092 - protein, 708 aa, Pseudomonas aeruginosa; identical to SEQ ID NO: 85

SEQ ID NO: 1093 - protein, 254 aa, Pseudomonas aeruginosa; identical to SEQ ID NO: 86

SEQ ID NO: 1094 - protein, 670 aa, Pseudomonas aeruginosa; identical to SEQ ID NO: 118

SEQ ID NO: 1095 - protein, 1028 aa, Pseudomonas aeruginosa; identical to SEQ ID NO: 151

SEQ ID NO: 1096 - protein, 731 aa, Pseudomonas aeruginosa; identical to SEQ ID NO: 152

SEQ ID NO: 1097 - protein, 245 aa, Pseudomonas aeruginosa; identical to SEQ ID NO: 102

SEQ ID NO: 1098 - protein, 547 aa, Pseudomonas aeruginosa; identical to SEQ ID NO: 103

SEQ ID NO: 1099 - protein, 1083 aa, Pseudomonas aeruginosa; identical to SEQ ID NO: 104

SEQ ID NO: 1100 - protein, 708 aa, Pseudomonas aeruginosa; identical to SEQ ID NO: 1080

SEQ ID NO: 1101 - protein, 254 aa, Pseudomonas aeruginosa; identical to SEQ ID NO: 1081

SEQ ID NO: 1102 - protein, 721 aa, Pseudomonas aeruginosa; identical to SEQ ID NO: 1082

SEQ ID NO: 1103 - protein, 1013 aa, Pseudomonas aeruginosa; identical to SEQ ID NO: 1083

SEQ ID NO: 1104 - protein, 708 aa, Pseudomonas aeruginosa; identical to SEQ ID NO: 85

SEQ ID NO: 1105 - protein, 254 aa, Pseudomonas aeruginosa; identical to SEQ ID NO: 86

SEQ ID NO: 1106 - protein, 670 aa, Pseudomonas aeruginosa; identical to SEQ ID NO: 118

SEQ ID NO: 1107 - protein, 1013 aa, Pseudomonas aeruginosa; identical to SEQ ID NO: 147

SEQ ID NO: 1108 - protein, 731 aa, Pseudomonas aeruginosa; identical to SEQ ID NO: 93

SEQ ID NO: 1109 - protein, 245 aa, Pseudomonas aeruginosa; identical to SEQ ID NO: 94

SEQ ID NO: 1110 - protein, 558 aa, Pseudomonas aeruginosa; identical to SEQ ID NO: 114

SEQ ID NO: 1111 - protein, 1083 aa, Pseudomonas aeruginosa; identical to SEQ ID NO: 96

SEQ ID NO: 1112 - protein, 731 aa, Pseudomonas aeruginosa; identical to SEQ ID NO: 152

SEQ ID NO: 1113 - protein, 245 aa, Pseudomonas aeruginosa; identical to SEQ ID NO: 102

SEQ ID NO: 1114 - protein, 547 aa, Pseudomonas aeruginosa; identical to SEQ ID NO: 103

SEQ ID NO: 1115 - protein, 1083 aa, Pseudomonas aeruginosa; identical to SEQ ID NO: 104

SEQ ID NO: 1116 - protein, 708 aa, Pseudomonas aeruginosa; identical to SEQ ID NO: 85

SEQ ID NO: 1117 - protein, 254 aa, Pseudomonas aeruginosa; identical to SEQ ID NO: 86

SEQ ID NO: 1118 - protein, 670 aa, Pseudomonas aeruginosa; identical to SEQ ID NO: 118

SEQ ID NO: 1119 - protein, 1028 aa, Pseudomonas aeruginosa; identical to SEQ ID NO: 151

SEQ ID NO: 1120 - protein, 708 aa, Pseudomonas aeruginosa; identical to SEQ ID NO: 85

SEQ ID NO: 1121 - protein, 254 aa, Pseudomonas aeruginosa; identical to SEQ ID NO: 86

SEQ ID NO: 1122 - protein, 670 aa, Pseudomonas aeruginosa; identical to SEQ ID NO: 118

SEQ ID NO: 1123 - protein, 1028 aa, Pseudomonas aeruginosa; identical to SEQ ID NO: 151

SEQ ID NO: 1124 - protein, 731 aa, Pseudomonas aeruginosa; identical to SEQ ID NO: 152

SEQ ID NO: 1125 - protein, 245 aa, Pseudomonas aeruginosa; identical to SEQ ID NO: 102

SEQ ID NO: 1126 - protein, 547 aa, Pseudomonas aeruginosa; identical to SEQ ID NO: 103

SEQ ID NO: 1127 - protein, 1083 aa, Pseudomonas aeruginosa; identical to SEQ ID NO: 104

SEQ ID NO: 1128 - protein, 731 aa, Pseudomonas aeruginosa; identical to SEQ ID NO: 152

SEQ ID NO: 1129 - protein, 245 aa, Pseudomonas aeruginosa; identical to SEQ ID NO: 102

SEQ ID NO: 1130 - protein, 547 aa, Pseudomonas aeruginosa; identical to SEQ ID NO: 103

SEQ ID NO: 1131 - protein, 1083 aa, Pseudomonas aeruginosa; identical to SEQ ID NO: 104

SEQ ID NO: 1132 - protein, 708 aa, Pseudomonas aeruginosa; identical to SEQ ID NO: 85

SEQ ID NO: 1133 - protein, 254 aa, Pseudomonas aeruginosa; identical to SEQ ID NO: 86

SEQ ID NO: 1134 - protein, 670 aa, Pseudomonas aeruginosa; identical to SEQ ID NO: 118

SEQ ID NO: 1135 - protein, 1028 aa, Pseudomonas aeruginosa; identical to SEQ ID NO: 151

SEQ ID NO: 1136 - protein, 731 aa, Pseudomonas aeruginosa; identical to SEQ ID NO: 152

SEQ ID NO: 1137 - protein, 245 aa, Pseudomonas aeruginosa; identical to SEQ ID NO: 102

SEQ ID NO: 1138 - protein, 547 aa, Pseudomonas aeruginosa; identical to SEQ ID NO: 103

SEQ ID NO: 1139 - protein, 1083 aa, Pseudomonas aeruginosa; identical to SEQ ID NO: 104

SEQ ID NO: 1140 - protein, 708 aa, Pseudomonas aeruginosa; identical to SEQ ID NO: 85

SEQ ID NO: 1141 - protein, 254 aa, Pseudomonas aeruginosa; identical to SEQ ID NO: 86

SEQ ID NO: 1142 - protein, 670 aa, Pseudomonas aeruginosa; identical to SEQ ID NO: 118

SEQ ID NO: 1143 - protein, 1028 aa, Pseudomonas aeruginosa; identical to SEQ ID NO: 151

SEQ ID NO: 1144 - protein, 731 aa, Pseudomonas aeruginosa; identical to SEQ ID NO: 152

SEQ ID NO: 1145 - protein, 245 aa, Pseudomonas aeruginosa; identical to SEQ ID NO: 102

SEQ ID NO: 1146 - protein, 547 aa, Pseudomonas aeruginosa; identical to SEQ ID NO: 103

SEQ ID NO: 1147 - protein, 1083 aa, Pseudomonas aeruginosa; identical to SEQ ID NO: 104

SEQ ID NO: 1148 - protein, 708 aa, Pseudomonas aeruginosa; identical to SEQ ID NO: 85

SEQ ID NO: 1149 - protein, 254 aa, Pseudomonas aeruginosa; identical to SEQ ID NO: 86

SEQ ID NO: 1150 - protein, 670 aa, Pseudomonas aeruginosa; identical to SEQ ID NO: 118

SEQ ID NO: 1151 - protein, 1028 aa, Pseudomonas aeruginosa; identical to SEQ ID NO: 151

SEQ ID NO: 1152 - protein, 708 aa, Pseudomonas aeruginosa; identical to SEQ ID NO: 85

SEQ ID NO: 1153 - protein, 254 aa, Pseudomonas aeruginosa; identical to SEQ ID NO: 86

SEQ ID NO: 1154 - protein, 670 aa, Pseudomonas aeruginosa; identical to SEQ ID NO: 118

SEQ ID NO: 1155 - protein, 1028 aa, Pseudomonas aeruginosa; identical to SEQ ID NO: 151

SEQ ID NO: 1156 - protein, 731 aa, Pseudomonas aeruginosa; identical to SEQ ID NO: 152

SEQ ID NO: 1157 - protein, 245 aa, Pseudomonas aeruginosa; identical to SEQ ID NO: 102

SEQ ID NO: 1158 - protein, 547 aa, Pseudomonas aeruginosa; identical to SEQ ID NO: 103

SEQ ID NO: 1159 - protein, 1083 aa, Pseudomonas aeruginosa; identical to SEQ ID NO: 104

SEQ ID NO: 1160 - protein, 708 aa, Pseudomonas aeruginosa; identical to SEQ ID NO: 85

SEQ ID NO: 1161 - protein, 254 aa, Pseudomonas aeruginosa; identical to SEQ ID NO: 86

SEQ ID NO: 1162 - protein, 670 aa, Pseudomonas aeruginosa; identical to SEQ ID NO: 118

SEQ ID NO: 1163 - protein, 1028 aa, Pseudomonas aeruginosa; identical to SEQ ID NO: 151

SEQ ID NO: 1164 - protein, 731 aa, Pseudomonas aeruginosa; identical to SEQ ID NO: 152

SEQ ID NO: 1165 - protein, 245 aa, Pseudomonas aeruginosa; identical to SEQ ID NO: 102

SEQ ID NO: 1166 - protein, 547 aa, Pseudomonas aeruginosa; identical to SEQ ID NO: 103

SEQ ID NO: 1167 - protein, 1083 aa, Pseudomonas aeruginosa; identical to SEQ ID NO: 104

SEQ ID NO: 1168 - protein, 708 aa, Pseudomonas aeruginosa; identical to SEQ ID NO: 85

SEQ ID NO: 1169 - protein, 254 aa, Pseudomonas aeruginosa; identical to SEQ ID NO: 86

SEQ ID NO: 1170 - protein, 670 aa, Pseudomonas aeruginosa
MKLPPVHMPVAEWAPVVRERWTVLVEKVARMKAASGKSDAFEAMLARLRDMASTGRFDGLPELLKRRLTARALTWLWLNDETMGRRLLSSRLLSVLVDAQQPRLTRITLQQLAQFYFRRFDKLDEHDGLRKQLEQILLQQLHLLPEPKVSGPQADPLVTLKRDAHWLLPPDGPVQLVERVRDSGHELGETFEVMGLQGFDDGRYGDICRVHFYLETLRGLAPGEYDPVLDELQKPAVSKAPYEGERRIGHVALEILIDRAGQEPGEVWQNFILNLAGDPRISRNSPNYREWWQFLGEERVQKVRGWLSKEDLRLFLQAVEQFGIETQNDDLQRMFPARKQFLEGLFKLKLIRNTRLLLGGRAQHSVKRILGKDVQTSFASMDGQMNDKAVIYLDCGDFHLVEGSHSFKIWVYLAAPGEALRSYERSSFSHSDLTTAVPKAYKRLYPELPYDAFTHHPPLSWQNRVFSFLADNGIALDIEQLLNRSDYQPYLRKFGMPVVNAKRTPVPPPSQTDFPAEPARSRVGKTGATTMSAPQGRKPAEMIARDSRAIPREEAATVRRSNQQHDPVVSHSVSSPDAAAPATARPSLVGEGLLTGLKPSALKILRYFVDNPGDKVRYAANVFGVDSREINQILYGPLKDMCTRDEQFGWTVNEAARLALEALDEQDRAE

SEQ ID NO: 1171 - protein, 1028 aa, Pseudomonas aeruginosa; identical to SEQ ID NO: 151

SEQ ID NO: 1172 - protein, 731 aa, Pseudomonas aeruginosa; identical to SEQ ID NO: 152

SEQ ID NO: 1173 - protein, 245 aa, Pseudomonas aeruginosa; identical to SEQ ID NO: 102

SEQ ID NO: 1174 - protein, 547 aa, Pseudomonas aeruginosa; identical to SEQ ID NO: 103

SEQ ID NO: 1175 - protein, 1083 aa, Pseudomonas aeruginosa; identical to SEQ ID NO: 104

SEQ ID NO: 1176 - protein, 708 aa, Pseudomonas aeruginosa; identical to SEQ ID NO: 85

SEQ ID NO: 1177 - protein, 254 aa, Pseudomonas aeruginosa; identical to SEQ ID NO: 86

SEQ ID NO: 1178 - protein, 670 aa, Pseudomonas aeruginosa; identical to SEQ ID NO: 118

SEQ ID NO: 1179 - protein, 1028 aa, Pseudomonas aeruginosa; identical to SEQ ID NO: 151

SEQ ID NO: 1180 - protein, 708 aa, Pseudomonas aeruginosa; identical to SEQ ID NO: 85

SEQ ID NO: 1181 - protein, 254 aa, Pseudomonas aeruginosa; identical to SEQ ID NO: 86

SEQ ID NO: 1182 - protein, 670 aa, Pseudomonas aeruginosa; identical to SEQ ID NO: 118

SEQ ID NO: 1183 - protein, 1028 aa, Pseudomonas aeruginosa; identical to SEQ ID NO: 151

SEQ ID NO: 1184 - protein, 731 aa, Pseudomonas aeruginosa; identical to SEQ ID NO: 152

SEQ ID NO: 1185 - protein, 245 aa, Pseudomonas aeruginosa; identical to SEQ ID NO: 102

SEQ ID NO: 1186 - protein, 547 aa, Pseudomonas aeruginosa; identical to SEQ ID NO: 103

SEQ ID NO: 1187 - protein, 1083 aa, Pseudomonas aeruginosa; identical to SEQ ID NO: 104

SEQ ID NO: 1188 - protein, 708 aa, Pseudomonas aeruginosa; identical to SEQ ID NO: 85

SEQ ID NO: 1189 - protein, 254 aa, Pseudomonas aeruginosa; identical to SEQ ID NO: 86

SEQ ID NO: 1190 - protein, 670 aa, Pseudomonas aeruginosa; identical to SEQ ID NO: 118

SEQ ID NO: 1191 - protein, 1028 aa, Pseudomonas aeruginosa; identical to SEQ ID NO: 151

SEQ ID NO: 1192 - protein, 731 aa, Pseudomonas aeruginosa; identical to SEQ ID NO: 152

SEQ ID NO: 1193 - protein, 245 aa, Pseudomonas aeruginosa; identical to SEQ ID NO: 102

SEQ ID NO: 1194 - protein, 547 aa, Pseudomonas aeruginosa; identical to SEQ ID NO: 103

SEQ ID NO: 1195 - protein, 1083 aa, Pseudomonas aeruginosa; identical to SEQ ID NO: 104

SEQ ID NO: 1196 - protein, 782 aa, Pseudomonas aeruginosa
MMEFLYHLLPNFSLLKGGSTEALGVIFWLVMATLFGYSLVSLVMSSIRFRVRVRALNSLVTGQNRENLALSRREILQKALSLKDQRIGALWREFDDSLVSSSDHKQLFNTLDAEHFFNVRTLAHGLSGSRFFSSLPGLLVGLGVLATFVGLTIGLSKLKLDSTAGVDQLREGISVMIQGAAVAFMASVWGVGFSLILNLIEKIAERWALGRVQDLQHRIDTLYPLIPAEQSLVHIADYSRESKEALQELHERIGDRLQESLVGMNEAMQAALTDALNNIMAPAIQTLVSTTSQQSTQVLERLVSNFTDGLTSAGREQGSLMQQAAADVNAAVGGMTDRLNQLFQTLSDQQGRQQEAARQQSGEFQAQMERISSSADQRQQQLESRFSELLSGLTGQLDTQLGSAQRRDEERQALFERTLVEAGASQSALLEKFASASSEQLQAMAEAGNERHGNLEKVFSRLMMTLNSQLDSQMGAAEKREQDRALRHDQQQAAVLAQQQQLIGSLGQTSQQQIGAIAEAAAAQQRALEESVSKLLGNFNEQMSGHGQQAEQREHSRQQRFNEQLESMAAQQHALLEGIATAVQATQQQSRQMAEQHQQLMGRLQQASDAAATSSRHMDSSANQLGLLSTNVRQAAELLGQRLESVTQRIESAGEQNAELAGQLRQQATALAQLQGALLDGAQRFEQAAAEARSGFGEMRSHQQEFLTGVRGEFTALGEALRSQVQGVEQQAEQWLRSYSTEVRDQVHERMDQWNKETLSFAGQMHAAVQAISNVVDELEAR

SEQ ID NO: 1197 - protein, 247 aa, Pseudomonas aeruginosa; identical to SEQ ID NO: 165

SEQ ID NO: 1198 - protein, 723 aa, Pseudomonas aeruginosa; identical to SEQ ID NO: 166

SEQ ID NO: 1199 - protein, 964 aa, Pseudomonas aeruginosa
MQLTLAPAPGARAVIRDEEWIIQNADQCNLGGWQLSCIGVSETVRNRHALFLTELEDVTLIDPAKTELIYDDSPTFTASRLFIEARLRQSALQSDSVVIGHHAVMDALPFQLQPAHRVLEQLRPRLLIADTVGLGKTLEAGILTTELMRRGKARRILVVTTKSMMRQFQQEFWSRFTIPLTRLDSAGIQRIRREIPTNHNPFNYYDRTIISVDTLKRDSEYRHYLEKAWWDLIIIDEAHNVSYKGNRTQSNRLAELLSQRSDALILLTATPHNGKKDSFASLMRMLDPTVLPMGADYTREDVQHLFVRRFKKDVREQMKQDFPEREVFRLASAASPAENLAFDALAELKLNSDGSGARDGAMLFRTVLEKALFSSPAACLQSLKERIRRLEGKDPQHPDLEGLRDLQGLVQAIGPQQFSKFQYLIEQLRGGQHWRWDGRDPSDRLVIFTERVETLKFLQQELPKALGLKDEAVAILHGQLPDQEIQQTVEDFGKTHSPLRLLIASDVASEGLNLHYQAHRLIHFDISWSLMVFQQRNGRVDRYGQTRAPKIGYLLTEPRHERIRGDLRYLEILIDKDEQAAKNIGDPSAFMGLYDEEAETIEVAKAIEGSATVEGFEALLAGDDVDPFEALWTSTAQEAAQASQPMASVHASTAAITAPTCELPSLFNDSYRYLRDALRLLAGQSPSEYSPVKYDDANKTLSFQPSRDLEQLLKRDLASEMWPEDNTFALSADRTVVESGVRQARDTNAWPQLHYLWALHPIAQWLDYKLMALFGRQRAPLLRVAQGLNVGEAIVLVLAQVPNRRGQAVLAEWMGVQLNAAGQVQGVLSLEDALQRTGLAGNLGSGANIRANDGNAPDARTLQAALPAVIEAAQQHIRPIKQAFDTDCRARLDRELSKLKTLQDKHTVQLELDFAKGIEQVNAAKRRQKESDTAELFNNYQQWIRDTLQLDDRAQFTVVAALMA

SEQ ID NO: 1200 - protein, 782 aa, Pseudomonas aeruginosa; identical to SEQ ID NO: 1196

SEQ ID NO: 1201 - protein, 247 aa, Pseudomonas aeruginosa; identical to SEQ ID NO: 165

SEQ ID NO: 1202 - protein, 723 aa, Pseudomonas aeruginosa; identical to SEQ ID NO: 166

SEQ ID NO: 1203 - protein, 1009 aa, Pseudomonas aeruginosa; identical to SEQ ID NO: 167

SEQ ID NO: 1204 - protein, 731 aa, Pseudomonas aeruginosa; identical to SEQ ID NO: 160

SEQ ID NO: 1205 - protein, 245 aa, Pseudomonas aeruginosa; identical to SEQ ID NO: 161

SEQ ID NO: 1206 - protein, 558 aa, Pseudomonas aeruginosa
MNRALSSLSAAIASGLERQSERSGDVGLSALPSLKRASTELSRRFDQVEKALAPPREKRLLALGKFKREQALTSSEWRLVFAGLADDDEVSVPVLEDDQLFDRVHREVAGRIEQRSLSRRDWLALCFSYFAYDEHKPDDNVNWRVLRDDIDRGFDAVRQRIGREKEWMRIVAEHRELFGAQAGTRLAEEIFEGRARDLSSLQAIAQVPDGSWLWQRIFAVLLSRIFLLDDETFLKRLPELVALGQLNTRYLNRVLSACLTRYHRSRYHEQSSSLLKQAALEHWGSPQMRSKQNAWLQYVEQPVCAMVVAWFAKEDLEHFFTLLKGEAEVDQSRLFYWLRFANQMSYTRIVMGGDAWHDRGSDFVAFREKNKGRLSQLTGGPSHNNAVVMQIGNYFFVEFSGTGNACYVYRADAAPFNPDKQVLGLATELKQQGRALKRMSHSPAPRRPNVVEGWLDKFDDELRALGIVAQRPASYTQPRVSEDKPAAHSAAYASVAGDSLDVQVKSMLGSVPYKTFDHRSTSGVYQVLLARDDAAAKTALLRLGFKAVKNNALMFWRL

SEQ ID NO: 1207 - protein, 1082 aa, Pseudomonas aeruginosa; identical to SEQ ID NO: 163

SEQ ID NO: 1208 - protein, 731 aa, Pseudomonas aeruginosa; identical to SEQ ID NO: 152

SEQ ID NO: 1209 - protein, 245 aa, Pseudomonas aeruginosa; identical to SEQ ID NO: 102

SEQ ID NO: 1210 - protein, 547 aa, Pseudomonas aeruginosa; identical to SEQ ID NO: 103

SEQ ID NO: 1211 - protein, 1083 aa, Pseudomonas aeruginosa; identical to SEQ ID NO: 104

SEQ ID NO: 1212 - protein, 708 aa, Pseudomonas aeruginosa; identical to SEQ ID NO: 85

SEQ ID NO: 1213 - protein, 254 aa, Pseudomonas aeruginosa; identical to SEQ ID NO: 86

SEQ ID NO: 1214 - protein, 670 aa, Pseudomonas aeruginosa; identical to SEQ ID NO: 118

SEQ ID NO: 1215 - protein, 1013 aa, Pseudomonas aeruginosa; identical to SEQ ID NO: 147

SEQ ID NO: 1216 - protein, 731 aa, Pseudomonas aeruginosa; identical to SEQ ID NO: 152

SEQ ID NO: 1217 - protein, 245 aa, Pseudomonas aeruginosa; identical to SEQ ID NO: 102

SEQ ID NO: 1218 - protein, 547 aa, Pseudomonas aeruginosa; identical to SEQ ID NO: 103

SEQ ID NO: 1219 - protein, 708 aa, Pseudomonas aeruginosa; identical to SEQ ID NO: 1080

SEQ ID NO: 1220 - protein, 254 aa, Pseudomonas aeruginosa; identical to SEQ ID NO: 1081

SEQ ID NO: 1221 - protein, 1013 aa, Pseudomonas aeruginosa; identical to SEQ ID NO: 1083

SEQ ID NO: 1222 - protein, 708 aa, Pseudomonas aeruginosa; identical to SEQ ID NO: 85

SEQ ID NO: 1223 - protein, 254 aa, Pseudomonas aeruginosa; identical to SEQ ID NO: 86

SEQ ID NO: 1224 - protein, 670 aa, Pseudomonas aeruginosa; identical to SEQ ID NO: 118

SEQ ID NO: 1225 - protein, 1013 aa, Pseudomonas aeruginosa; identical to SEQ ID NO: 147

SEQ ID NO: 1226 - protein, 708 aa, Pseudomonas aeruginosa; identical to SEQ ID NO: 85

SEQ ID NO: 1227 - protein, 254 aa, Pseudomonas aeruginosa; identical to SEQ ID NO: 86

SEQ ID NO: 1228 - protein, 670 aa, Pseudomonas aeruginosa; identical to SEQ ID NO: 118

SEQ ID NO: 1229 - protein, 1028 aa, Pseudomonas aeruginosa; identical to SEQ ID NO: 151

SEQ ID NO: 1230 - protein, 670 aa, Burkholderia cepacia
MPSMNLSELAAEYWHIGVVALVLVCLSLDFLVRFFIRSFKLRRDLDDAIEALQAIRGEKNGELVELSAVETKAMKSEALSNPWTEYAKTLHKQLGDEDELGQQRIRCWRSTALAETFFTDQAIVDSRLKTDFFKHLPGVLTGLGIIGTFLGLIKGLVHFDVSVDPAAAQAQLQGLVSSVGHAFYVSAFAIGLAMLITWIEKTIVTVCYGQVEDIRELVDSMFRGGAGEEYLQQLAKSSQDAATQAQQMRDSLVVDLKEILTTLTERQIAAQAQYTGQMSVDVAKVISESLASPMSAMAEAVQKVSGSQGDAVNKLLTDVLASFSEQMQEMFGGQMRGMSDLLQKASESMQATAIQFGQLAANMDAAGNNTVDSMGEKLAQALDAMDVRQSAMNARMGEFIEQIRSLVAQSQSETGEKLREALAAVGTQVAGVVETLRKQAEEAAESQGQRARRFEESTGQAINSLSGQVEQLLSQSVETNKSLQTSVSALAGATDRAMASLNSGVETLYVAASDFAKAGSGVSETMRSASTATDSIKTASAQLSTATDNARGIFADYARTRDTFATMVAELRQTFESAKKDAAMTSELVGKIQAAARELAAAQQQSEDYLKGVTEVLVGAHESFRDNIDRTLGEGNRKFQSELSNAVNLLSGAIKNLGDAVDEIPAGRGR

SEQ ID NO: 1231 - protein, 131 aa, Burkholderia cepacia
MFGPKSSRRRNGRDEGEKPFWISFSDLMTALMVLFLVSMAVALIAITQKQKVIDDTIELRKKTIAQCLTEVEDVTKRPEFKGVTVHGNSIDFGAVVLFADQHHSFERSADERFIRSFVPEVLKVALTCPHQ

SEQ ID NO: 1232 - protein, 536 aa, Burkholderia cepacia
MVLTTYETLRDLEFSLAAQKWSVMVCDEAQKIKNPNAMVTRAAKKQNARLKIACTGTPVENTLADLWCLFDFVQPGLLGSLKDFGSKYRRPIEVETDDEKARIEELRGLIEPQKLRRTKAEVAKDLPKKILHEGCRKLPLSARQRALYADAVAQFKSRGQGQGSGLQSPLGLLQYLRRLCSDPRPPGHIATSDESVETIKKASPKMDWMLRRLREIEASGSGDKVIVFCEFRDLQRVIQRAISEVFGFVPDVINGDTSTESGAASSRQTRITAYQQNPGFGVIILSPLAVGFGVNIQAANHVIHYTRTWNPAKEDQATDRAYRIGQQKDVYVYYPVVVGGDFVTFDEKLDVLLERKRALSYDMLNGVGDVTPSDFADIEAPGGGSPFGEDLFNPVDVGSLGPDAFESFCALLWSKQGYSRTIKTPKTGDGGVDIVAIKGNRGALIQCKSSGVEGKEMGWEAVKDVAAGSVAYSARYPGVEFQLIAATNRRFNQSARQQASLLNVTLIEGSDLVDLLSKHPTKRGEFDRFAMAGWSQ

SEQ ID NO: 1233 - protein, 670 aa, Burkholderia cepacia
MPGANLGELVSEYWHIGLVALVLAWLSLDFLIKFVVRSFKLRRDLEGAIVALRAIRSEKKGELIELSEVESKAMKSEALSNPWTEYAKTLHKQLGDEDELGQQRIRCWRSTALAETFFTDQAIVDSCLKTDFFKHLPGVLTGLGIIGTFFGLIKGLVHFDVSVDPAAAQMQLQGLVRSVGHAFYVSASAIGLAMLITWIEKSIITACYGRVEEIRELVDGLFKGGAGEEYLQQLAKSSQDAATQAQQLRDSLVVDLREILTTLTERQIAAQAQHTGQMSVDVAKVISESMASPMSAMAEAVQRVSGSQGEAVNKLLTDVLSSFSTQMQEMFGGQMRGMSDLLQKASESMQATALQFGQLASNMDAAGTNTVDSMGEKLAQALDAMDARQSAMNARMGEFVEQIRSLVAHSQSETGEKLRDALAAVGTQVAGVVDTLRQQAEAAAESQGQRTQRFEESTDRAINSLSGQIDQLLAQSMETNKSLQASVSALAGATDRAMASLNSGAETLYVAASDFAKAGSGVSETMRSATAATDSIKAASAQLSMATDSAKGIFADYARTRDTFATMITDLRQTFDSAKKDAAMTSELVGKIQAATRELAAAQQQSEDYLKGVTEVLVGAHESFRDNIDKTLGEGNRKFHSELSNAVNLLSGAIKNLGDVVDEIPAGRGR

SEQ ID NO: 1234 - protein, 241 aa, Burkholderia cepacia
MFGPKSSRRRNGRDEGEKPFWISFSDLMTALMVLFLVSMAVALIAITQKQKAIDDTIELRKKTIAQCLTEVEDVTKRPEFKGVTVHGNSIDFGTVVLFADQQHSFEKPADERFIRSFVPEVLKVARARSCESWLKRVVVEGFASRTGNYLYNLNLSYLRSQRVLCALLNQQVQDALSEADRKQIQTLFLVGGSSFNTASNDGAARMRRVEIKLEFRDFGSAAEPAPDIPLDPGKSCPNDLR

SEQ ID NO: 1235 - protein, 545 aa, Burkholderia cepacia
MNEALALLRSGLTRSFAQAAKNPDQWLDARSMQLAKERVIRDHGGAAIKVDHRTIWASIEDFRRLGHAANFRELKYVCLGVSAMDAKGWCILGEERLREQVGRQVEEQVAIHRKLRCFQALLASYFSFSLGASNLDPKAVKGWITLRTWLQRHRQQLAVVLDHIPPWFEALDRHSELLTGRPCDKFVPDLMRGDASALEEAMESLGIDRDSWVMEAAVFAQMEAAEKLDDVRFKAALPDLLRIAMGEAGAKVGERLRIRCIALLVSRYSRCSATPEHPGLRDAAIGVIGNPWLRRASWDAYVIDAAKQPDTSAREMVFGWLKGRLIQDFFELLSAEDAGDTRRLVYWLRFAPFVDDMWFALGPAAQYRNDRLFREFRERAKGRLLDLEGASGDNNAFVMRIGAYVAIEFGTTGHAFYLLRWDDLPPAVSRALTSGKPKDYVALIQLKPESHEWKQSHRDAPVALRSWEQKFDDELLPRLGVAPKDRPVCVPDLENLLEGRNVTVTDHRAKGGALRIGPDDELADVARQLAALGMQLRRGRGWIKE

SEQ ID NO: 1236 - protein, 1198 aa, Burkholderia cepacia
MLLLRQLEQEGYIEAQSSGALMDWESYYRLEAVESYSASLHLLKPPMNRGWRPMLSSRGGLSDANFAIGISGWRDPSGAQPGGDVEVQGAILSADGKQSLLSESAWRVVQAITERRSRSAERHSPEDNKRDWARIRRHAVDAKADLADFLAKTVVLTPERIDIQMRKGGEGAQDMVEIMPSFDGAPGRWLEVFDRFEVVPARYEIPDGSGLVHILLSEDARAVLSEIRRMPGRRVAGARAEAFLRNPFATLGPSAAVTIDPDQFERAREDAGIVFERFSASIVEDQSGYPCEVGLLIEQVFEGKLVAEESKFESASELESFIAKMEGRIATGAQCCHWKGFDLEILGDSPDQIEKLRAALAKLAQPHKIKASDIFDLSLYSERIEGFGIEKTYYSPFIAKKGDGGWVPENIDLGLWFTDSKGETVAIPLDGRNLDKFRKEVERAEQEKRGSFSFPGCPKPVPTGWAKEALETLGKVKEEVKGGNYDPGKDKSGRRAVERKGLVVKPNVDGLDYEERRGELTADKAPPAMPSSLRSEIELKDHQRDGLAWLQKMWRHSPSACRGALLADDMGLGKTIQLLAFMASLIELEPRIDPFLVVAPVSLLDNWRAEIEKFFVEGAMDVLTLYGSNLAAKRAPKSALDEGLIESGSPKLLASGWLGSAKVVLTTYETLRDLEFSLAAQKWSVMVCDEAQKIKNPNAMVTRAAKKQNARLKIACTGTPVENTLADLWCLFDFVQPGLLGSLKDFGGKYRRPIEAETDDEKARIEELRGLIEPQKLRRTKAEVAKDLPKKVLHEGCRKLPISARQRGLYTDAVAQFKSRGQGQGSGLQSPLGLLQYLRRLCSDPRPPGHIATSNESVETIKKASPKMDWMLRRLKEIEASGSGDKVIVFCEFRDLQRVIQRAVAEAFGFVPDVINGDTSTESGSASSRQARITAYQQDPGFGVIILSPLAVGFGVNIQAANHVIHYTRTWNPAKEDQATDRAYRIGQQKDVHVYYPVVVGGDFVTFDEKLDLLLERKRALSYDMLNGAGDVTPSEFADIQAPGGGSPFGEDPFDPADVGSLGPDAFESFCALLWSKQGYSRTIKTPKTGDGGVDIVAINGNRGALIQCKSSGIEGKEMGWEAIKDVSAGSVAYSARYPGVEFQLYAATNRRFNQSARQQASLLNVTLIEGGDLIDLLSKHPTKRGELDRFVMAGWSR

SEQ ID NO: 1237 - protein, 670 aa, Burkholderia cepacia; identical to SEQ ID NO: 1233

SEQ ID NO: 1238 - protein, 241 aa, Burkholderia cepacia; identical to SEQ ID NO: 1234

SEQ ID NO: 1239 - protein, 545 aa, Burkholderia cepacia; identical to SEQ ID NO: 1235

SEQ ID NO: 1240 - protein, 860 aa, Burkholderia cepacia
MLRQLEQEGYIEAQSSGALMDWESYYRLEAVESYSASLHLLKPPMNRGWRPMLSSRGGLSDANFAIGISGWRDPSGAQPGGDVEVQGAILSADGKQSLLSESAWRVVQAITERRSRSAERHSPEDNKRDWARIRRHAVDAKADLADFLAKTVVLTPERIDIQMRKGGEGAQDMVEIMPSFDGAPGRWLEVFDRFEVVPARYEIPDGSGLVHILLSEDARAVLSEIRRMPGRRVAGARAEAFLRNPFATLGPSAAVTIDPDQFERAREDAGIVFERFSASIVEDQSGYPCEVGLLIEQVFEGKLVAEESKFESASELESFIAKMEGRIATGAQCCHWKGFDLEILGDSPDQIEKLRAALAKLAQPHKIKASDIFDLSLYSERIEGFGIEKTYYSPFIAKKGDGGWVPENIDLGLWFTDSKGETVAIPLDGRNLDKFRKEVERAEQEKRGSFSFPGCPKPVPTGWAKEALETLGKVKEEVKGGNYDPGKDKSGRRAVERKGLVVKPNVDGLDYEERRGELTADKAPPAMPSSLRSEIELKDHQRDGLAWLQKMWRHSPSACRGALLADDMGLGKTIQLLAFMASLIELEPRIDPFLVVAPVSLLDNWRAEIEKFFVEGAMDVLTLYGSNLAAKRAPKSALDEGLIESGSPKLLASGWLGSAKVVLTTYETLRDLEFSLAAQKWSVMVCDEAQKIKNPNAMVTRAAKKQNARLKIACTGTPVENTLADLWCLFDFVQPGLLGSLKDFGGKYRRPIEAETDDEKARIEELRGLIEPQKLRRTKAEVAKDLPKKVLHEGCRKLPISARQRGLYTDAVAQFKSRGQGQGSGLQSPLGLLQYLRRLCSDPRPPGHIDVPPSIGPMGF

SEQ ID NO: 1241 - protein, 608 aa, Pseudomonas fluorescens F113
MVDTPLGTEFYKHLPGILTGIGIVGTFFGLMLGLQHFDPSTPEQVNASVDKLLKDVLFAFIGSFISIMASIAVTITEKWRLGQCYKILEEFNETIDGLFDSGVGEEYLAELVRSSAESSVQTRQLKDSLVTDLREMLQNLVDTQVRESLKLADTLSSTYRDSGQMLADQVSSAIENSLKSPLEAIAGAVQAASGDQSGQVQNLLQDVLVAFMNKLEGTFGQQFNGLHELMGQSVSAMQSMQQGFSTLIQDMRSASESSTQNSSTMIAQLLSDMQAGQNAMQAGMNEMLTNLQASVARIGNEGEGAGARMAEQLEKLFAQSEVRQQAMAENLQAFVELIKQNIGQGQQETMAKIAGSVDVLGEQLSAVFKQLEYGQQQMDQSTRAAQADLHQGTRDLVGGLDEQVKALLQTVSEQQKTAQDTVKALSAQTEQHLQSMQLGADKMRAAAERFETAGQSVARASESTAGLMGTVQGAGTELAQASRELNTVVADYRNNREALAKTLAVIEGVVASAQGEANGRSQYLQDLKVQSERMQTLNREVYEYLENISGVLGNGFKEFGDGMDRVLRQTLGSLDAELDKAVKSLAGGVEGVKESLDDFGDIMERIRQ

SEQ ID NO: 1242 - protein, 247 aa, Pseudomonas fluorescens F113
MFGKQMPSVARSKDEGEKPFWISFADLMTAMMILFLVVMVAALSSVTQRINQAEQGEKQRNKDISQICEHLSLQAKSASKTIVVDCKDNRISFGDAGRFGHNQYALSNDGQSALQEVVPMILGAANSEEGRKWFKQVVIEGSTDTDGSYLYNLHLSLQRSEWVMCSLLDSRSPLQVGLSPEHQQQIRSMFLAGGVSFNNAKDTKEESRRVELRMQFFGLKEKEDNLKPEVPVFNNTDMEKCQLAMNR

SEQ ID NO: 1243 - protein, 542 aa, Pseudomonas fluorescens F113
MTSPIARLSAAINLSLSAHRTGPAPEPLARFPRLGAAGVDLYERFERAEKALPPPQEKRRAAINKFRNVLPLNASEWRLVFAGLSDKSERVGPILDDDQLFDRVHKEIHQRIEKRKLSRRDWLALCFSYFGYEAATPDKSANWCLLREDVQLGFECVRGQQKREKEWVHIVQQHQELFSEQAGARLGDQMFKGEISDLSALQTIAQIPDSSWLWRRIFNVLISRIFMLDDAEFSQRLADLVDIGRQHPRYMNDILSACLSRYHLAEYREKPSSLLKQVALDNWGSPQIRSRQNSWLQYVEKDVCAMVVAWFAKEDLEHFFNLLKGDAEVDQSRLHYWLRFANQMSYTRIVMGSDAWHDSGRDYVHFREKNKGRLSRLVGGPGHNNAVIMQIGNYFFVEFSGTGNACYVYQADKSPFDPDKSLLELASELKQPHRALDRMRHSPAPSRPNRIEGWLSKFDDALDKLGIHVQSQAGAPGSPKPLPFEDQVREALKSVKHKVYDQRARGGAFQVQLDDNDLAAIAALQRLGFKSVNHQPLRFWRQ

SEQ ID NO: 1244 - protein, 1082 aa, Pseudomonas fluorescens F113
MLKRFLKGIGLQSNLAVENTEPGFSIEEQGICYPLSLADNEESWPLASYLDQLEEEEFISQLSDRWLLTWDELYRLLDEPEHLTSLPLLRLPPQTALIPQLSSQGSLASDDFKVSVSGWRDPQSNANVQVQRTGAILQYHGKMEILPESCWKLTGAVRQLYLAQQNESGEVTNQIGWASIRKLARKAGAGMDGFLDKTIVIKPESLRLNPRKSTVGNTPVIELQPTFEGQPVNWLESFDGANQVQDRYRVTGDDGSLTHVLIEPEVKSVLDYVRSLPGRRVAGDDALSFVRNPYSVLGESAVQVLDAETYEDELAEAGIFFHRFHLEPKLDESGQHIEQVNLTLEPISPTPQSPIEVEFKSAYELAPFVHELQLKLAAGMPAGFWQGYELELSDFDFRQLAGISDLLKRWQNEAAGIEFDSVLDLSLYGDRVIGIGEAERITSPFLVKEATENWLPKGVAALGIDAETLGRWDPSDRAQFEAFEQRLDEARAAGDETVCLPESETPLSIAAAEQLFEAWSKKIAPVETDLIQPVEKIGRAVLQIGHNIDEPTYVQIRQSALRAALDATPELPNLLKPEVVLREHQLQGIAWLQHLFRLSPSDVSGCLLADDMGLGKTIQLLTFLVWYLEKYPQDKPTLIVAPVSLLDNWERELHRFFFADALPVLKLYGSALSAVKFKKEEIPADLKAKGIKNLLRPGWMGGARIVLTTYETLRDQEFSLARQQWSIVVCDEAQKLKNPAALVTQAIKAIPARFRVACTGTPVENTLIDLWCLFDFIQPGFLGGLNQFGREYQRPIEAALERDMIALERLRGLIDPQTLRRTKQDIAKDLPAKIEDAACRSLGMHVLQRSLYLSEISAYTKKQQIEEQLDQKTSGMLGLLHKLKLICAHPYSVQPDRRLRDNSPKLQWLIQTLEGIKRAGKNDKVILFTELRDIQRELQHSIQEHFGFRATVINGDTSTSSQSANSRQRLIDQFQEQPGFAVIILSTIAVGFGVNVQAANHVIHFTRCWNPAKEDQATDRAYRIGQKKDVYVYYPTVRDPEMPTFEATLDDLLSKRRALARDMLSGASEIQASEFGELLGPR

SEQ ID NO: 1245 - protein, 730 aa, Pseudomonas fluorescens LMG 5329
MDFSTLLHLWDAASSEQLIAPKIVVGFVFILCAWYFVRYFCRSFKLSNQLKILTKRVRDVKAFAAPQRRSELEQLFNGSNLEHSWHEYAETLHDQFELQDGEQVLVRSRSTAGAAHFFSPQSVVDTPLGTEFYKHLPGILTGIGIVGTFFGLMLGLQHFDPSTPEQVNASVDKLLKDVLFAFIGSFISIMASIVVTITEKWRLGQCYKLLETFNETIDGLFDSGVGEEYLAELVRSSAESSVQTRQLKDSLVTDLREMLQNLVDTQVRESLKLADTLSTTYRDSGQLLADQVSSAIENSLKSPLEAIAGAVQAVSGDQSGQVQNLLQDVLVAFMNKLEGTFGQQFNGLHELIGQSVAAMQSMQQGFSTLIQDMRSASESSTQNSSTMIAQLLSDMQAGQNAMQAGMNEMLANLQASVARIGNEGEGAGARMAEQLEKLFAQSEARQLAMAENLQAFVESIKQNIGQGQQETMAKIAGSVEVLGEQLSAVFKQLEHGQQQMDQTTRAAQADLHQGTRDLVGGLDEQVKALLQTVSEQQQSAQDTVKALSAQTEQHLQSMQLGADKMRAAAERFETAGQSVARASESTAGLMGTVQGAGTELAQASRELNTVVADYRNNREALAKTLAVIEGVVACAQGEASGRSQYLQDLKAQSERMQALNREVYEYLENISGVLGNGFKEFGDGMDRVLRQTLGSLDAELDKAVKSLAGGVEGVKESLEDFGDIMERIRQ

SEQ ID NO: 1246 - protein, 247 aa, Pseudomonas fluorescens LMG 5329
MFGKQMPSAARSKDEGEKPFWISFADLMTAMMILFLVVMVAALSSVTQRINQAEQGEKQRNKDISQICEHLSLKAKTASKTIVVDCKDNRISFGDAGRFGHNQYALSNDGQSALQEVVPMILDAANSEEGRKWFKQVVIEGSTDTDGSYLYNLHLSLQRSEWVMCSLLDSRSPLQVGLSPEHQQQIRSMFLAGGVSFNNAKDTKEESRRVELRMQFFGLKEKEDNLKPDVPVFNNTDMEKCQLAMNR

SEQ ID NO: 1247 - protein, 542 aa, Pseudomonas fluorescens LMG 5329
MTSPIARLSAAINLSLSTHRVGPAPEPLARFPRLGAAGIDLYERFERAEKALPPPQEKRRVAISKFRNILPLNASEWRLVFAGLSDKSEGVVPILDDDQLFDRVHKEIHHRIEKRRLSRRDWLALCFSYFGYEAATPDKNANWCLLRADVQLGFDCVRGQQKREKEWVHIVQQHQELFSEQAGARLGDKMFKGEISDLSALQTIAQIPDSSWLWRRIFNVLISRIFLLDDAEFSRRLADLVDIGRQHPRYMNDILSACLSRYHLAAYRETPSSLLKQVALDNWGSPQIRSRQNSWLQYVEKDVCAMVVAWFAKEDLEHFFNLLKGDTEVDQSRLHYWLRFANQMSYTRIVMGADAWNDGGRDFVHFREKNKGRLSRLVGGSSRNNAVVMQIGNYFFVEFSGTGNACFVYESDKSPFDPDKFQLELTSELKQPHRAKARMLHTPAPSKPTRIEGWLLKFDDSLGKLGIRVQSQAGTPGASNPMAFEDQVRVALKSVKHKVYDQSARGGAFQVQLDNNDLAAVAALQRLGFKPVNHQPLRFWRQ

SEQ ID NO: 1248 - protein, 1082 aa, Pseudomonas fluorescens LMG 5329
MLKRFLKGIGLQPSSPVENTEPAFSIEEQGICYSLSLAENAESWPLASYLDQLEEEEFVSQLSDRWLLTWDELYRLLDEPEHLSSLPLLGLPPQTTLIPQLSSQGSLASDDFKVAVSGWRDPQSNANVQVQRTGAVVQYHGTMEILPESSWKLTGAVRQLYLAQQNEPGEVNNQIGWASIRKLARKAGAGMDGFLDKTVVIKPESLRLNPRKSTVGNTPVIELEPSFEGQPANWLVSFDGANQVQDRYRVTSDDGSLTHVLIEPEVKSVLDYVRSLPGRRVAGDDALSFVRNPYSALGDSAAQVLDAQSYEDELVEAGIFFHRFHLEPKLDEAGQHIEQVKLTLEPISPTPQPPIEVEFNAAYELAPFVHELQLKLAAGMPAGFWQGYELELSDFDLRQLAGINDLLKRWQNEAAGIEFDSVLDLSLYGDRVTGIGEAEKITSPFLVKEATENWLPKDVAALGVDAEVLGRWDPSDRAQFEAFEQRLDEARAAGDETVCLPESETPLSIAVAEQLFAAWSRKIAPVETSLVQQQEKVGRAVLQIGHNIDEPTYVQIRQAALRAALDAVPELPGLLKPEVVLREHQLQGVAWLQHLFRLSPSDVSGCLLADDMGLGKTIQLLTFLVWYLEKYPQAKPTLIVAPVSLLDNWERELHRFFFADALPVLKLYGSALSAVKFKKEEIPTDLKAKGIKNLLRPGWMGGARIVLTTYETLRDQEFSLARQQWSIVVCDEAQKLKNPAALVTQAIKAIPARFRVACTGTPVENTLIDLWCLFDFIQPGFLGGLNQFGREYQRPIEAALERDTVALERLRGLIDPQTLRRTKQDIAKDLPAKIEDTACRSLGMHTLQRNLYLSEIAAYSQKQQIEEQLDQKTSGMLGLLHKLKLICAHPYSVQPDKRLRDNSPKLQWLMQTLESIKRAGNGDKVIVFTELRDIQRELQHSIQEHFGFRATVINGDTSTSSQSANSRQRLIDQFQEQPGFAVIILSTIAVGFGVNVQAANHVIHFTRCWNPAKEDQATDRAYRIGQEKDVYVYYPTVRDAAMPTFEATLDELLSKRRALARDMLSGASEIQASDFEGLLKAQ

SEQ ID NO: 1249 - protein, 781 aa, Pseudomonas fluorescens
MDLLKLLWPDFSLLLTGNTNGISAWFWLLTAGIFAIALLALLVHLVHFKARLQAVNSLLAGQTREQLALNRRETVQRAHALKNTGISMLWREFDESLVSSGDQKLLFNTLDAEHFFNARTLAPGLTASRLLAATPGFLVAIGVLGTFVGLTIGLVGLELSSSSGVEALRKGIDGLISGAAVAFMTSVWGVTFSLLLNFIEKMFERSALAQVQSLQNKIDSLYPRILAEQSLVHIADYGRESSTALQELHERIGDRLQESMAGMNEAMQTALADTLNNIMGPAIQTLVSGASQQSTQVLDKLVGSFMEGMTSVGREQGNLMQQAAADINNAVGAMSGQLNQLFHSLSDQQGRQQETAQQQSRQFEEQLQRVVSSAEQREQQLEQRFNQLMSGLGGQLDGQLSAAQRRDDERQALFERAQAEANQRQQELLTQVASSTREQMQTMAEAGNERHNNLENVFSRLMMSLNTQLDSQLSSSEQREQARAERHERQLVAATAQQQQLVGSLSQTTQQQLTAMVEAASAQQSNLESAFGKLLGNLNEQMSGHSEYAEQREQSRQQRLADQMENMASQQQQLLESIAKAVQTTQQQSLQMAEQHQQLLGRLQQTSEAAAASSKHMDSSANQLGLLSTNVRQASELLGQRLESVSERIEDASAQNAELAAQLKGQSASLSQLQEALLEGAQRFEQAASEARNGFGEMRTHQQEFLVGIRTEFTALGETLRTQVAGVEKQAEEWLRSYSGEVHQQVHERMDQWNKQTLSFADQMYAAVQAISNVVDELEAR

SEQ ID NO: 1250 - protein, 248 aa, Pseudomonas fluorescens
MRWRKSNEVSVDEENPYWMSFSDMMSALLVIFILAAVILILQLMERQKDFDQKVSLLEQAEQVRRTILDEAVDELRQRGIKVEVSENHTVLRIPNALLGFDTGAYEVLPRYQPTALEIGEVINKVISKEHRVDFLDTIFIEGHTDNRPYNNAQIKGNWGLSTFRAISLWQFWSSELPEAERLNRLNNQDGDPLFSVSGYGETRPVNDQQSSEDDYRLNRRIDIRFTIRRPLSAEYEGVREVLGGGTTK

SEQ ID NO: 1251 - protein, 704 aa, Pseudomonas fluorescens
MKVPPIDNRPGEWPHGVIENWTRLLARAQHLESKAGGSDAFEQMLATFREMMRTGRFDGFKALLTRRLAARALTWLWLHDDVIGPRLLNVRLLNTLIEAQQPRLTRITLVQMVQLYFRFFDRLDDRDKTAEQSLRAVLEAHVHAQLRWLPEPRMQSLRPDALTQLKQHGYWLLGLEGPLALAKHVREQGQELAATFEAYGLAGLSTSRYGDVCRAHFYLETLRQLVPGEWDEVLDELLKPSVSKAPYEGDKRIGHAALEIIIDRAGDAPSDIWQSFILNLAGDPRIASSSPNYRQWWLPLGEARINQVRGWLSKEDLRLFLQAVEQYGNESGKEDLQRMFPARKTFLEGLFKLGLIRHTRLMLGGIAQQSVRRILGEEVKTNFAKMEGSMNDKAAIYLDCGDFHLVEGSHSFKIWVYLAQPGPAMKSYEKNLFSHSDLTIELPKVYKKLYPGLGYEAVTHNGTWQRKVFDFLAENGIGVDIEKLLSKQEYRSYLNRHGVPVVRSNKVIVPSALQSPMQAVKPERLPELGSNAFETTSYAIGSASAASRPLTEPRTVGAAAEASVVNSIRAQNNAIADAGYSGSRRLFGKEPDAGTALAPVDSALPSVVAVVAESASAPLVVNELSGTALAGSITRLPKSAIAVMHYFASNPGDKARYASNVLEIEIREVNRLLHGPLRTFCKQDESFGWSVSGPALAVLNKLFP

SEQ ID NO: 1252 - protein, 1009 aa, Pseudomonas fluorescens
MAFVDVIKGLLGKAGEELAAQPGFDFQADSHGLNFYLPKAAFVALQEGRGSTLQKVQLITLRMLEEQGLANPLPNGFMVLEADLAGLEAEQADLLRLPPRLPGSFAAQISGRTGNSSFRVALHLKMTDGDAPFTRKGPLLYLTSTEAYRLTPAELMGLLAWEHHQELQPEQRGEAANLRLMAELQTAARSGMRIDLSHFERLDVVVPQNIGVVATRLPDGSLLLCPSLGNGTTPDQLEKRWSQLDMGANDGVLRIDNRVVLLDPQKMAAIKEVLSNKRIPADKVAEFLTTPSAFLDAALVNLDMGFSIRVAGIGKLQHMDFGDQDSQKNDWFALDKRPASAAIILKLVQTPEELARFQEVYASAKEQGATSLTFAGQVIDVSNPEQVDEHIQKVQEAFEGATAAPVVEPDEPDEVKETVSVLLRDADDIHQGLLRKAGEAKPFREPDWDAYARQPFPHQREGVEWMMKLLGAAIQDDHANLYRLQGALLADDMGLGKTYMSLVTVGEYLAQQKAVNKSQKPILVVAPLSLLENWEDEVDHTFKSIPFRDIVVLQAGRDLNRFRVKGAERESVQVASLADEDGQMDGEAIRYALTIGPEAGAQRLDMDRRLVLTTYQTLRDYQFSMCMIDWGMVIFDEAQNIKNPNALQTQAAKGLKADFKLLATGTPVENSLGDFWCLMHTAQPGVLGGWSQFRDNWIKPILHAPEDERDAVRRKVGAELRDAVGIFMLRRVKEDQLKGLPSKTIHSGVAQPTGGLLVHTPQLSRGMKGIQLKAYDAILSDFRERRATEDMRGTALMALSQLREISLHPRLREETQLMTNTAKDAREVMAESGKLTVLLELLDQIRQKNEKVILFMVTKRLQRLLKLWLDQIYGLNVAIINGDTAAVAKKADILTRKQLITAFEAKPDFNLIIMSPVAAGVGLTVVGANHVVHLERHWNPAKEAQASDRVYRIGQTKEVHIHLPAVLHPQYDSFDVHLDRLLRGKLMLKDAVVTPEAVSENEMIQSLGL

SEQ ID NO: 1253 - protein, 730 aa, Pseudomonas putida F1
MDFSTLRHLWDGASSEQLIAPLMVAGFVAILCTFYFFHYFYKSFGLSAQLKRLIKSLENAKTVLPSDRRSELERLFKGSNLEHSWREYAETLHDQYELKEGEQVIGRSRATAAAAHFFSPQSVVDTPLGTEFYKHLPGILTGIGIVGTFFGLMLGLQHFDPSTPEQVNASVDKLLKDVLFAFFGSFISIMASIAVTLTEKLRLGHCYKLLEALNETIDGLFDSGVGEEYLAELVRSSAESSVQTRQLKDSLVTDLREMLQNLVDTQVRESLKLADTLSTTYRDSGQLLADQVSGAIENSLKSPLEAIAGAVQAASGDQSGQVQNLLQDVLVAFMNKLEGTFGQQFNGLHELMGQSVAAMQSMQQGFSTLIQDMRSASESSNQSSSTMIAQLLANMQAGQSAMQAGMNEMLANLQASVARIGNEGEGAGARMAEQLEKLFAQSEARQQAMAENLQAFVESIKQSIGQGQQETMAKIAGSVEVLGEQLSAVFKQLEQGQQQMDQSTRAAQADLHQGTRELVGGLDEQVKALLQTVSEQQKSAQDTVNALSAQTEQHLQSMQLGADKMRAAAERFETAGQSVARASESTAGLMGTVQGAGAELAQASRELNTVVADYRNNREALAKTLAVIEGVVASAQGEASGRSQYLQDLKVQSERMQALNREVYEYLENISGVLGNGFKEFGEGMDRALRQTLGSLDTELDKAVKSLAGGVEGVKESLEDFSDIMERIRR

SEQ ID NO: 1254 - protein, 247 aa, Pseudomonas putida F1
MFGKQMPSAARSKDEGEKPFWISFADLMTAMMILFLVVMVAALSSVTQRINQAEQGEKQRSKDISQICEHLSLKAKTASKTIVVDCKDNRISFGDAGRFGHNQYALSNDGQSALQEVVPMILDAANSEEGRKWFKQVVIEGSTDTDGSYLYNLHLSLQRSEWVMCSLLDSRSPLQVGLSPEHQQQIRSMFLAGGVSFNNAKDTKEESRRVELRMQFFGLKEKESSLKPDVPVFTNTDVEKCQLAMNR

SEQ ID NO: 1255 - protein, 541 aa, Pseudomonas putida F1
MTSSIARLSVAISKSLSAHRTVHAPEPLERFPRLTAAGVDLYERFERAEKALPPPEEKRRAAISKFRNVLPLNASEWRLVFAGLSDKSERVGPILDDDQLYARVHKEVHKRIEKRELSRRDWLALCFSYFGYDAATPEQNANWCLLREDVQLGFECVRDQQKRVKEWVQIVQQHQELFSEQAGATLGDQMFKGEISDLSALQTIAQIPDKSWLWNRIFSVLVSRIFLLDDAEFSQRLADLVDIGRQHQGYMNQILSACLSRYHLAAYREKPSSLLKQLALDNWGSPQIRSRQNSWLQYVDKDVCAMVVAWFAKEDLEHFFNLLKGDDDVDQSRLFYWLRFANQMSYTRIIMGSDAWSNEGRDFAHFREKNKGRLGRLIGAAGHNNAVVMQIGNYFFVEFSGMGACYVYQADKAPFDPEKSQLGLATEIKQRHRVVEWMRHFPAPSRSDRVEGWLIKFDDTLERLGIRIQSHEVEPVTSRLLSFDYQLRESMRSVKHTLHDRRAQGGAIHIQLEENDQAATIALRRLGFKPENNKPLRFWRE

SEQ ID NO: 1256 - protein, 1082 aa, Pseudomonas putida F1
MLKRFLKGIGLQPNSAAEKTKPAFSIEEQGICYPLSLAENTESWSLASYLDQLEEEEFVSQLSDRWLLTWDELYRLLDEPEHVTSLPLLGLPPLTVLIPQLSSQGSLASDDFKVSISGWRDPQSNANVQVQRTGAIVQYQGATELLPEASWKLTGAVRQLYLAQQNEPGEVTNQIGWASIRKLARKAGAGMDGFLDKTVVIKPEKLRLNPRKSTLGDTPVIELQPSFDGQPANWLESFDGAKQVQDRYRVTGDDGSLTHVLIEPEVKSVLDYVRSLPGRRVAGDDALSFVRNPYSTLGESAAHVLDAESYEDELAEAGIFFHRFHLEPKPDEAGQRIEQVTLTLEPISPTPQAPIEIEFKAAHEFAPLVHELHLKLAAGMPAGFWQGYELELSDFDLRQLAGINDLLKRWQNEAAGIEFESVLDLSLYGDRVTGIGEAERITSPFLVKEATENWLPKDVAALGIDAEILGRWDPSDRAQFEAFGQRLDEARGAGDDTVCLPESETPLSIAAAEQLLDAWSKKIAPVETGQVEQREKVGRAVLQIGHNIDEPTYVQVRQAALRAALDATPELPGLLKPEVVLRDHQLQGVAWLQHLFRLSPTDVSGCLLADDMGLGKTIQLLTFLVWYLEQYPNDQPTLIVAPVSLLDNWERELHRFFFADALPVLKLYGSALSAVKFKKDEIPADLKAKGIRNLLRPGWMGDARIVLTTYETLRDQEFSLARQQWSIVVCDEAQKLKNPAALVTQAIKAIPARFRVACTGTPVENTLIDLWCLFDFIQPGFLGGLNQFGRDYQRPIEATLERDTEALERLRGLIEPQTLRRTKQDIAKDLPAKIEDAACRSLGMHALQRNLYLSEVSAYSQKQQIEEQLDQKTSGMLGLLHRLKLICAHPYSVQPDTRLRDNSPKLQWLIQTLESIKRAGNGDKVIVFTELRDIQRELQHAIQQHFGFRATVINGDTSTSSQSANSRQRLIDQFQELPGFAVIILSTIAVGFGVNVQAANHVIHFTRCWNPAKEDQATDRAYRIGQQKDVYVYYPTVRDAAMPTFEATLDELLSKRRALARDMLSGASELQASDFEGLLGAR

SEQ ID NO: 1257 - protein, 730 aa, Pseudomonas putida ND6; identical to SEQ ID NO: 1253

SEQ ID NO: 1258 - protein, 247 aa, Pseudomonas putida ND6; identical to SEQ ID NO: 1254

SEQ ID NO: 1259 - protein, 541 aa, Pseudomonas putida ND6; identical to SEQ ID NO: 1255

SEQ ID NO: 1260 - protein, 1083 aa, Pseudomonas putida ND6
MMLKRFLKGIGLQPNSAAEKTKPAFSIEEQGICYPLSLAENTESWSLASYLDQLEEEEFVSQLSDRWLLTWDELYRLLDEPEHVTSLPLLGLPPLTVLIPQLSSQGSLASDDFKVSISGWRDPQSNANVQVQRTGAIVQYQGATELLPEASWKLTGAVRQLYLAQQNEPGEVTNQIGWASIRKLARKAGAGMDGFLDKTVVIKPEKLRLNPRKSTLGDTPVIELQPSFDGQPANWLESFDGAKQVQDRYRVTGDDGSLTHVLIEPEVKSVLDYVRSLPGRRVAGDDALSFVRNPYSTLGESAAHVLDAESYEDELAEAGIFFHRFHLEPKPDEAGQRIEQVTLTLEPISPTPQAPIEIEFKAAHEFAPLVHELHLKLAAGMPAGFWQGYELELSDFDLRQLAGINDLLKRWQNEAAGIEFESVLDLSLYGDRVTGIGEAERITSPFLVKEATENWLPKDVAALGIDAEILGRWDPSDRAQFEAFGQRLDEARGAGDDTVCLPESETPLSIAAAEQLLDAWSKKIAPVETGQVEQREKVGRAVLQIGHNIDEPTYVQVRQAALRAALDATPELPGLLKPEVVLRDHQLQGVAWLQHLFRLSPTDVSGCLLADDMGLGKTIQLLTFLVWYLEQYPNDQPTLIVAPVSLLDNWERELHRFFFADALPVLKLYGSALSAVKFKKDEIPADLKAKGIRNLLRPGWMGDARIVLTTYETLRDQEFSLARQQWSIVVCDEAQKLKNPAALVTQAIKAIPARFRVACTGTPVENTLIDLWCLFDFIQPGFLGGLNQFGRDYQRPIEATLERDTEALERLRGLIEPQTLRRTKQDIAKDLPAKIEDAACRSLGMHALQRNLYLSEVSAYSQKQQIEEQLDQKTSGMLGLLHRLKLICAHPYSVQPDTRLRDNSPKLQWLIQTLESIKRAGNGDKVIVFTELRDIQRELQHAIQQHFGFRATVINGDTSTSSQSANSRQRLIDQFQELPGFAVIILSTIAVGFGVNVQAANHVIHFTRCWNPAKEDQATDRAYRIGQQKDVYVYYPTVRDAAMPTFEATLDELLSKRRALARDMLSGASELQASDFEGLLGAR

SEQ ID NO: 1261 - protein, 781 aa, Pseudomonas putida LS46
MMDLLQHLIPDFAHMFSANPNGISAWFWSATALVFVFSFWALVVHYRRFSARMHALHSLLEGQSKETLAQNRRETLQRAGELKAPNVGMLWREFDESLVLSSDQKQLFNTLDAEHFFNPRTLAGGLTASRLLAAAPSFLVAIGVLGTFVGLTVGLEGLVGSTGEIEALKGGINKLISGAAVAFMTSVWGVLFSLLLNFIEKMFERAALQGIQALQHDVDALYPRIPAEQSLVHIAEYGKESKEALQELHERIGERLQETLTGMNEAMQTALTDALNNIMAPAIQTLVSTTSQQSTQVLESLVGNFMEGMTSVGREQGQQMQQAAANVNAAVSGMSEQLNQLFSSLSEQQSQQMAVVQQQSSAFEAQLQRISGSADDRQAQMEQRFSELMAGLSGQLQSQLGAAQQRDEERQALFERVLGQASSSQTAMLEQFSHSTREQMQAMAEAGNERHNNLEKVFSRLMMNLNTQLDTQMGTAEQREQARAQRHEQQQAELLERQQLMLGSLGQSSQQQINALNEAAAQQQRELQSTVDKLLGGLTTQIGTQGEQAEAREQARQERFQQQLEQVALQQQELLAGLASAVQATQQQSRLMAEQHQQLLGQLKQATEAAAQSSKHMDSSANQLGLLSTNVRSAAELLGQRLEQVTARIEQAGGQNAELAGQLQQQATILAQLQGTLLEGAQRFEQAASEARNGFGEMKTTQQEFLAGVRYEFTSLGVALREQVEAVEKQAEEWLRSYAGEVRVQTDDRMNKWNEVSQNYADQMHRIVQNMSSILDELEAR

SEQ ID NO: 1262 - protein, 254 aa, Pseudomonas putida LS46
MRLGKAKEVSVDEENPYWMSFSDIMSALLVIFILASVILILQLMEIQQELKERQVQFEEEIVELKKAEQVRRTILDEAVEALRRRGIKVEVSENHTVLSIPNDLLGFDSGAYDIHAAYQERALEIGKVIHEVIARDDRIEYLDTIFIEGHTDNRPFPGFMGKGNWGLSTFRAISLWQFWGAALPGDEQLASLNNKDGKPLFSVSGYGETRPVVVDQQAEEDFKRNRRIDIRFTIRRPDSAQYEQVRERLEEVQP

SEQ ID NO: 1263 - protein, 681 aa, Pseudomonas putida LS46
MKLPPLHMPVVEWPARTIEVWQTLIEKGARMAAATGQGDAFEAMLARLRDMASTGRFDGLPALLKRRLTARALTWLWLNDEVIGRRLFSVRLLTVLVEAQQPRLTRITLQQLAQFYFRRFDKLDEHEGLREKLEQVLQQQLQLLPEPRVSGPQADPLLTLKRDGHWLLPLDGPVQLVEQVRDSGHELSATFEALGLQGFDDGRYGDICRAHFYLETLRGLSPGEYDPVLDELQKPSVAKAPYEGERRIGHIALEILIDRVGQEPGDAWLNFILNLAGDPRISRNSANYREWWQFLGDERVHKVRGWLSKEDLRLFLQAVEQFGIETQNDDLQRMFPARKQFLEGLFKLKLIRNTRLLLGGRAQHSVNRILGKEVKTTFARMDGQMNDKAVIYLDCGDFHLVEGSHSFRVWVYLASPGEALRSYERSSFSHADLTTAIPQAYKLLYPSLPYDAFTHHPPLSWQNRVFSFLADNGIALDIEQLLNRSDYQSYLRKFGMPVVNARRTAVPAPRQLDSPAESARSAADRTEATMLSAPQGRAPVAQVTRESRATPAQEPLASRAVTSSPSSSVRQGTQQHYPVVTRYVSPSVVNAPVTAPPMQASEGRLAGLKPSALKILRYFVDNPGDKVRYAANVFGVETREINQILYGPLKDMCVRDEQYGWTVNEAARLALEALDEQEGAE

SEQ ID NO: 1264 - protein, 1012 aa, Pseudomonas putida LS46
MGLMDIFRSLIGERDGALSTQQGFQSQPDSNGLNFFMPTPAFQALQTGQGSALAKVQLIVFNMLTEQGIAETTANGFHIGAEDVSGMDLEQAEILRLPRRLPGRFLTSISGRTGNSGFRVAITLEMPDGAASFTRKGPYLFLTSSECYWLTPAEMMGLQAWERHEALLPEQRGEAANLRLMAELQTAARSGMRIDLSHFERLDVVVPENIGVIATRLPDGSLQLCPSLGDGSTADQLEKRWSQLDMTADGGVLRIDNRVLLVDQARMEGIRNVLANKRIPANQVNEFIATPTAFLDAALVNLEVGFSARVAGIGKLQHMDFGALDATKNDWFALDKRPAPAAILGKLIQSPEDLQRFEGVLQAANEQGATSVEFAGEVIDISDAPAVQQELAKARQNMHPVSDSESRDEEYEPPESKEKVGVILKDADEINSALLHKAAAATPLTVPDWSVYARQPFPHQREGIEWMLKLMGAALQDEADDLYRLQGGLLADDMGLGKTYMSLVTVGEYLASQRAADKPQKPVLVVAPLSLLENWEDEVDKTFAGIPFRDVVVLQSGRSLRDYRVNGAERESVQLASMIDDTSGMVDEQSIRYALHVGPEAGVHRLDMDRRLVLTTYQTLRDYQFSLCRIDWGVVIFDEAQNIKNPNALQTIAAKGLKADFKLLATGTPVENSLGDFWCLMHTVQPGLLGGWENFRDTWIKPILAASDDERDEVRAYLGEQLRRAVGIFMLRRVKEDQLKGLPTKTILSGVEQADHGLQRHATQLGVVMKGNQLQIYDEVLNSYRARRASAEDMRGTALAALTQLRSISLHPRLENEPALYSEDGKQARQLMMESGKLAVMLQLLDEIRSKGEKVILFMMTKRLQRVLKLWLDQIYGLNVSVINGDTKAVATRAEDMTRKRLIAEFEAHGGFNVLIMSPVAAGVGLTVIGANHVVHLERHWNPAKEAQASDRVYRIGQTKPVFVHLPAVTHPQFDSFDVHLDRLLRGKLMLKDAVVTPESVSEGEMIQSMGL

SEQ ID NO: 1265 - protein, 730 aa, Pseudomonas putida HB3267
MDFSTLLHLWGAASSEQLIAPKMVVGLVFILCAWYFVRYFCRSFKLSAQLKRLTVSLQNVKTLDPSLRLSELERLFSGSRLEHSWREYAETLHDQFELKEGEQVLLRSRATAGAAHFFSPQSVVDTPLGTEFYKHLPGILTGIGIVGTFFGLMLGLQHFDPSTPEQVNASVDKLLKDVLFAFIGSFISIMASIAVTLTEKWRLGHCYKLLEAFNETIDGLFDSGVGEEYLAELVRSSAESSVQTRQLKDSLVTDLREMLQNLVDTQVRESLKLADTLSTTYRDSGQLLADQVSGAIENSLKSPLEAIAGAVQAASGDQSGQVQNLLQDVLVAFMNKLEGTFGQQFNDLHELMGQSVAAMQSMQQGFSTLIQDMRSASESSNQNSSTMIAQLLADMQAGQNAMQAGMNEMLANLQASVARIGNEGEGAGARMAEQLEKLFAQSEARQQAMAENLQAFVESIKQSIGQGQQETMAKIAGSVEVLGEQLSAVFKQLEQGQQQIDQSTRAAQADLHQGTRDLVGGLDEQVKALLQTVSEQQKSAQDTVNALSAQTEQHLHSMQLGADKMRAAAERFETAGQSVVRASESTAGLMGTVQGAGAELAQASRELNTVVADYRNNREALAKTLAVIEGVVASAQGEASGRSQYLQDLKVQSERMQALNREVYEYLENISGVLGNGFKEFGEGMDRALRQTLGSLDTELDKAVKSLAGGVEGVKESLEDFGDIMERIRR

SEQ ID NO: 1266 - protein, 247 aa, Pseudomonas putida HB3267
MFGKQMPSAARSKDEGEKPFWISFADLMTAMMILFLVVMVAALSSVTQRINQAEQGEKQRSKDISQICEHLSLKAKTASKTIVVDCKDNRISFGDAGRFGHNQYALSNDGQSALQEVVPMILDAANSEEGRKWFKQVVIEGSTDTDGSYLYNLHLSLQRSEWVMCSLLDSRSPLQVGLSPEHQQQIRSMFLAGGVSFNNAKDTKEESRRVELRMQFFGLKEKEGNLKPEVPVFTNTDVEKCQLAMNR

SEQ ID NO: 1267 - protein, 542 aa, Pseudomonas putida HB3267
MTSSIARLSAAISQSLSAHRTVQAPQPLERFPRLAAAGVDLYERFERAEKALPPPEEKRRAAISKFRNVLPLNASEWRLVFAGLSDKSELVGPILDDDQLYARVHEEVHQRIEKRRLSRRDWLALCFSYFGYDAATPAQNANWCLLREDVQLGFECVRDQQKRVKEWVQIVQQHQELFSEQAGATLGDQMFKGEINDLSALQTIAQIPDNSWLWRRIFTVLISRIFMLDDAEFSQRLADLVDIGRQHPRYMNDILSACLSRYHLAAYREKPSSLLKQLALDNWGSPQIRSRQNSWLQYVDKDVCAMVVAWFAKEDLEHFFNLLKGEAEVDQSRLHYWLRFANQMSYTRIVMGSDAWNDSGRDFVHFREKNKGRLSRLVGGPGYNNAVIMQIGNYFFVEFSGTGNACYVYQADKSPFNPDKMQLELASELKQPNRALDRMRHSPAPSRPDRIEGWLSKFDYALEQWGIRLQSQVAAAGSAKPLPFEDQVRDALKSVKHKVYDQRERGGAFQVQLDDHDPAAVTALQRLGFRPVNNQPLRFWRQ

SEQ ID NO: 1268 - protein, 1095 aa, Pseudomonas putida HB3267
MLKRFLKGIGLQPNSAVENTEPVFSIEEQGICYPLSLAESTESWSLASYLDQLEEEEFVSQLSDRWLLTWDELYRLLDEPEHETSLPLLRLPSQTALIPQLSSQGSLASDDFKVSISGWRDPQSNANVQVRRTGAIVQHQGATEMLPEASWKLTGAVRQLYLAQQNEPGEVTNQIGWASIRKLARKAGAGMDGFLDKTVVIKPEKLRLNPRKSKLGDTPVIELQPSFDGQPANWLESFDGAKQVQDRYRITGDDGSLTHVLIEPEVKSVLDYVRSLPGRRVAGDDALSFVRNPYSTLGESAAHVLDAEVYEDELAEAGIFFHRFHLEPKLDEADQRIEQVTLTLEPISPTPQAPIEIEFKAAHEFAPLAHELHLKLAAGMPAGFWQGYELELSDFDLRQLAGINDLLKRWQNEAAGIEFESVLDLSLYGDRVTGIGEAERITSPFLVKEATENWLPKDVAALGIDAEILGRWDPSDRAQFEVFGQRLDEARAAGDETVCLPESETPLSIAAAEQLFDAWSKKIAPDEISQVEQREKVGRAVLQIGHNIDEPTYVQVRQAALRAGLDATPELPGLLKPEVVLREHQLQGVAWLQHLFRLSPTDVSGCLLADDMGLGKTIQLLTFLVWYLEQYPKDQPALIVAPVSLLDNWERELHRFFFADALPVLKLYGSALSAVKFKKDEIPADLKAKGIKNLLRPGWMGDARIVLTTYETLRDQEFSLARQQWSIVVCDEAQKLKNPAALVTQAIKAIPARFRVACTGTPVENTLIDLWCVFDFIQPGFLGSLNQFGREYQRPIEGALERDTVALERLRGLIDPQTLRRTKQDIGKDLPAKIEDTACRSLGMYALQRNLYLSEVAAYSQKQQIEEQLDQKTSSMLGLLHKLKLICAHPYSVQPDTRLRDHSPKLQWLTQTLESIKRAGNGDKVIVFTELRDIQRELQHAIQQHFGFRATVINGDTSTSSQSANSRQRLIDQFQELPGFAVIILSTIAVGFGVNVQAANHVIHFTRCWNPAKEDQATDRAYRIGQQKDVYVYYPTVRDAAMPTFEATLDELLGKRRALARDMLSGASELQASDFEALLGPVRKEISQSPHGTSQ

SEQ ID NO: 1269 - protein, 782 aa, Pseudomonas putida
MMEFLNHLLPNFSLLKSGSTEALGVVFWLIMAALFSYSLYSLFRSGLSFNARMQALNTLIVGQSRENLALNRRETLQKATGLKVKRIGALWHEFDDSLVSSSDHKQLFNTLDAEHFFNARTLAPGLSGSRFFGSLPGLLVGLGVLATFVGLTIGLSKLKLDSSGGVDQLRVGISVMIQGAAVAFMASVWGVGFSLVLNLIEKVTERWALGRIHDLQHQIDALYPLIPAEQSLVHIADYSRESKEALQELHERIGDRLQESLAGMNEAMQAALTDALNNIMAPAIQTLVSTTSQQSTQVLEQLVSNFTQGLTSAGREQGNLMQQAAADVNTAVSGMSNQLNQLFQSLSDQQGRQLEVARQQSGEFQAQLQQLSTSADQRQHQLEARFSELMSGLTGQLDGQLASAERRDVERQSLFERTLAKAGESQSALLEKFAGASREQLQAMAEAGNERHSNLEAVFSRLMMTLNTQLDSQMGAAESREKERAQRHEQQQAASLAQQQQLIGSLGQTSQQQINAIAEAASAQQQALEVTVGKMLSNFSEQMAGHDQQAENREQSRQKLFNEQMQSMAAQQQALLEGIATAVQATQQQSRQMSEQHLQLMGRLQQASEAAAASSRHMDSSANQLGLLSTNVRQAADLLGQRLESVTQRIESAGEQNAQLAGHLQGQAAALSQLQSALLESAQRFEQTAAEARNGFGELRGHQQEFLTGVRGEFTALGEALREQVQGIEQQAEQWLRTYSSEVRDQVHERMDQWNKETMSFASQMHAAVQAISNVVDELEAR

SEQ ID NO: 1270 - protein, 247 aa, Pseudomonas putida
MRWRKSHDVPMEDEDPYWKSFVDIMSALLVLFILASVVLILQLMEKSADFDQQVEQLKKAETVRQQILDEAVEKLRERGIKVEVSENHTVLRIPNELLGFDTGAYEIQPRYQQTALEIGEVINQVISKDDRINYLDTIFIEGHTDNRPFPGFMGKGNWGLSTFRAISLWQFWSNEIPEADRLNRLSNQDGEPLFSVSGYAETRPVSKQQDGEDDYRLNRRIDIRFTIRRPQSADYEAVKTLLGNSSQ

SEQ ID NO: 1271 - protein, 626 aa, Pseudomonas putida
MNLPPIDNRPGEWPPTVIEGWVRLVEKANRMKAKVGGSDAFERMLARFRDMASSGRFDGLKELLGRRLGARALTWLWLHDEVVGFRLFNARMLDALIEHQQPRLSRLTLIQLLQLYFRYFDRLDERDKQAESSLRGRLELHLLDQLQRMPAPRQVFGVDPLVNLNREGEWLLTLDGPTALVKSVRSKGGELGEAFEALGLSGFDVGRYGDICRAHYYLDVLSQLPPGEWDDVLDELLKPSVSKAPYEGEKRIGHAALEIMIDRAGDDPGDAWQNFFLTLAGDPRIASSAPNFREWWKPLGDERIAKVCGWLSKEDLRLFLQAVEQYGVESGKEDLKRMFPARKLFLEGLFRLGLIRHTRLMLGRSAKASVKRILGGDVKTSFASMDSVMNDKAVIYLDCGDFHLVEGSHSFKIWVYLAQPGDWIKSYERNQFSHSDLTISLPGQYRAAYPNLPYESVTHNGSWQRKVFDFLAANGIALDIEKLLSRAEYKSYLIRYGMPVVGLKTARTEPLPQHGVRSDSAPAAEPATRAALLARRLVASRVVSEVADADAAIGQLGVFELQVLWYFKENPGDKVRYAANVLGVDAREINRVLYGPLKSFCEQGSGFSWSLKEEISSVLDRQATEK

SEQ ID NO: 1272 - protein, 1009 aa, Pseudomonas putida
MGLADIFKSLLGEGRATLSTQQGFVHAADSDGVNFYLDKTAHGALLEGKGNSLQKVQMIVLRMLQEQGLAEPLANGFHVAAEDVAGMDEEQAEILRLPRRFNMNFTSKISGRTGNSGFHVDLAVLSGATEAPFTRKGPLLFLTSTESYRLTPAELMGLMAWERHQNLLPQQRGEAANLRMMAELQTAARSGMRVDLSHFDRLDVVVPENIGVIATRLPDGSLMLSPSLGDGSTPDQLEKRWSQLDIGADGGVLRIDNRVVLLDPQKMAAIREVLGSKRIPAEKVAEFIATPSAFLDAALVNLDVGFSVRVAGIGKLQHMEFGDLDNRKNDWFALDSRPAPAEIIPTLVQSEEDLARFHEAYKAAKEQGADSMSFGGEVIDISDPVRIDAQLDKVVSGLGDLKPDVTAGVEPSEGPKERVSVLLRDADKINSALLSKASEAKPEYEPDWGAYARQPFPHQREGIEWMLGLLESAVRDDHGDLYRLQGGLLADDMGLGKTYMSLVAVGEYLVRQKVAGRAQKPVLVVAPLSLLENWEDEVSQTFKGIPFRDIVMLQAGRDLSRFRVKGSERESAQLASLIDEDGAMADDAIRYALTIGPESGVHRLDMDRRLVLTTYQTLRDYQFSLCRIDWGLVIFDEAQNIKNPNAAQTRAAKGLKADFKLLATGTPVENSLGDFWCLMDTAQPGILGGWSQFRDSWIKPILSAADDEKDEVRRKIGAGLREAVGRFMLRRIKEDQLKGLPSKTIHSGVEQPKGGQLLHAAHLSVCMKGAQLQAYDAVLNDFRARRATEDMRGTALAALAQLREISLHPRLREEAKLMANSASEARASMAQSGKLTVLLELLDRIRENEEKVILFMVTKRLQRILKLWLDQIYGLDVAIINGDTAAVAKKSDELTRKKLIGVFESKPGFNVMIMSPVAAGVGLTVVGANHVVHLERHWNPAKEAQASDRVYRIGQKKDVHIHLPAVRHPQYDSFDVHLDRLLRGKLMLKDAVVTPEAVSESEMIQSMGL

SEQ ID NO: 1273 - protein, 783 aa, Pseudomonas stutzeri A1501
MVMMDLLQHLIPDFAHMFSANPNGISAWFWLVTALIFGFSLFFLMLHFRHFRARMRALRSLLDGQSKETLAANRRETLHKAQELKATNVGMLWREFDESLVLSSDQQKLFNTLDAEHFFNARTLASGLTASRLLAAAPSFLVAVGVLGTFVGLTVGLEGLVGTSDEIEALKGGINKLISGAAVAFMTSVWGVAFSLLLNIIEKMFERSALNDIQRLQHDIDFLYPRIPAEQSLVHIAEYGKESKEALQELHERIGDKLQETLTGMNEAMQTALTEALNNIMAPAIQTLVSTTSQQSTQVLETLVGSFMDGMTSVGREQGSQMQQAAADVNAAVSGMSERLNQLFTSLSEQQGRQMEAAQQQSTQFEAQLQRIAGSADQRQEQLEQRFSELMAGLSSQLQGQLGSAQRRDEERQAMFERLLSESSANQAALLEKFSSSTQDQMRVMAEAGNERHNNLEKVFSRLMMNLNTQLDTQMGAAEQREQARAQRHEEQQAAALAQQQQLIGNLGQISQQQIGAIAEAAATQQRNLEETVSKLLGSFNEQVSGYGVQAEQREQSRQQRCNEQLENMAAQQQELLAGIASAVQVTQQQSRQMAEQHQQLMTRLQQATEAAATSSKHMDSSANQLGLLSANLRQAADALGQRLEAVTQSVEAASTQNAALAAQLQGQASSLSQLQAALLEGAQRFEQAASEARNGFGDMKQTQQEFLSGVRHEFTTLGETLRAQVEAVEKQAEEWLRSYASEVRMQTEDRMNKWNEVSLAYADQMHRNVQAVSGILDELEAR

SEQ ID NO: 1274 - protein, 254 aa, Pseudomonas stutzeri A1501
MRFRKSHDVAVDEENPYWMSFSDIMSALLVIFILASVILILQLMDIQQKLEERQVQFEQEIEELKKAEQVRRTILDEAVEALRRRGIKVEVSENHTVLSIPNDLLGFDTGAYEIHSAYQARALEIGKVINEVISRDDRVEFLDTIFIEGHTDNRPLPGFMGKGNWGLSTFRAISLWQFWGDALAREEQLSRLNNKDGKPLFSVSGYGETRPAVADQVTEEDFKRNRRIDIRFTIRRPDSAQYEQVKERLGEAKP

SEQ ID NO: 1275 - protein, 210 aa, Pseudomonas stutzeri A1501
MRLPPVEFPAASWGAQMLERWTVLAKKAATMETEAGNNDAFERMCAELRRMAFTLRCDVLPELLKRRITARALTSLWLNDEVVELLNARLLTTLLRAQQPRLTRMTLQQLVQLYFRRFDRLDEKEGLRELLERSLLQQLDLIPPSKIQTSRADPLVTLKREGHWLLSLDGPRHLAERVRQGGRELGETFIELGLHGFDDGRYGDICRAHF

SEQ ID NO: 1276 - protein, 1012 aa, Pseudomonas stutzeri A1501
MRLFDVLKSLIGERDVAVGSQEGFASSADSNGVNFYLPVQTFKALQEGKGNALQKIQLIVLNMLSEQGIAEHTANGFHIGAEDIAGMDSEQADILRLPRRFMGRFQTSISGRTGNSGFRVGLAVEVAEGLTPFSRKGPYLCLTSTERYWLTPAELMGLMAWEKHESLEPAQRGEAANLRLMAELQTAARSGMRIDLSHFDRLDVVVPENVGVIATRLPDGSLMLCPSLGDGSTPDQLEKRWSQLDMSADGGVLRIDNRVVLLDQAKMDGIRNVLVNKRIPPDKVAEFIASPTAFLDAALVNLEVGFSVRVAGIGKLQHMDFGTLDTAKNDWFALDKRPAPAEIIPKLVQTPEELERFEEVLRSAIEQGATSLSFAGEVIDISDAPLVARQLERVKETLEKPELSEPPAAAEDLFDEPKEKVAVILKDAGEINSTLLAKASNARLLEAPDWSAYARQPFPHQVEGIEWMLRLMNAALSDDHDDLYRLQGSLLADDMGLGKTYMSLVAIGEYMAAQRRSEKPQKPVLVVAPLSLLENWEDEVGKTFLSIPFRDLVVLQAGRDLNRYRVKGAERESVQLAALADDDGMMDAQSIRYALTIGPEAGAQRLDMDRRLVLTTYQTLRDYQFSLCRIDWGMVIFDEAQNIKNPNALQTRAAKGLKADFKLLATGTPVENSLGDFWCLMDTAQPGLFGSWENYRDTWIKPILSAGEEERDEVRVRLGEQLRKAVGPFMLRRVKEDQLKGLPSKTIRSGVEQVDRGIQRYAPELGVSMRGIQLQVYDDVLDGYRARRASADDMRGSALAALTQLRSVSLHPRLDDEPSLYSRDGHHARQLMSESGKLAVMLKLLDEIRDKGEKVILFMMTKRLQRVLKLWLDQIYGLDIAVINGDTKAVATKAEEMTRKKLISAFEAKSGFNVLVMSPVAAGVGLTVVGANHVVHLERHWNPAKEAQASDRVYRIGQQKEVFIHLPAVTHPQFDSFDVHLDRLLRGKLMLKDAVVTPEAVSESEMIHSMGL

SEQ ID NO: 1277 - protein, 781 aa, Pseudomonas stutzeri DSM 4166
MMDLLQHLIPDFAHMFSANPNGISAWFWLVTALIFGFSLFFLMLHFRHFKARMRALRSLLDGQSKDTLAASRRETLHKAQELKASNVGMLWREFDESLVQSSDQQKLFNTLDAEHFFNARTLASGLTASRLLAAAPSFLVAVGVLGTFVGLTVGLEGLVGTSDEIEALKGGINKLISGAAVAFMTSVWGVAFSLLLNIIEKMFERSALIDIQRLQHDIDFLYPRIPAEQSLVHIAEYGKESKEALQELHERIGDRLQETLNGMNEAMQTALTDALNNIMAPAIQTLVSTTSQQSTQVLETLVGSFMDGMTSVGREQGSQMQQAAADVNAAVSGMSERLNQLFTSLSEQQGRQMEVAQQQSSQFEAQLQRIAGSADQRQEQLEQRFSELMAGLSSQLQGQLGSAQRRDEERQAMFERLLSESSANQAALLEKFSSSTQDQMRVMAEAGNERHNNLEKVFSRLMMNLNTQLDTQMGAAEQREQARAQRHEEQQAAVLAQQQQLIGNLGQTSQQQIGAIAEAAATQQRNLEETVSKLLGSFNEQVSGYGVQAEQREQSRQQRFNEQLENMAAQQRELLAGIASAVQVTQQQSRQMAEQHQQLMTRLQQATEAAATSSKHMDSSANQLGLLSANLRQAADALGQRLEAVTQGVEAASTQNAALAAQLQGQASSLSQLQAALLEGAQRFEQAASEARNGFGDMKQTQQEFLSGVRHEFTTLGETLRAQVEAIEKQAEEWLRSYASEVRTQTEDRMNKWNEVSLAYADQMHRNVQAVSGILDELEAR

SEQ ID NO: 1278 - protein, 254 aa, Pseudomonas stutzeri DSM 4166
MRFRKSHDVAVDEENPYWMSFSDIMSALLVIFILASVILILQLMDIQQKLEERQVQFEQEIEELKKAEQVRRTILDEAVEALRRRGIKVEVSENHTVLSIPNDLLGFDTGAYEIHSAYQARALEIGKVINEVISRDDRVEFLDTIFIEGHTDNRPLQGFMGKGNWGLSTFRAISLWQFWGDALAREEQLSRLNNKDGKPLFSVSGYGETRPAVADQVTEEDFKRNRRIDIRFTIRRPDSAQYEQVKERLGETKP

SEQ ID NO: 1279 - protein, 751 aa, Pseudomonas stutzeri DSM 4166
MRLPPVEFPVAGWSAQMLERWIVLTKKAATMETEAGNNDAFERMCAELRRMAFTLRCDVLPELLKRRITARALTSLWLNDEVVELLNARLLTTLLRAQQPRLTRMTLQQLVQLYFRRFDRLDEKEGLRELLERSLLQQLDLIPPSKIQTSRADPLVTLKREGHWLLSLDGPRHLAERVRQGGRELGETFIELGLHGFDDGRYGDICRAHFYLETLRHLPLGDSDPVLDELLKPSVAKAPFEGARRIGHVALEILIDRAGQEAGEVWQNFILNLAGDPRISSSAVNFREWWQPLGEERIQKVRGWLSKEDLRLFLQAVEQYGLETANMEMQRMFPARKRFLEGLFKLKLIRNTRLLLGGKAQQSVKRILGKDVKTSFARMDGPMNDKAVIYLDCGDFHLVEGSHSFKIWVYLAAPGETLRTYERNTFSHQDLTTTVPGTYKKLYPGLPYDAFVHTPHAWQNKVFTFLAENGIALDVEQLLSAEDYRLQLRKFGIPAVSAKRTVVPAPAKEWAKAVARAPTAAQQGTEHAAALPSRNADVPTPPRRSADVSVAANGAVSSSAVASGRDNPVLQRTKLPPFSSLQLAALRYLETHPRCGFYALLEAVSNQGGNVLNVKTMLESSLSQYVQQDEEGKWLLSTHGEQLVAELVRSEPPDASQSVSSAANANASANAGSRVARLEPFALAVLRYFAANPGDKVRYAANVLEVDARLVNQALYGPLKGICTQDDKYGWQLTGVAQRELEAFEAEGREQ

SEQ ID NO: 1280 - protein, 1012 aa, Pseudomonas stutzeri DSM 4166; identical to SEQ ID NO: 1276

SEQ ID NO: 1281 - protein, 781 aa, Pseudomonas stutzeri ATCC 14405 = CCUG 16156
MMDLLQHLIPDFAHMFSANPNGISAWFWLVTALIFGFSLFFLMLHFRHFKARMRALRSLLDGQSKDALAASRRETLHKAQELKASNVGMLWREFDESLVQSSDQQKLFNTLDAEHFFNARTLASGLTASRLLAAAPSFLVAVGVLGTFVGLTVGLEGLVGTSDEIEALKGGINKLISGAAVAFMTSVWGVAFSLLLNIIEKMFERSALIDIQKLQHDIDFLYPRIPAEQSLVHIAEYGKESKEALQELHERIGDRLQETLNGMNEAMQTALTDALNNIMAPAIQTLVSTTSQQSTQVLETLVGSFMDGMTSVGREQGSQMQQAAADVNAAVSGMSERLNQLFTSLSEQQGRQMEAAQQQSTQFEAQLQRIAGSADQRQEQLEQRFSELMAGLSSQLQGQLGSAQRRDEERQAMFERLLSESSANQAALLEKFSSSTQDQMRVMAEAGNERHNNLEKVFSRLMMNLNTQLDTQMGAAEQREQARAQRHEEQQAAALAQQQQLIGNLGQTSQQQIGAIAESAATQQRNLEETFSKLLGSFNEQVSGYGVQAEQREQSRQQRFNEQLENMAAQQQELLAGIASAVQVTQQQSRQMAEQHQQLMTRLQQATEAAATSSKHMDSSANQLGLLSANLRQASDALGQRLEAVTQSVEAASTQNGALAAQLQGQASSLSQLQAALLEGAQRFEQAASEARNGFGDMKQTQQEFLSGVRHEFTTLGETLRAQVEAVEKQAEEWLRSYATEVRTQTEDRMNKWNEVSLAYADQMHRNVQAVSGILDELEAR

SEQ ID NO: 1282 - protein, 254 aa, Pseudomonas stutzeri ATCC 14405 = CCUG 16156
MRFRKSHDVAVDEENPYWMSFSDIMSALLVIFILASVILILQLMDIQQKLEERQVQFEQEIEELKKAEQVRRTILDEAVEALRRRGIKVEVSENHTVLSIPNDLLGFDTGAYEIHSAYQARALEIGKVINEVISRDDRVEFLDTIFIEGHTDNRPLQGFMGKGNWGLSTFRAISLWQFWGDALAREEQLSRLNNKDGKPLFSVSGYGETRPAVADQVTEEDFKRNRRIDIRFTIRRPDSAQYEQVKERLGEAKP

SEQ ID NO: 1283 - protein, 751 aa, Pseudomonas stutzeri ATCC 14405 = CCUG 16156
MRLPPVEFPAASWGAQMLERWTVLAKKAATMEASVGNNDAYERTSAELHRMAQTLRFDALPEMLKRRITARTLTSLWLKNEVIELLNARLLTTMLRAQQPRLTPMTLRQLAQLYFRRFDRLGEKEGVRELLERSLLQQLDLIPPSKIQTSRADPLVTLKREGHWLLSLDGPRYLAERVRQGGRELGETFMELGLHGFDDGRYGDICRAHFYLETLRHLPLGESDPVLDELLKPTVAKAPFEGTRRIGHVALEILIDRAGQEPGEVWQNFILNLAGDPRISSSAVNFREWWQPLGEERIQKVRGWLSKEDLRLFLQAVEQYGLETANTEMQRMFPARKRFLEGLFKLKLIRNTRLLLGGKAQQSVKRILGKDVKTSFARMDGQMTDKAVIYLDCGDFHLVEGSHSFKIWVYLAAPGEALRTYERNTFSHYDLTTTVPGTYKKLYPGLPYDAFVHTPHAWQNKVFTFLAENGIALDVEQLLSAEDYRLQLRKFGIPAVSAKRTVVPAPAKEGAKAVTRSPKAAQQGTEHAAALPSRNADVPTPPGRSADVSVAANGAVSSSAVASGRDNPVLQRTKLPPFSSLQLAALRYLETHPRCGFYALLEAVSNQGGNVLNVKTMLESSLSQYVQQDEERKWLLSTHGEQLLAELARSEPSDASQSVPSAADMNANDNAGSRVARLEPFALAVLRYFAANPGDKVRYAANVLEVDARLVNQALYGPLNGICTQDDKYGWQLTGAAQRELEAFEAEGREQ

SEQ ID NO: 1284 - protein, 1012 aa, Pseudomonas stutzeri ATCC 14405 = CCUG 16156
MRLFDVLKSLIGERDVAVGSQEGFASSADSNGVNFYLPVQTFKALQEGKGNALQKIQLIVLNMLAEQGIAEHTANGFHIGAEDIAGMDSEQADILRLPRRFTGRFQTSISGRTGNSGFRVGLAVEVAEGVTPFSRKGPYLYLTSTERYWLTPAELMGLMAWEKHESLDPAQRGEAANLRLMAELQTAARSGMRIDLSHFDRLDVVVPENVGVIATRLPDGSLMLCPSLGDGSTPDQLEKRWSQLDMSAGGGVLRIDNRVVLLDQAKMDGIRNVLANKRIPPDKVAEFIASPTAFLDAALVNLEVGFSVRVAGIGKLQHMDFGALDTAKNDWFALDKRPAPAEIIAKVVQTPEELQRFEEVLQAALEQGATSLSFAGEVIDISDVPLVARQLERVRETFDKSELTDQFDTLEDDFDELKEKVAVILKDAGEINSTLLAKASNARLLDSPNWSAYARQPFPHQVEGVEWMLRLMSVALSDDHDDLYRLQGSLLADDMGLGKTYMSLVAIGEYLAAQRRSEKPQKPVLVVAPLSLLENWEDEVGKTFHGIPFRDLVVLQSGRDLNSYRVKGAERESVQLAALADDDGMMDAQSIRYALTIGPEAGPQRLDMDRRLVLTTYQTLRDYQFSLCRIDWGMVIFDEAQNIKNPNALQTRAAKGLKADFKLLATGTPVENSLGDFWCLMDTAQPGLFGSWENYRDTWIKPILSAGEEERDEVRVRLGEQLRKAVGPFMLRRVKEDQLKGLPSKTIRSGVEQVDRGIQRYAPELGVSMRGIQLQVYDDVLDGYRARRASADDMRGSALAALTQLRSVSLHPRLDDEPSLYSRDGHHARQLMSESGKLAVMLKLLDEIRDKGEKVILFMMTKRLQRVLKLWLDQIYGLDIAVINGDTKAVATKAEEMTRKKLISAFEAKSGFNLLIMSPVAAGVGLTVVGANHVVHLERHWNPAKEAQASDRVYRIGQQKEVFIHLPAVTHPQFDSFDVHLDRLLRGKLMLKDAVVTPEAVSESEMIYSMGL

SEQ ID NO: 1285 - protein, 781 aa, Pseudomonas stutzeri CCUG 29243
MMDLLQHLIPDFAHMFSANPNGISAWFWLVTALIFGFSLFFLMLHFRHFKARMRALRSLLDGQSKDTLAASRRETLHKAQELKASNVGMLWREFDESLVQSSDQQKLFNTLDAEHFFNARTLASGLTASRLLAAAPSFLVAVGVLGTFVGLTVGLEGLVGTSDEIEALKGGINKLISGAAVAFMTSVWGVAFSLLLNIIEKMFERSALNDIQRLQHDIDFLYPRIPAEQSLVHIAEYGKESKEALQELHERIGDRLQETLNGMNEAMQTALTDALNNIMAPAIQTLVSTTSQQSTQVLETLVGSFMDGMTSVGREQGSQMQQAAADVNAAVSGMSERLNQLFTSLSEQQGRQMEVAQQQSSQFEAQLQRIAGSADQRQEQLEQRFSELMAGLSSQLQGQLGSAQRRDEERQAMFERLLSESSANQAALLGKFSSSTQDQMRVMAEAGNERHNNLEKVFSRLMMNLNTQLDTQMGAAEQREQARAQRHEEQQAAVLAQQQQLIGNLGQTSQQQIGAIAEAAATQQRNLEETVSKLLGSFNEQVSGYGVQAEQREQSRQQRFNEQLENMAAQQQELLAGIASAVQVTQQQSRQMAEQHQQLMTRLQQATEAAATSSKHMDSSANQLGLLSANLRQASDALGQRLEAVTQSVEAATTQNGALAAQLQGQASSLSQLQAALLEGAQRFEQAASEARNGFGDMKQTQQEFLSGVRHEFTTLGETLRAQVEAVEKQAEEWLRSYASEVRTQTEDRMNKWNEVSLAYADQMHRNVQAVSGILDELEAR

SEQ ID NO: 1286 - protein, 254 aa, Pseudomonas stutzeri CCUG 29243
MRFRKSHDVAVDEENPYWMSFSDIMSALLVIFILASVILILQLMDIQQKLEERQVQFEQEIEELKKAEQVRRTILDEAVEALRRRGIKVEVSENHTVLSIPNDLLGFDTGAYEIHSAYQARALEIGKVINEVISRDDRVEFLDTIFIEGHTDNRPLPGFMGKGNWGLSTFRAISLWQFWGDALAREEQLSRLNNKDGKPLFSVSGYGETRPAVANQVTEEDFKRNRRIDIRFTIRRPDSAQYEQVKERLEEAKP

SEQ ID NO: 1287 - protein, 752 aa, Pseudomonas stutzeri CCUG 29243
MRLPPAEFPVAGWSAQMLERWIVLTKKAATMEASVGNNDAYERTSAELHRMAQTLRFDALPEMLKRRITARTLTSLWLKNEVIELLNARLLTTMLRAQQPRLTPMTLRQLAQLYFRRFDRLDEKEGVRELLERSLLQQLDLIPPSKIQTSRADPLVTLKREGHWLLSLDGPRYLAERVRQGGRELGETFMELGLHGFDDGRYGDICRVHFYLETLRHLPLGEADPVLDELLKPTVAKAPFEGTRRIGHVALEILIDRAGQEPGEVWQNFILNLAGDPRISSTNERFVEWWRPLGEERIQKVRGWLSKEDLRLFLQAVEQYGLETANTEMQRMFPARKRFLEGLFKLKLIRNTRLLLGGKAQQSVKRILGKDVKTSFARMDGPMNDKAVIYLDCGDFHLVEGSHSFKIWVYLAAPGEALRTYERNTFSHYDLTTTVPGTYKKLYPGLPYNSFVHIPHVWQNKVFTLLAENGIALDIEQLLSPEDYRRQLSKFGIPAVNAKRTLVPAPAKEGAKVGTRAPTAAQQGTERAAAPMPRNADVPTPARRSADVESVAANGAMRSSTIASERNNPVPQQTKLPPFSSLQLAALRYLETHPRCGFYALLDAVSNQGGNVLNVKTMLESSLSQYVQQDEEGNWLLSIHGEQLLAELARSEPSDASQSVPSAANMNANENAGSRVARLEPFALAVLRYFAANPGDKVRYAANVLEVDARLVNQALYGPLKGICTQDDKYGWQLTGAAQRELEAFEAEGREQ

SEQ ID NO: 1288 - protein, 1012 aa, Pseudomonas stutzeri CCUG 29243
MRLFDVLKSLIGERDVAVGSQEGFASTADSNGVNFYLPVQTFKALQEGKGNALQKIQLIVLNMLAEQGIAEQTANGFHIGAEDIAGMDSEQADILRLPRRFTGRFQTSISGRTGNSGFRVGIAVEVAEGVTPFSRKGPYLYLTSTERYWLTPAELMGLMAWEKHESLDPAQRGEAANLRLMAELQTAARSGMRIDLSHFNRLDVVVPENVGVIATRMPDGSLMLCPSLGDGSTPDQLEKRWSQLDMSADGGVLRIDNRVVLLDQAKMDGIRNVLANKRIPPDKVAEFIASPTAFLDAALINLEVGFSVRVAGIGKLQHMDFGALDAAKNDWFALDKRPAPAEIIPKLVQTPEELQRFEEVLQAALEQGATSLSFAGEVIDISDVPLVARQLERVKQTFDQPERTDQSSALEDDFDEPKERVAVILKDAGEINSALLAKASNARLLDAPNWSAYARQPFPHQIEGVEWMLRLMSAALSDDHDDLYRLQGSLLADDMGLGKTYMSLVAIGEYLAAQRRSEKPQKPVLVVAPLSLLENWEDEVGKTFHSIPFRDLVVLQSGRDLNSYRVKGAERESVQLAALADDDGMMDAQSIRYALTIGPEAGAQRLDMDRRLVLTTYQTLRDYQFSLCKIDWGMVIFDEAQNIKNPNALQTRAAKGLKADFKLLATGTPVENSLGDFWCLMDTAQPGLFGSWENYRDTWIKPILSAGEEERDEVRVRLGEQLRKAVGPFMLRRVKEDQLKGLPSKAIRSGVEQVDRGIQCYARELGTTMRGIQLQVYDDVLDGYRARRASADDMRGSALAALTQLRSVSLHPRLDDETSLYSRDGEHARQLMSESGKLAVMLKLLDEIRDKGEKVILFMMTKRLQRVLKLWLDQIYGLDVAIINGDTKAVATKAEDMTRKKLISAFEAKSGFNMLIMSPVAAGVGLTVVGANHVVHLERHWNPAKEAQASDRVYRIGQQKEVFIHLPAVMHPQFDSFDVHLDRLLRGKLMLKDAVVTPEAVSESEMIYSMGL

SEQ ID NO: 1289 - protein, 682 aa, Pseudomonas stutzeri KOS6
MKKLARQVRELKKLQPAKRRSELEQLFHEHTLGHAWQEYAETLHDQFEVHEGERRLLCSRATAGAGHFFTAQTVVETPLGTEFYKHLPGILTGIGIVGTFFGLMLGLQHFDPSTPEQVSSSVDQLLKDVLFAFLGSFFSIFASIGVTLTEKWRLGRCYKHLESLTESIDGLFDSGVGEEYLAELVKSSNESSIQTRQLKDSLVTDLREMLQNLVDTQVRENLKLADSLSASYRDSGQVLAEQIGGAIENSLKSPLEAIAGAVNTASGDQSNQVQSLLTDVLTAFMSKLESTFGQQFNGLHEMLGQSVAAMQSMQQGFNELVGDMRSASEASSQNSAKMIAQLLSDMQAGQNSMQAGMNEMLASLQTSIARIGSEGEGAGERMAKQLEKLFADSEARQQAMAENLQIFVESLQQSIGQGQQETMAKIAGSVDVLGEQLGGLFKQLEQNRTQMEQASKTAQVELHRGTREVVGGLEEQVKTLLDAVADQQGAMQDSLKLLGAQTEQHLQSMQQGAEKMRLAAERFDSAGQSVSKAGEATASVLGALQGTSGDLVGASRELTSVVADYRNNREALNQTLAVIQGVVATTQGESAGRSQYLQDLKLQGERLQTLNREVNDYLEQISAVLGKGFNEFSEGVDRSLRLTLGSLDAELHKAMTSLAGGVEGVKESLEDFSDIMERVQRR

SEQ ID NO: 1290 - protein, 245 aa, Pseudomonas stutzeri KOS6
MFGKSAAPARARDEGEKPFWISFADLMTAMMILFLVVMVASLSSVTQRIQQAEQGEKQRGKDIAKLCQDLKLRAGGLNSTIVVDCRDNRISFGEAGRFGHNQYFLNSQGQQALQDVVPLILDAADSEEGRKWLKQVVIEGFTDTDGSYLYNLHLSLQRSEWVMCSLLDSRSPVQKGLSAERQQQIRSMFLAGGVSFNNAKESKEESRRVELRMQFFGLKDQEHEGQEPALEFAYAANEKCQLEMR

SEQ ID NO: 1291 - protein, 558 aa, Pseudomonas stutzeri KOS6
MSRALSSLSAAITSGLQRQNERSGDAGFSSMVALKRVNTELSRRFDQVEKALAPPREKRLLALGKFKREQALTSSEWRLVFAGLADDDEVSVPVLEDDHLFDRVHREVAGRIEQRTLSRRDWLALCFSYFAYDEHKPDDNANWRVLRDDIDRGFDAVRQRIGREKEWMRIVAEHRELFGAQAGTRLAEEIFEGRARDLSSLQAIAQVPDGSWLWQRIFAVLLSRIFLLDDETFLKRLPELVALGQLNTRYLNQVLSACLTRYHRSRYREQSSSLLKQAALEHWGSPQMRSKQNAWLQYVEQPVCAMVVAWFAKEDLEHFFTLLKGEAEVDQSRLFYWLRFANQMSYTRIVMGGDAWHDRGSDFVAFREKNKGRLSQLAGGPSHNNAVVMQIGNYFFVEFSGTGNACYVYRADAAPFNPDKPVLGLATELKQQGRALKRMSHSPAPRRPNVVEGWLEKFDDELRTLGIVAQRPASFTQPRLSGDKPAVHTAASAPGTGDSLDVQVRSMLGSVPYKTFDHRSKSGVYQVLLARDDAAAKTALLRLGFKAVKNNALMFWRL

SEQ ID NO: 1292 - protein, 1083 aa, Pseudomonas stutzeri KOS6
MLGRFFSGKDRSQSAKGAAPGAYQIEEQGICYALSLADDDTSWPVAAYLDQLFEEDYASQLSDRWLLPWESIYQLLDDPAHASSLPLLGLPAIAKLQPQLASTGGLSGPDFKVFVQSWRNSETGSPVTFERVGAMARHAATTELLPPAVWELLKAIRDLHAAQQQAPGEVTNQIGWANIRKLAKRAGAVLDGFLDKTVVVRPEHLKLRPRKAVVSGTPIIELDVAFDGQPDNWLASFDGYKQVQDKYRVPGADGSVTHVLIEPDVKAVLESVRALPGRRVAGDEALSLVRNPYSVIGDAAEKVVDADEYEEQLADAGIYFHRFRLEPCLGEDGKHVRSIGLFLEPISAKPLPEVELRFDFAHEFAPFVNELQVKLAAGMPAGFWQGYELELSDFDLAQLAGVNELLRHWQRQEAGQTFEEVLDLASYGDRVVGIGEAERITSPFLVKEATENWLPVDVKELGMDGDLLSQWDPASREDFEEFEHRIDQARVAGDEQVCLPGTETPLPFQVAEQLYEAWSKKLNPVEPKSPVVTEPVAGRAVLHIEHNIEEATYAQRREAALLAGRHANADIPELLRPEVQLRDHQMKGVAWMQHLFGLSPDHVAGCLLADDMGLGKTIQLLTFVVWYLEQNPQGKPVLIVAPVSLLDNWERELQRFFYADVLPVLKLYGGALSAVKFKRDEIPEDLQAKGIKNLLRPGWMGDARIVLTTYETLRDQELSLARQQWAIVICDEAQKIKNPAALITQAAKAIPSRFRIACTGTPVENTLIDLWCLFDFIQPGFLGGLNQFGREYQRPIEAGLERDTAALERLRGLIEPQTLRRTKQDVAKDLPAKIEDQGCRKLLMHTLQRNLYLSEVAQYTQKQQMQEQLEQRESGMLGLLHKLKLVCAHPFSVQPDPRLREHSPKLQWLLSTLDNIARSGSGDKVILFTELRDVQRELQHAIQERFGFKPTVINGDTSTSSQSAQSRQRLIDHFQEQPGFSVIILSTVAVGFGVNVQVANHVIHFTRCWNPAKEDQATDRAYRIGQEKDVYVYYPTVRDARIPTFEATLDELLQKRRALARDMLQGASELQASEFGELLRAQG

SEQ ID NO: 1293 - protein, 781 aa, Pseudomonas stutzeri B1SMN1; identical to SEQ ID NO: 1277

SEQ ID NO: 1294 - protein, 254 aa, Pseudomonas stutzeri B1SMN1; identical to SEQ ID NO: 1278

SEQ ID NO: 1295 - protein, 1012 aa, Pseudomonas stutzeri B1SMN1; identical to SEQ ID NO: 1276

SEQ ID NO: 1296 - protein, 659 aa, Pseudomonas syringae pv. actinidiae ICMP 19098
MEKVFNATKLKHLWKEYSETLHNQFEYHEGEERLVRSRATTVAANFFTSQSVVDTPLATEFFKHLPGILTGVGIVGTFFGLMLGLQHFDPSTPELVNASVDKLLKDVLFAFIGSVLSIMASIIVTVSEKWRLGRCYKHLESLNEAIDSLFGSGVGEEYLAALVRSSAENSIQTRQLKDSLVTDLREMLQNLVDTQVRESLKLADTLSTTYRDSGQLLADQVSNAIENSLKSPLEAIAGAVQAASGDQSGQVQNLLQDVLVAFMNKLEGTFGQQFNGLNEMMGQSVAAMQSMQQGFSSLIQDMRSASDNSNQSSSAMIAQLLADMQTGQSAMQAGMNEMLANLQSSIARIGTEGEDAGARMAQQLEKMFADSEARQMAMAENLQSFVESIQKNMGQGQQETMAKIAGSVEVLGEQLSTVFKKLESGREQMDQSTRVAQAELHHGTRELVGGLDEQVKTLLQSVAEQNKASQDNVKALSAQTEQHLQSMQLGADKMRAAAERFENAGLSVSKASESTASLLGTVQGAGTELAQASRELNSVVADYRNNRESLSKTLTVIEGVVASAQVEASGRAQYLQDLKQQSERMQSLNREVHEYLENISGVLGDGFKEFGDGMDRALRQTLGSLDTELDKAVKSLAGGVDGVKESIEDFGDIMERIKQ

SEQ ID NO: 1297 - protein, 247 aa, Pseudomonas syringae pv. actinidiae ICMP 19098
MFGKQMPSVARAKDDAEKPFWISFADLMTAMMILFLVVMVAALSSVTQRINQSEQGEKQRSRDISELCEHLQLKAKGSNATIVVDCKDNRISFGEAGRFGHNQYSLSDEGQSALQGVVPLILDAADSEEGRKWFKQVVIEGFTDTVGSYLYNLHLSLQRSEWVMCSLLDSRSPLQIGLSAERQQQIRLMFLAGGVSFNNAKDTNEASRRVELRMQFYGLKEKEEDLKSDVPVFASTVSEKCQLAMTR

SEQ ID NO: 1298 - protein, 378 aa, Pseudomonas syringae pv. actinidiae ICMP 19098
MRIVQHHKELFSEQAGETLGEQMFNGEISDLSVLQAIAQIPNSSWLWHRIFSVLLSRIFVLDDEEFSKRFPDFIEIGRQHPTYMNALLSACLTRYHAATYREKPSSLLKQTALDNWGSPQIRSKQNSWLQYVERDVCAMVVAWFAKEDLEHFFNLLKGDADVDHSRLYYWLRFANQMSYTRIVMGLDAWGDRSKDFVHFREKNKGRFSRLGGAPSHNNAVVMQIGNYFFVEFSGTGNACYVYEAIKSPFNPDKSQLELGELKQPPQALARMRHSPAPSSPTRIEGWLSKFDDELQRLGISIHTQSGFVPSPSSKQQLMSLDEQVRDAVKTVRYKIHDSRGKGGAFQVHLDSHDHSAVAALQRLGFKPVNHQPLRFWRQ

SEQ ID NO: 1299 - protein, 1082 aa, Pseudomonas syringae pv. actinidiae ICMP 19098
MLKRFLSGKGLLPKSGELNNLPTYSIEEQGLCFPLSLADSTEFWPLASYLDQLEEEEFVSQLSDRWLLPWDELYRLLNDEGHVSSVPLLGLPKQSNLTPQLTSQGSLASSDFMVSIGAWSDHESAATVQTKRTGAVLRHGDKIELLPEATYQLVSAVRQLHLSQQESPGELTNQIGWASVRKLARKAGAGMDGFLDKTVVVRPDNLRLNPRKSSVGNTPVIELEPTFDGQPENWLESFDAHKQVQDRYRVIGADGSLTHVLIEPEVKSVLDYVRSLHGRRVAGDDALSFIRNPYSALGDSASQVLDADTYESDLADAGIFFHRFHLEPELNDTGLRIQRINLTLQPISSTPQASIELPFNEAYEFAPLVHELHLKLAAGMPAGFWQGYELELSDFDLRQLAGISELLKRWQNEAAGAEFDAVLDLSLYGDRVTGIGEAERITSPFLVKEATENWLPKDLADLGIDAEILGRWDPLDRAQFDEFEQRLNRARAAADDTVLMSLSDTPLSIAAAEQLFDTWSKKISTPVAKISSLEEKVGRAVLQIGHNIDEPTYVQVRQEALRAALDAQPELPSLLRPEVILREHQLQGVAWLQHLFRLSPTDVSGCLLADDMGLGKTIQLLTFLVWYLEQYPQDKPTLIVAPVSLLDNWERELHRFFFADALPVLKLYGSALSAVKFKKAEIPADLKAKGIKNLLRPGWIGGARIVLTTYETLRDQEFSLARQQWSIVVCDEAQKLKNPAALVTQAIKAVPARFRVACTGTPVENSLIDLWCLFDFIQPGFLGGLNQFGREYQRPIEAAIERDYVALERLRVLIEPQTLRRTKQDIAKDLPAKIEDKGCRSLSMHGLQRNLYLSEISAYSQKQQIEEHLDQKTSGMLGLLHKLKLICAHPYSVQPDKRLRENSPKLRWLIDTLESIKKSGKGDKVILFTELRDIQRELQHAIQEYFGFRATVINGDTSTSSQSANNRQKLIDQFQDKPGFSVIILSTIAVGFGVNVQAANHVIHFTRCWNPAKEDQATDRAYRIGQEKDVYVYYPTVRDAAMPTFESTLDELLSKRRALARDMLSGSGEIQASDFERVLGVS

SEQ ID NO: 1300 - protein, 659 aa, Pseudomonas syringae pv. actinidiae ICMP 19096; identical to SEQ ID NO: 1296

SEQ ID NO: 1301 - protein, 247 aa, Pseudomonas syringae pv. actinidiae ICMP 19096; identical to SEQ ID NO: 1297

SEQ ID NO: 1302 - protein, 518 aa, Pseudomonas syringae pv. actinidiae ICMP 19096
MARFPRLEAASADLYNRFERAEKALPPPQEKRRAAINKFRNVLPLTSSEWRMVFAGLADKSESVGPILEDEQLYGRIHIEVSQRIEKQRLSRRDWLALCFSYFGYESDTPDTNPVWCLLQGDIRKGFACVKAQQTREKEWMRIVQHHKELFSEQAGETLGEQMFNGEISDLSVLQAIAQIPNSSWLWHRIFSVLLSRIFVLDDEEFSKRFPDFIEIGRQHPTYMNALLSACLTRYHAATYREKPSSLLKQTALDNWGSPQIRSKQNSWLQYVERDVCAMVVAWFAKEDLEHFFNLLKGDADVDHSRLYYWLRFANQMSYTRIVMGLDAWGDRSKDFVHFREKNKGRFSRLGGAPSHNNAVVMQIGNYFFVEFSGTGNACYVYEAIKSPFNPDKSQLELGELKQPPQALARMRHSPAPSSPTRIEGWLSKFDDELQRLGISIHTQSGFVPSPSSKQQLMSLDEQVRDAVKTVRYKIHDSRGKGGAFQVHLDSHDHSAVAALQRLGFKPVNHQPLRFWRQ

SEQ ID NO: 1303 - protein, 177 aa, Pseudomonas syringae pv. actinidiae ICMP 19096
MLKRFLSGKGLLPKSGELNNLPTYSIEEQGLCFPLSLADSTEFWPLASYLDQLEEEEFVSQLSDRWLLPWDELYRLLNDEGHVSSVPLLGLPKQSNLTPQLTSQGSLASSDFMVSIGAWSDHESAATVQTKRTGAVLRHGDKIELLPEATYQLVSAVRQLHLSQQESPGELTNQIGW

SEQ ID NO: 1304 - protein, 659 aa, Pseudomonas syringae pv. actinidiae ICMP 19094; identical to SEQ ID NO: 1296

SEQ ID NO: 1305 - protein, 247 aa, Pseudomonas syringae pv. actinidiae ICMP 19094; identical to SEQ ID NO: 1297

SEQ ID NO: 1306 - protein, 378 aa, Pseudomonas syringae pv. actinidiae ICMP 19094; identical to SEQ ID NO: 1298

SEQ ID NO: 1307 - protein, 183 aa, Pseudomonas syringae pv. actinidiae ICMP 19094
MLKRFLSGKGLLPKSGELNNLPTYSIEEQGLCFPLSLADSTEFWPLASYLDQLEEEEFVSQLSDRWLLPWDELYRLLNDEGHVSSVPLLGLPKQSNLTPQLTSQGSLASSDFMVSIGAWSDHESAATVQTKRTGAVLRHGDKIELLPEATYQLVSAVRQLHLSQQESPGELTNQIGWASVRKL

SEQ ID NO: 1308 - protein, 659 aa, Pseudomonas syringae pv. actinidiae ICMP 19095; identical to SEQ ID NO: 1296

SEQ ID NO: 1309 - protein, 247 aa, Pseudomonas syringae pv. actinidiae ICMP 19095; identical to SEQ ID NO: 1297

SEQ ID NO: 1310 - protein, 545 aa, Pseudomonas syringae pv. actinidiae ICMP 19095
MTSALAKLSSAIALGLNSRRFAISSEPLARFPRLEAASADLYNRFERAEKALPPPQEKRRAAINKFRNVLPLTSSEWRMVFAGLADKSESVGPILEDEQLYGRIHIEVSQRIEKQRLSRRDWLALCFSYFGYESDTPDTNPVWCLLQGDIRKGFACVKAQQTREKEWMRIVQHHKELFSEQAGETLGEQMFNGEISDLSVLQAIAQIPNSSWLWHRIFSVLLSRIFVLDDEEFSKRFPDFIEIGRQHPTYMNALLSACLTRYHAATYREKPSSLLKQTALDNWGSPQIRSKQNSWLQYVERDVCAMVVAWFAKEDLEHFFNLLKGDADVDHSRLYYWLRFANQMSYTRIVMGLDAWGDRSKDFVHFREKNKGRFSRLGGAPSHNNAVVMQIGNYFFVEFSGTGNACYVYEAIKSPFNPDKSQLELGELKQPPQALARMRHSPAPSSPTRIEGWLSKFDDELQRLGISIHTQSGFVPSPSSKQQLMSLDEQVRDAVKTVRYKIHDSRGKGGAFQVHLDSHDHSAVAALQRLGFKPVNHQPLRFWRQ

SEQ ID NO: 1311 - protein, 184 aa, Pseudomonas syringae pv. actinidiae ICMP 19095
MLKRFLSGKGLLPKSGELNNLPTYSIEEQGLCFPLSLADSTEFWPLASYLDQLEEEEFVSQLSDRWLLPWDELYRLLNDEGHVSSVPLLGLPKQSNLTPQLTSQGSLASSDFMVSIGAWSDHESAATVQTKRTGAVLRHGDKIELLPEATYQLVSAVRQLHLSQQESPGELTNQIGWASVRKLA

SEQ ID NO: 1312 - protein, 659 aa, Pseudomonas syringae pv. actinidiae ICMP 18883; identical to SEQ ID NO: 1296

SEQ ID NO: 1313 - protein, 247 aa, Pseudomonas syringae pv. actinidiae ICMP 18883; identical to SEQ ID NO: 1297

SEQ ID NO: 1314 - protein, 378 aa, Pseudomonas syringae pv. actinidiae ICMP 18883; identical to SEQ ID NO: 1298

SEQ ID NO: 1315 - protein, 928 aa, Pseudomonas syringae pv. actinidiae ICMP 18883
MSSPTWGGLDPQRVSHWINFERNDTAWHYAPDNRESMAAKQTEGVAYLWNLLAANGVALLADEVGMGKTFQALGVAALLWKVKPDARVLVMAPGRDICRHWRREFETFVREHYREADHSVKSSVDGGPVPSVQECYRLDNLVNAVERGLGHLYLTTIHSLSGLVEKKDKSDGAGAAKVAAGIIHQRLKSALGESGFDLIIVDEAHYLRNLNGGSQRVSAARALFGAEGSRLGAKNLLLTATPSHSRLIDVQSILSYFTEIDPEGELAVLSGSARTKALLEKFALRRLRLMEGAGGLYSKRHYRHEKAIPAGFEGRPNAEMFFALYQKRLVADLRKQKENKSLMYGYLEGFESMGHLPALAQSSDGDEVTEIVDKAAEDFSTASDTELLRELTGDYRKQFGTFPDHPKYGALIDQCVPEGLYGQDKMLHDHKHLIFVRRIPSVRELTQRVNERYDELLAGIIVQAWGIPLNDPRVDVWRKTGWSRASYDQLISGLDHAFVMDEAAEVVGDDEDSEEDSGQLASRIAELFVVKRELGGQTDCVNSRLRFSKSESVFSLFLEPASDYQEAGYGGYYTQIDAKRADYANAAKFARFQHWGNQAQLKLAIGDRVQPDGKFDQPMFSVWSLLVPRLPDLLRQKLRRWAESDKAVAENFGNYLKAGFLHASPVIVELYGWFVEFRRGRRDRNVHSSYRGFYQWVSGRIEGSLMLRYFIAALETFDQLCGKIIDHGLNRWDQEWRSLKGLTSPGLYASGENSNSRQRLILGFNSPFYPNVLVSTSVLQEGVNLHMQCHQIHHYGLAGSPGDNEQRVGRLDRLFGCVNQRLKHAGNTDLSIHYPFLQGSVDEDQVASFIARKHQVEKQMDACVQANFDKQMRLDNTQEWKEFLQTPVGRGQTLINDPYGASFAQGDLSKNYEPYFESILGVLPLTEN

SEQ ID NO: 1316 - protein, 659 aa, Pseudomonas syringae pv. actinidiae ICMP 19099; identical to SEQ ID NO: 1296

SEQ ID NO: 1317 - protein, 247 aa, Pseudomonas syringae pv. actinidiae ICMP 19099; identical to SEQ ID NO: 1297

SEQ ID NO: 1318 - protein, 545 aa, Pseudomonas syringae pv. actinidiae ICMP 19099; identical to SEQ ID NO: 1310

SEQ ID NO: 1319 - protein, 1082 aa, Pseudomonas syringae pv. actinidiae ICMP 19099; identical to SEQ ID NO: 1299

SEQ ID NO: 1320 - protein, 659 aa, Pseudomonas syringae pv. actinidiae ICMP 19100; identical to SEQ ID NO: 1296

SEQ ID NO: 1321 - protein, 247 aa, Pseudomonas syringae pv. actinidiae ICMP 19100; identical to SEQ ID NO: 1297

SEQ ID NO: 1322 - protein, 378 aa, Pseudomonas syringae pv. actinidiae ICMP 19100; identical to SEQ ID NO: 1298

SEQ ID NO: 1323 - protein, 1082 aa, Pseudomonas syringae pv. actinidiae ICMP 19100; identical to SEQ ID NO: 1299

SEQ ID NO: 1324 - protein, 659 aa, Pseudomonas syringae pv. actinidiae ICMP 18804; identical to SEQ ID NO: 1296

SEQ ID NO: 1325 - protein, 247 aa, Pseudomonas syringae pv. actinidiae ICMP 18804; identical to SEQ ID NO: 1297

SEQ ID NO: 1326 - protein, 545 aa, Pseudomonas syringae pv. actinidiae ICMP 18804; identical to SEQ ID NO: 1310

SEQ ID NO: 1327 - protein, 1082 aa, Pseudomonas syringae pv. actinidiae ICMP 18804; identical to SEQ ID NO: 1299

SEQ ID NO: 1328 - protein, 730 aa, Pseudomonas syringae
MDFSTLLHLWGAASSEQLIAPITVVGFVFILCAWYFVRYFCPSFKLSSQLKKLTKRVHGVKALAPSQRRSELEQLFNGSKLEHSWHEYAETLHDQFEFQEGEQVLVRSRATAGAAHFFSPQSVVDTPLGTEFYKHLPGILTGIGIVGTFFGLMLGLQHFDPSTPEQVNASVDKLLKDVLFAFIGSFISIMASIAVTITEKWRLGQCYRLLEAFNETIDGLFDSGVGEEYLAELVRSSAESSVQTRQLKDSLVTDLREMLQNLVDTQVRESLKLADTLSTTYRDSGQLLADQVSSAIENSLKSPLEAIAGAVQAASGDQSGQVQNLLQDVLVAFMNKLEGTFGQQFNGLHELMGQSVAAMQSMQQGFSTLIQDMRSASESSTQNSSTMIAQLLSDMQAGQNAMQAGMNEMLANLQASVARIGNEGEGAGARMAEQLEKLFAQSEARQQAMAENLQAFVESIKQNIGQGQQETMAKIAGSVEVLGEQLSAVFKQLEHGQQQMDQTTRAAQADLHQGTRDLVGGLDEQVKALLQTVSEQQKSAQDTVKALSAQTEQHLQSMQLGADKMRAAAERFETAGQSVARASESTAGLMGTVQGAGTELAQASRELNTVVADYRNNREALAKTLAVIEGVVASAQGEASGRSQYLQDLKVQSERMQALNREVYEYLENISGVLGNGFKEFGDGMDRTLRQTLGSLDAELDKAVKSLAGGVEGVKESLEDFGDIMERIRQ

SEQ ID NO: 1329 - protein, 247 aa, Pseudomonas syringae
MFGKQMPSVVRSKDEGEKPFWISFADLMTAMMILFLVVMVAALSSVTQRINQAEQGEKQRSKDISQICEHLSLKAKTASKTIVVNCKDNRISFGDAGRFGHNQYALSNDGQSALQEVVPMILDAANSEVGRKWFKQVVIEGSTDTDGSYLYNLHLSLQRSEWVMCSLLDSRSPLQVGLSPEHQQQIRSIFLAGGVSFNNAKDTKEESRRVELRMQFFGLKEKEDNLKPEVPVFNNTDMEKCQLAMSR

SEQ ID NO: 1330 - protein, 542 aa, Pseudomonas syringae
MTSPIARLSAAINLSLLAHRTGPAPEPLARFPRLGAAGIDLYERFERAEKALPPPQEKRRAAINKFRNVLPLNASEWRLVFAGLSDKSERVGPILDDDQLFYRVHKEIHHRIEKRRLSRRDWLALCFSYFGYEAATPDQNANWCVLREDVQLGFECVRGQQKREKEWVHIVQQHQELFSEQAGARLGNQMFKGEISDLSALQTIAQIPDSSWLWRRIFNVLISRIFMLDDAEFSQRLADLVDIGRQHPRYMNDILSACLSRYHLAAYREKPSSLLKQVALDNWGSPQIRSRQNSWLQYVEKDVCAMVVAWFAKEDLEHFFNLLKGDSEVDQSRLHYWLRFANQMSYTRIVMGADAWNDRGRDFVHFREKNKGRLSKLVGGPGHNNAVVMQIGNYFFVEFSGTGNACYVYKADDSPFNPDKSHLELTAELKQANRALDRMRHSPAPSRPNRIEGWLSKFDDSLGKLGICAQSQAGTPGSSKPMAFEDQVRDALKSVKHKVYDQRARGGAFQVQLDDNDQDAVAALQRLGFKPVNHQPLRFWRQ

SEQ ID NO: 1331 - protein, 1082 aa, Pseudomonas syringae
MLKRLLKGIGRQPNSAAENTEPVFSIEEQGICYPLSLAENAQSWPLASYLDQLEEEEFVSQLSDRWLLTWDELYRLLDELEHLTSLPLLGLPPETALIPQLSSQGSLASDDFKVAVSGWRDPQSNANVQVQRTGAIVQRHGIMEILPESSWKLTGAVRQLYLAQQNEPGEVTNQIGWASIRKLARKAGAGMDGFLDKTVVIKPESLRLNPRKSTVGNIPVIELEPTFEGQPANWLESFDGANQVQDRYRVTGDDGSLTHVLIDPEVKSVLDYVRSLPGRRVAGDDALSFVRNPYSALGESAAQVLDAETYEDDLAEAGIFFHRFHLEPKLDEAGQRIEQVNLTLEPISPTPQAPIEVEFKAAYELAPFVHELQLKLAAGMPAGFWQGYELELSDFDLRQLAGINDLLKRWQNEAAGIEFDSVLDLSLYGDRVTGIGEAERITSPFLVKEATENWLPKDVAALGIDAKIFGRWDPSDRAQFEAFEQRLDEARAAGDETVCLPESETPLSIAAAEQLFNAWSKKIAPVETGLVQQQEKVGRAVLQIGHNIDEPTYVEIRQAALRAALDAIPELPSLLKPEVVLREHQLQGVAWLQHLFRLSPADVSGCLLADDMGLGKTIQLLTFLVWYLEKYPQDKPTLIVAPVSLLDNWERELHRFFFADALPVLKLYGSALSAVKFKKEEIPADLKAKGIKNLLRPGWVGGARIVLTTYETLRDQEFSLARQQWSIVVCDEAQKLKNPAALVTQAIKAIPARFRVACTGTPVENTLIDLWCLFDFIQPGFLGGLNQFGREYQRPIEAALERDTVALERLRGLIDPQTLRRTKQDIAKDLPAKIEDTACRSLSMHALQRNLYLSEISAYSQKQQIEEQLDQKTSGMLGLLHKLKLICAHPYSVQPDKRLRDNSPKLQWLMQTLESIKRAGNGDKIIVFTELRDIQRELQHSIQEHFGFRATVINGDTSTSSQSANSRQRLIDQFQELPGFSVIILSTIAVGFGVNVQAANHVIHFTRCWNPAKEDQATDRAYRIGQEKDVYVYYPTVRDAQMPTFEATLDELLSKRRALARDMLSGASDIQASDFEALLKTR

SEQ ID NO: 1332 - protein, 730 aa, Pseudomonas syringae pv. actinidiae ICMP 19497
MDFSTLLKLWADASTAQLMAPRVVMVAVAVLCLWFVGKYLIPSFALSRRLKSLTRSVNTIKEKSADQLQREMEKVFNATKLKHLWKEYSETLHNQFEYHEGEERLVRSRATTVAANFFTSQSVVDTPLATEFFKHLPGILTGVGIVGTFFGLMLGLQHFDPSTPELVNASVDKLLKDVLFAFIGSVLSIMASIIVTVSEKWRLGRCYKHLESLNEAIDSLFGSGVGEEYLAALVRSSAENSIQTRQLKDSLVTDLREMLQNLVDTQVRESLKLADTLSTTYRDSGQLLADQVSNAIENSLKSPLEAIAGAVQAASGDQSGQVQNLLQDVLVAFMNKLEGTFGQQFNGLNEMMGQSVAAMQSMQQGFSSLIQDMRSASDNSNQSSSAMIAQLLADMQTGQSAMQAGMNEMLANLQSSIARIGTEGEDAGARMAQQLEKMFADSEARQMAMAENLQSFVESIQKNMGQGQQETMAKIAGSVEVLGEQLSTVFKKLESGREQMDQSTRVAQAELHHGTRELVGGLDEQVKTLLQSVAEQNKASQDNVKALSAQTEQHLQSMQLGADKMRAAAERFENAGLSVSKASESTASLLGTVQGAGTELAQASRELNSVVADYRNNRESLSKTLTVIEGVVASAQVEASGRAQYLQDLKQQSERMQSLNREVHEYLENISGVLGDGFKEFGDGMDRALRQTLGSLDTELDKAVKSLAGGVDGVKESIEDFGDIMERIKQ

SEQ ID NO: 1333 - protein, 247 aa, Pseudomonas syringae pv. actinidiae ICMP 19497; identical to SEQ ID NO: 1297

SEQ ID NO: 1334 - protein, 545 aa, Pseudomonas syringae pv. actinidiae ICMP 19497; identical to SEQ ID NO: 1310

SEQ ID NO: 1335 - protein, 1082 aa, Pseudomonas syringae pv. actinidiae ICMP 19497; identical to SEQ ID NO: 1299

SEQ ID NO: 1336 - protein, 629 aa, Xanthomonas campestris pv. campestris str. ATCC 33913
MNVLWIAATGDWLHALIASIIAVLFLCFLFFVLFRASALLVSLKRLGNAVRLLTGKSPPLVKRELSKLFANSRLQPNWAEYEDTLHEQTANQGIDREIVAVRATVPAESFFNAELVVDSTLHTEFFKHLPGIFTGLGIIATFSGLIAGLQSFDVKAVEPDALKASLGGLFGHVGSAFLLSAVAIGLAMICTIVEKILYAANVHAITSIALALDGLFKSGVGEEYLSKLVRSSEDGAVQTKQLKESLVEDLKALLTNLTERQIEATHQLSNEIGASLETSLQVPLQKIADTVQLASQDQSASAGKMIENLMDTFMAQMRDTMGSQMGDLSGMMQQSAASIMRVEESLRRLVDDMQSATHASSEGIQRAMAELLSSLASHERQQSETLGGAQVQMLTHVQSAVERMASAQAAGANQVGEAAADATRRIVEASAEVQKAGEESSRRAAELTESIHDVTLESIRKLESGAAQVASMMAALNEVVDRLARTSGSLAGLHEQSGQLGSRLDQSSTSLRTSTDTLAIASQALSQASVRVEGVSSLMTTEASAREATLKDIQLALSKGQEAAREFGEYSDMLTVKLGDAMEQFGSKTGAVLNHLMTDFDKELGNAVLMLRDIVERMSLIAASDERRG

SEQ ID NO: 1337 - protein, 238 aa, Xanthomonas campestris pv. campestris str. ATCC 33913
MFGSMARGRRRNKDDGEKPFWISYADLMTAMMVLFLSAMAVTIAAVTRVVEGPAEIRAREIQSVCEQLGRDLSGVSEIQINCADQRISFPTVGTFGFNSYRLPAEADGALAQLVPAVLNAADGELGKKWLKQVVVEGYTDTKGGYLYNLHLSLQRSEWVLCLLMDPSKNKSLALSDEQLSRVRKLFLAGGVSFNNQRTTADESRRVELRIQFYGVDEPHSAHLDTGSDFMAGADRCQL

SEQ ID NO: 1338 - protein, 491 aa, Xanthomonas campestris pv. campestris str. ATCC 33913
MFKKSLGRLLNEGANALSARDDMILASQFVASSELLCGQSIAARQDLSVPLIQRWRKGIGDSLLGPLLWRTVFVGYFLLGESAEREVYRDFLQKTLPKLKAQKVPPGWLPTVEEHKEVFGLKPLARYVTEWAAGDERGLDALSDHVEIPGSSWFWAEFVGNALAKLEGMNDIEFERSSLRYLSLLYRFPSQQDAVLAALVERAAGSPDNLLNQKILECVVDAWGNPQLELSDRSHRWSQVSDDARQWICRCLAEEDLTDFFELIKSSSKALSAMDKRRFEYWKRFTGRMQFTKLVLGPSFRSTTNADIGRFIKKRRGRLGWLASSTSMNIAMLMKLGEHWFVEFAETGNACYGYQQITLPFKVGDKTLSLHQLKDQRIATYRLPHSGPWESEFDRTLARVGIWPNGVQQGGRSPAKRATNAPSAIADVDQLLPSLPAHLARELSLARKAIVDNRNKGGSYWIELGSKPSSELIEAMNVAGFRFAASRGFYR

SEQ ID NO: 1339 - protein, 1065 aa, Xanthomonas campestris pv. campestris str. ATCC 33913
MKLRFWKGESPETIPMDAPEFSAESSGWKGTAQEKSTHPGAIYLLQLADERFALKDGAGYLIPWEKLYSLLSDSDHVSSLHLLKLPQTSRLRPAIRSHGTPTDTNFRVTLEAWIAESGEELLAERLGAVLTMPGQDLLLPQSAFTLLEAMAELAQCGEDWDADRRMLQMGKVQEAARWAGATMDRYLEHSPVVVANKLEINLKQHEAAEAQIVEVEPRPIGAPEGWLSQFDRYQSVRGRYDVTDAEGGMSHVVLSSQVREVGQQIKSMPGRRLAGKQADAFMHNPYAVLGEAAAQVISPERFAEAKRTAGIDEWELELQPADVDGSWDAVLVDSVGKSESVFVGSFHASEFDSLLEEASGSEGLGVARWKKHRVLLSGLTLESLARLRQAHFKEAVGSVIGVETLFDLAHYSDRVVGFDGKPIIVPKVQGSSPAEDWIKGAGEFVAVDPATGTATEGRLSTNDVQEFGERVDLAEREGHINVAVPGIEKEIPTPEARAWMKELTKPAGEKRIESLKNPAPAEKLSLRILHNIEELEYPSEETEQARVKDVYEAPAALRPEVALKDHQVEGVAWMQGRMRQRGDGVRGVLLADDMGLGKTLQALTLMAWYRQTAPAPKPCLIVAPVSLLENWKAEIAKFLDGRQGATLTLYGEHLALHRLSAREIGPELRELGVKKALNPGFAHGAAFVLTTYETLRDYQLSMAREKWGVLVCDEAQKIKTPSAMVTRSAKAMQADFKIACTGTPVENSLADLWCLFDFFQPGLLDSLTKFTKVFRQQIELRSEGHEQKVEVLREQISPWVLRRMKAEVADLKPKTELPCELAMSAKQRGLYAAAARRFRETVDSGEGGDTAALSLLHQLRQICANPLAAADDRSEFLSLDEHLRHSPKLAWLIEKLQEIQATGEKVIVFTEFRDIQRLIQRAIASRLSYQASIVNGSTSVEAGADDSRQIIIDAFQAKPDFGVIVLSTTAVGFGVNIQAANHVIHFTRPWNPAKEDQATDRAYRIGQEKEVFVYYPTVLGDGFESFEERVAKRLATKRKLSNDMLAPEQGLTLEEFSDLSLGFSE

SEQ ID NO: 1340 - protein, 629 aa, Xanthomonas campestris pv. campestris str. 8004
MNVLWIAATGDWLHALIASIIAVLFLCFLFFVLFRASALLVSLKRLGNAVRLLTGKSPPLVKRELSKLFANSRLQPNWAEYEDTLHEQTANQGIDREIVAVRATVPAESFFNAELVVDSTLHTEFFKHLPGIFTGLGIIATFSGLIAGLQSFDVKAVEPDALKASLGGLFGHVGSAFLLSAVAIGLAMICTIVEKILYAANVHAITSIALALDGLFKSGVGEEYLSKLVRSSEDGAVQTKQLKESLVEDLKALLTNLTERQIEATHQLSNEIGASLETSLQVPLQKIADTVQLASQDQSASAGKMIENLMDTFMAQMRDTMGSQMGDLSGMMQQSAASIMRVEESLRRLVDDMQSATHASSEGIQRAMAELLSSLASHERQQSETLGGAQVQMLTHVQSAVERMASAQAAGANQVGEAAADATRRIVEASAEVQKAGEESSRRAAELTESIHDVTLESIRKLESGAAQVASMMAALNEVVDRLARTSGSLAGLHEQSGQLGSRLDQSSTSLRTSTDTLAIASQALSQASVRVEGVSSLMTTEASAREATLKDIQLALSKGQEAAREFGEYSDMLTVKLGDAMEQFGSKTGAVLNHLMTDFDKELGNAVLMLRDIVERMSLIAASDERRR

SEQ ID NO: 1341 - protein, 238 aa, Xanthomonas campestris pv. campestris str. 8004; identical to SEQ ID NO: 1337

SEQ ID NO: 1342 - protein, 491 aa, Xanthomonas campestris pv. campestris str. 8004; identical to SEQ ID NO: 1338

SEQ ID NO: 1343 - protein, 1065 aa, Xanthomonas campestris pv. campestris str. 8004; identical to SEQ ID NO: 1339

SEQ ID NO: 1344 - protein, 629 aa, Xanthomonas campestris pv. campestris
  MOD_RES (188)..(188): Any amino acid
  MOD_RES (191)..(200): Any amino acid
  MOD_RES (202)..(203): Any amino acid
  MOD_RES (206)..(211): Any amino acid
MNVLWIAATGDWLHALIASIIAVLFLCFLFFVLFRASALLVSLKRLGNAVRLLTGKSPPLVKRELSKLFANSRLQPNWAEYEDTLHEQTANQGIDREIVAVRATVPAESFFNAELVVDSTLHTEFFKHLPGIFTGLGIIATFSGLIAGLQSFDVKAVEPDALKASLGGLFGHVGSAFLLSAVAIGLAXICXXXXXXXXXXNXXAIXXXXXXLDGLFKSGVGEEYLSKLVRSSEDGAVQTKQLKESLVEDLKALLTNLTERQIEATHQLSNEIGASLETSLQVPLQKIADTVQLASQDQSASAGKMIENLMDTFMAQMRDTMGSQMGDLSGMMQQSAASIMRVEESLRRLVDDMQSATHASSEGIQRAMAELLSSLASHERQQSETLGGAQVQMLTHVQSAVERMASAQAAGANQVGEAAADATRRIVEASAEVQKAGEESSRRAAELTESIHDVTLESIRKLESGAAQVASMMAALNEVVDRLARTSGSLAGLHEQSGQLGSRLDQSSTSLRTSTDTLAIASQALSQASVRVEGVSSLMTTEASAREATLKDIQLALSKGQEAAREFGEYSDMLTVKLGDAMEQFGSKTGAVLNHLMTDFDKELGNAVLMLRDIVERMSLIAASDERRG

SEQ ID NO: 1345 - protein, 238 aa, Xanthomonas campestris pv. campestris; identical to SEQ ID NO: 1337

SEQ ID NO: 1346 - protein, 491 aa, Xanthomonas campestris pv. campestris
MFKKSLGRLLNEGANALSARDDMILASQFVASSELLCGQSIAARQDLSVPLIQRWRKGIGDSLLGPLLWRTVFVGYFLLGESAEREVYRDFLQKTLPKLKAQKVPPGWLPTVEEHKEVFGLKPLARYVTEWAAGDERGLDALSDHVEIPGSSWFWAEFVGNALAKLEGMNDIEFERSSLRYLSLLSRFPSQQDAVLAALVERAAGSPDNLLNQKILECVVDAWGNPQLELSDRSHRWSQVSDDARQWICRCLAEEDLTDFFELIKSSSKALSAMDKRRFEYWKRFTGRMQFTKLVLGPSFRSTTNADIGRFIKKRRGRLGWLASSTSMNIAMLMKLGEHWFVEFAETGNACYGYQQITLPFKVGDKTLSLHQLKDQRIATYRLPHSGPWESEFDRTLARVGIWPNGVQQGGRSPAKRATNAPSAIADVDQLLPSLPAHLARELSLARKAIVDNRNKGGSYWIELGSKPSSELIEAMNVAGFRFAASRGFYR

SEQ ID NO: 1347 - protein, 641 aa, Xanthomonas campestris pv. campestris
MPKVQGSSPAEDWIKGAGEFVAVDPATGTATEGRLSTNDVQEFGERVDLAEREGHINVAVPGIEKEIPTPEARAWMKELTKPAGEKRIESLKNPAPAEKLSLRILHNIEELEYPSEETEQARVKDVYEAPAALRPEVALKDHQVEGVAWMQGRMRQRGDGVRGVLLADDMGLGKTLQALTLMAWYRQTAPAPKPCLIVAPVSLLENWKAEIAKFLDGRQGATLTLYGEHLALHRLSAREIGPELRELGVKKALNPGFAHGAAFVLTTYETLRDYQLSMAREKWGVLVCDEAQKIKTPSAMVTRSAKAMQADFKIACTGTPVENSLADLWCLFDFFQPGLLDSLTKFTKVFRQQIELRSEGHEQKVEVLREQISPWVLRRMKAEVADLKPKTELPCELAMSAKQRGLYAAAARRFRETVDSGEGGDTAALSLLHQLRQICANPLAAADDRSEFLSLDEHLRHSPKLAWLIEKLQEIQATGEKVIVFTEFRDIQRLIQRAIASRLSYQASIVNGSTSVEAGADDSRQIIIDAFQAKPDFGVIVLSTTAVGFGVNIQAANHVIHFTRPWNPAKEDQATDRAYRIGQEKEVFVYYPTVLGDGFESFEERVAKRLATKRKLSNDMLAPEQGLTLEEFSDLSLGFSE

SEQ ID NO: 1348 - protein, 481 aa, Sinorhizobium fredii NGR234
MDIVFTAGIFARDLVLALASLLKQPPAPGLFSLFLVILLVIATLWFWAVVRRRVGLLRRATKLVRKSRGPEEFRERFQETYDELTSWSGADAGRLADTWDEFRETTIESQGQTGIRNAIRPSVFFNLEEMGFSVSGWRVVPSLFVSVGLAATFLGLIAALQETGNSLSAGGDQAAVMKALTQLLTVASAKFIMSLTGLLCSIVFTVVMRVRSSGLEQEMRTLTHAIETRMSFVSLEDLAEKQLKAIVEQRDHMQKLNHELIAAISEPLQKAAASGINHVDEMVQSLAGSLTQGLVGAMSATSERLEAASGRLEGLAATLSGAAQEFSQAAERTAVGLDGAARRLELVSDNLARAGNGLAQAAVPVAESANKTAEATQQIASSSINMVESARQTMSSEREMVVAAANSIREHIKSFETRAAAYDGQLAAAFRTFTEQISRSIGEVENHANNVHGQYTEALSTLQGVIENAKAFTPESARPSA

SEQ ID NO: 1349 - protein, 309 aa, Sinorhizobium fredii NGR234
MRGRGGARRQEEEEESVFISMADMTISFLFILMILLAFFASQFNVSDTVPRPLYDSLKDEKDRIQRDIDAIAEIVEANGRPVVTATREMKDELERLRKLLNTPEKANKMEVYNSAVADARKNLLTSLKSEINSRIPGVNVAVSANYDALQFAGDGLFDSGKEVPTTVGAVRMRQIAEVLDQNLGCYSLGSRRAFTENCNPAFALIDSLQVEGHTDSVGSEVLNMDLSAKRAASIYALMIEQKPDLVLYQNRDEQPVLSVAGFGKGRPIQQNETESGRDANRRIDLRFIMVVPSKETDIADIRRALSGEP

SEQ ID NO: 1350 - protein, 437 aa, Sinorhizobium fredii NGR234
MSLLETLRAMPHRKKFEGKSIEGLSQAVQAVFQAFPEFSRVSPATLEQMKAKIAAAVRDWEWGSVTVGEVGMLASAAFGRAEELDTQTLSFVRREVQATTNPVLLDAAAEGYFAGWSRGGQLTRWLASIMQERSSHLSKRWQSVFVSIPQALDANHAPEHLAERMVMEPDPYRWLAGAGVASPHSGNLMQELHQAWLRTLPEIKTDAQVAHVFRWILPEGRARASDKMAASAIEKLLSPWLHKMPEQEYRKALLDRITDAYGDPRNKRPEFWSLVSAPCRGVLVRWLAGASMDALLSVITKSTANHMWPPRHDFWKGLFNRGLVDEAWVALSPAAAAIAQDMFAKSVNAASMAAGRQTSKARKDTCLLVMRIGRYIVVEGSHDYRVHMFSDADSRAPKLYQASYDAEALILGAGHPDTRIHDQPGHWKRWVEERVVR

SEQ ID NO: 1351 - protein, 1072 aa, Sinorhizobium fredii NGR234
MIKFDFRADSQAAYVTVAPEKRGWLAAFRRREAVDLRALTKAERATALAVARLRHLDPLGELHQIAENGLVIRHPLVAQLDSNTASALGLPRLMTGYVFKAKLAGTVGSSDFGIDWWWEKNGRTVALPLQGAFLGSAAQMMRLPSQIYSAIEQANALKERSSVTDHWLELGKFRRLFDASDEPASRENLEGFLRNLSVVTCDSVGIAFDAEDETKFFPLPFVGSPEPDPDRDTADVAALKGRELNEFRDGAIRRGAQPAYRVADGKFLIVDRSAAPVLDAIARNAKADEAGRRAFIADAGRIIQSAIERQMEDDGRITALMSPAARAERVEQETSRVWIETTEWVSRVLGVAKWQVTEIEGMQSSGTKWLNSSIDAELADRLSQIEDEQLAEVVEALRTAIAEHTPLITHEVGDIPAIAEVLEALSRRLAEYLRQKPIDAPSVSLDAYLPVTHDNFWEVDFKAAVRPRGNEAEFKFPEAVRTALQPHQLTSLKWQVAAWQAGIPGVLNADEQGLGKTLQTLSFVAWLRAEMDAGAVPHRPFLVVAPTSLLLNWEAEIDRHLSAQALGIPVRLYGSHLAEFKKEGLSGQDIREGEALLDLDKIRSLENGAPVVITTYQTLANFAISLMDLQCAVAIFDEIQFVKNPVTMRAKAAKSLNADFRIGLTGTPIENATKDLWALMDQLFPGALGALAQFKRVFGLPTEENMSALHHALFSGQHERPPLALRRLKTDAAPGLPTKVRILHPREMSEPQMLRYDEARRKGGMMLALLHHIRRISLHPGLLEGETTEEFSASAARVDAAMDILRHIKSKGERALVFVENRDVQAWFAEVVRLEFNLDTVMIINGDTTIDARKEITDRFQRHLTNDGGFDVLVLGPRAAGTGLTLTAANHVIHLSRWWNPAVEEQCNDRTHRIGQTKPVTVHIPLAVHTRLGAGSFDCLLQRLMKRKRTIADRVLWPAEATESETRMLYDAVVEASDVEVGSEALELDGVLEGRTDLTAEMLDGNAIRIRPRRGGASIVVSSGRTVPSSSIRSDTDAAVVSMQVHGVGKEMPVPHSRLTTGTLWPEFVLPE

SEQ ID NO: 1352 - protein, 675 aa, Mesorhizobium loti
MFSSVLELGTLVKDLVLSAASFLTGDAAPGIVVIVLLIALAVILASALLTFQKRIGSIKRLRRELGSGDSPLLQGREKISAWFNSQKGGKEQEALREAWSEFDETLFIDNSSGQPVLRNSVRPSAFFNIDDLHFGQGFYRIWPGLFVSIGLALTFLGLIAALNALSGERIDETAMANLLRIASAKFIMSLTGLVCSIVLTIALRIFVGSLDEQLHGLCRTVEGRINFASLEQIAVDQLRATIESREHQRQLTLQMIAEIGGPLKTELPQAISSSITTALQPIMDKVSQQGTDSIATMATDLSQQVTQGVAGALGQASEHLARAGDKISQLADRMDQSSGRMGSEMETAIARVAQAVDELRGAMSASAQSASGVFSQGAEQLLGVMNRTLESIRDNTSEGARAISAAAADMRDAATSIRSEIEVAARNGADAAKARLELAGEDAGKAIGAAGQTMLDAFSKAGAEITGMTQALSSRAGDDLIAPIESIARQLDGMVSSLTGGVDQMRRLADAVRDGASASSEAAGAFRGASQELVAAAAPVRATSERIEGTLRQFADGTRDAVATVRESSRATAEAAAQTLEAARETIAAERQGVESSLVAVTTMLERLRGQGDRLDTIDEKLGHAFDLYSSQTEQAMQAVRTHVQTMAVQLNTALSTLQTILDGLQEFQPQQAHG

SEQ ID NO: 1353 - protein, 323 aa, Mesorhizobium loti
MRATPMRRRRHEEEEESAFVSMTDMTVGFLFIVILLLAFFASQYNPSEMVPRPEYEQVLNERDALAVELKRLQQRIAQLETERDTAIAARERADKEIVKLKTRIAKLEAELERLKKPNPLEAYINSSMEARRRILQQLRDHIALDFPDLQLMLSEESLRFQGEGLFKRGEYTLLPDRLRLVQVLADRLHEILPCYTLGDDARFDTNCNSGFALIEAVQIEGHTDSDGDDMANLVLSTNRATTTFRAMTTHQVKLLNYRNFQQQPVLSVAGYGRMRPIASNDTVEHKASNRRIDLRIIMHVPRDTDEIDKVRDALLIGSRMNPQ

SEQ ID NO: 1354 - protein, 413 aa, Mesorhizobium loti
MIERNIRRVLDRYDAPDKPPERDAERLFSEMLRRIREHDWRKVPMSFVTRVASLVYAATHRFRDDLADIRRFLCAEIRAATRHGFLNPMVRIYIESYETGKAHTMELAEALQHSRSRIGARWQPLLENVPELLDAHNAPSALAAKMDRMPDPWHGLRSLGLHQPHAPGLMDAAHLEFLNVIEPQLTSLGEIERLLGWLKPDDRALRQVGAGKAIEVLLGHWRTRNPPAEIQSLLVDRLTQLYSHPRVNPHPAWNEVDPALVQIFLRWLMGADIRFLFRVLTEVERGHMWADREKFWWTLHEQGRIDEVWIAFNDDGHRAALSKLPTDARQNGRRFGRQVGDRDKSLLVMRIRNKIVIEGTFNFKVHFFKADQPRTPELYRPRYDVADIRNLPNVDAIAHLGDWQSRVLMALSR

SEQ ID NO: 1355 - protein, 723 aa, Mesorhizobium loti
MFVFFNWVTRSVLFWLIAAAAVLLAARELPFINLPLVWSTILGATAGNIESISKPAFAYGLAGGLFFTGIGFAAAFYICHVLPVQIALWRATVQVTRAKGKDRGRDAIRKAFASNFENLRQTLERNSLIGHAWLEFEETLFNTDGDRAIGNTVRPQTFFNLALARERLSGLKMMNAVPGYFVGVGLLLTFIGLVFALYKAGAAANAGDADKMAQEMGALLQIATFKFSTSIAGLGASIVLSVFFRWYFVLVESAFERFNATLERGLLYTAPQSISLEMNRTLQDQLMQLKDITQGEFFNRMGSELAPRLNAAMVEAMAPVTDQIGNAVGSLTANSQDGVQQMLHKFTDSLQHGAGTELRELAATLKQLQMSIVEMQGGLRGSGDEFATKLSDAADNLNRMVERAGQSFETSSGQSRDALATVMDLLRQTMEKATAEIDTALGTAASGASTKLEAAMGLVMDKLDKRIGELGDGLQTMQRTMGEHGDAARRQIEVSVSQSTDMQKAVLAEMEATVQGISGRIRSAVDDAVASVGRRFDELAASMRAIEGALAGQKAALEGASSEARKTAEALGKSAQSVQVATAPLISVGDRFSSATEKMTEGVTATLDALKLAQSEMAGLAADLSATNKSSGDFWNNFAGKFDDVDTALGQAVSVLSRSTSDQQQRLETHVQSVDRGLSEAIGKLSGILTQMSDSAESIADSLEAARAGGALSSSNGARGTQQ

SEQ ID NO: 1356 - protein, 302 aa, Mesorhizobium loti
MIVAEPDHRAVSHAEEDENYFVSMTDMMVGILFIFIIMLMVFALHFRQQTDETVKLTAEQQQQLQKANELAEQIAQLRRQIVAEIAELNKADQARARLLEKIQRKLDEVGLKVTIERETGVLRLTEEAIRFSPDSSVLDDTAKRNVDAVAKVLLDVLANYAACPDTETCPGASGYVVETVFIEGHTDRTGDDSRNWQLSTERAVNTYRRIVDNFPGLRKLRNSDHREILSVSGYAYTRPATEQDDSEGFRINRRIDLRFVMEADRRERLTEVLDLLDKMEKKVDELSPTGTSVISTAPTARP

SEQ ID NO: 1357 - protein, 460 aa, Mesorhizobium loti
MSAHLKEAIAELVIRHGVPARPSTPAQIEITAGKLRETDRDAPRTKDYDAISEQLALTLSKGDRITGRQARDGAWCLWQTRFAIAADPATLKPFLGQLRELKHKGASRALALSYLISFHEDRPGLSAVAATLRDLAAVAGKPFDTLEEKFRIFDINDGPRLIGEAALAQRKSPRIVLAEQGLQMELVLGGGFVEPCARRVLERVAEDKRLPSLERIDFVKLISVNGETKRLNFPGHKDLVANALLLPYANQRPDEVIRDRTLDLLISLEGVGDPRTRSGNWASMPRSRDIAVSWLTEQALRQFLDVVEEVNPNEYWHYRRTFWEAMHDGDAISAAWVVMDREGAREARRRFGKNTGFAQFTSGAVQAGHAVLLLRIGEGVCAEWSFNGKCRFWQDAQRQGAPRLYDDGYDAEFLRTGTRYPPMLEITHYPHTGPNAWQHLAARQIQGMTGMRFSPKEYMP

SEQ ID NO: 1358 - protein, 970 aa, Mesorhizobium loti
MLGTQVVETSFWPKLTGKEGAAARYLLALADSGEADISATEVLVAHPAIAALPASVAEAFRLPPLGTLSVTLAFQGIMTDPRARIRVSWYDADTRRIRIERTGALARWGALEGRLSGTLYALTEAIDRYNATENSGSDIRIAAWAPVQNALKMATGQEVVTEDRFLTSLTIYQAGAVALDVFATPYGPDFLPVVMGREKSATLNDDAPAPEGTELAPAASDLVSDALLPEPLQRRFARELFAAETTSRDAYVLDRNTYLVVDPALKSALDVIRTKRSAPREERISFLKNPRIEIAQALGDETGEMAQTLLVETWQYSERILGLGVWEPPAMPWLKNKAGQWLPERFPVRIGDQIVEMDQRIFDDLRTAMAAADQQGDSKIQLGDRTLKVPEVQDAFERLGLDRQGNAPTQAVEEENRLEQPQRDPQPGEQERLIIQQNFEGKEFAVSYNARQTVAGDEFPPTDVVTTRPKPHQRDGFDWLVGSYRTGWPGVLLADDMGLGKTFQALAFLVWVRQIRSKLGIDAGAQKKPMLIVAPTALLRNWVEESDRHLAPQALGERIDAFGSALRHLKMERLEHWTAETALDVARLRSADWILTTYETLADYHRAFARVPFSVAVFDEAQKIKSPGSINTQSAKAMNVEFVLALTGTPIENRLADLWCIMDRVVPGYLGDLKGFVQCYENGDGDDLRRLKASLDQPPRPDTPPVLLRRMKAEILEGLPKREVSKRQMPMPPQQAEAYAAAVFRAQTGGTSQGEMLRAIHAFRGISLHPAGGSGCDPLDMTSVRDWISKSARMIHAVKVLEHLNTIGEKALVFVEDLEVQKVFAAAIATHLQMPRQPAIINGAIPGEKRLEIVERFQSSSLRFDVLVLSPKAAGIGLTITAANHVIHLSRWWNPAVEDQCNDRCYRIGQQRPVTVHVPIAVHPEFGETSFDQTLDALLERKRQLSRDMLVPPVEDGDVEALFGRTLGRV

SEQ ID NO: 1359 - protein, 677 aa, Neorhizobium galegae bv. orientalis
MQIIISIGDIFRTFILHVAGLLTHESAPGFIAFLLLLSLLIASFAFWRRVNKQRRAILWLKREISASADELEFSRNIDALGAKIAENAKSPQQRQLAHAWTEYRETFVPHEEDGNIILRNAVRPSTFLNVEELGFGAGAWRIAPGLFVTIGLFLTFLGLISALNTMSQGEEINSATMRTLLSIASAKFIMSLTGLFCSIIFTVVFRRVYGGLLRAAHDLCEAIEKKLTYISLEALASEQLQAIREQREHFRLIGMELVSELGRPLREELPKAISASISDAMAPMMDRVGKLGAEGVGDLVSGLSNKLTDTVGLALSDASQRLSEAGMKIGQLADRMDQSSGRMGSEMETATMRVAQAVEELRNSMAATTQSAGGAFTQGAERLLDVMNQTLEGIRSNTGEGARAMSAAAGEMRAAAESFRSEIEAAAKSGTEAANAQIQAATSDASGSISTAGQNVVDAFGRTSAEITRISEQAAMKAGQELMAPLESIAGQLKEMIAGLNQGNADLRRMADGVRAGADASSEAAGTFRSASGDLISAATPIRSIAERIDTSIRQLTDSTQHVASVVSRTAETTAESAAAALDAAEKILGQERLAIETTMSGLKTLVDQMRGQGDRLDEMDSKLGNAFEIYTDQVARAIDGMFGHVRAMQEQLAPALDTMHSIVEQAEQFAPQSRRV

SEQ ID NO: 1360 - protein, 326 aa, Neorhizobium galegae bv. orientalis
MRGGFRVQHQEEEEESAFVSMTDMTVSFLFIVMLLLAFFASQYSENDTVSRTIHEEVLAERDTALEEIKKLRALVSEKEKRIEEQSVEIEKQRDEIAQLQQKIAELEEVIAKSKKPDPLEAYLTRSAAERRRILETLRNQLKVDFPDLQVVISEESDALRFQGEGLFDRGISTLKADRRAVVEKIAARLEQILPCYTLGPKKSWNAECNPSLSIIEALQIEGHTDSDGTPDSNLNLSTARANSTFTTMTASKPGLVDFQNFRNQPVLSVAGYGQMRPIRKNDTLEGKATNRRVDLRIIMYSPSRSDEIERIRSSLEKSDGVANGNP

SEQ ID NO: 1361 - protein, 389 aa, Neorhizobium galegae bv. orientalis
MLVAEVNRRFQSDDWNDTPMSLVTSAARALFDAERRERPDLADLRRFYYDECRVSTRMGFLGAMASIYIGSYVPAARHTLELSEALREARGRLGGRWKNLLEHIPEILDPFTAHEAVARKMLPMDDPWSGLKSLGLRSPHANGLMDHAHLAYIRSIAPELKSREGMARLFGWLKPDNQEAKLTVSADAISACLGHWTQAVPPEDDQRYLLENLIGLYGDPRVQRSGAWTGVSEQLMSVILRWLTRENIRFFLDIVSAVEESHMWEPRRKFWLGLHQQGRIDAAWVAFSDRAAREARSKSKQSGSRGTLRFGRQIAGGGRSNTSLLILKVGRKIVVEGSHSYKVHVFDATNLRAPALYGDNYDCDDIRDIPGARAKSHQGYWEGWVLENI

SEQ ID NO: 1362 - protein, 1033 aa, Neorhizobium galegae bv. orientalis
MEFDVSFDQSAVTVALREKRHGFLSRLTSRKSTTDLDSLPIEERDLLFAVADVRAIGDEIGAPARITSNAIVLDHRLVAALDARTANILGLPAVVDLVLKTDVEGIVGASNFRLRHEWLRNGQRQFPKRTGSILETANGLRRVPLWMMDAIETSEAHRPGNGDSTDWEALARFRQMLDPGADGENKGPAARLSMTDFLSGLQVRMADSFSISPRTSSDFDVVPFSSQRLERDLSGFDEVSEDMGEIQNTDLGIFQNRVRERGALPAYRLSPGSYLVVDRSAAPALQVMAEMQHAPAAERQDFIRNPGLKISNAVEASLRAQGKLEGLSPQAEQEMIEAAAGSLIVETKEFSERVTGVVTFEKIALDIAEGSGTTWLPEEFSRKLGEALGAMPRSELEALRERVSSAIEHEKAAIELGELSIPARPEMLSVIDNHLSAAIDNDDSDKDGDKADEGKRGPVVLDTAVNFEEVSWHAKLTPRAAASGSGIPVSIRTPLKPHQVESLQWQIEAWKAGLPGVLNADEQGLGKTLQTIAFLTWLKSHMAEKDAGNKGPVLVVAPTSLLENWEQEVSRHLHDPGLGHLIRLYGSSLGGRKLVGAKGRDTDSGDAKLDLSSLHEAIEEGRAHRFWLLTTYTTLTNYQHSLGRIPFSAIVFDEIQALKNPVSLRAVAGRAMNADFRIGLTGTPIENAATDLWSIMDQLAPGSLDSLRDFHGKYKEPTSENMTDLHARVFRPNKDCPPLALRRLKDEVASDLPKKSRRIHPRLMPEGQAIAYDDAKLKLATGGLGAQLKMLHHIRTVSVHPSVQSAWSDEDFISASGRLTAVMDILRRVHAQGERALVFIEHRQMQYRFVELVRAEFKLQRVDLINGDTPIPQRQAIVNRFQRHLEDDRGFDLLVLGPKAAGTGLTLTAATHVIHLSRWWNPAVEEQCNDRVHRIGQTNPVTVHIPMAVHASYQDQSFDCLLQSLMMRKRRLASSALWPMGDTQDDVAALQRLMSAEKTADNRDPVKAAMQGMFDRDKLRLPAAEADGSLAID

SEQ ID NO: 1363 - protein, 685 aa, Methylobacterium extorquens CM4
MFELVLGFGIAARDAILAVAGLLKSEAVPGLIAVALVLALAFLIVLYARSIAVRVAAVRGLRHVVRRAADEASFGQSIADLDAEVLRSGSRGARKQIATAWDKYRETLVEHDEDGAIILRNSVRPAVFFNADDLGFGSGFWRAVPGLFVTIGLFLTFLGLISALGAMDLSAPDKVQSSLRELLLVASAKFIMSLTGLLCSIVFTVVLRWGIGSIEGALHTLCAEIEKRLSFISLENLAAEQLRATREQREHFRLIGLELVAELGRPLREEIPAAISASINATMGPLLQQVGQLGTDHMGSMVKDLSARFSDDVGRALAQASERLVQAGDRIGELSTRMDQSSGRMGSEMDAAVARLAQAVDDLRDTMSATAASANGAFTDGADRLLGAMNQTLQEIRDNTRAGAEAMGAAAADMRGAAEGFRTELEAATRSGATEAAARMQAAGSDASAQISAAGSTVVQAFGRTAGEIAEATREVGARAAQDLLAPLDSIAGRLRETADGVAAAVGGVGRLGDGVRASAEAAERAAGAFRGSSEALITASAPLRATTERIESSIRQLADATQHVAGTVSRSAEQTARSAADALAAAQTALGGHAGAIEASLAGVGHVVDRLKGQGAQLDTLDEKLGAAFDVYAARVATAVDTLSDYVRRMQSELAPALDTLRAVVEQAEQFIPESRVAAGRRGP

SEQ ID NO: 1364 - protein, 296 aa, Methylobacterium extorquens CM4
MRGATRRLAHEEEEESAFVSMTDLTVSFLFIVIILLAFFASQLKDDQTVPLPEYRQIERERDRLATENADLSREVARLEDELRKERTNRLQTYLSAVSSERDRILRTLRDRLVVDFPELENIVSIETGALRFKGDGLFKTDRWQLAEDKRRVVTAIATRLNELLPCYTFGKAARWQASCNAAGAVIEAVQIEGHTDASGQDRSNFSLSTERAVETLFAMIGREPALLDNRNSAGQPVLSVSGYGRLRPVADNTSERGRATNRRIDLRIIMYTPHSVEEVERIKDDLQRGLAGTVLQ

SEQ ID NO: 1365 - protein, 438 aa, Methylobacterium extorquens CM4
MSLDDTLARLRPPEPPVLPNLKTFAAAAERILHRWPDVAPDPPERDREQLVLRMEAHRVEERWDGVRMSLVTAAARAVFDATRRGRPDLADLRGFYLAEIRASHRTTFLGAMVSVYLESFAPDAPHTRALAEALSGARDRLGARWRTLVEGIPEVFRPDLAPEAIARRMVGMRSPWPELKALGLRAPHAPGLMDFVHDAYVARLKPHLTVRAEIEQLLSWLKPDDQAVARSSGAPAAIEALLGHWRTGNPPEADIDLITRSLVAFYGDPRVQQGGAWASVASDCLAVILRWLTGKDIRFFMDVVSAVEDSHMWEPRRRFWLKLHAQRRIDAAWVAFSPSGAEYARRLLKTGEVRGVVSYGQQTAGYSRANTSLLILKCGNRIVVEGSHSYKVHIFREGHPHAPALYQRAYDCEQIRLVPGAESRSHLGDWQGWVEERI

SEQ ID NO: 1366 - protein, 1033 aa, Methylobacterium extorquens CM4
MVSPALDFAFDPQGITLSRPTRVGLLGRLGFGRDRRELDRLPLAERTLLLAIADLRAAAAEKPTELLEITPEHIRLSHRLAAALDAETAASLGLPPVVDLSLRTDAEGVLGSPSFRLHHEWVKNGQRQTVQRVGAILKTSAGPRRLPEWLMDAVAVSEGFESGRSESQHWNALARFRQLLDPGIRIAEPTAAARVSMTDFLAGLEVRIADRFALSPTAEDDFDVVPFSGRELAQAGYDEAAVGVPEGAGELAGPLLRGFQERVRSRGALSAYRLGPGNFLVIDPAAAPALSVMARMQHAPAAERKAFLRNPRPLVTQAVEAALRGAGQLDGLDAVGEEDAIEAAALPLFVETQEYADRVTGIGVFRKPDLEIGPGSGTTWLPEAFAEKLQSALAALSPAELDDLHRRVSRAMSAGDATVPLAGFDLPARAEALALIRQYRGGEATEDATEEEKGSSEPVVLETVDNFDELKWVARLKPRSATGNEDVPSLIRTDLKAHQRASFEWQVAAWKAGLPGILNADEQGLGKTLQTIAFLAWLKQHAADPRALQRGPVLVVAPTSLLENWEQEVARHTREPGLGHLIRLYGSGIGARKHAGASGRDIDAGESKLDLAFLHEALAEGRAHRSWILTTYTTLVNYQHSLREIPFSAVVFDEIQALKNPASLRAAAARAVRADFRIGLTGTPIENAAVDLWAIMDQLAPGSLDSLPEFRARYGTPDATNMAELHRRVFTSTPPAQPLALRRIKDVVARDLPEKARRLHPRAMPERQAAAYEDAQFKLAQGGAGAAFKMLHHIRTVSVHPNLDGAETDSAFLEASARLSAVFEILGVIAERRERALVFVEHRRMQHRLVELARARFNLPRVDLINGDTPISRRQAIVNRFQRHLEGEPAFDVLVLGPKAAGTGLTLTAATHVIHLSRWWNPAVEEQCNDRVHRLGQTRPVTIHVPMAIHAGYREGSFDCLLHGLMHRKRRLAASALWPMGDTQADVGELTRLLDSAAKREGADPVRSAIAAMFARDGLEAPVWEQDGSIRVS

SEQ ID NO: 1367 - protein, 657 aa, Legionella pneumophila str. Lens
MTSGDNNLLAPLSLLKENEYFMINPEYIFTLITKDSTVYFFVSFIFAIALIPFWQATYTIGKVNRAIKKANELIKSLGNESPSKFYNEFENIKAQLNGIDYLKNIWGEFIGSTYYLTNNNTQQINSNKIFLSHRPSYYFNKESVLGSQLNLNQFFSFPNYLIGLGLAFTFIGLAAALHIAQSGLANGEGQTALSELLKVASVKFFSSITGIGCSLIISFIQKIRIKGFQNNLNNFCGLLEKCTEYKPAEKLIFESIQEEKTHTLALQSMANDISIGIGDVLNNQLPASVANALAPLADEIRALAQKFSGSNENALEKVLNEFLDQLRKSSGDEMQGLIDGVNTLKDSLLRLVENMETMGKSFGSNTKDSTDRLMASLDAFTSTFTPVQQGIGKFGQSLDSLENIARSIQQASGNITGAADISNQSMSNLAGTVTQITENLTPIQDLLNVINLSLKKVDESSENLHGAGRTIASAADGFKNSAESIEQASNRFDQKINKFEVVIDGISGTANVLERASNNVSNAIKPLSETSEGLTKVIHAIQETESRIHGSQKQLSDLLINLENFTEKLPSLLSQYEERFSKVDQDLANAFGELAKGSDEFRTSISQFVISFDQQFDKAIRQLSGVIQDLQEERENAELTTNNYHKAEYVDADTRIA

SEQ ID NO: 1368 - protein, 234 aa, Legionella pneumophila str. Lens
MQTPESHDESYFASFTDMLVGIIFIFIILLMIVANNFQSATKKVTEINESRDKILKEIEQSLKQEGVSVTIDIEQGVLRLPESILFGVDQYQVNEEGKIALSKLASVLEKYLPCMAVTEEKFKSQCESLNLTSRDGLDAVFIEGHTDSTGSSEHNWYLSARRAISVFNELIDAKPLLNVGLKNINGIPILNVSGYEARRPIDPNNLSVNRRIELRFIMRSPTPQDIKRLKHAIG

SEQ ID NO: 1369 - protein, 482 aa, Legionella pneumophila str. Lens
MPLDNLANTKEQLKHFFKLNKLNVSKNLLTLPTILHTVKELEKKFAVTDHSPSIVEIEKIYFRFAQAIENKELTSISNREWRMSPYIFWYQNGESKPLGSNYDFISQYINWLKRNSTPGNWRKLIHVFLRDYNQRSNYKLIFQQISCVIREELDSCSKKNNLIRWTERDRQINLFSRDFCLNKAIDSFIQDANCDWDEFAILSGLHGDLGQTGYAESIGKELLNKINTLPSEELLNATINYYFNNGQIRFNDHRVKLIEALLSPWATNAYKISSELKKRVHDILIENFKDPRIIAHQRNGWRSVNQSSLQIMLRWLVGDSIEQFFDIVDQMALDHQWKYRKAFWMAYFARGYLDEAWFALGPDAQYYAETHFGNKLSFGKIVKECSSNQSVLIIKIKDLVFAEWSHNGKCRAWLTTDPSCPSHYKDNYSGSNLKAKSLKIVPHYQTDGIQHQGSENYSWQEKLNDFIYQHTGIKVYHYDFRI

SEQ ID NO: 1370 - protein, 1128 aa, Legionella pneumophila str. Lens
MIFGFKRKAKTTTKLLCHEQQQDGIYQFIFQLESKNTIVPIQEWRNSNHPGAIWLLDYLHDNDLIQKDSLDNLTIRLYSEQLIEILKGQECYLQHLLELPPLFDGGLHIECQGLLAKDDYTLNYSWIDGNSRPITVSERRGIFLIFGNRKYLLSYFAWKFAEDIDAIREKLHSSNSMHARLETLENFKSIRSLLPEEESRKFSDDGSISNIKLYFANAFRIDAIPEGNSFKIQPVLLKRHETQNQDCVFENILPPVEQQRYNDQFSNSTKLQPYYTLGPGKYILINDQLNKALSTVHKIQHSNDTEKLNFLKNPKAALADSLEGMISDEELNLIFSDRVTGIGEWNAKVIPWIQLPPGEWIPDGKFPNSPFGIDIAGKKIQFETITDLSVILDKIKEAKKSGVLFVDHEGINIPVNDRSISALEKFIPRQPLNNEDNKHNQANSPDQDRILQTPVMLVKENLEYVEFHVVRIPRNRYPQSSKLPETIRTEPKQHQVEAYKWLCAHYKAGSRGVLLADDMGLGKTFQSLMFLEWLREGMIKEEICDKPLLIVAPTGLLKNWEAEVQKHLLNGLGNIARVYGSDLKSLRTNNSLNVSKIKSANLVLTTYDTLTRYQTSFGVISFSTVVFDEIQKLKNPGTQNYSAACSLNCDFWLGMTGTPVENRLCDLWSITDVLQPGMLGSIKEFSNKYEKCILDIDEYEQQNILKELQDGLTKGSEANPPFMLRRMKSSVLTGLPKKNVHIIPVEMPQKQASTYSQILNQVKNMESKNGVMLKAIHQLRACSLHPDYKRQDEYINDNEYIGGSARLKACFEILDKIYAKREKVLIFIEYNEWHRHDFLCQIIKTKYKLDRLPMAINGQINSKTRQHIVDKFQEERGKFDVMLLSPRAGGVGITLTAANHIIHLTRWWNPAVEDQANDRIYRIGQESDVHIYYPLAIHAEYENSCFDYNLHQLLEKKREVSQQVIIAPPMEQDAIDQLFAKTFNKSPHSKISINESYYGFDGNSYEEFILEKLQNKAPLFGFHAKATKKSWDKGADIIIESDNGNIVAIVQCKHVSCSTKTPPDIPEDLDKAVKHYVSQNNPPIFKIGITNASKLRKFDTDWLRSSSFNQILYADQGLRPELLLKLLS

SEQ ID NO: 1371 - protein, 636 aa, Legionella pneumophila subsp. pneumophila
MINPEYLFTLITKDSTVYFFVSFIFAIALIPFWQATYTIGKVNRAIKKANELIKSLGNESPSKFYNEFENIKAQLNGIDYLKNIWGEFIGSTYYLTNNNTQQINSNKIFLSHRPSYYFNKESVLGSQLNLNQFFSFPNYLIGLGLAFTFIGLAAALHIAQSGLANGEGQTALSELLKVASVKFFSSITGIGCSLIISFIQKIRIKGFQNNLNNFCGLLEKCTEYKPAEKLIFESIQEEKTHTLALQSMANDISIGIGDVLNNQLPASVANALAPLADEIRALAQKFSGSNENALEKVLNEFLDQLRKSSGDEMQGLIDGVNTLKDSLLRLVENMETMGKSFGSNTKDSTDRLMASLDAFTSTFTPVQQGIGKFGQSLDSLENIARSIQQASGNITGAADISNQSMSNLAGTVTQITENLTPIQDLLNVINLSLKKVDESSENLHGAGRTIASAADGFKNSAESIEQASNRFDQKINKFEVVIDGISGTANVLERASNNVSNAIKPLSETSEGLTKVIHAIQETESRIHGSQKQLSDLLINLENFTEKLPSLLSQYEERFSKVDQDLANAFGELAKGSDEFRTSISQFVISFDQQFDKAIRQLSGVIQDLQEERENAELTANNYHKAEYVDADTRIA

SEQ ID NO: 1372 - protein, 234 aa, Legionella pneumophila subsp. pneumophila; identical to SEQ ID NO: 1368

SEQ ID NO: 1373 - protein, 482 aa, Legionella pneumophila subsp. pneumophila
MPLDNLANTKEQLKHFFKLNKLNVSKNLLTLPTILHTVKELEKKFAVTDHSPSIVEIEKIYFRFAQAIENKELTSISNREWRMSPYIFWYQNGESKPLGSNYDFISQYINWLKRNSTPGNWRKLIHVFLRDYNQRSNYKLIFQQISCVIREELDSCSKKNNLIRWTERDRQINLFSRDFCLTKAIDSFIQDANCDWDEFALLSGLHGDLGQTGYAESIGKELLNKINTLPSEELLNATINYYFNNGQIRFNDHRVKLIEALLSPWATNAYKISSELKKRVHDILIENFKDPRIIAHQRNGWRSVNQSSLQIMLRWLVGDSIEQFFDIVDQMALDHQWKYRKAFWMAYFARGYLDEAWFALGPDAQYYAETHFGNKLSFGKIVKECSSNQSVLIIKIKDLVFAEWSHNGKCRAWLTTDPSCPSHYKDNYSGSNLKAKSLKIVPHYQTDGIQHQGSENYSWQEKLNDFIYQHTGIKVYHYDFRI

SEQ ID NO: 1374 - protein, 1128 aa, Legionella pneumophila subsp. pneumophila
MIFGFKRKAKTTTKLLCHEQLQDGIYQFIFQLESKNTIVPIQEWRNSNHPGAIWLLDYLHDNDLIQKDSLDNLTIRLYSEQLIEILKGQECYLQHLLELPPLFDGGLHIECQGLLAKDDYTLNYSWIDGNSRPITVSERRGIFLIFGNKKYLLSYFAWKFAEDIDAIREKLHSSNSMHARLETLENFKSIRSLLPEEESRKFSDDGSISNIKLYFANAFRIDAIPEGNSFKIQPVLLKRHETQNQDCVFENILPPVEQQRYNDQFSNSTKLQPYYTLGPGKYILINDQLNKALSTVHKIQHSNDTEKLNFLKNPKAALADSLEGMISDEELNLIFSDRVTGIGEWNAKVIPWIQLPPGEWIPDGKFPNSPFGIDIAGKKIQFETITDLSVILDKIKEAKKSGVLFVDHEGINIPVNDRSISALEKFIPRQPLNNEDNKHNQANSPDQDRILQTPVMLVKENLEYVEFHVVRIPRNRYPQSSKLPETIRTEPKQHQVEAYKWLCAHYKAGSRGVLLADDMGLGKTFQSLMFLEWLREGMIKEEICDKPLLIVAPTGLLKNWEAEVQKHLLNGLGNIARVYGSDLKSLRTNNSLNVSKIKSANLVLTTYDTLTRYQTSFGVISFSTVVFDEIQKLKNPGTQNYSAACSLNCDFWLGMTGTPVENRLCDLWSITDVLQPGMLGSIKEFSNKYEKCILDIDEYEQQNILKELQDGLTKGSEANPPFMLRRMKSSVLTGLPKKNVHILPVEMPQKQASTYSQILNQVKNMESKNGVMLKAIHQLRACSLHPDYKRQDEYINDNEYIGGSARLKACFEILDKIYAKREKALIFIEYNEWHRHDFLCQIIKTKYKLDRLPMAINGQINSKTRQNIVDKFQEERGKFDVMLLSPRAGGVGITLTAANHIIHLTRWWNPAVEDQANDRIYRIGQESDVHIYYPLAIHAEYENSCFDYNLHQLLEKKREMSQQVIIAPPMEQDAIDQLFAKTFNKSPYSKISINESYYGFDGNSYEEFILEKLQNKAPLFGFHAKATKKSWDKGADIIIESDNGNIVAIVQCKHVSCSTKTPPDIPEDLDKAVKHYVSQNNPPIFKIGITNASKLRKFDTDWLRSSSFNQILYADQGLRPELLLKLLS

SEQ ID NO: 1375 - protein, 636 aa, Legionella pneumophila; identical to SEQ ID NO: 1371

SEQ ID NO: 1376 - protein, 234 aa, Legionella pneumophila; identical to SEQ ID NO: 1368

SEQ ID NO: 1377 - protein, 482 aa, Legionella pneumophila; identical to SEQ ID NO: 1373

SEQ ID NO: 1378 - protein, 1128 aa, Legionella pneumophila; identical to SEQ ID NO: 1374

SEQ ID NO: 1379 - protein, 636 aa, Legionella pneumophila; identical to SEQ ID NO: 1371

SEQ ID NO: 1380 - protein, 234 aa, Legionella pneumophila; identical to SEQ ID NO: 1368

SEQ ID NO: 1381 - protein, 482 aa, Legionella pneumophila; identical to SEQ ID NO: 1373

SEQ ID NO: 1382 - protein, 1128 aa, Legionella pneumophila; identical to SEQ ID NO: 1374

SEQ ID NO: 1383 - protein, 636 aa, Legionella pneumophila; identical to SEQ ID NO: 1371

SEQ ID NO: 1384 - protein, 234 aa, Legionella pneumophila; identical to SEQ ID NO: 1368

SEQ ID NO: 1385 - protein, 482 aa, Legionella pneumophila; identical to SEQ ID NO: 1373

SEQ ID NO: 1386 - protein, 1128 aa, Legionella pneumophila; identical to SEQ ID NO: 1374

SEQ ID NO: 1387 - protein, 636 aa, Legionella pneumophila; identical to SEQ ID NO: 1371

SEQ ID NO: 1388 - protein, 234 aa, Legionella pneumophila; identical to SEQ ID NO: 1368

SEQ ID NO: 1389 - protein, 482 aa, Legionella pneumophila; identical to SEQ ID NO: 1373

SEQ ID NO: 1390 - protein, 1128 aa, Legionella pneumophila; identical to SEQ ID NO: 1374

SEQ ID NO: 1391 - protein, 636 aa, Legionella pneumophila; identical to SEQ ID NO: 1371

SEQ ID NO: 1392 - protein, 234 aa, Legionella pneumophila; identical to SEQ ID NO: 1368

SEQ ID NO: 1393 - protein, 482 aa, Legionella pneumophila; identical to SEQ ID NO: 1373

SEQ ID NO: 1394 - protein, 1128 aa, Legionella pneumophila; identical to SEQ ID NO: 1374

SEQ ID NO: 1395 - protein, 636 aa, Legionella pneumophila; identical to SEQ ID NO: 1371

SEQ ID NO: 1396 - protein, 234 aa, Legionella pneumophila; identical to SEQ ID NO: 1368

SEQ ID NO: 1397 - protein, 482 aa, Legionella pneumophila; identical to SEQ ID NO: 1373

SEQ ID NO: 1398 - protein, 1128 aa, Legionella pneumophila; identical to SEQ ID NO: 1374

SEQ ID NO: 1399 - protein, 636 aa, Legionella pneumophila; identical to SEQ ID NO: 1371

SEQ ID NO: 1400 - protein, 234 aa, Legionella pneumophila; identical to SEQ ID NO: 1368

SEQ ID NO: 1401 - protein, 482 aa, Legionella pneumophila; identical to SEQ ID NO: 1373

SEQ ID NO: 1402 - protein, 1128 aa, Legionella pneumophila; identical to SEQ ID NO: 1374

SEQ ID NO: 1403 - protein, 636 aa, Legionella pneumophila; identical to SEQ ID NO: 1371

SEQ ID NO: 1404 - protein, 234 aa, Legionella pneumophila; identical to SEQ ID NO: 1368

SEQ ID NO: 1405 - protein, 482 aa, Legionella pneumophila; identical to SEQ ID NO: 1373

SEQ ID NO: 1406 - protein, 1128 aa, Legionella pneumophila; identical to SEQ ID NO: 1374

SEQ ID NO: 1407 - protein, 636 aa, Legionella pneumophila; identical to SEQ ID NO: 1371

SEQ ID NO: 1408 - protein, 234 aa, Legionella pneumophila; identical to SEQ ID NO: 1368

SEQ ID NO: 1409 - protein, 482 aa, Legionella pneumophila; identical to SEQ ID NO: 1373

SEQ ID NO: 1410 - protein, 1128 aa, Legionella pneumophila; identical to SEQ ID NO: 1374

SEQ ID NO: 1411 - protein, 636 aa, Legionella pneumophila; identical to SEQ ID NO: 1371

SEQ ID NO: 1412 - protein, 234 aa, Legionella pneumophila; identical to SEQ ID NO: 1368

SEQ ID NO: 1413 - protein, 482 aa, Legionella pneumophila; identical to SEQ ID NO: 1373

SEQ ID NO: 1414 - protein, 1128 aa, Legionella pneumophila; identical to SEQ ID NO: 1374

SEQ ID NO: 1415 - protein, 636 aa, Legionella pneumophila; identical to SEQ ID NO: 1371

SEQ ID NO: 1416 - protein, 234 aa, Legionella pneumophila; identical to SEQ ID NO: 1368

SEQ ID NO: 1417 - protein, 482 aa, Legionella pneumophila; identical to SEQ ID NO: 1373

SEQ ID NO: 1418 - protein, 1128 aa, Legionella pneumophila; identical to SEQ ID NO: 1374

SEQ ID NO: 1419 - protein, 636 aa, Legionella pneumophila; identical to SEQ ID NO: 1371

SEQ ID NO: 1420 - protein, 234 aa, Legionella pneumophila; identical to SEQ ID NO: 1368

SEQ ID NO: 1421 - protein, 482 aa, Legionella pneumophila; identical to SEQ ID NO: 1373

SEQ ID NO: 1422 - protein, 1128 aa, Legionella pneumophila; identical to SEQ ID NO: 1374

SEQ ID NO: 1423 - protein, 636 aa, Legionella pneumophila; identical to SEQ ID NO: 1371

SEQ ID NO: 1424 - protein, 234 aa, Legionella pneumophila; identical to SEQ ID NO: 1368

SEQ ID NO: 1425 - protein, 482 aa, Legionella pneumophila; identical to SEQ ID NO: 1373

SEQ ID NO: 1426 - protein, 1128 aa, Legionella pneumophila; identical to SEQ ID NO: 1374

SEQ ID NO: 1427 - protein, 636 aa, Legionella pneumophila; identical to SEQ ID NO: 1371

SEQ ID NO: 1428 - protein, 234 aa, Legionella pneumophila; identical to SEQ ID NO: 1368

SEQ ID NO: 1429 - protein, 482 aa, Legionella pneumophila; identical to SEQ ID NO: 1373

SEQ ID NO: 1430 - protein, 1128 aa, Legionella pneumophila; identical to SEQ ID NO: 1374

SEQ ID NO: 1431 - protein, 636 aa, Legionella pneumophila; identical to SEQ ID NO: 1371

SEQ ID NO: 1432 - protein, 234 aa, Legionella pneumophila; identical to SEQ ID NO: 1368

SEQ ID NO: 1433 - protein, 482 aa, Legionella pneumophila; identical to SEQ ID NO: 1373

SEQ ID NO: 1434 - protein, 1128 aa, Legionella pneumophila; identical to SEQ ID NO: 1374

SEQ ID NO: 1435 - protein, 636 aa, Legionella pneumophila; identical to SEQ ID NO: 1371

SEQ ID NO: 1436 - protein, 234 aa, Legionella pneumophila; identical to SEQ ID NO: 1368

SEQ ID NO: 1437 - protein, 482 aa, Legionella pneumophila; identical to SEQ ID NO: 1373

SEQ ID NO: 1438 - protein, 1128 aa, Legionella pneumophila; identical to SEQ ID NO: 1374

SEQ ID NO: 1439 - protein, 636 aa, Legionella pneumophila; identical to SEQ ID NO: 1371

SEQ ID NO: 1440 - protein, 234 aa, Legionella pneumophila; identical to SEQ ID NO: 1368

SEQ ID NO: 1441 - protein, 482 aa, Legionella pneumophila; identical to SEQ ID NO: 1373

SEQ ID NO: 1442 - protein, 1128 aa, Legionella pneumophila; identical to SEQ ID NO: 1374

SEQ ID NO: 1443 - protein, 636 aa, Legionella pneumophila; identical to SEQ ID NO: 1371

SEQ ID NO: 1444 - protein, 234 aa, Legionella pneumophila; identical to SEQ ID NO: 1368

SEQ ID NO: 1445 - protein, 482 aa, Legionella pneumophila; identical to SEQ ID NO: 1373

SEQ ID NO: 1446 - protein, 1128 aa, Legionella pneumophila; identical to SEQ ID NO: 1374

SEQ ID NO: 1447 - protein, 636 aa, Legionella pneumophila
MINPEYLFTLITKDSTVYFFVAFIFAIALIPFWQAIYTIGKVNRAIKKANELIKSLGNESPLKFYNEFENIKTQLNGIDYLKNIWGEFIGSTYYLTSNNTQQINSNKIFLSHRPSYYFNKDSVLGSRLNLNQFFSFPNYLIGLGLAFTFIGLAAALHIAQSGLANGEGQTALSELLKVASVKFFSSITGIGCSLIISFIQKIRIKGFQNNLNNFCELLEKCTEYKPAEKLIFESIQEEKTHTLALQSMANDISIGIGDVLNNQLPASVANALAPLADEIRSLAQKFSGSNENALEKVLNEFLDQLRKSSGDEMQGLIDGVNTLKDSLLRLVENMETMSKSFGSNTKDSTDRLMASLDAFTSTFTPVQQGIGKFGQSLDSLENIARSIQQASGNITGAADISNQSMSNLAGTVTQITENLTPIHDLLNVINLSLKKVDESSENLHGAGRTIASAADGFKNSAESIEQASNRFDQKINKFEVVIDGISGTANILERASNNVSNAVKPLSDTSEGLTKVIHAIQETESRIHGSQKQLSDLLINLENFTEKLPSLLSQYEERFSKVDQDLANAFGELAKGSDEFRTSISQFVISFDQQFDKAIRQLSGVIQDLQEERENAELTTNNYHKAEYVDADTRIA

SEQ ID NO: 1448 - protein, 234 aa, Legionella pneumophila
MQTPESHDESYFASFTDMLVGIIFIFIILLMIVANNFQSATKKVTEINESRDKILKEIEQSLKQEGVSVTIDIEQGVLRLPESILFGVDQYQVNEEGKIALSKLASVLEKYLPCMAVTEEKFKSQCDSLNLTSRDGLDAVFIEGHTDSTGSSEHNWYLSARRAISVFNELIEAKPLLNVGLKNINGIPILNVSGYEARRPIDPNNLSVNRRIELRFIMRSPTPQDIKRLKHAIG

SEQ ID NO: 1449 - protein, 482 aa, Legionella pneumophila
MPLDNLANTKEQLKHFFKLNKLNVSKNLLTLPTILHTVKELEKKFALTDHSPSIVEIEKIYFRFAQAIENKELTSISNREWRMSPYIFWYQSGESKPIGSNYEFIGQYIHWLKNNSTPGNWRKLIHVFLRDYNQRSNYKLIFQQIACVIREGLENCSKKNNLLRWIERDRQINLFSRDFCLNKAIDSFIQDANCDWDEFALLSGLHGDLGQTGYAESIGKELLNKINTLPSEELLNATINYYFNNGQIRFNDHRVKLIEALLSPWATNTYKISSELKKRVHDILIENFKDPRIIAHQRNGWRSVNQSSLQIMLRWLVGDSIEQFFDIVDQMALDHQWKYRKAFWMAYFARGYLDEAWFALGPDAQYYAETHFGNKLSFGKIVKECSSNQSVLIIKIKDLVFAEWSHNGKCRAWLTTDPSCPSHYKDNYSGSNLKAKSLKIVPHYQTDGIQHQGSENYSWQEKLNDFIYQHTGIKVYHYDFRI

SEQ ID NO: 1450 - protein, 1129 aa, Legionella pneumophila
MIFGFKRKAKTTTKLLCHEQLQDGIYQFIFQLESKKTIVPIQEWRNSNHPGAIWLLDYLHDNDLIQKDSLDNLTIRLHSEQLIEILKGQESYLQHLLELPPLFDGGLHIECQGLLAKDDYTLNYSWIDGNSRPITLSDRRGIFLIFGNKKYLLSYVAWKFAEDIDAIRERLHSSNSMHDRLQILERFNSIRELLPEEESQKYSDDGSISNIKLYFANAFRIDAIPEGNSFKIQPVLLKRHETQNQDCVFENILPPVEQQRYNDQFSNSTKLQPYYTLGPGKYILINDQLNKALSTIHKIQHSNDNEKLNFLKNPKATLADSLEGMISDDELNLIFSDRVTGIGDWNAKVIPWIQLPPGEWIPDGKFPNSPFGIDIAGKKIQFETINDLSVILDKIKEAKKSGVLFVDHEGINIPVNDSSISALEKFIPRQPLNNEDNSHNQSNSPDQDRILQTPVMLVKENLEYVEFHVVRIPRKRYPQSIKLPETIRTEPKQHQIEAYKWLCAHYKAGSRGVLLADDMGLGKTFQSLMFLEWLREGMIKEEICDKPLLIIAPTGLLKNWEAEVHKHLLNGLGNIARVYGSDLKYLRTNKSLNVNKIKSANLVLTTYDTLTRYQTSFGVISFSAVVFDEIQKLKNPGTQNYSAACSLNCDFWLGMTGTPVENRLCDLWSITDVLQPGMLGSIKEFSNKYEKCILDIDEYEQQNILKELQDGLTKGSEANPPFMLRRMKSSVLTGLPKKNVHIIPVEMPQKQASTYSQILNQVKNMESKNGVMLKAIHQLRACSLHPDYKRQNEYINDNEYIGGSARLKACFEILDKIYAKREKALIFIEYNEWHRHDFLCQIIKTKYKLDSLPMAINGQINSKTRQNIVDKFQEERGKFDVMLLSPRAGGVGITLTAANHIIHLTRWWNPAVEDQANDRIYRIGQESDVHIYYPLAIHAEYENSCFDYNLHQLLEKKRELSQQVIIAPPMEQDAIDQLFAKTFNKSPHSKISINESYYGFDGNSYEEFILEKLQNKAPLFGFHAKATKKSWDKGADIIIESDNGNIVAIVQCKHVSCSTKTPPDIPEDLDKAVKHYVSQNNPPIFKIGITNASKLRKFDMDWLRSSSFNQILYADQGLNPELLFKLFPY

SEQ ID NO: 1451 - protein, 636 aa, Legionella pneumophila; identical to SEQ ID NO: 1371

SEQ ID NO: 1452 - protein, 234 aa, Legionella pneumophila; identical to SEQ ID NO: 1368

SEQ ID NO: 1453 - protein, 482 aa, Legionella pneumophila; identical to SEQ ID NO: 1373

SEQ ID NO: 1454 - protein, 1128 aa, Legionella pneumophila; identical to SEQ ID NO: 1374

SEQ ID NO: 1455 - protein, 636 aa, Legionella pneumophila; identical to SEQ ID NO: 1371

SEQ ID NO: 1456 - protein, 234 aa, Legionella pneumophila; identical to SEQ ID NO: 1368

SEQ ID NO: 1457 - protein, 482 aa, Legionella pneumophila; identical to SEQ ID NO: 1373

SEQ ID NO: 1458 - protein, 1128 aa, Legionella pneumophila; identical to SEQ ID NO: 1374

SEQ ID NO: 1459 - protein, 636 aa, Legionella pneumophila; identical to SEQ ID NO: 1371

SEQ ID NO: 1460 - protein, 234 aa, Legionella pneumophila; identical to SEQ ID NO: 1368

SEQ ID NO: 1461 - protein, 482 aa, Legionella pneumophila; identical to SEQ ID NO: 1373

SEQ ID NO: 1462 - protein, 1128 aa, Legionella pneumophila; identical to SEQ ID NO: 1374

SEQ ID NO: 1463 - protein, 636 aa, Legionella pneumophila; identical to SEQ ID NO: 1371

SEQ ID NO: 1464 - protein, 234 aa, Legionella pneumophila; identical to SEQ ID NO: 1368

SEQ ID NO: 1465 - protein, 482 aa, Legionella pneumophila; identical to SEQ ID NO: 1373

SEQ ID NO: 1466 - protein, 1128 aa, Legionella pneumophila; identical to SEQ ID NO: 1374

SEQ ID NO: 1467 - protein, 636 aa, Legionella pneumophila; identical to SEQ ID NO: 1371

SEQ ID NO: 1468 - protein, 234 aa, Legionella pneumophila; identical to SEQ ID NO: 1368

SEQ ID NO: 1469 - protein, 482 aa, Legionella pneumophila; identical to SEQ ID NO: 1373

SEQ ID NO: 1470 - protein, 1128 aa, Legionella pneumophila; identical to SEQ ID NO: 1374

SEQ ID NO: 1471 - protein, 636 aa, Legionella pneumophila; identical to SEQ ID NO: 1371

SEQ ID NO: 1472 - protein, 234 aa, Legionella pneumophila; identical to SEQ ID NO: 1368

SEQ ID NO: 1473 - protein, 482 aa, Legionella pneumophila; identical to SEQ ID NO: 1373

SEQ ID NO: 1474 - protein, 1128 aa, Legionella pneumophila; identical to SEQ ID NO: 1374

SEQ ID NO: 1475 - protein, 636 aa, Legionella pneumophila; identical to SEQ ID NO: 1371

SEQ ID NO: 1476 - protein, 234 aa, Legionella pneumophila; identical to SEQ ID NO: 1368

SEQ ID NO: 1477 - protein, 482 aa, Legionella pneumophila; identical to SEQ ID NO: 1373

SEQ ID NO: 1478 - protein, 1128 aa, Legionella pneumophila; identical to SEQ ID NO: 1374

SEQ ID NO: 1479 - protein, 636 aa, Legionella pneumophila; identical to SEQ ID NO: 1371

SEQ ID NO: 1480 - protein, 234 aa, Legionella pneumophila; identical to SEQ ID NO: 1368

SEQ ID NO: 1481 - protein, 482 aa, Legionella pneumophila; identical to SEQ ID NO: 1373

SEQ ID NO: 1482 - protein, 1128 aa, Legionella pneumophila; identical to SEQ ID NO: 1374

SEQ ID NO: 1483 - protein, 636 aa, Legionella pneumophila; identical to SEQ ID NO: 1371

SEQ ID NO: 1484 - protein, 234 aa, Legionella pneumophila; identical to SEQ ID NO: 1368

SEQ ID NO: 1485 - protein, 482 aa, Legionella pneumophila; identical to SEQ ID NO: 1373

SEQ ID NO: 1486 - protein, 1128 aa, Legionella pneumophila; identical to SEQ ID NO: 1374

SEQ ID NO: 1487 - protein, 636 aa, Legionella pneumophila; identical to SEQ ID NO: 1371

SEQ ID NO: 1488 - protein, 234 aa, Legionella pneumophila; identical to SEQ ID NO: 1368

SEQ ID NO: 1489 - protein, 482 aa, Legionella pneumophila; identical to SEQ ID NO: 1373

SEQ ID NO: 1490 - protein, 1128 aa, Legionella pneumophila; identical to SEQ ID NO: 1374

SEQ ID NO: 1491 - protein, 636 aa, Legionella pneumophila; identical to SEQ ID NO: 1371

SEQ ID NO: 1492 - protein, 234 aa, Legionella pneumophila; identical to SEQ ID NO: 1368

SEQ ID NO: 1493 - protein, 482 aa, Legionella pneumophila; identical to SEQ ID NO: 1373

SEQ ID NO: 1494 - protein, 1128 aa, Legionella pneumophila; identical to SEQ ID NO: 1374

SEQ ID NO: 1495 - protein, 636 aa, Legionella pneumophila; identical to SEQ ID NO: 1371

SEQ ID NO: 1496 - protein, 234 aa, Legionella pneumophila; identical to SEQ ID NO: 1368

SEQ ID NO: 1497 - protein, 482 aa, Legionella pneumophila; identical to SEQ ID NO: 1373

SEQ ID NO: 1498 - protein, 1128 aa, Legionella pneumophila; identical to SEQ ID NO: 1374

SEQ ID NO: 1499 - protein, 636 aa, Legionella pneumophila; identical to SEQ ID NO: 1371

SEQ ID NO: 1500 - protein, 234 aa, Legionella pneumophila; identical to SEQ ID NO: 1368

SEQ ID NO: 1501 - protein, 482 aa, Legionella pneumophila; identical to SEQ ID NO: 1373

SEQ ID NO: 1502 - protein, 1128 aa, Legionella pneumophila; identical to SEQ ID NO: 1374

SEQ ID NO: 1503 - protein, 636 aa, Legionella pneumophila; identical to SEQ ID NO: 1371

SEQ ID NO: 1504 - protein, 234 aa, Legionella pneumophila; identical to SEQ ID NO: 1368

SEQ ID NO: 1505 - protein, 482 aa, Legionella pneumophila; identical to SEQ ID NO: 1373

SEQ ID NO: 1506 - protein, 1128 aa, Legionella pneumophila; identical to SEQ ID NO: 1374

SEQ ID NO: 1507 - protein, 636 aa, Legionella pneumophila; identical to SEQ ID NO: 1371

SEQ ID NO: 1508 - protein, 234 aa, Legionella pneumophila; identical to SEQ ID NO: 1368

SEQ ID NO: 1509 - protein, 482 aa, Legionella pneumophila; identical to SEQ ID NO: 1373

SEQ ID NO: 1510 - protein, 1128 aa, Legionella pneumophila; identical to SEQ ID NO: 1374

SEQ ID NO: 1511 - protein, 636 aa, Legionella pneumophila; identical to SEQ ID NO: 1371

SEQ ID NO: 1512 - protein, 234 aa, Legionella pneumophila; identical to SEQ ID NO: 1368

SEQ ID NO: 1513 - protein, 482 aa, Legionella pneumophila; identical to SEQ ID NO: 1373

SEQ ID NO: 1514 - protein, 1128 aa, Legionella pneumophila; identical to SEQ ID NO: 1374

SEQ ID NO: 1515 - protein, 636 aa, Legionella pneumophila; identical to SEQ ID NO: 1371

SEQ ID NO: 1516 - protein, 234 aa, Legionella pneumophila; identical to SEQ ID NO: 1368

SEQ ID NO: 1517 - protein, 482 aa, Legionella pneumophila; identical to SEQ ID NO: 1373

SEQ ID NO: 1518 - protein, 1128 aa, Legionella pneumophila; identical to SEQ ID NO: 1374

SEQ ID NO: 1519 - protein, 636 aa, Legionella pneumophila; identical to SEQ ID NO: 1371

SEQ ID NO: 1520 - protein, 234 aa, Legionella pneumophila; identical to SEQ ID NO: 1368

SEQ ID NO: 1521 - protein, 482 aa, Legionella pneumophila; identical to SEQ ID NO: 1373

SEQ ID NO: 1522 - protein, 1128 aa, Legionella pneumophila; identical to SEQ ID NO: 1374

SEQ ID NO: 1523 - protein, 636 aa, Legionella pneumophila; identical to SEQ ID NO: 1371

SEQ ID NO: 1524 - protein, 234 aa, Legionella pneumophila; identical to SEQ ID NO: 1368

SEQ ID NO: 1525 - protein, 482 aa, Legionella pneumophila; identical to SEQ ID NO: 1373

SEQ ID NO: 1526 - protein, 1128 aa, Legionella pneumophila; identical to SEQ ID NO: 1374

SEQ ID NO: 1527 - protein, 636 aa, Legionella pneumophila; identical to SEQ ID NO: 1371

SEQ ID NO: 1528 - protein, 234 aa, Legionella pneumophila; identical to SEQ ID NO: 1368

SEQ ID NO: 1529 - protein, 482 aa, Legionella pneumophila; identical to SEQ ID NO: 1373

SEQ ID NO: 1530 - protein, 1128 aa, Legionella pneumophila; identical to SEQ ID NO: 1374

SEQ ID NO: 1531 - protein, 636 aa, Legionella pneumophila; identical to SEQ ID NO: 1371

SEQ ID NO: 1532 - protein, 234 aa, Legionella pneumophila; identical to SEQ ID NO: 1368

SEQ ID NO: 1533 - protein, 482 aa, Legionella pneumophila; identical to SEQ ID NO: 1373

SEQ ID NO: 1534 - protein, 1128 aa, Legionella pneumophila; identical to SEQ ID NO: 1374

SEQ ID NO: 1535 - protein, 636 aa, Legionella pneumophila; identical to SEQ ID NO: 1371

SEQ ID NO: 1536 - protein, 234 aa, Legionella pneumophila; identical to SEQ ID NO: 1368

SEQ ID NO: 1537 - protein, 482 aa, Legionella pneumophila; identical to SEQ ID NO: 1373

SEQ ID NO: 1538 - protein, 1128 aa, Legionella pneumophila; identical to SEQ ID NO: 1374

SEQ ID NO: 1539 - protein, 636 aa, Legionella pneumophila; identical to SEQ ID NO: 1371

SEQ ID NO: 1540 - protein, 234 aa, Legionella pneumophila; identical to SEQ ID NO: 1368

SEQ ID NO: 1541 - protein, 482 aa, Legionella pneumophila; identical to SEQ ID NO: 1373

SEQ ID NO: 1542 - protein, 1128 aa, Legionella pneumophila; identical to SEQ ID NO: 1374

SEQ ID NO: 1543 - protein, 636 aa, Legionella pneumophila; identical to SEQ ID NO: 1371

SEQ ID NO: 1544 - protein, 234 aa, Legionella pneumophila; identical to SEQ ID NO: 1368

SEQ ID NO: 1545 - protein, 482 aa, Legionella pneumophila; identical to SEQ ID NO: 1373

SEQ ID NO: 1546 - protein, 1128 aa, Legionella pneumophila; identical to SEQ ID NO: 1374

SEQ ID NO: 1547 - protein, 636 aa, Legionella pneumophila; identical to SEQ ID NO: 1371

SEQ ID NO: 1548 - protein, 234 aa, Legionella pneumophila; identical to SEQ ID NO: 1368

SEQ ID NO: 1549 - protein, 482 aa, Legionella pneumophila; identical to SEQ ID NO: 1373

SEQ ID NO: 1550 - protein, 1128 aa, Legionella pneumophila; identical to SEQ ID NO: 1374

SEQ ID NO: 1551 - protein, 636 aa, Legionella pneumophila; identical to SEQ ID NO: 1371

SEQ ID NO: 1552 - protein, 234 aa, Legionella pneumophila; identical to SEQ ID NO: 1368

SEQ ID NO: 1553 - protein, 482 aa, Legionella pneumophila; identical to SEQ ID NO: 1373

SEQ ID NO: 1554 - protein, 1128 aa, Legionella pneumophila; identical to SEQ ID NO: 1374

SEQ ID NO: 1555 - protein, 636 aa, Legionella pneumophila; identical to SEQ ID NO: 1371

SEQ ID NO: 1556 - protein, 234 aa, Legionella pneumophila; identical to SEQ ID NO: 1368

SEQ ID NO: 1557 - protein, 482 aa, Legionella pneumophila; identical to SEQ ID NO: 1373

SEQ ID NO: 1558 - protein, 1128 aa, Legionella pneumophila; identical to SEQ ID NO: 1374

SEQ ID NO: 1559 - protein, 636 aa, Legionella pneumophila; identical to SEQ ID NO: 1371

SEQ ID NO: 1560 - protein, 234 aa, Legionella pneumophila; identical to SEQ ID NO: 1368

SEQ ID NO: 1561 - protein, 482 aa, Legionella pneumophila; identical to SEQ ID NO: 1373

SEQ ID NO: 1562 - protein, 1128 aa, Legionella pneumophila; identical to SEQ ID NO: 1374

SEQ ID NO: 1563 - protein, 636 aa, Legionella pneumophila; identical to SEQ ID NO: 1371

SEQ ID NO: 1564 - protein, 234 aa, Legionella pneumophila; identical to SEQ ID NO: 1368

SEQ ID NO: 1565 - protein, 482 aa, Legionella pneumophila; identical to SEQ ID NO: 1373

SEQ ID NO: 1566 - protein, 1128 aa, Legionella pneumophila; identical to SEQ ID NO: 1374

SEQ ID NO: 1567 - protein, 636 aa, Legionella pneumophila; identical to SEQ ID NO: 1371

SEQ ID NO: 1568 - protein, 234 aa, Legionella pneumophila; identical to SEQ ID NO: 1368

SEQ ID NO: 1569 - protein, 482 aa, Legionella pneumophila; identical to SEQ ID NO: 1373

SEQ ID NO: 1570 - protein, 1128 aa, Legionella pneumophila; identical to SEQ ID NO: 1374

SEQ ID NO: 1571 - protein, 636 aa, Legionella pneumophila; identical to SEQ ID NO: 1371

SEQ ID NO: 1572 - protein, 234 aa, Legionella pneumophila; identical to SEQ ID NO: 1368

SEQ ID NO: 1573 - protein, 482 aa, Legionella pneumophila; identical to SEQ ID NO: 1373

SEQ ID NO: 1574 - protein, 1128 aa, Legionella pneumophila; identical to SEQ ID NO: 1374

SEQ ID NO: 1575 - protein, 636 aa, Legionella pneumophila; identical to SEQ ID NO: 1371

SEQ ID NO: 1576 - protein, 234 aa, Legionella pneumophila; identical to SEQ ID NO: 1368

SEQ ID NO: 1577 - protein, 482 aa, Legionella pneumophila; identical to SEQ ID NO: 1373

SEQ ID NO: 1578 - protein, 1128 aa, Legionella pneumophila; identical to SEQ ID NO: 1374

SEQ ID NO: 1579 - protein, 636 aa, Legionella pneumophila; identical to SEQ ID NO: 1371

SEQ ID NO: 1580 - protein, 234 aa, Legionella pneumophila; identical to SEQ ID NO: 1368

SEQ ID NO: 1581 - protein, 482 aa, Legionella pneumophila; identical to SEQ ID NO: 1373

SEQ ID NO: 1582 - protein, 1128 aa, Legionella pneumophila; identical to SEQ ID NO: 1374

SEQ ID NO: 1583 - protein, 636 aa, Legionella pneumophila; identical to SEQ ID NO: 1371

SEQ ID NO: 1584 - protein, 234 aa, Legionella pneumophila; identical to SEQ ID NO: 1368

SEQ ID NO: 1585 - protein, 482 aa, Legionella pneumophila; identical to SEQ ID NO: 1373

SEQ ID NO: 1586 - protein, 1128 aa, Legionella pneumophila; identical to SEQ ID NO: 1374

SEQ ID NO: 1587 - protein, 636 aa, Legionella pneumophila; identical to SEQ ID NO: 1371

SEQ ID NO: 1588 - protein, 234 aa, Legionella pneumophila; identical to SEQ ID NO: 1368

SEQ ID NO: 1589 - protein, 482 aa, Legionella pneumophila; identical to SEQ ID NO: 1373

SEQ ID NO: 1590 - protein, 1128 aa, Legionella pneumophila; identical to SEQ ID NO: 1374

SEQ ID NO: 1591 - protein, 636 aa, Legionella pneumophila; identical to SEQ ID NO: 1371

SEQ ID NO: 1592 - protein, 234 aa, Legionella pneumophila; identical to SEQ ID NO: 1368

SEQ ID NO: 1593 - protein, 482 aa, Legionella pneumophila; identical to SEQ ID NO: 1373

SEQ ID NO: 1594 - protein, 1128 aa, Legionella pneumophila; identical to SEQ ID NO: 1374

SEQ ID NO: 1595 - protein, 636 aa, Legionella pneumophila; identical to SEQ ID NO: 1371

SEQ ID NO: 1596 - protein, 234 aa, Legionella pneumophila; identical to SEQ ID NO: 1368

SEQ ID NO: 1597 - protein, 482 aa, Legionella pneumophila; identical to SEQ ID NO: 1373

SEQ ID NO: 1598 - protein, 1128 aa, Legionella pneumophila; identical to SEQ ID NO: 1374

SEQ ID NO: 1599 - protein, 636 aa, Legionella pneumophila; identical to SEQ ID NO: 1371

SEQ ID NO: 1600 - protein, 234 aa, Legionella pneumophila; identical to SEQ ID NO: 1368

SEQ ID NO: 1601 - protein, 482 aa, Legionella pneumophila; identical to SEQ ID NO: 1373

SEQ ID NO: 1602 - protein, 1128 aa, Legionella pneumophila; identical to SEQ ID NO: 1374

SEQ ID NO: 1603 - protein, 636 aa, Legionella pneumophila; identical to SEQ ID NO: 1371

SEQ ID NO: 1604 - protein, 234 aa, Legionella pneumophila; identical to SEQ ID NO: 1368

SEQ ID NO: 1605 - protein, 482 aa, Legionella pneumophila; identical to SEQ ID NO: 1373

SEQ ID NO: 1606 - protein, 1128 aa, Legionella pneumophila; identical to SEQ ID NO: 1374

SEQ ID NO: 1607 - protein, 636 aa, Legionella pneumophila; identical to SEQ ID NO: 1371

SEQ ID NO: 1608 - protein, 234 aa, Legionella pneumophila; identical to SEQ ID NO: 1368

SEQ ID NO: 1609 - protein, 482 aa, Legionella pneumophila; identical to SEQ ID NO: 1373

SEQ ID NO: 1610 - protein, 1128 aa, Legionella pneumophila; identical to SEQ ID NO: 1374

SEQ ID NO: 1611 - protein, 636 aa, Legionella pneumophila; identical to SEQ ID NO: 1371

SEQ ID NO: 1612 - protein, 234 aa, Legionella pneumophila; identical to SEQ ID NO: 1368

SEQ ID NO: 1613 - protein, 482 aa, Legionella pneumophila; identical to SEQ ID NO: 1373

SEQ ID NO: 1614 - protein, 1128 aa, Legionella pneumophila; identical to SEQ ID NO: 1374

SEQ ID NO: 1615 - protein, 636 aa, Legionella pneumophila; identical to SEQ ID NO: 1371

SEQ ID NO: 1616 - protein, 234 aa, Legionella pneumophila; identical to SEQ ID NO: 1368

SEQ ID NO: 1617 - protein, 482 aa, Legionella pneumophila; identical to SEQ ID NO: 1373

SEQ ID NO: 1618 - protein, 1128 aa, Legionella pneumophila; identical to SEQ ID NO: 1374

SEQ ID NO: 1619 - protein, 636 aa, Legionella pneumophila; identical to SEQ ID NO: 1371

SEQ ID NO: 1620 - protein, 234 aa, Legionella pneumophila; identical to SEQ ID NO: 1368

SEQ ID NO: 1621 - protein, 482 aa, Legionella pneumophila; identical to SEQ ID NO: 1373

SEQ ID NO: 1622 - protein, 1128 aa, Legionella pneumophila; identical to SEQ ID NO: 1374

SEQ ID NO: 1623 - protein, 636 aa, Legionella pneumophila; identical to SEQ ID NO: 1371

SEQ ID NO: 1624 - protein, 234 aa, Legionella pneumophila; identical to SEQ ID NO: 1368

SEQ ID NO: 1625 - protein, 482 aa, Legionella pneumophila; identical to SEQ ID NO: 1373

SEQ ID NO: 1626 - protein, 1128 aa, Legionella pneumophila; identical to SEQ ID NO: 1374

SEQ ID NO: 1627 - protein, 636 aa, Legionella pneumophila; identical to SEQ ID NO: 1371

SEQ ID NO: 1628 - protein, 234 aa, Legionella pneumophila; identical to SEQ ID NO: 1368

SEQ ID NO: 1629 - protein, 482 aa, Legionella pneumophila; identical to SEQ ID NO: 1373

SEQ ID NO: 1630 - protein, 1128 aa, Legionella pneumophila; identical to SEQ ID NO: 1374

SEQ ID NO: 1631 - protein, 636 aa, Legionella pneumophila; identical to SEQ ID NO: 1371

SEQ ID NO: 1632 - protein, 234 aa, Legionella pneumophila; identical to SEQ ID NO: 1368

SEQ ID NO: 1633 - protein, 482 aa, Legionella pneumophila; identical to SEQ ID NO: 1373

SEQ ID NO: 1634 - protein, 1128 aa, Legionella pneumophila; identical to SEQ ID NO: 1374

SEQ ID NO: 1635 - protein, 636 aa, Legionella pneumophila; identical to SEQ ID NO: 1371

SEQ ID NO: 1636 - protein, 234 aa, Legionella pneumophila; identical to SEQ ID NO: 1368

SEQ ID NO: 1637 - protein, 482 aa, Legionella pneumophila; identical to SEQ ID NO: 1373

SEQ ID NO: 1638 - protein, 1128 aa, Legionella pneumophila; identical to SEQ ID NO: 1374

SEQ ID NO: 1639 - protein, 636 aa, Legionella pneumophila; identical to SEQ ID NO: 1371

SEQ ID NO: 1640 - protein, 234 aa, Legionella pneumophila; identical to SEQ ID NO: 1368

SEQ ID NO: 1641 - protein, 482 aa, Legionella pneumophila; identical to SEQ ID NO: 1373

SEQ ID NO: 1642 - protein, 1128 aa, Legionella pneumophila; identical to SEQ ID NO: 1374

SEQ ID NO: 1643 - protein, 636 aa, Legionella pneumophila; identical to SEQ ID NO: 1371

SEQ ID NO: 1644 - protein, 234 aa, Legionella pneumophila; identical to SEQ ID NO: 1368

SEQ ID NO: 1645 - protein, 482 aa, Legionella pneumophila; identical to SEQ ID NO: 1373

SEQ ID NO: 1646 - protein, 1128 aa, Legionella pneumophila; identical to SEQ ID NO: 1374

SEQ ID NO: 1647 - protein, 636 aa, Legionella pneumophila; identical to SEQ ID NO: 1371

SEQ ID NO: 1648 - protein, 234 aa, Legionella pneumophila; identical to SEQ ID NO: 1368

SEQ ID NO: 1649 - protein, 482 aa, Legionella pneumophila; identical to SEQ ID NO: 1373

SEQ ID NO: 1650 - protein, 1128 aa, Legionella pneumophila; identical to SEQ ID NO: 1374

SEQ ID NO: 1651 - protein, 636 aa, Legionella pneumophila; identical to SEQ ID NO: 1371

SEQ ID NO: 1652 - protein, 234 aa, Legionella pneumophila; identical to SEQ ID NO: 1368

SEQ ID NO: 1653 - protein, 482 aa, Legionella pneumophila; identical to SEQ ID NO: 1373

SEQ ID NO: 1654 - protein, 1128 aa, Legionella pneumophila; identical to SEQ ID NO: 1374

SEQ ID NO: 1655 - protein, 636 aa, Legionella pneumophila; identical to SEQ ID NO: 1371

SEQ ID NO: 1656 - protein, 234 aa, Legionella pneumophila; identical to SEQ ID NO: 1368

SEQ ID NO: 1657 - protein, 482 aa, Legionella pneumophila; identical to SEQ ID NO: 1373

SEQ ID NO: 1658 - protein, 1128 aa, Legionella pneumophila; identical to SEQ ID NO: 1374

SEQ ID NO: 1659 - protein, 636 aa, Legionella pneumophila; identical to SEQ ID NO: 1371

SEQ ID NO: 1660 - protein, 234 aa, Legionella pneumophila; identical to SEQ ID NO: 1368

SEQ ID NO: 1661 - protein, 482 aa, Legionella pneumophila; identical to SEQ ID NO: 1373

SEQ ID NO: 1662 - protein, 1128 aa, Legionella pneumophila; identical to SEQ ID NO: 1374

SEQ ID NO: 1663 - protein, 636 aa, Legionella pneumophila; identical to SEQ ID NO: 1371

SEQ ID NO: 1664 - protein, 234 aa, Legionella pneumophila; identical to SEQ ID NO: 1368

SEQ ID NO: 1665 - protein, 482 aa, Legionella pneumophila; identical to SEQ ID NO: 1373

SEQ ID NO: 1666 - protein, 1128 aa, Legionella pneumophila; identical to SEQ ID NO: 1374

SEQ ID NO: 1667 - protein, 636 aa, Legionella pneumophila; identical to SEQ ID NO: 1371

SEQ ID NO: 1668 - protein, 234 aa, Legionella pneumophila; identical to SEQ ID NO: 1368

SEQ ID NO: 1669 - protein, 482 aa, Legionella pneumophila; identical to SEQ ID NO: 1373

SEQ ID NO: 1670 - protein, 1128 aa, Legionella pneumophila; identical to SEQ ID NO: 1374

SEQ ID NO: 1671 - protein, 636 aa, Legionella pneumophila; identical to SEQ ID NO: 1371

SEQ ID NO: 1672 - protein, 234 aa, Legionella pneumophila; identical to SEQ ID NO: 1368

SEQ ID NO: 1673 - protein, 482 aa, Legionella pneumophila; identical to SEQ ID NO: 1373

SEQ ID NO: 1674 - protein, 1128 aa, Legionella pneumophila; identical to SEQ ID NO: 1374

SEQ ID NO: 1675 - protein, 636 aa, Legionella pneumophila; identical to SEQ ID NO: 1371

SEQ ID NO: 1676 - protein, 234 aa, Legionella pneumophila; identical to SEQ ID NO: 1368

SEQ ID NO: 1677 - protein, 482 aa, Legionella pneumophila; identical to SEQ ID NO: 1373

SEQ ID NO: 1678 - protein, 1128 aa, Legionella pneumophila; identical to SEQ ID NO: 1374

SEQ ID NO: 1679 - protein, 636 aa, Legionella pneumophila; identical to SEQ ID NO: 1371

SEQ ID NO: 1680 - protein, 234 aa, Legionella pneumophila; identical to SEQ ID NO: 1368

SEQ ID NO: 1681 - protein, 482 aa, Legionella pneumophila; identical to SEQ ID NO: 1373

SEQ ID NO: 1682 - protein, 1128 aa, Legionella pneumophila; identical to SEQ ID NO: 1374

SEQ ID NO: 1683 - protein, 636 aa, Legionella pneumophila; identical to SEQ ID NO: 1371

SEQ ID NO: 1684 - protein, 234 aa, Legionella pneumophila; identical to SEQ ID NO: 1368

SEQ ID NO: 1685 - protein, 482 aa, Legionella pneumophila; identical to SEQ ID NO: 1373

SEQ ID NO: 1686 - protein, 1128 aa, Legionella pneumophila; identical to SEQ ID NO: 1374

SEQ ID NO: 1687 - protein, 636 aa, Legionella pneumophila; identical to SEQ ID NO: 1371

SEQ ID NO: 1688 - protein, 234 aa, Legionella pneumophila; identical to SEQ ID NO: 1368

SEQ ID NO: 1689 - protein, 482 aa, Legionella pneumophila; identical to SEQ ID NO: 1373

SEQ ID NO: 1690 - protein, 1128 aa, Legionella pneumophila; identical to SEQ ID NO: 1374

SEQ ID NO: 1691 - protein, 636 aa, Legionella pneumophila; identical to SEQ ID NO: 1371

SEQ ID NO: 1692 - protein, 234 aa, Legionella pneumophila; identical to SEQ ID NO: 1368

SEQ ID NO: 1693 - protein, 482 aa, Legionella pneumophila; identical to SEQ ID NO: 1373

SEQ ID NO: 1694 - protein, 1128 aa, Legionella pneumophila; identical to SEQ ID NO: 1374

SEQ ID NO: 1695 - protein, 636 aa, Legionella pneumophila; identical to SEQ ID NO: 1371

SEQ ID NO: 1696 - protein, 234 aa, Legionella pneumophila; identical to SEQ ID NO: 1368

SEQ ID NO: 1697 - protein, 482 aa, Legionella pneumophila; identical to SEQ ID NO: 1373

SEQ ID NO: 1698 - protein, 1128 aa, Legionella pneumophila; identical to SEQ ID NO: 1374

SEQ ID NO: 1699 - protein, 636 aa, Legionella pneumophila; identical to SEQ ID NO: 1371

SEQ ID NO: 1700 - protein, 234 aa, Legionella pneumophila; identical to SEQ ID NO: 1368

SEQ ID NO: 1701 - protein, 482 aa, Legionella pneumophila; identical to SEQ ID NO: 1373

SEQ ID NO: 1702 - protein, 1128 aa, Legionella pneumophila; identical to SEQ ID NO: 1374

SEQ ID NO: 1703 - protein, 636 aa, Legionella pneumophila; identical to SEQ ID NO: 1371

SEQ ID NO: 1704 - protein, 234 aa, Legionella pneumophila; identical to SEQ ID NO: 1368

SEQ ID NO: 1705 - protein, 482 aa, Legionella pneumophila; identical to SEQ ID NO: 1373

SEQ ID NO: 1706 - protein, 1128 aa, Legionella pneumophila; identical to SEQ ID NO: 1374

SEQ ID NO: 1707 - protein, 636 aa, Legionella pneumophila; identical to SEQ ID NO: 1371

SEQ ID NO: 1708 - protein, 234 aa, Legionella pneumophila; identical to SEQ ID NO: 1368

SEQ ID NO: 1709 - protein, 482 aa, Legionella pneumophila; identical to SEQ ID NO: 1373

SEQ ID NO: 1710 - protein, 1128 aa, Legionella pneumophila; identical to SEQ ID NO: 1374

SEQ ID NO: 1711 - protein, 636 aa, Legionella pneumophila; identical to SEQ ID NO: 1371

SEQ ID NO: 1712 - protein, 234 aa, Legionella pneumophila; identical to SEQ ID NO: 1368

SEQ ID NO: 1713 - protein, 482 aa, Legionella pneumophila; identical to SEQ ID NO: 1373

SEQ ID NO: 1714 - protein, 1128 aa, Legionella pneumophila; identical to SEQ ID NO: 1374

SEQ ID NO: 1715 - protein, 636 aa, Legionella pneumophila; identical to SEQ ID NO: 1371

SEQ ID NO: 1716 - protein, 234 aa, Legionella pneumophila; identical to SEQ ID NO: 1368

SEQ ID NO: 1717 - protein, 482 aa, Legionella pneumophila; identical to SEQ ID NO: 1373

SEQ ID NO: 1718 - protein, 1128 aa, Legionella pneumophila; identical to SEQ ID NO: 1374

SEQ ID NO: 1719 - protein, 636 aa, Legionella pneumophila; identical to SEQ ID NO: 1371

SEQ ID NO: 1720 - protein, 234 aa, Legionella pneumophila; identical to SEQ ID NO: 1368

SEQ ID NO: 1721 - protein, 482 aa, Legionella pneumophila; identical to SEQ ID NO: 1373

SEQ ID NO: 1722 - protein, 1128 aa, Legionella pneumophila; identical to SEQ ID NO: 1374

SEQ ID NO: 1723 - protein, 636 aa, Legionella pneumophila; identical to SEQ ID NO: 1371

SEQ ID NO: 1724 - protein, 234 aa, Legionella pneumophila; identical to SEQ ID NO: 1368

SEQ ID NO: 1725 - protein, 482 aa, Legionella pneumophila; identical to SEQ ID NO: 1373

SEQ ID NO: 1726 - protein, 1128 aa, Legionella pneumophila; identical to SEQ ID NO: 1374

SEQ ID NO: 1727 - protein, 636 aa, Legionella pneumophila; identical to SEQ ID NO: 1371

SEQ ID NO: 1728 - protein, 234 aa, Legionella pneumophila; identical to SEQ ID NO: 1368

SEQ ID NO: 1729 - protein, 482 aa, Legionella pneumophila; identical to SEQ ID NO: 1373

SEQ ID NO: 1730 - protein, 1128 aa, Legionella pneumophila; identical to SEQ ID NO: 1374

SEQ ID NO: 1731 - protein, 636 aa, Legionella pneumophila; identical to SEQ ID NO: 1371

SEQ ID NO: 1732 - protein, 234 aa, Legionella pneumophila; identical to SEQ ID NO: 1368

SEQ ID NO: 1733 - protein, 482 aa, Legionella pneumophila; identical to SEQ ID NO: 1373

SEQ ID NO: 1734 - protein, 1128 aa, Legionella pneumophila; identical to SEQ ID NO: 1374

SEQ ID NO: 1735 - protein, 636 aa, Legionella pneumophila; identical to SEQ ID NO: 1371

SEQ ID NO: 1736 - protein, 234 aa, Legionella pneumophila; identical to SEQ ID NO: 1368

SEQ ID NO: 1737 - protein, 482 aa, Legionella pneumophila; identical to SEQ ID NO: 1373

SEQ ID NO: 1738 - protein, 1128 aa, Legionella pneumophila; identical to SEQ ID NO: 1374

SEQ ID NO: 1739 - protein, 636 aa, Legionella pneumophila; identical to SEQ ID NO: 1371

SEQ ID NO: 1740 - protein, 234 aa, Legionella pneumophila; identical to SEQ ID NO: 1368

SEQ ID NO: 1741 - protein, 482 aa, Legionella pneumophila; identical to SEQ ID NO: 1373

SEQ ID NO: 1742 - protein, 1128 aa, Legionella pneumophila; identical to SEQ ID NO: 1374

SEQ ID NO: 1743 - protein, 636 aa, Legionella pneumophila; identical to SEQ ID NO: 1371

SEQ ID NO: 1744 - protein, 234 aa, Legionella pneumophila; identical to SEQ ID NO: 1368

SEQ ID NO: 1745 - protein, 482 aa, Legionella pneumophila; identical to SEQ ID NO: 1373

SEQ ID NO: 1746 - protein, 1128 aa, Legionella pneumophila; identical to SEQ ID NO: 1374

SEQ ID NO: 1747 - protein, 636 aa, Legionella pneumophila; identical to SEQ ID NO: 1371

SEQ ID NO: 1748 - protein, 234 aa, Legionella pneumophila; identical to SEQ ID NO: 1368

SEQ ID NO: 1749 - protein, 482 aa, Legionella pneumophila; identical to SEQ ID NO: 1373

SEQ ID NO: 1750 - protein, 1128 aa, Legionella pneumophila; identical to SEQ ID NO: 1374

SEQ ID NO: 1751 - protein, 636 aa, Legionella pneumophila; identical to SEQ ID NO: 1371

SEQ ID NO: 1752 - protein, 234 aa, Legionella pneumophila; identical to SEQ ID NO: 1368

SEQ ID NO: 1753 - protein, 482 aa, Legionella pneumophila; identical to SEQ ID NO: 1373

SEQ ID NO: 1754 - protein, 1128 aa, Legionella pneumophila; identical to SEQ ID NO: 1374

SEQ ID NO: 1755 - protein, 636 aa, Legionella pneumophila; identical to SEQ ID NO: 1371

SEQ ID NO: 1756 - protein, 234 aa, Legionella pneumophila; identical to SEQ ID NO: 1368

SEQ ID NO: 1757 - protein, 482 aa, Legionella pneumophila; identical to SEQ ID NO: 1373

SEQ ID NO: 1758 - protein, 1128 aa, Legionella pneumophila; identical to SEQ ID NO: 1374

SEQ ID NO: 1759 - protein, 636 aa, Legionella pneumophila; identical to SEQ ID NO: 1371

SEQ ID NO: 1760 - protein, 234 aa, Legionella pneumophila; identical to SEQ ID NO: 1368

SEQ ID NO: 1761 - protein, 482 aa, Legionella pneumophila; identical to SEQ ID NO: 1373

SEQ ID NO: 1762 - protein, 1128 aa, Legionella pneumophila; identical to SEQ ID NO: 1374

SEQ ID NO: 1763 - protein, 636 aa, Legionella pneumophila; identical to SEQ ID NO: 1371

SEQ ID NO: 1764 - protein, 234 aa, Legionella pneumophila; identical to SEQ ID NO: 1368

SEQ ID NO: 1765 - protein, 482 aa, Legionella pneumophila; identical to SEQ ID NO: 1373

SEQ ID NO: 1766 - protein, 1128 aa, Legionella pneumophila; identical to SEQ ID NO: 1374

SEQ ID NO: 1767 - protein, 634 aa, Legionella jordanis
MLNAETFFYFITQDSTVWFFVLLIVIVALFPLKQSFWNIGKVNKDLKIASKVFFQIESKKDFYNNFESISTKISNLRWLKAIWNDFISSTYYLTYNETDNHSHRAVYLSHRPYEYFTKQSILGQVLNINQFYAYPNYLIGIGLTFTFIGLAAALHIAQQGLAHGEGQAALSELLKVASVKFFSSIAGISCSLFISFIQKKQTKEFHKKLNNFCSLIENCTEYKPTEKLLFESIQEQTKQTFALQSMANDISRGIGDVLNNQLPVSVAKALEPLAHEIRELAHKFSGSNENALEKVLDEFIEQLRKSSADDMQGLVNGVNTLKVSLEKLVDNIELMSTNFGSNTKESTDRLMRSLENFANTFVPVQNGIAEFGKTLNSLESIAESIQNASGNISGAASINTQSMSNLAGTVNQITENIAPIQDLLGNLSLSLQKINESSLKLDSAGDSISLAVNGFNSSAQNIENASSKFNDNITLIQTVIDGLNNTTTNLEKSSSDIRQSVLPLSQTSEQIQKALKVTQETELRLIESQKQMGTLLNSLDSFTEKMPTILSQYEDRFTKVDHDLANAFSELAKGSEEFKNSIIHFIQSFDSQFEKALSHLSAAIHELQEEREETYTNFIEQKSNGQVDADTRIT

SEQ ID NO: 1768 - protein, 234 aa, Legionella jordanis
MQTQELHDESYFASFTDMLVGIIFIFIILLMIVANNYQSATKKVTEINESRDKILKKIEHSLKEEGVAVTVDLEQGVLRLPESILFGIDQYNLNENGKVALSKLANVLEKYLPCMAITDKKYKYHCGSLNLASQDGLDAVFIEGHTDVTGSSDHNWYLSTRRAISIFKELTEAKPFLNEGVKNINGIPILNVSGYEARRPVDPNRLELNRRIELRFIMRSPTPEDLEKLHRAIR

SEQ ID NO: 1769 - protein, 482 aa, Legionella jordanis
MQSDNSPSLRKEISQFYHTIKLKSQHLSLQEPQVNRALKIIEKKFDSLGSIPTSQNLEKLSITFYKALEAKSFDNISNKEWKLVPFILWTTPQVNSFALGSDLNFLQKYLNWLSQNLTASNLKKLIYCFLKDFSLREQYLAVFKKLSCFITEKIYSSMNPSLSKWYERNQKLNIFSPNFDLSKVISLYLNECNLDIYKFFSLLGLQGEISIRGYSEAIGLNLLKILEREPSDKLINAVINYFFSKDSVRFSNHRVNLIQSLLTPWLSNNSTNSSESQKKVQDLLIKHFKDPRIIAYRRDGWRSISEQYLKVIYQWLVGESIEQFFEIVDQMALDRQWKYRKAFWMAYYKYGFLDEAWFVLGPDAKYYAETYFENKLSFGAMDSGCKSNHSVLILKIGNIVLAEWSHEGKCRAWRDEDPKAPERYKNYYVGKNFKEESLKIVPHYNSDGIGHLSSNTYSWQQNLSDFIYRNTGLKVYHSDFWI

SEQ ID NO: 1770 - protein, 1125 aa, Legionella jordanis
MIFGFNIKKRSKQTLIYDEQFINNQWVLLFKLQQKNSLIPLSEWHKCDHKGAQWLLEFIEANNLQQQPSVDTLIISSKDFITSIKEQELFIQNLLELPPLFDGGIHIISEGLIAKNNYKIKYHWVNSYSRPIIQSKEWGIFLQIGENKFLLPWYAWKIKEEIKLLQTQLVSSSSIQKRLELIEHFSSIRHLLPEEKTWTLTDDGSISKITLFFANAFKIQAVPEKDSFRIEPILLRKKELENLDPHFENILPPIDQEAFIRSFNNSLQLNQYYGLGPGRYLLIHPQVNKALETVHKIQHATKEEKLEFLKNPKAALAEDLEGIINEDELDQIFSDRVIGIGDWNAKIIPWIQLPPNEWLPGGELPNVPFGIDINGDKHQFANKNEVSDLVDKLKNAQKDGYQFYQYGEFSIPVNNENISKLECFLPKKPNTVIEKEDKLKTLTGITDKINQTPVMLVKENLECVEFNVFRHPRVIIPHSNAIPNNVKSEPKPHQIEAFKWLQNHYIAGSRGVLLADDMGLGKTFQSLMFLAWLHEAMKLKEITNKPLLIVAPTGLLKNWEDEINIHLSSGLGNLLRAYGSTLKNLKSGRYLDVTQLKGSDLILTTFDTLTRYQTSFSVINFAVVVFDEIQKLKNPGTQNYSAACSLHCDFWLGMTGTPVENRLCDLWAITDVLQPGMLGSIKEFSTKYEKSILTLGENEQNEIIKELQDGLTKASEKAPPFMLRRMKSSILPGLPKKNIHVKTVLMPNIQANAYQKIIQEVAQQEESGGMLKALHLLRACSLHPDSKRQRQYNSYDEFILQSARVKECFQILDSIYKNKEKALIFIEYNEWHHPAFLPHIIKTRYNLKKLPMAINGQINSKSRQDIVDKFQNERGIFDVMLLSPRAGGVGLTLTAANHIIHLTRWWNPAVEDQANDRIYRIGQNSDVHIYYILALHPEYESTCFDLNLHELLEKKRRLSQQIIIAPPMENDTIDELYAKTFQKNQKIKLPIEESYIHLNGKTYEDLIFQDMKKIAPKFGYIARYTQQSHDKGADIIIDTYDGETKAIVQCKFVDNPTKAPLNLTSDLDRASPYYSNSHSNPLLIGFTNAQKIKKADRTWENNANNRKIVYGKEGLDASNLFDFLD

SEQ ID NO: 1771 - protein, 686 aa, Acinetobacter baumannii ABNIH19
MLAFAEFLQDYFIIPVGMLIFVLWIGFKFYSKYIKPAKKLSGQLSVLINALKGMEENSSLNKHSLDAKFENDTPLKHAWLNYKNSFHDIYETLDGEDVLVSSRATVSSDVFFSQAVIVDTPLRVEFYKHLPGIITGVGIIATFAGLLFGLLAFDPAGDPAKVQDSLGLLLGGVSEAFMASALAIGTAMIITWREKSWLRQCYEQLETLTTEIDKLFETDSTGEEYLAKLLKSSQANETNARQLKDSLVNDLKVMMTNLVEENKKNQIAFAAQLSESYAKSSQDMATQIGQSITDTLQAPLDKIASSVQQVSSDNGSAVQELMTDVLTAFMNKLESTFGSQMTGMTEMMTQSVSAMKEMQLGFSQLLTDMKINSETSTKTLEIQMSKMIEDIQQKQNEMSDQMNLMVDHLSQGAAKIGEQGQHAIEQLNGKVSELMGNLGGTMSELMSDVTKQRMEQDRVILENQQKLHEQSSTLIDNLGTEIKDLIAHSQNAVQVYKENIQKLSQVTTDSITGMNNGAEKMRLASEQFNTAGSSLITVTDKTSQLIAEVSTTSTHLTSASSNLIALLKDYKDSQESVKQAISTLDGLIKQAQSEAGMSTKMLEDMNHMTNALNQVKKEMQDYLEQVSDVLVKSFVSFDSSMETSLNHSLRDFDNTLDQAVKRLVDSIEGLGSFVEDLEDLVQQKKN

SEQ ID NO: 1772 - protein, 243 aa, Acinetobacter baumannii ABNIH19
MLGNRYSKKPRSKDEGEKPFWISFADLMTALMTLFLVVMAVSLMVVTKKINEATQAENQRSSEILDICTSIQNDAALKNKIINVDCKDNRINFGEAGRFGHNDYRLNAAGVEALNTLVPIVLNAANSENGKKWFKQIVIEGFTDTDGSYLYNLNLSLRRSEWVMCNLLDPKFSHGLSLSDAQKNQVKQLFLAGGVSFNSAKDSKEASRRVELRMQFYGLKEKENAEPQPHFVSAPVETCQLTR

SEQ ID NO: 1773 - protein, 456 aa, Acinetobacter baumannii ABNIH19
MSIANLKRRLEEKISVFSEPTHIQTKFVRPQRLMKTLSIIEHKLDVLENEQPLEEKIIKSVLKLEQHGFDGLTKRDWKNLAWSLSKKLPNYEEKLLFTPVGVRLIDYFNQLGIDQLQFVYFPLLYSYFSFQAKELEKQPDSWVQLRNILNTNKSLVFKNSTRLKKWMTTLIDNSEVLTTEPTKKFVREFLQDNDENRVANQLESLRIASGSWFWDDLIRSAIKSIKTMKEDEYFQIIPRFLVLLEKNKIYTTTILAALLERYASTSQREKVHEVLKHLALDQWGNPQYESSAGWNNVNADTKKMVIQWFVRADLEAFFKLFNQNADIQRFNYWMRFIDQINFSQIFLGSNALNSRRDEHLKFRRLNRGRLKELAGSTTSTNNAFLLKIDNIYIVDFSETGNACYFYNRLPYKDYVGKIEIKTLRNQEICIDRQTRNGNWQPRFDNALARLGIFSKR

SEQ ID NO: 1774 - protein, 686 aa, Acinetobacter baumannii ABNIH6; identical to SEQ ID NO: 1771

SEQ ID NO: 1775 - protein, 243 aa, Acinetobacter baumannii ABNIH6; identical to SEQ ID NO: 1772

SEQ ID NO: 1776 - protein, 456 aa, Acinetobacter baumannii ABNIH6; identical to SEQ ID NO: 1773

SEQ ID NO: 1777 - protein, 686 aa, Acinetobacter baumannii ABNIH7; identical to SEQ ID NO: 1771

SEQ ID NO: 1778 - protein, 243 aa, Acinetobacter baumannii ABNIH7; identical to SEQ ID NO: 1772

SEQ ID NO: 1779 - protein, 456 aa, Acinetobacter baumannii ABNIH7; identical to SEQ ID NO: 1773

SEQ ID NO: 1780 - protein, 1067 aa, Acinetobacter baumannii ABNIH7
MKLTFWKRKKSTDSVVEDNLMASIKSLQYDDVGLIYPYQQNAKNDADFYWESLEEEDIAYLMDDQYVLPWEELFQLQQDPEHSNVLNLLNLPSPTNLHPVIRSEGGLSDPDFKIILDGWCDQNRIKSKGLIKRIGAVLNVDGQEYLLNETTWKLLEKIKEFARISNKDNKLNQKYWAQIRSLANRSQANLDEFLRKTVVLAPEKLQLNLRKNLISQESVVEVQPSFEEAPSNWLQTFDHYNQVQDQYSISLPDGGVAHVVIDPQVKNVLSEIKKMPNRRVSGERAQTFLHNPFAQLGDDATEVISPEGFEKSKQDAEIYSYSLQIYKFYNELGHYVSAQLTLNENSGREQQPILLELSNLEQTKYFISAYEKPSPIFMWAGYTIDKTSYLDHQVQELKSDLTEIQKYEDELQAQQVLDLSNYSDRVIGIGEAQKLNSEFIQRDSGESEWLPQHLMELEQQFQDRLSNEAIELLEQRIKQAEQEGKDQVLIPNANTEVSVDDAKKLLNSLSDSNRKEPIETLEESTVNLQKKKKDTLLIANNIDKAEFTKQRADQLVFDEKNHPPARLPSSFRSQEFGLKPHQEYGVAWLQNLHQYAPEQVSGCLLADDMGLGKTLQLLCFIGEYLENAKDKKPVLVVAPVSLLENWEAEANRFFSAKFPKILSLYGENLKDRKIPKHLISAQLRDDHGITHLLEEEWLSDADIVLTTYETMRDLEFSLARVDWGIMVCDEAQKIKVPTAMVTKAAKAQKADFKIACTGTPVENSLTDLWCLFDFIQENLLGSLNEFGKTYRRPIENLDNVDNEVLEQLRNLIAPQVLRRMKHDVADLPEKIEVNHCKNITISSLQRHLYADVINRYRKLSEEGNQGAMLASLHSMRMICAHPFQLQPNASIHESPKVDWLIKTLEAIKAKNEKVIIFTEFRDIQVFLKRILLERFGLNVTTVNGDSNTSSKKGLTRQNLIDRFQATSGFNVIILSTTAVGFGVNIQKANHVIHYTRSWNPAKEDQATDRAYRIGQDKEVFVYYPSIAANDFDTFEIKLDRLLSSKRALADDMLQPSRELSKELIEMI

SEQ ID NO: 1781 - protein, 686 aa, Acinetobacter baumannii ABNIH10; identical to SEQ ID NO: 1771

SEQ ID NO: 1782 - protein, 243 aa, Acinetobacter baumannii ABNIH10; identical to SEQ ID NO: 1772

SEQ ID NO: 1783 - protein, 387 aa, Acinetobacter baumannii ABNIH10
MSIANLKRRLEEKISVFSEPTHIQTKFVRPQRLMKTLSIIEHKLDVLENEQPLEEKIIKSVLKLEQHGFDGLTKRDWKNLAWSLSKKLPNYEEKLLFTPVGVRLIDYFNQLGIDQLQFVYFPLLYSYFSFQAKELEKQPDSWVQLRNILNTNKSLVFKNSTRLKKWMTTLIDNSEVLTTEPTKKFVREFLQDNDENRVANQLESLRIASGSWFWDDLIRSAIKSIKTMKEDEYFQIIPRFLVLLEKNKIYTTTILAALLERYASTSQREKVHEVLKHLALDQWGNPQYESSAGWNNVNADTKKMVIQWFVRADLEAFFKLFNQNADIQRFNYWMRFIDQINFSQIFLGSNALNSRRDEHLKFRRLNRGRLKELAGSTTSTNNAFLLK

SEQ ID NO: 1784 - protein, 686 aa, Acinetobacter baumannii ABNIH11; identical to SEQ ID NO: 1771

SEQ ID NO: 1785 - protein, 243 aa, Acinetobacter baumannii ABNIH11; identical to SEQ ID NO: 1772

SEQ ID NO: 1786 - protein, 456 aa, Acinetobacter baumannii ABNIH11; identical to SEQ ID NO: 1773

SEQ ID NO: 1787 - protein, 1067 aa, Acinetobacter baumannii ABNIH11; identical to SEQ ID NO: 1780

SEQ ID NO: 1788 - protein, 686 aa, Acinetobacter baumannii 1419130
MLAFAEFLQNYFIIPVGMLIFVLWIGFKFYSKYIKPAKNLSEQLSVLINALKGMDKNSSLNKHSLDAKFENDTPLKHAWLNYKNSFHDIYETVDGEDVLVSSRATVSSDVFFSQAVIVDTPLRVEFYKHLPGIITGVGIIATFAGLLFGLLAFDPAGDPAKVQDSLGLLLGGVSEAFMASALAIGTAMIITWREKSWLRQCYEQLETLTTEIDKLFETDSTGEEYLAKLLKSSQANETNARQLKDSLVNDLKVMMTNLVEENKKNQIAFAAQLSESYAKSSQDMATQIGQSITDTLQAPLDKIASSVQQVSGDQGSAVQELMTDVLTAFMSKLESTFGSQMTGMNEMMTQSVSAMKEMQLGFSQLLTDMKINSETSTKTLEIQMSKMIEDIQQKQNEMSDQMNLMVDHLSQGAAKIGEQGQHAIEQLNGKVSELMGNLGGTMSELMSDVTKQRMEQDRVILENQQKLHEQSSTLIDNLGTEIKDLIAHSQNAVQVYKENIQKLSQVTTDSITGMNNGAEKMRLASEQFNTAGSSLITVTDKTSQLIAEVSTTSTHLTSASSNLISLLKDYKDSQESVKQAISTLDGLIKQAQSEAGMSTKMLEDMNHMTNALNQVKKEMQDYLEQVSDVLVKGFDSFGSSVETSLNHSLGAFDNTLDQAVKRLATGVEGLGNFVEDLEDLVQQKKN

SEQ ID NO: 1789 - protein, 243 aa, Acinetobacter baumannii 1419130
MLGNRYSKKPRSKDDGEKPFWISFADLMTALMTLFLVVMAVSLMVVTKKINEATQAENQRSSEILDICTSIQNDAALKNKIIAVDCKDNRINFGEAGRFGHNDYRLNAAGVEALNTLVPIVLNAANSENGKKWFKQIVIEGFTDTDGSYLYNLNLSLRRSEWVMCNLLDPKFSQGLSLTEAQKNQVKQLFLAGGVSFNSAKDSKEASRRVELRMQFYGLKEKENAEPQPHFVSAPVETCQLTR

SEQ ID NO: 1790 - protein, 466 aa, Acinetobacter baumannii 1419130
MSIANLKRRLEEKISVFSEPTHIQTKFVRPQRLMKTLSIIEHKLDDLENVQPLEEKIIKSVLKLEQHGFDGMTKRDWKNLAWSLSKKLPNYEEKLLFTPVGVRLIDYFNQLGIDQLQFVYFPLLYSYFAFEQHELENLPSNWIQLRKILDENKSSIFKASTRPKKWMTTLIDNSEVLTTEPTKKFVREFLQDNDENRVANQLESLRIASVSWFWDDLIRSAIKSIKTMKEDEYFQIIPRFLVLLEKNKIYATDILAALLERYASTSQREKVHEVLKHLALDQWGNPQYESSAGWNNVNADTKKMVIQWFVRADLEAFFTLFSRTADVNRFNYWIKYIDKISFSQIFLGPAALYSSQIEHKNFREVNKGRLKRLIGSTQTNNAFMLKIDNVYVIDFSDTGNACYIVDKIPYKENSRDVHRDTLKPWKHLLKLSHTSGWQTRFDEKLAELGIFSSQANNSNSRYKRHY

SEQ ID NO: 1791 - protein, 1067 aa, Acinetobacter baumannii 1419130
MKLAFWKKKKSTDSVVEDNLMASIKSLQYDDVGLIYPYQQNAKNDADFYWESLEEEDIAYLMDDQYVLPWEELFQLQQDPEHSNVLNLLNLPSPTNLHPVIRSEGGLSDPDFKIILDGWCDQNRIKSKGLIKRIGAVLNVDGQEYLLNETTWKLLEKIKEFARISNKDNKLNQKYWAQIRSLANRSQANLDEFLRKTVVLAPEKLQLNLRKNLISQESVVEVQPSFEEAPSNWLQTFDHYNQVQDQYSISLPDGGVAHVVIDPQVKNVLSEIKKMPNRRVSGERAQTFLHNPFAQLGDDATEVISPEGFEKSKQDAEIYSYSLQIYKFYNELGHYVSAQLTLNENSGREQQPILLELSNLEQTKYFISAYEKPSPIFMWAGYTIDKTSYLDHQVQELKSDLTEIQKYEDELQAQQVLDLSNYSDRVIGIGEAQKLNSEFIQRDSGESEWLPQHLMELEEQLQDRLSNEAIEMLEQRIKQAEQEGKDQVLIPNANTEVSLDDAKKLFNSLSDSNRKESIETLEEPTVNLQKKKKDTLLIANNIDKAEFTKQRADQLVFDEKNHIPARLPSSFRSQEFSLKPHQEYGIAWLQNLHQYAPKQVSGCLLADDMGLGKTLQLLCFIGEYLENAKDKKPVLVVAPVSLLENWEAEANRFFSAKFAKILSLYGENLKDRKIPKHLISAQLRDDHGITHLLEEDWRGDADIVLTTYETMRDLEFSLARVDWGIMVCDEAQKIKVPTAMVTKAAKAQKADFKIACTGTPVENSLTDLWCLFDFIQENLLGSLNEFGKTYRRPIENLDNVDNEVLEQLRNLIAPQVLRRMKHDVADLPEKIEVNHCKNITISSLQRHLYADVINHYRKLSEEGNQGAMLASLHSMRMICAHPFQLQPNASIHESPKVDWLIKTLEAIKAKNEKVIIFTEFRDIQVFLKRILLERFGLNVTTVNGDSNTSSKKGLTRQNLIDRFQATSGFNVIILSTTAVGFGVNIQKANHVIHYTRSWNPAKEDQATDRAYRIGQDKEVFVYYPSIAANDFDTFEIKLDRLLSSKRALADDMLQPSRELSKELIEMI

SEQ ID NO: 1792 - protein, 686 aa, Acinetobacter baumannii 1461402
MLAFAEFLQNYFIIPVGMLIFVLWIGFKFYSKYIKPAKKLSGQLSVLINDFKGMDKNPSRNKHSLDEKFENNTPLKHAWLNYKKSLHDIYETVDGEDVLGSSRATVSSDVFFSQSVIVDTPLRVEFYKHLPGIITGVGIIATFAGLLFGLLAFDPAGDPAKVQDSLGLLLGGVSEAFMASALAIGTAMIITWREKSWLRQCYEQLETLTTEIDKLFEADSTGEEYLSKLVKLSKSSESTARQLKDSLVNELKVMMTNLVEENKKNQIAFSAQLSENYAKSSQDMATQIGQSITDTLQAPLDKIASSVQQVSGDQGSAVQELMTDVLTAFMSKLESTFGSQMTGMNEMMTQSVSAMKEMQLGFSQLLTDMKINSETSTKTLEIQMSKMIEDIQQKQNEMSDQMNLMVDHLSQGAAKIGEQGQHAIEQLNGKVSELIGNLGGTMSELMSDVTKQRTEQDRVILENQQKLHEQSSALIDNLGTEIKDLIAHSQNAVQVYKENIQKLSQVTTDSITGMNNGAEKMRLASEQFNTAGSSLITVTDKTSQLIAEVSTTSTHLTSASSNLISLLKDYKDSQESVKQAISTLDGLIKQAQAEVGMSSEMLKDMNQMTTALNQVKKEMQDYLEQVSDVLVKSFESFGSSVETSLNHSLGAFDNTLDQAVKRLATGVEGLGSFVEDLEDLVQQKKN

SEQ ID NO: 1793 - protein, 243 aa, Acinetobacter baumannii 1461402
MLGNRYSKKPRSKDEGEKPFWISFADLMTALMTLFLVVMAVSLMVVTKKINEATQAENQRSSEIMDICTSIQNDAALKNKIIAVDCKDNRINFGEAGRFGHNDYRLNAAGVEALNTLVPIVLNAANSENGKKWFKQIVIEGFTDTDGSYLYNLNLSLRRSEWVMCSLLDSKFSHGLSLSDAQKNQVKQLFLAGGVSFNSAKDSKEASRRVELRMQFYGLKEKENAEPQPHFVSSPVETCQLTR

SEQ ID NO: 1794 - protein, 466 aa, Acinetobacter baumannii 1461402
MSIANLKRRLDEKISVFSEPTHIQTKFVRPQRLMKTLSIIEHKFDDLENVQPLEEKIIKSVLKFEQQGFDGLTKRDWKNLAWSLSKKLPNYEEKLLFTPVGVRLIDYFNQLGIDQLKFVYFPLLYSYFSFQAKELEKQPDSWVKLRNILNTNKSSVFKNSTRLKKWMTTLIDNSEVLTTEPTKKFVRDFLQDNDDNRVANQLESLRIASGSWFWDDLIRSSIKSIKTMKEDEYFKIIPRFLVLLEKNKIYKTTILATLLDRYASTSQREKVHEVLKHLALNQWGNPQYESSAGWNNVNADTKKMVIQWFVRADLEAFFNLFSRVADIERFNYWIKYIDKISFSQIFLGPNALHSTQAEHIKFREMNKGRLKRLTRSTANNNAFMLKIENVYVMDFSSVGNACYITNSIPYSERAREVSIDELKPWPHLLKLSHTPGWQIRFDEKLAELGIFSSSTNNSNSRYKRHY

SEQ ID NO: 1795 - protein, 1067 aa, Acinetobacter baumannii 1461402
MKLAFWKKKKSTDCVVEDNLVASIKSLQYDEVGLISAYQQNAKNDADFYWESLEEEDIAYLLDDQYVLPWEELFQLQQDPEHSNVLNLLNLPSPTTLYPVIRSEGGLSDPDFKIILDGWCDQNRIKSKGLIKRIGAVLNVDGQEYLLNETTWKLVEKVKEFARISNKDNKLNQKYWAQIRSLANRSQANLDEFLRKTVVLAPEKLQLNLRKNLISQESVVEVQPDFDESPSNWLQTFDRYNQVQDQYSISLPDGGVAHVVIDPQVKNVLSEIKKMPNRRVSGERAQIFLHNPFAQLGDDATQVISPEDFEQSKQEAEIYSYSLQLDKFYNESGYYISAQLTLNENSGREQQPILLELSNLEQTKYFITAYEKPSPIFMWAGYTIDKTSYLDHQVQELKSDLTEIQKYEDELQAQQVLDLSNYSDRVIGIGEAQKLNSEFIQRDSGESEWLPQHLIELEQQFQDRFSDEAIELLEQRIKQAEQEGKDQVLIPNANTEVSLDDAKKLLNSLSDSNRKEPIETLEESTVNLQKKKKDTLLIANNIDKAEFTKKRADQLVFDEKNHPPARLPSSFRSQEFGLKPHQEYGVAWLQNLHQYAPEQVSGCLLADDMGLGKTLQLLCFIGEYLENAKDKKPVLVVAPVSLLENWEAEANRFFSAKFAKILSLYGENLKDRKIPKHLISAQLRDDHGITHLLEEDWRGDADIVLTTYETMRDLEFSLARVDWGIMVCDEAQKIKVPTAMVTKAAKAQKADFKIACTGTPVENSLTDLWCLFDFIQENLLGSLNEFGKTYRRPIENIENVDNEVLEQLRNLIAPQVLRRMKHDVADLPEKIEVDHCKNITISSLQRHLYADVINRYRRLSEEGNQGAMLASLHSMRMICAHPFLLQPNASIHESPKVDWLIKTLEAIKVKNEKVIIFTEFRDIQVFLKRILLERFGLNVTTVNGDSNTSSKKGLTRQNLIDRFQATSGFNVIILSTTAVGFGVNIQKANHVIHYTRSWNPAKEDQATDRAYRIGQDKEVFVYYPSIAANDFDTFEIKLDRLLSSKRALADDMLQPSRELSKELIEMI

SEQ ID NO: 1796 - protein, 686 aa, Acinetobacter baumannii 1295743; identical to SEQ ID NO: 1788

SEQ ID NO: 1797 - protein, 243 aa, Acinetobacter baumannii 1295743; identical to SEQ ID NO: 1789

SEQ ID NO: 1798 - protein, 466 aa, Acinetobacter baumannii 1295743; identical to SEQ ID NO: 1790

SEQ ID NO: 1799 - protein, 1067 aa, Acinetobacter baumannii 1295743
MKLAFWKKKKSTDSVVEDNLMAIIKSLQYDDVGLIYPYQQNAKNDADFYWESLEEEDIAYLMDDQYVLPWEELFQLQQDPEHSNVLNLLNLPSPTNLHPVIRSEGGLSDPDFKIILDGWCDQNRIKSKGLIKRIGAVLNVDGQEYLLNETTWKLLEKIKEFARISNKDNKLNQKYWAQIRSLANRSQANLDEFLRKTVVLAPEKLQLNLRKNLISQESVVEVQPSFEEAPSNWLQTFDHYNQVQDQYSISLPDGGVAHVVIDPQVKNVLSEIKKMPNRRVSGERAQTFLHNPFAQLGDDATEVISPEGFEKSKQDAEIYSYSLQIYKFYNELGHYVSAQLTLNENSGREQQPILLELSNLEQTKYFISAYEKPSPIFMWAGYTIDKTSYLDHQVQELKSDLTEIQKYEDELQAQQVLDLSNYSDRVIGIGEAQKLNSEFIQRDSGESEWLPQHLMELEEQLQDRLSNEAIEMLEQRIKQAEQEGKDQVLIPNANTEVSLDDAKKLFNSLSDSNRKESIETLEEPTVNLQKKKKDTLLIANNIDKAEFTKQRADQLVFDEKNHLPARLPSSFRSQEFSLKPHQEYGIAWLQNLHQYAPKQVSGCLLADDMGLGKTLQLLCFIGEYLENAKDKKPVLVVAPVSLLENWEAEANRFFSAKFAKILSLYGENLKDRKIPKHLISAQLRDDHGITHLLEEDWRGDADIVLTTYETMRDLEFSLARVDWGIMVCDEAQKIKVPTAMVTKAAKAQKADFKIACTGTPVENSLTDLWCLFDFIQENLLGSLNEFGKTYRRPIENLDNVDNEVLEQLRNLIAPQVLRRMKHDVADLPEKIEVNHCKNITISSLQRHLYADVINHYRKLSEEGNQGAMLASLHSMRMICAHPFQLQPNASIHESPKVDWLIKTLEAIKAKNEKVIIFTEFRDIQVFLKRILLERFGLNVTTVNGDSNTSSKKGLTRQNLIDRFQATSGFNVIILSTTAVGFGVNIQKANHVIHYTRSWNPAKEDQATDRAYRIGQDKEVFVYYPSIAANDFDTFEIKLDRLLSSKRALADDMLQPSRELSKELIEMI

SEQ ID NO: 1800 - protein, 686 aa, Acinetobacter baumannii 466760; identical to SEQ ID NO: 1788

SEQ ID NO: 1801 - protein, 243 aa, Acinetobacter baumannii 466760; identical to SEQ ID NO: 1789

SEQ ID NO: 1802 - protein, 466 aa, Acinetobacter baumannii 466760; identical to SEQ ID NO: 1790

SEQ ID NO: 1803 - protein, 1067 aa, Acinetobacter baumannii 466760
MKLAFWKKKKSTDSVVEDNLMASIKSLQYDDVGLIYPYQQNAKNDADFYWESLEEEDIAYLMDDQYVLPWEELFQLQQDPEHSNVLNLLNLPSPTNLHPVIRSEGGLSDPDFKIILDGWCDQNRIKSKGLIKRIGAVLNVDGQEYLLNETTWKLLEKIKEFARISNKDNKLNQKYWAQIRSLANRSQANLDEFLRKTVVLAPEKLQLNLRKNLISQESVVEVQPSFEEAPSNWLQTFDHYNQVQDQYSISLPDGGVAHVVIDPQVKNVLSEIKKMPNRRVSGERAQTFLHNPFAQLGDDATEVISPEGFEKSKQDAEIYSYSLQIYKFYNELGHYVSAQLTLNENSGREQQPILLELSNLEQTKYFISAYEKPSPIFMWAGYTIDKTSYLDHQVQELKSDLTEIQKYEDELQAQQVLDLSNYSDRVIGIGEAQKLNSEFIQRDSGESEWLPQHLMELEEQLQDRLSNEAIEMLEQRIKQAEQEGKDQVLIPNANTEVSLDDAKKLFNSLSDSNRKESIETLEEPTVNLQKKKKDTLLIANNIDKAEFTKQRADQLVFDEKNHLPARLPSSFRSQEFSLKPHQEYGIAWLQNLHQYAPKQVSGCLLADDMGLGKTLQLLCFIGEYLENAKDKKPVLVVAPVSLLENWEAEANRFFSAKFAKILSLYGENLKDRKIPKHLISAQLRDDHGITHLLEEDWRGDADIVLTTYETMRDLEFSLARVDWGIMVCDEAQKIKVPTAMVTKAAKAQKADFKIACTGTPVENSLTDLWCLFDFIQENLLGSLNEFGKTYRRPIENLDNVDNEVLEQLRNLIAPQVLRRMKHDVADLPEKIEVNHCKNITISSLQRHLYADVINHYRKLSEEGNQGAMLASLHSMRMICAHPFQLQPNASIHESPKVDWLIKTLEAIKAKNEKVIIFTEFRDIQVFLKRILLERFGLNVTTVNGDSNTSSKKGLTRQNLIDRFQATSGFNVIILSTTAVGFGVNIQKANHVIHYTRSWNPAKEDQATDRAYRIGQDKEVFVYYPSIAANDFDTFEIKLDRLLSSKRALADDMLQPSRELSKELIEMI

SEQ ID NO: 1804 - protein, 686 aa, Acinetobacter baumannii 230853; identical to SEQ ID NO: 1792

SEQ ID NO: 1805 - protein, 243 aa, Acinetobacter baumannii 230853; identical to SEQ ID NO: 1793

SEQ ID NO: 1806 - protein, 466 aa, Acinetobacter baumannii 230853; identical to SEQ ID NO: 1794

SEQ ID NO: 1807 - protein, 1067 aa, Acinetobacter baumannii 230853; identical to SEQ ID NO: 1795

SEQ ID NO: 1808 - protein, 686 aa, Acinetobacter baumannii 1239920
MLAFAEFLQNYFIIPVGMLIFVLWIGFKFYSKYIKPAKNLSEQLSVLINALKGMEKNSSLNKHSLDAKFENDTPLKHAWLNYKNSFHDIYETLDGEDVLVSSRATVSSDVFFSQAVIVDTPLRVEFYKHLPGIITGVGIIATFAGLLFGLLAFDPAGDPAKVQDSLGLLLGGVSEAFMASALAIGTAMIITWREKSWLRQCYEQLETLTTEIDKLFETDSTGEEYLAKLLKSSQANETNARQLKDSLVNDLKGMMTNLVEENKKNQIAFAAQLSESYAKSSQDMATQIGQSITDTLQAPLDKIASSVQQVSGDQGSAVQELMTDVLTAFMSKLESTFGSQMAGMNEMMTQSVSAMREMQVGFSQLLTDMKINSETSTKTLEIQMSKMIEDIQQKQNEMSDQMNLMVDHLSQGAAKIGEQGQHAIEQLNGKVSELMGKLGGTMSELMSDVTKQRMEQDRVILENQQKLHEQSSVLIDSLGTEIKDLIAHSQNAVQVYKENIQKLSQVTTDSITGMNNGAEKMRLASEQFNTAGSSFITVTDKTSQLIAEVSTTSTHLSNASSNLISLLKDYKDSQESVKQAISTLDGLIKQAQAEAGMNTKMLEDMNHMTNALNQVKKEMQDYLEQVSDVLVKSFESFGSSVETSLNHSLGAFDNTLDQAVKRLESGIDGLSGFVEGLEDLVQQKTV

SEQ ID NO: 1809 - protein, 243 aa, Acinetobacter baumannii 1239920
MLGNRYSNKPRSKDEGEKPFWISFADLMTALMTLFLVVMAVSLMVVTKKINEATQAENQRSSEILNICTSIQNDAALKNKIITVDCKDNRINFGEAGRFGHNDYRLNAAGVEALNTLVPIVLNAANSENGKKWFKQIVIEGFTDTDGSYLYNLNLSLRRSEWVMCSLLDPKFSHGLSLSDAQKNQIKQLFLAGGVSFNSAKDSKEASRRVELRMQFYGLKEKENAEPQPHFVSAPIETCQLTR

SEQ ID NO: 1810 - protein, 471 aa, Acinetobacter baumannii 1239920
MSIANLKRRLEEKISVFSDSTHIQTKFVKPQRLIKRLSILEHKFDDLENLQPLEEKIIKSVLKLEQHGFDGLTKRDWKNLAWSLSKKLPNYEEKILFTPVGARLIDYFNQLGSDQLKFVYFPLLYSYFSFQAKELEKQPDSWVQLRNILNTNKSLVFKTLNRPKKWMTTLIDYSEVLTTEPTKKFVREFLQDSNANTVTYKLESLRISANSWFWDDLIQSSIKSIKTMKEDEYFQIIARFLVLLEKNKIYTTAILAALLERYASTSQREKVHEVLKHLALDQWGNPQYESSAGWNNVNADTKKMVIQWFVRADLEAFFTLFSRTADVNRFNYWIKFIDKISFSQIYLGPEALYSQQHEHKSFRNLNKGRLKELIGSTPSNNAFLLKIDNVFVIDFSDTGNACFLFNEFPYIESSLKTHVRALKNYHHKGYIDKLGHIGNWGERFDQRLAELGIFANLRQMNKYQPNHKNRY

SEQ ID NO: 1811 - protein, 1067 aa, Acinetobacter baumannii 1239920
MKLTFWKRKKSTDSVVEDNLVASIKSLQYDEVGLIHPYQQNAKNDADFYWESLEEEDIAYLLDDHYILPWEEMFQLQQDPEHSNVLNLLNLPSLTNLHPLIRSEGGLSDPDFKIILDGWCDQNRIKSKGLIKRIGAVLNVDGQEYLLNETTWKLVEKVKEFARVSNKDNKLNQKYWAQIRSLANRSQANLDEFLRKTVVLAPEKLQLNLRKNLISQESVVEVQPDFDEAPSNWLQTFDHYNQVQDQYSISLPDGGIVHVVVDPQVKNVLNEIKKMPNRRVSGERAQTFLHNPFAQLGDDATQVISPESFEKSKQEAEIYNYSLQIDKFYNELGHYFSAQLTLNENSGREQQPIPLELSNLEQTKYFISAYEKPSPIFMWAGYTIDKTSYLDHQVQEIKSDLAEIQKYEDELQAQQVLDLSNYSDRVIGIGEAVKLNSEFILRDSGESEWLPQHLMALEQQFQDRFSAEAIELLEQRIRQAEQEGKDQVLIPNANTEVSLDDAKKLLNSLSDSNRKEPIGTLEEPRVNLQKKKKDTLLIANNIDKAEFTKQRADQLVFDKKNHPPARLPSSFRSQEFSLKQHQEYGIAWLQNLHQYAPEQVSGCLLADDMGLGKTLQLLCFIGEYLENAKDKKPVLVVAPVSLLENWEAEANRFFSAKFAKILSLYGENLKDRKIPKHLISAQLRDDHGITHLLEEDWRGDADIVLTTYETMRDLEFSLARVDWGIMICDEAQKIKVPTAMVTKAAKAQKADFKIACTGTPVENSLTDLWCLFDFIQENLLGSLNEFGKTYRRPIENSENTDNKVLEQLRQLIAPQVLRRMKHDVADLPEKIEVDHCKNITISSLQRHLYADVINRYRRLSEEGNQGAMLASLHSMRMICAHPFQLQPNASIYESPKVDWLIKTLEVIKTKNEKVIIFTEFRDIQVFLKRILLERFGLNVTTVNGDSNTSSKKGLTRQNLIDKFQATSGFNVIILSTTAVGFGVNIQKANHVIHYTRSWNPAKEDQATDRAYRIGQDKEVFVYYPSIAANDFDTFEIKLDRLLSSKRALADDMLQPSRELSKELIEMI

SEQ ID NO: 1812 - protein, 688 aa, Acinetobacter baumannii 1566109
MNWLVWAEFLQSYYIIPFGMFILVTYIGYRFYLKYITPAKNLNTQLESAISALKKVEEHSGFNKNSLDSIFENGTPLKHAWLNYKNSFHDIYETVDGEDVLVSSRATVSSDVFFSQAVIVDTPLRVEFYKHLPGIITGVGIIATFAGLLFGLLAFDPAGDPAKVQDSLGLLLGGVSEAFMASALAIGTAMIITWREKSWLRQCYEQLEILTTEIDKLFETDSTGEEYLAKLLKSSQANETNARQLKDSLVNDLKVMMTNLVEENKKNQIAFATHLSESYAKSSQDMATQIGQSITDTLQAPLDKIASSVQQVSGDQGSAVQELMTDVLTAFMSKLESTFGSQMTGMNEMMTQSVSAMKEMQLGFSQLLTDMKINSETSTKTLEIQMSKMIEDIQQKQNEMTDQMNLMVDHLSQGAAKIGEQGQHAIEQLNGKVSELMGNLGGTMSELMSDVTKQRMEQDRVILENQQKLHEQSSTLIDNLGTEIKDLIAHSQNAVQVYKENIQKLSQVTTDSITGMNNGAEKMRLASEQFNTAGSSLITVTDKTSQLIAEVSTTSTHLTSASSNLISLLKDYKDSQESVKQAISTLDGLIKQAQAEVGMSSEMLKDMNQMTTALNQVKKEMQDYLEQVSDVLVKSFESFGSSVETSLNHSLGAFDNTLDQAVKRLATGVEGLGSFVEDLEDLVQQKKN

SEQ ID NO: 1813 - protein, 200 aa, Acinetobacter baumannii 1566109
MVVTKKINEATQAENQRSSEIMDICTSIQNDAALKNKIIAVDCKDNRINFGEAGRFGHNDYRLNAAGVEALNTLVPIVLNAANSENGKKWFKQIVIEGFTDTDGSYLYNLNLSLRRSEWVMCSLLDPKFSHGLSLSDAQKNQVKQLFLAGGVSFNSAKDSKEASRRVELRMQFYGLKEKENAEPQPHFVSAPVETCQLTR

SEQ ID NO: 1814 - protein, 466 aa, Acinetobacter baumannii 1566109
MSIANLKRRLEEKISVFSEPTHIQTKFVRPQRLMKTLSIIEHKLDDLENEQPLEEKIIKAVLKLEQHGFDGLTKRDWKNLAWSLSKKLPNYEEKLLFTPVGVRLIDYFNQLGIDQLQFVYFPLLYSYFSFQAKELEKQPDSWVQLRNILNTNKSLVFKNSTRLKKWMTTLIDNSEVLTTEPTKKFVREFLQDNDENRVANQLESLRIASGSWFWDDLIRSAIKSIKTMKEDEYFQIIPRFLVLLEKNKIYTTDILAALLERYAGTSQREKVHEVLKHLALDQWGNPQYESSAGWNNVNADTKKMVIQWFVRADLEAFFRLFSRTADVDRFNYWIKFIDKISFSQIFLGPAASRSSLNEHRKFREANRGRLKRLVGSTQTNNAFMLKIDNIYVFDFSDTGNACYILNKIPYDQRLLDIHIQTLKPWGQSLTLIHRPGWQRRFDEKLAELGIFSSQANNSISGYRKRY

SEQ ID NO: 1815 - protein, 717 aa, Acinetobacter baumannii 1566109
MKLAFWKKKKNTESVAEDNLVASIKPLQYDEVGLIYPYQQNAKNDADFYWESLEEEDIAYLLDEQYILPWEEMFQLQQDPEHSNVLNLLNLPSPTNLHPVIRSEGGLSDPDFKIILDGWCDQNRIKSKGLIKRIGAVLNVDGQEYLLNDTTWQLVEKVKEFARVSNKDNKLNQKYWAQIRSLANRSQANLDEFLRKTVVLAPEKLQLNLRKNLISQESVVEVQPDFDEAPSNWLQTFDHYNQVQDQYSISLPDGGVAHVVIDPQVKNVLSEIKKMPNRRVSGERAQTFLHNPFAQLGDDATEVISPEGFEKSKQDAEIFSYSLQIDKFYNELGHYVSAQLTLNENSGREQQPILLELSNLEQTKYFITAYEKPSPIFMWAGYTIDKTSYLDHQVQELKSDLTEIQKYEDELQAQQVLDLSNYSDRVIGIGEAQKLNSEFIQRDSGESEWLPQHLIELEQQFQDRFSDEAIELLEQRIKQAEQEGKDQVLIPNANTEVSVDDAKKLLNSLSDSNRKEPIETLEESTVNLQKKKKDTLLIANNIDKAEFTKQRADQLVFDEKNHPPARLPSSFRSQEFGLKPHQEYGVAWLQNLHQYAPEQVSGCLLADDMGLGKTLQLLCFIGEYLENAKDKKPVLVVAPVSLLENWEAEANRFFSAKFAKILSLYGENLKDRKIPKHLISAQLRDDHGITHLLEEDWRGDADIVLTTYETMRDLEFS

SEQ ID NO: 1816 - protein, 686 aa, Acinetobacter baumannii 72431; identical to SEQ ID NO: 1788

SEQ ID NO: 1817 - protein, 243 aa, Acinetobacter baumannii 72431; identical to SEQ ID NO: 1789

SEQ ID NO: 1818 - protein, 466 aa, Acinetobacter baumannii 72431; identical to SEQ ID NO: 1790

SEQ ID NO: 1819 - protein, 1067 aa, Acinetobacter baumannii 72431; identical to SEQ ID NO: 1803

SEQ ID NO: 1820 - protein, 686 aa, Acinetobacter baumannii; identical to SEQ ID NO: 1788

SEQ ID NO: 1821 - protein, 243 aa, Acinetobacter baumannii; identical to SEQ ID NO: 1772

SEQ ID NO: 1822 - protein, 456 aa, Acinetobacter baumannii; identical to SEQ ID NO: 1773

SEQ ID NO: 1823 - protein, 1067 aa, Acinetobacter baumannii; identical to SEQ ID NO: 1780

SEQ ID NO: 1824 - protein, 686 aa, Acinetobacter baumannii MRSN 58; identical to SEQ ID NO: 1771

SEQ ID NO: 1825 - protein, 243 aa, Acinetobacter baumannii MRSN 58; identical to SEQ ID NO: 1772

SEQ ID NO: 1826 - protein, 456 aa, Acinetobacter baumannii MRSN 58; identical to SEQ ID NO: 1773

SEQ ID NO: 1827 - protein, 1067 aa, Acinetobacter baumannii MRSN 58; identical to SEQ ID NO: 1780

SEQ ID NO: 1828 - protein, 688 aa, Acinetobacter baumannii
MNWLVWAEFLQSYYIIPFGMFILVTYIGYRFYLKYITPAKNLNTQLESAISALKKVEEHSGFNKNSLDSIFENGTPLKHAWLNYKNSFHDIYETVDGEDVLVSSRATVSSDVFFSQAVIVDTPLRVEFYKHLPGIITGVGIIATFAGLLFGLLAFDPAGDPAKVQDSLGLLLGGVSEAFMASALAIGTAMIITWREKSWLRQCYEQLEILTTEIDKLFETDSTGEEYLAKLLKSSQANETNARQLKDSLVNDLKVMMTNLVEENKKNQIAFATHLSESYAKSSQDMATQIGQSITDTLQAPLDKIASSVQQVSGDQGSAVQELMTDVLTAFMSKLESTFGSQMTGMTEMMTQSVSAMKEMQLGFSQLLTDMKVNSETSTKTLEIQMSKMIEDIQQKQNAMSNQMNLMVDHLSQGAAKIGEQGQHAIEQLNGKVSELIGNLGGTMSELMSDVTKQRMEQDRVILENQQKLHEQSSALIDNLGTEIKDLIAHSQNAVQVYKENIQKLSQVTTDSITGMNNGAEKMRLASEQFNTAGSSLITVTDKTSQLIAEVSTTSTHLTSASSNLISLLKDYKDSQESVKQAISTLDGLIKQAQAEVGMSSEMLKDMNQMTTALNQVKKEMQDYLEQVSDVLVKSFESFGSSVETSLNHSLGAFDNTLDQAVKRLATGVEGLGSFVEDLEDLVQQKKN

SEQ ID NO: 1829 - protein, 243 aa, Acinetobacter baumannii
MLGNRYSKKPSSKDEGEKPFWISFADLMTALMTLFLVVMAVSLMVVTKKINEATQAENQRSSEIMDICTSIQNDAALKNKIIAVDCKDNRINFGEAGRFGHNDYRLNAAGVEALNTLVPIVLNAANSENGKKWFKQIVIEGFTDTDGSYLYNLNLSLRRSEWVMCSLLDPKFSHGLSLSDAQKNQVKQLFLAGGVSFNSAKDSKEASRRVELRMQFYGLKEKENAEPQPHFVSVPVETCQLTR

SEQ ID NO: 1830 - protein, 457 aa, Acinetobacter baumannii
MSIANLKRRLDEKISVFSDSTHIQTKFVKPQRLMKRLSILEHKFGDLENVQPLEEKIIKSVLKLEQHGFDGMTKRDWKNLAWSLSKKLPNYEEKILFTPVGVRLIDYFNQLGIDQLQFVYFPLLYSYFAFEQHELENLPSNWIQLRKILDENKSSIFKASTRPKKWMTTLIDNSEVLTTEPTKKFVREFLQNNDENGVANQLESLRIASVSWFWDDLIRSAIKSIKTMKEDEYFQIIPRFLVLLEKNKIYATDILAALLERYASTSQREKVHEVLKHLALDQWGNPQYESSAGWNNVNADTKKMVIQWFVRADLEAFFKVFSYGAEVRRFNYWMRFIKQVTLSEIFLNDDAMFYATFQQEKFKKNNVGRFKRIVGKSTAANAFMIKIGGYYIVEFSELNNATYFYRKQPYVDSKAKLQLVNIGDLKSTAKCEFYLSHNGAWEKSFDNRLKGLGITPD

SEQ ID NO: 1831 - protein, 1068 aa, Acinetobacter baumannii
MKLAFWKKKKSTDSVVEDNLVASIKSLQYDEVGLIYPYQQNAKNDADFYWGSLEEEDVAYLLDNQYVLPWEELFQLQQNPEHSNVLNLLNLPSPTNLHPVIRSEGGLSDADFKIILDGWCDQNRIKSKGPIKRIGAVLNVDGQEYLLNETTWKLVEKIKEFARISNKDHKLNQKYWAQIRSLANRSQANLDEFLRKTVVLSPEKLQLNLRKNLISQESVVEVQPEFDEAPSNWLQTFDHYNQVQDQYSISLPDGGVAHVVIDPQVKNVLSEIKKMPNRRVSGERAQIFLHNPFAQLGDDATQVISPEGFEKSKQDAEIYSYSLQIDKFYNELGHYVSAQLTLNENSGREQQPIPLELSNLEQTKYFIAAYEKPSPIFMWAGYTIDKTSYLDHQVQELKSDLTEIQKYEDELQAQQVLDLSNYSDRVIGIGEAQKLNSEFIQRDSGESEWLPQHLMELEQQLQDRFSDETIELLEQRIKQAEQEGKARVVIPNTDTEVSIDEAKELLNKLNTSKKISLLELEKEPLENLQKKKKDTLLIASNIEEAEFTKQRMELLTLDKVSFPPPRLPSSFRKQEFSLKQHQEYGISWLQNLYQYAPENVSGCLLADDMGLGKTLQLLCFIGEYLETAKQKKPVLIVAPVSLLENWEAEANRFFSAKFAKILSLYGENLKDRKIPKLLISAQLREDHGITNLLEEDWLGDTDIVLTTYETMRDLEFSLARVDWSIMVCDEAQKIKVPTAMVTKAAKAQKADFKIACTGTPVENSLVDLWCLFDFIQENLLGSLSAFNKTYRRPIESGENADSQLLEQLRELIKPQVLRRMKKEVADLPNKNEVSDCKRIGISMLQRQLYAEVINRYQKLSTEGNQGAMLASLHSMRMICAHPLQIRPDASIQDSPKVDWLIKTLEQIKAKNEKVIIFTEFRDIQVFLKRILLERFGLNITTVNGDSSTSSKKGLSRQNLIDKFQNTVGFNVIILSTVAVGFGVNIQKANHVIHYTRSWNPAKEDQATDRAYRIGQDKEVFVYYPTISAGKDFDTFEIKLDVLLSSKRALADDMLKPNTDLGKELIRLI

SEQ ID NO: 1832 - protein, 686 aa, Acinetobacter baumannii; identical to SEQ ID NO: 1788

SEQ ID NO: 1833 - protein, 243 aa, Acinetobacter baumannii; identical to SEQ ID NO: 1789

SEQ ID NO: 1834 - protein, 466 aa, Acinetobacter baumannii; identical to SEQ ID NO: 1790

SEQ ID NO: 1835 - protein, 1067 aa, Acinetobacter baumannii; identical to SEQ ID NO: 1803

SEQ ID NO: 1836 - protein, 686 aa, Acinetobacter baumannii
MLAFAEFLQDYFIIPVGMLIFVLWIGFKFYSKYIKPAKNLSEQLSVLINALKGMDKNSSLNKHSLDAKFENDTPLKHAWLNYKNSFHDIYETVDGEDVLVSSRATVSSDVFFSQAVIVDTPLRVEFYKHLPGIITGVGIIATFAGLLFGLLAFDPAGDPSKVQDSLGLLLGGVSEAFMASALAIGTAMIITWREKSWLRQCYEQLETLTTEIDKLFETDSTGEEYLAKLLKSSQANETNARQLKDSLVNDLKVMMTNLVEENKKNQIAFAAQLSESYAKSSQDMATQIGQSITDTLQAPLDKIASSVQQVSGDQGSAVQELMTDVLTAFMSKLESTFGSQMTGMNEMMTQSVSAMKEMQLGFSQLLTDMKINSETSTKTLEIQMSKMIEDIQQKQNEMSDQMNLMVDHLSQGAAKIGEQGQHAIEQLNGKVSELMGNLGGTMSELMSDVTKQRMEQDRVILENQQKLHEQSSTLIDNLGTEIKDLIAHSQNAVQVYKENIQKLSQVTTDSITGMNNGAEKMRLASEQFNTAGSSLITVTDKTSQLIAEVSTTSTHLTSASSNLISLLKDYKDSQESVKQAISTLDGLIKQAQAEAGMSTKMLEDMNHMTNALNQVKKEMQDYLEQVSDVLVKSFESFGFSVETSLNHSLGAFDNTLDQAVKRLESGIDGLNGFVEDLEDLVQQKKN

SEQ ID NO: 1837 - protein, 243 aa, Acinetobacter baumannii
MLGNRYSKKPRSKDEGEKPFWISFADLMTALMTLFLVVMAVSLMVVTKKINEATQAENQRSSEILDICTSIQNDAALKNKIINVDCKDNRINFGEAGRFGHNDYRLNAAGVEALNTLVPIVLNAANTENGKKWFKQIVIEGFTDTDGSYLYNLNLSLRRSEWVMCSLLDPKFSHGLSLSEAQKNQVKQLFLAGGVSFNSAKDSKEASRRVELRMQFYGLKEKENAEPQPHFVSAPVETCQLTR

SEQ ID NO: 1838 - protein, 466 aa, Acinetobacter baumannii
MSIANLKRRLDEKISVFSDSTHIQTKFVKPQRLMKRLSILEHKFGDLENVQPLEEKIIKSVLKLEQHGFDGMTKRDRKNLAWSLSKKLPNYEEKILFTPVGVRLIDYFNQLGIDQLQFVYFPLLYSYFAFEQHELENLASNWIQLRKILDENKSSIFKASTRPKKWMTTLIDNSEVLTTEPTKKFVREFLQDNDENRVANQLESLRIASVSWFWDDLIRSAIKSIKTMKEDEYFQIIPRFLVLLEKNKIYATDILAALLERYASTSQREKVHEVLKHLALDQWGNPQYESSAGWNNVNVDTKKMVIQWFVRADLEAFFRLFSRTADVDRFNYWIKFIDKIAVSQIFLGPAASESNQVEHRKFREENRGRLKLLTGSTRTNNAFMLKIENIYVFDFSDIGNACYILNKIPYNQERKKVDIDTLKPWVHILKLSHTSGWQRKFDEKLAELGIFSSQANNSNSLYKRRY

SEQ ID NO: 1839 - protein, 1070 aa, Acinetobacter baumannii
MRLAFWKKKKNTETFVEDNLVASIKSLQYDEVGLIYPYQQNAQNDADFYWESLEEEDLAYLLDDHYILPWEELFQLQQDPEHSNVLNLLNLPSPTNLHPVIRSEGGLSDPDFKIILDGWCDQNRIKSKGLIKRIGAVLNVDGQEYLLNETTWKLVEKVKEFARISNKDNKLNQKYWAQIRSLANRSQANLDEFLRKTVVLAPEKLQLNLRKNLISQESVVEVQPDFDEAPSNWLQTFDRYNQVQDQYSISLPDGGVAHVVIDPQVKNVLSEIKKMPNRRVSGERAQIFLHNPFAQLGDDATEVISPEGFEKSKQDAEIFSYRLQIDKFYNELGHYVSAQLTLNENSGREQQSILLELSTLEQTKYFISAYEKPSPIFMWAGYTIDKTSYLDHQVQELKSDLTEIQKYEDELQAQQVLDLSNYSDRVIGIGEAQKLNSEFIQRDSGESEWLPQHLMELEEQLQDRLSNEAIEVLEQRIKQAEQEGKDQVLIPNANTEVSLDDAKKLFNSLSDSNRKESIETLEEPTVNLQKKKKDTLLIANNIDKAEFTKQRADQLVFDEKNHLPARLPSSFRSQEFSLKPHQEYGIAWLQNLHQYAPKQISGCLLADDMGLGKTLQLLCFIGEYLENAKDKKPVLVVAPVSLLENWEAEANRFFSAKFAKILSLYGENLKDRKIPKHLISAQLRDDHGITHLLEEEWLGDADIVLTTYETMRDLEFSLARVDWGIMVCDEAQKIKVPTAMVTKAAKAQKADFKIACTGTPVENSLTDLWCLFDFIQENLLGSLSEFNKIYRRPIEMSEDVDKQILEQLRKLIAPQVLRRMKKEVADLPEKHEVQHCKNIPISTLQRQLYIDTANHFRKLSAEGNQGAMLGALHSMRMICAHPLQLQPNASIHESPKVDWLIKTLEVIKAKNEKVIIFTEFRDIQVFLKRILLERFGLNVTTVNGDSNTSSKKGLTRQNFIDRFQATSGFNVIILSTTAVGFGVNIQKANHVIHYTRSWNPAKEDQATDRAYRIGQQKEVYVYYPTISAPDGEELKTFEVKLDELLSSKRALADDMLQPSRELSKELIEMI

SEQ ID NO: 1840 - protein, 662 aa, Bordetella bronchiseptica B18-5 (C3)
MGVAHPSLASLHGLPLYVFLLVAVLTLAFLIGYVVKGTQVWWQLRSALKAVRSLLKTGPAPNPTEVASAFRREPLKHLWIEYADTLHELRQAGSGGTALTEFRATIPAEAMFTKEVLVDGRLFDEFTRHLPGVLTGLGIIGTFAGLLSGLDKFKVDPEKIQNTVNGLGPLLEGVQHAFVASGSAIACAMLVVFISRFTLAYFYRLVEHLTNGIDSLYRTGAGEEYLARLVKSSEQNAASTAQLKDALVEDLHKMMTNLVDRQIAAQETASLALGKHIGEAISTAIAEPMKRVGDAMEATSRGNGEQVNSMLEILLTGFMAKLEDTFGGQMRGINEQMQRSMDSMAAVQASLQGLLSDIRSTNEHAASQMSGTLEEAMKKAADNQQLLTEQMREFVQDFRSLVTEEQSKSKHAMNEAVTKVLGEVATAMEGLENVRKASAAEESGRNDRLATQTNQLIGGLTTQVESLLGAVSDQVSKTQRNIDALGDVSLRAIDGMNQGALTIGSAAQRFETAGAAVTDAFDRSTKVAETLATTAASLQAASTAVQRGFEQYDSTRKTVDTQMAALMGLIESVKREAGISQELVNSIKTSAEAMRQSEAEAREHLGQVNAALVKAFSDFGNALVSQVKSTISETDRHLAQGTGHLNGVVQELANAVQRMKRA

SEQ ID NO: 1841 - protein, 234 aa, Bordetella bronchiseptica B18-5 (C3)
MLARLVLKRGAKHEGESPFWISFSDLMSALMVLFLVVMAVTLVSVTQSIDAATRATVERSAAINRVMQMIAQDPKSAGVGVDQQNFRIDLGKEVRFDSGSYTINTTAGQFLRSYIPVLLRAKESDDGKRWIRSIVVEGFTDEDGTYLYNLQLSLDRSRSVVCSLFQTSGVADALTPEQLRKVQELFLVGGYSFNSIKKDKAESRRVEFKIDFWGLDERLPEASDALKGKEFGRC

SEQ ID NO: 1842 - protein, 570 aa, Bordetella bronchiseptica B18-5 (C3)
MLAVSALQRLTKDLAASLASMGLHAGEFGKPDLVEKPTREAEQLFQGYAKAKPSKEDAYAAARAFVRGQPLDAWQRDLVASAVAEPIREQSGAMALASKRFLALLKSYEDEAARGDLWRLTWHGLLYSYFNFDLEAGKDTATREGWEALRAFLEQTWPLMDKQAGEDLVPDWMKVLRHEVDVLTAKPVEKYSRAYLRGETESTDRVAADLGIPPSSWFWHALVLGAVRHAAREIDAEFRRLVPQLIKLIQTKPGFRDEAIEVVLNRYHGCKGAPSDERLRDFVCQPTVWKNPKLKAAGIATAWNRVPDPVWQMVLGWVNERNLKDFFDILAARNNADEGRLAFWSKYLKQISWTRLVFGADTMALKRTNAGVRELIAREEGAYAQLTRFLDFDGFMMQIGPYIIIEFSKTGKACYGYQADRLPFARYASRYAGGTEDLAAGYNQDRALRIHHSKGWEWKAEQELRQLGIIPDAVDPRRVLSSATGGTDTATNTGRTTERPESAPPGPDIARLKSLVARFRGASINDKRRTSSGGRLWVEDPLQRRQLASELKAHGFKWANSRQAWYFPER

SEQ ID NO: 1843 - protein, 1300 aa, Bordetella bronchiseptica B18-5 (C3)
MVLPGAMMGLFDFLKRATSSNGQEPTLTTIWAADGARIEFNNDIMDTTPEGLLEAIHQAGAEDSVLGAYLAQLASESRCRIDAHGVTIPWPDVYELQGSAEHAGALKLLALPPQSPLRPIIDGSGTLSSDDFTVEVSGWTDGAQQVQVDRLDGAVATVGGTAQMLSASAWAAVSDIVALQSRPPEGRTQHAQEMAWGRIRSHADRAGALYASPYLETTLVLTPESLRLPLAKEETPFGRVLTVSPTFDGAPDGWLAAFDGFNSVQPHYDLTRGAGRVRVVISEPVRKVLAVIKREMPNRKVAGAKAEKFIHNPFAFLGDTAHQVLKEGEFEADRVEAGAVAAVFSIVGRTEHGRINSVDLLITEHFGDGTARTDKKAFKTADDLDAFLGALKSALEQDREHFPWDEYDLTIDAESTVQLEQGQQVAHLWRTQPAQRISLDDVYQLDGYSGRIEGIGAAKPIYVPVFQRDKTQSEDESGWLPTDLTPMVKVTLQGHEGQVLIPLTKEWVKDFDKQVSDAEREGAAEVKNASLPTSLETAQARTLADGFKAMLGGQDHVKVERESKPKEKKGPRETLLVKTNFHGVDYLEERRATLALPEGWEAQLPRSLRQSIKLKTHQLHGVAWFQHLVSKAPAECRGALLADDMGLGKTLQLLSLLGWYYEENPNAAPSVIFAPKSLLENWANEARKFFSDSFPEILVLYDDTLKARKQPLSLIDIQLRDKGIVELLKPDWIGTAKVVVTTYEILTSYEFSLAKQPFTFVICDEAQRIKTPGTLVTLAAKKLKADFRIACTGTPVENSLADLWCLFDLVQPGLLGALEEFGKTYRRPIECQTEEQVTALQRLQAAIAPQTLRRTKGDIAADLPKKFFAYKKAAEAELQFKPHLGNDEMLEIPLTEHQRILYKGGLKKLQEAAHESNGRKRAQLSFGALHLMKAVCAEPYCLPGTKFIVDKGGREPHLANSPKLGWLLARLADIQRTGEKAIIFTELREVQAGLYYFLKETFGLRPFIINGDSQGRQGYIDKFSAQPGFDVIILSTLAAGAGLNVTAANHVFHFTRAWNPSKEAQATDRAFRIGQEREVFVYCPTVVADDFHTFEVRLDQLLKRKAGLAGSTLDDGGLSGALTVMLNGSGKDATFTELVGDSGCGEALPKQYLTMDDVDRMDGDSFEVFCSLLWGKRGFQATVTPKRGGDGGIDVVALKGREGELLQCKSSKASDVGWDAIKEVTAGAAKYQARFRGTRFRRLAVTNQSFTTGAREQAAANQVELVVRSHLEEMLGSHPITNHEFDTALQEQTLYSEVMA

SEQ ID NO: 1844 - protein, 669 aa, Bordetella bronchiseptica MBORD762
MNEISKALGVAHPSLASLHGLPLYVFLLVAVLTLAFLIGYVVKGTQVWWQLRSALKAVRSLLKTGPAPNPTEVASAFRREPLKHLWIEYADTLHELRQAGSGGTALTEFRATIPAEAMFTKEVLVDGRLFDEFTRHLPGVLTGLGIIGTFAGLLSGLDKFKVDPEKIQNTVNGLGPLLEGVQHAFVASGSAIACAMLVVFISRFTLAYFYRLVEHLTNGIDSLYRTGAGEEYLARLVKSSEQNAASTAQLKDALVEDLHKMMTNLVDRQIAAQETASLALGKHIGEAISTAIAEPMKRVGDAMEATSRGNGEQVNSMLEILLTGFMAKLEDTFGGQMRGINEQMQRSMDSMAAVQASLQGLLSDIRSTNEHAASQMSGTLEEAMKKAADNQQLLTEQMREFVQDFRSLVTEEQSKSKHAMNEAVTKVLGEVATAMEGLENVRKASAAEESGRNDRLATQTNQLIGGLTTQVESLLGAVSDQVSKTQRNIDALGDVSLRAIDGMNQGALTIGSAAQRFETAGAAVTDAFDRSTKVAETLATTAASLQAASTAVQRGFEQYDSTRKTVDTQMAALMGLIESVKREAGISQELVNSIKTSAEAMRQSEAEAREHLGQVNAALVKAFSDFGNALVSQVKSTISETDRHLAQGTGHLNGVVQELANAVQRMKRA

SEQ ID NO: 1845 - protein, 234 aa, Bordetella bronchiseptica MBORD762; identical to SEQ ID NO: 1841

SEQ ID NO: 1846 - protein, 570 aa, Bordetella bronchiseptica MBORD762; identical to SEQ ID NO: 1842

SEQ ID NO: 1847 - protein, 1293 aa, Bordetella bronchiseptica MBORD762
MGLFDFLKRATSSNGQEPTLTTIWAADGARIEFNNDIMDTTPEGLLEAIHQAGAEDSVLGAYLAQLASESRCRIDAHGVTIPWPDVYELQGSAEHAGALKLLALPPQSPLRPIIDGSGTLSSDDFTVEVSGWTDGAQQVQVDRLDGAVATVGGTAQMLSASAWAAVSDIVALQSRPPEGRTQHAQEMAWGRIRSHADRAGALYASPYLETTLVLTPESLRLPLAKEETPFGRVLTVSPTFDGAPDGWLAAFDGFNSVQPHYDLTRGAGRVRVVISEPVRKVLAVIKREMPNRKVAGAKAEKFIHNPFAFLGDTAHQVLKEGEFEADRVEAGAVAAVFSIVGRTEHGRINSVDLLITEHFGDGTARTDKKAFKTADDLDAFLGALKSALEQDREHFPWDEYDLTIDAESTVQLEQGQQVAHLWRTQPAQRISLDDVYQLDGYSGRIEGIGAAKPIYVPVFQRDKTQSEDESGWLPTDLTPMVKVTLQGHEGQVLIPLTKEWVKDFDKQVSDAEREGAAEVKNASLPTSLETAQARTLADGFKAMLGGQDHVKVERESKPKEKKGPRETLLVKTNFHGVDYLEERRATLALPEGWEAQLPRSLRQSIKLKTHQLHGVAWFQHLVSKAPAECRGALLADDMGLGKTLQLLSLLGWYYEENPNAAPSVIFAPKSLLENWANEARKFFSDSFPEILVLYDDTLKARKQPLSLIDIQLRDKGIVELLKPDWIGTAKVVVTTYEILTSYEFSLAKQPFTFVICDEAQRIKTPGTLVTLAAKKLKADFRIACTGTPVENSLADLWCLFDLVQPGLLGALEEFGKTYRRPIECQTEEQVTALQRLQAAIAPQTLRRTKGDIAADLPKKFFAYKKAAEAELQFKPHLGNDEMLEIPLTEHQRILYKGGLKKLQEAAHESNGRKRAQLSFGALHLMKAVCAEPYCLPGTKFIVDKGGREPHLANSPKLGWLLARLADIQRTGEKAIIFTELREVQAGLYYFLKETFGLRPFIINGDSQGRQGYIDKFSAQPGFDVIILSTLAAGAGLNVTAANHVFHFTRAWNPSKEAQATDRAFRIGQEREVFVYCPTVVADDFHTFEVRLDQLLKRKAGLAGSTLDDGGLSGALTVMLNGSGKDATFTELVGDSGCGEALPKQYLTMDDVDRMDGDSFEVFCSLLWGKRGFQATVTPKRGGDGGIDVVALKGREGELLQCKSSKASDVGWDAIKEVTAGAAKYQARFRGTRFRRLAVTNQSFTTGAREQAAANQVELVVRSHLEEMLGSHPITNHEFDTALQEQTLYSEVMA

SEQ ID NO: 1848 - protein, 675 aa, Zymomonas mobilis subsp. mobilis NCIMB 11163
MSIFFIGTPVENLILLVSGIFKEDGFPGIVVFLMVVACFILIFQMNREFHHQKKLINKLSDKIKGFSKASFTKEGVPSIGIWLRDQKLSYDQKKILFAWDKFEKTLISTSYSDNSYILTTVQPDYFFNTDALSFGLGRWRIIPGLFVSIGLACTFLGLIAALHQMADQQITSETMQALMKIASAKFIMSLAGLVCSIVFMIFMTRMKSLPEHALHDLVSNLDEHLSPLSLEKLGQEQLDVQQQILNVQKTMANDFVAELGRSLKEDVTPAISNSISEVMHPIISKVSQHSTDSITTMATNLSQQISGGVEHALTVASERIAMAGDRIAQLVERMDLSSGRMGSEIENTIVRVSQAVDDLRNTINKEANSTSGVFVHGAEQLLATMNTTLESIRDNTGIGARAISDAATNMATASKAMRAEMEEATQSGSKAAYLQISEAGNSVSMAIDSAGQSVLSALGNTTNKVAELAGDLGEKAGRELLEPISLIAEKLERLLSMIDSGVLAMRDMSNSVQAGANAGEIAANSFQGASADLVNATQPIRSTTEQIENILRILSQNIESSTTIITRSAETTAISSANVLKSAKETLGGEQRSIEIALQGVEKIANRMQGQAQKLDDIDLKLGHAFEVYATQTGEAMDSMRTHVVQMANELNKALDTLKTIVDQLQDFVPQQGHN

SEQ ID NO: 1849 - protein, 273 aa, Zymomonas mobilis subsp. mobilis NCIMB 11163
MEHKYHIRQEEKEEAESVFVSMTDIMVSFLFIVMLLMAFFASHYSDNQTIHHDPLEIYNAKSENIRHNIIMHLVEAVRADIKKEKIEGLEVSTQGDALRFQGNGLFASGQGGLSGNSLRIIKLLGHHLADFMPCFAVGSKGAVALSCNPDLVMLETVQVEGHTDSNGSHQNNLVLSTTRAISAFNEIVPDSKNNDMPEMLEFQNLLGQPIMAVAGYGEMRPVGNNATAVGRAANRRIDMRFIMYVPPGRDLIPHKVEDIDRISSLLKLQDLKK

SEQ ID NO: 1850 - protein, 433 aa, Zymomonas mobilis subsp. mobilis NCIMB 11163
MTQTGTPLSQILADGVEFSALESIPLDSIYCRVRLILDNYDEILPLEKDPEKILAKMLRLIETWDWSNVPLSFPLQVARFVFSQKNINFNIKIICDFLLKEILSSTKSGFLNSMVGIYIETFSKNNIFTPILGEHLFKSRLYLGHQFTNLLTKVPNFFDASTVVTTIAEFIENVDDPWESLKQIGIRHPHAPGLMSEVHSTFVRQIAPKLQERFYIDKLFTWLAPRNNAPLQNGASEALNAIMSVWEKDEPDKEIKKYLIDRITALYGHPQVGRSPVWAEVSEENERRLLHWIMGNDIRFLFQILAEVEKRHMWHDRENFWWTMYESGKINGLWIAFNPVGFSVAKKRLKTAFTRFAEQTGESDKSLLIMHIGNNVVVEGTYNFQIHIFNDQDPEAPKLYKPKYNVNSIREKSAKIKIMHQGKGWMDKVYKNL

SEQ ID NO: 1851 - protein, 1034 aa, Zymomonas mobilis subsp. mobilis NCIMB 11163
MSFDYSYNNDRVIINVPSRHSKFLGFLQKNKNFQKVDSKNFDLAIAIADISALADELKEPYEIHQKYIILSHRLVGSVDSQTAKILKLPPITDLVLKTDVEGVVGSSSFRLRAEWHRNNQHLTVNRIGSIIETSRGRQRIPAWMMDVLNIADGCRASNNDSIDWDVLARFRQALDLGAENIKDGHASCISMTDFLSGLHVRLADRFSISPNEQGTDFKIIPFSGQKIDDSEETSENMAELKGLHLADFQRKLKQKGVLNTFRLSSNEYLVIDRAAKPVLKLLHQMQEASLEERKVFIRNPLPRLTQAIKQDLYNNGKLSNIDDLLQEELIEKSVLPAFIETIEYNSFSERVIGIGKFVPPDLGINQSTVTTWLPEVFEEEEIKYLRTKTTKELEDLETQLEQAIRNKKETVIWKDMNFSAKPNILDELRCLIISREKSLEDNHPSEKKENLTNNDSDTIVLKTQDNFEKAIYSPAIKPRFSSIPTRIPSSIVTPLKQHQRESFDWQVNTWKFGLSGIFNADEQGLGKTLQTISFLVWLNELMEIDKSRRAPILIVAPTSLLHNWENEVDNHVEKVGLGHIIRLYGRGIDIRRRDGTSGIDTKTGEALLDFDDIMRNFYEGNGHFTCIITTYTTLTNYQHSLSKIPFAVTVFDEIQALKNPASLRSQAARSINADFRIGLTGTPIENSTTDLWAIMDQLVPGHLSSLLDYQRHYSNPTKDNMKALYQKVFCSTGQRPALALRRLKANVTCDLPSKTRLILPKEMPEVQAKAYDDIRKKLKEGQRGNALKLLHHIRTASVHPAVSSVSTDQKFIAQSGRLAATFEILKRIKTRGERALVFIENLKMQYRFAALVRSEFGLERVEIINGQTSISERQKIVDRFQKHLKDSKNKFDLLILGPRAAGTGLTLTAATHVIHLSRWWNPAVEEQCNDRVHRLGQTQPVYVYVPMAIHPYYKSKSFDCLLHNLMQKKRRLAQNILWPMADTANDVSQLQAQLINDENILEVGDCVRNAMIGMYADEDVLCPTPDNNGAFLYI

SEQ ID NO: 1852 - protein, 675 aa, Zymomonas mobilis subsp. pomaceae ATCC 29192
MSIFFIGTPIENLILLVSGIFKEDGFPGIVVFLMVVACFILIFQMNREFHHQKKLINKLSDKIKDFSKASFAKEGPPSIGIWLRDQKVSYDQKKILSAWDKFEKTLISTSYSDNSYILTTVQPDYFFNTDALSFGLGRWRIIPGLFVSIGLACTFLGLIAALHQMADQQITSETMQALMKIASAKFIMSLAGLVCSIVFMIFMTRMKSLPEHALHDLVSNLDEHLSPLSLEKLGQEQLDVQQQILNVQKTMANDFVAELGRSLKEDVTPAISNSISEVMHPIISKVSQHSTDSITTMATNLSQQISGGVEHALTVASERIAMAGDRIAQLVERMDLSSGRMGSEIENTIVRVSQAVDDLRNTINEEAISTSGVFVHGAEQLLATMNTTLESIRDNTGIGARAISDAATNMATASKTMRAEMEEATQSGSKAAYLQISEAGNSVSMAIDSAGQSVLSAFGNTANKVAELAGDVGEKAGRELLEPISLIAEKLERLLSMIDSGVLAMRDMSNSVQAGAHAGEIAANSFQGASSDLVNATQPIRSTTEQIENILRILSQNIESFTTIITRSAETTAISSANVLKSAKETLGGEQRSIEIALQGVEKIANRMQGQAQKLDDIDLKLGHAFEVYAMQTGEAMDSMRTHVVQMANELNKALDTLKTIVDQLQDFVPQQGHD

SEQ ID NO: 1853 - protein, 273 aa, Zymomonas mobilis subsp. pomaceae ATCC 29192
MQHKYHIRQEEKEEAESVFVSMTDIMVSFLFIVMLLMAFFASHYSDNQTIHHDPLEIYNAKSENIRHNIIMHLVDAVRADIKKEKIEGLEVSTQGDALRFQGNGLFASGQGGLSGNSLRIIKLLGHHLADFMPCFAVGSKGAVALSCNPDLVMLETVQVEGHTDSNGSHQNNLVLSTTRAISAFNEIVPDSKNNDMPEMLEFQNLLGQPIMAVAGYGEMRPVGNNATVVGRAANRRIDMRFIMYVPPGRDLIPHKVEDIDRISSLLKLQDSKK

SEQ ID NO: 1854 - protein, 433 aa, Zymomonas mobilis subsp. pomaceae ATCC 29192
MTQTGTPLSQILADGVEFSALESISLDSIYCRVRLILDNYDEILPLEKDPEKILAKMLRLIETWDWSNVPLSFPLQVARFVFSQKNINFNIKIICDFLLKEILSSTKSGFLNSMVGIYIETFSKNNIFTPILGEHLFKSRLYLGHQFTDLLIKVPNFFDASTVVTTIAEFIENIDDPWESLKQIGIRHPHAPGLMSEVHSTFVRQIAPKLRERFYIDKLFTWLAPHNNAPLQNGASEALNAIMSVWEKGEPDKEIKKYLIDRITALYGHPQVDRSPVWAEVSEENERRLLHWIMGNDIRFLFQILAEVEKKHMWHDRENFWWTMYESGKIHGLWIAFNPVGFSVAKKRLKTAFTRFAEQTGKSDKSLLIMHIGNNIVVEGTYNFQIHIFNDQDPEAPKLYKPKYNVNSIREKSAKIKIMHQGKGWMDKVYKNL

SEQ ID NO: 1855 - protein, 1034 aa, Zymomonas mobilis subsp. pomaceae ATCC 29192
MSFDYSYNNDRVIINIPSRNSKFLGFLQKNKNFQKVDSKNFDLAIAIADISALADELKEPYEIHQKYIILSHRLVGSVDSQTAKILNLPPITDLVLKTDVEGIVGSSSFRLRAEWHRNNQHLTVNRIGSIIETSKGRQRIPAWMMDVLNIADGCRASNNDSIDWDVLARFRQALDLGAENIKDGHASCISMTDFLSGLHVRLADRFSISPNEQGTDFKIIPFSGQKIDDSEEISENIAELKGLYLADFQRKLKQKGVLNTFRLSSNEYLVIDRAAKPVLKLLHQMQEASLEERKVFIRNPLPRLTQAIKQDLYNNGKLSNIDDLLQEELIEKSVLPAFIETIEYNSFSERVIGIGKFVPPDLGINQSTGTTWLPEVFGEEEMKYLRTKTTKELEDLETHLEQAIRNKEETVIWKDMNFSDKPNILNELRCLIISRDKYLEDNHPLEKKENLANTDSDTIVLKTQNNFEEAIYSPAIKPRFSSIPTRIPSSIVTPLKQHQRESFDWQVNAWKFGLSGIFNADEQGLGKTLQTISFLVWLNELMEFDKSRRAPILIVAPTSLLHNWENEVDNHVEKVGLGHIIRLYGRGIDIRRRDGTSGIDTKTGESLLDFEDIMRHFYEGNGHFTCIITTYTTLTNYQHSLSKIPFAVTVFDEIQALKNPASLRSQAARSINADFRIGLTGTPIENSTTDLWAIMDQLVPGHLSSLLDYQRHYSNPTKDNMKDLYQKIFCSTGQRPALALRRLKANVTCDLPSKTRLILPKEMPEVQAKAYDDIRKKLKEGQRGNALKLLHHIRTASVHPAVSSISTDQKFIAQSGRLAATFEILKRIKTRGERALVFIENLKMQYRFAALVRSEFGLERVEIINGQTSISERQKIVDRFQEHLKDSKNKFDLLILGPRAAGTGLTLTAATHVIHLSRWWNPAVEEQCNDRVHRLGQTQPVYVYVPMAIHPYYKSKSFDCLLHNLMQKKRRLAQNILWPMADTANDVSQLQAQLINDENILEVGDCVKNAMIGMYADEDVLCPTPDNNGAFLYI

SEQ ID NO: 1856 - protein, 729 aa, Enterobacter aerogenes
MSWLNSLLVALTSVEPHWVPFTVIGLVTFAFFCFIFFYLVRAVRIVNGLKKYTQSINSLENSTPEAQLEQLKSLFQRPELRHAWNEFEESLHLQSEQSNGEENIVRVRATAPSASFFSEQQLVDIPLNTEFFKHLPGILTGVGIIGTFYGLMIGLNHFDPSTPEQVSSSVNNLLHDVLYAFLGSAFAIFASILVTWLEKLSIAKCYKYLEKFTASLDSLYDSGVGEEYLASLVKSSNESATQARHLKESLVTDLRDMLLHLAESQKVENERLANTLSATYRESGSQFADQVSGAIENSLKSPLDKIAGAVQTASGDQSGMVQNMLQDVLTAFMAKLDTTFGQQFTNLNEMMGQTVGAIQTMQTGFATLLQDMRQVSDDSRQGSAQLIEQLLSEMKSGQQAMQAGMNDMLSSLQASVAKIGAEGEGAGERMARQLEKMFADSEAREKAQAEHMTAFIEAIQNSVQQGQSATMEKMAASVESLGEQLGSLFGQIDKGQQQISATQQANQQSLHEQTQRVMSEVDDQIKQLIDTVASQHQGTTETLRLLAEQTNRQIQDMQNGADKMRMAAERFEHAGDRVSEANHLTADVLNKAQSAGSSLSLATSELTSVVADYRNNREAVSKSIAMLELLAANTQSEQTTRNQFIADLKQHGERLQSYNREAQAFMENVSDVLGKGFEDFSEGVSRSLDKTLGKLDVEMAKASTLLAGSVEQIGESVSELDDVLSRVRA

SEQ ID NO: 1857 - protein, 246 aa, Enterobacter aerogenes
MFGNAFGVKKRRSDEAEKPFWISYADLMTAMMVLFLVVMVASLSSVTQRIQRAEQGEKVRGQDISRLCERLELHARNVNKTIVVDCHDNRISFGEAGRFDHNRFFLNAEGQKALQDVVPLVLDAADSDEGKKWFKQIVIEGFTDTDGSYLYNLHLSLQRSEWVMCSLLDSRSSLQKSISSEQQIQIRKLFLAGGVSFNNAKESKEASRRVELRMQFYGLKDKRDKANEVDFPPVVNKEVCQLVMPQ

SEQ ID NO: 1858 - protein, 559 aa, Enterobacter aerogenes
MTPALNALAQRIATKLSASQRDDHYLHNDFHALASAAFDMEKRFDKAEKIPLPPQEMRLAALRRLRLAQELSEREWRMVFYGLADNDPSYPDQPILLEDDAFFPEVNNAIKKRLETKTLKRRDWVALCSSYFAYQNPSPETNPHWCVLRGHIAQGYLVVKAAIRREKSWMKTIEFYHDIFTPQAGGVISRQLLAGESNSLSSLEKIAQIPDSSWLWKRIFTVLLAQLDTLDDPQFLDKISWLLGLAGQWVRFRDDIMTATLTRYYHSIYRDQPHSALKQAALEYWDSPQLKSQQNKWHQYVSEPVAAMVRGWLAKQDLMHFFELLRGNGDVDQARLHYWLRFANQMGFTRIVMGTDAWQDRGSDFVKFRDENKGRLSYLRGGRSLDNAMIMQINDYLFVEFSGTGNAMYAYRIGHAPFNPESRTLDINHLKDQGRCVIRMPHTPRAEGYNKVRITGWMLKYDDELRKLGIRWMAEEPVKFVDKKSSSPFSLSAIKIINPLRDTAIQHLVEGSSCIVSDNRQKGGVLSVQLRTPDDTIERELLRLGFAPVTKESHRYWIK

SEQ ID NO: 1859 - protein, 1081 aa, Enterobacter aerogenes
MLKRLLSKLTGNRQQIERHLKNQYQVEENGLSFPQSLVDDPELWALASWLEQLAEEDYLISLTDRWLLSWDALYRLLEDEEHASSLPLIGVPDVLPLRASLCSRGALSDSDFLVWIADWATLPARKPIRFSRTGAILTHENQQYLLSRENWALLQATEQLSAQQNQTPGETTNQLGWAAIRKCAKQAAAKFDDYLEKTHVVKPTSLSLRLRKATVADTAVIEIEPQFEDQPANWLGSFDKNSQVHDSYRIPGENGELSHVIIPPEVKEVLNSIHSIPGRRVAGSEALSFVRNPYTFLGEDAASVIAPEEHEQALFDARIFFHHFRLIPQLNAESKIAEVMLVLEPVSPVPQPEITFVFSAPWELGKFVQQLGISVAAQMPAGSWQGYELELSQFTEQQWHDCQALLTRWQQEIEGKEFSDVLDIAKYGDRVIGIGEFEKISSPWLTKAQSENWLPDDIDFSAFSVETLSGWQPENLHHFDELQERITQAEAAGETHIIAPWNDSQLPLDAAKTFSKNWEKQQSTANESQGNVADKTARAVLKIEQNIEEAAYIKQRRNSLLNARHAEPEIPLSLKEHIRLKDHQREGVAWLQQLFLRSPEETAGCLLADDMGLGKTLQILSFLVWFIEKFPQEPPSLIVAPVSLLDNWERELDNFFYTAGIPVLKLYGETIKAVKYPKQAIPAHLQSQGIKNLLKPGWQGEAKIILTTYETLRDQEFSLARQPWSIMVCDEAQKIKNPAALITHAANAVQARFKVACTGTPVENTLVDLWSLFDFAQPGLLGALNEFGKHYVRPIENEDGRDTERLESLRALIEPQTLRRTKEEVARDLPQKIEVESCKQLTLSGVQKQLYLSSVANWQQQQALSEGMQQAGSGMLGLLHRLKLICAHPAVVNPEPRFRDNSPKLNWLLKILEEIKHTSKDKVIIFTELRDLQRELQHAVHLKFGFRPVIINGDTSTKSRSQNSRQRLIDDFQAQPGFGVIILSTVAVGFGVNVQKANHVIHFTRCWNPAKEDQATDRAYRIGQTKDVYVYYPTVRDAEITTFEETLDDLLLRRRTLARDMLCATPELSSADFEGVLKGHS

SEQ ID NO: 1860 - protein, 851 aa, Enterobacter aerogenes
MFSLTSFLDTLTSVNPENVPKYVVLVVAVLLVCFIARYAIPSFVISARFKQKARAIQLIAKDKPAQQLEKLDALFSGKFFVHPWSEFKESLHRQFELDEDSGQKRIHSIRSTAPASAWFSEPLLVEIPLYTEAFKHLPGILTGIGIIGTFSGLMIGLHHFDPSTPEQVSASVANLLRDVLYAFLGSAFAIAFSILVTIFEKWRLARCYKNLELLTASIDQLFEGGVGEDYLSQLLSSTKENTTHAKQLKDGLVSDLREMLQNLVDSQVRENQKLAETLSSTYRESGQQIAEQVSGAIETSLKSPLDKIAGVVQTASGDQSHQVQSMLENVLTAFMNKMDNTFGQQFTTMQEMMGRSVEAIQSMQSGFSTLLQDMRQAGDDSRQGSAQLISQLLSEMKSGQQEMQAGMNDMLRSLQESVARIGAEGEGAGERMAQQLEKIFADSEAREKAMAEQMRAFIEAIQSSVQQGQNETMEKMAASVDTLGSHMATLFAQLENGQQQLNQQQNQAQNLLMSNMSKGVEDLTQNLAGVFSQLESGQKQMSQTQEQGQRALYEETQQLLARSEAREQAAAEQQQDFMAALQQTMHSGQDALREKMTSGIDQLGSQLGTLFGQLEEGQKSLSQQQQSAQNALQQEAQRIIGQLESQVQALMQMLREQQSASGDLLQRMAQNTTRHLEEIQAGADKMRVAADRFETAGNRVAEANNLTAEVLNGTQQAGRTLSSASAELGALIADYRNTREVVANAISALETLINSSHDEQTSRSRFVEDLKSYSERLQQYNREAQEFLHNVAEVMGTSFESFTTGVESGLNRSLQEMDTQLTKAAGALSSSVEIIGESVDTLETVLRSRRA

SEQ ID NO: 1861 - protein, 245 aa, Enterobacter aerogenes
MFNRAFNGRQRRSDEAEKPFWISYADLMTAMMVLFLVVMVASLSSVTQRIQQAEAGEKSRGHDIARLCEKLELQAKNLNKTIHVDCHDNRISFGEAGRFEHNRFSLTPEGLKALQDVVPLVLDAANSDEGKKWFKQIVIEGFTDTDGSYLYNLHLSLQRSEWVMCSLLDSRSALQQRITADQQLQIRKLFLAGGVSFNNAKESKEASRRVELRMQFFGLKDKKQDESMDVVPGISQETCQLGAVQ

SEQ ID NO: 1862 - protein, 597 aa, Enterobacter aerogenes
MTSAIEKLKSRLLPYRQKNEAPVVGHPFTYLQRVISQLEKKVDARAVQMVPPKEKRRQAISRLRSGVTPLPSEWKMIFFGLNDVAEDDLFDTALIDDAANFAKISAEIQSKIAQQRLTRREWLALCTSYFGHASDTPEENPQWLQLRMQIAAGFEQLKESSPRSLSWMTVIDTYGDIFTDNAGFLLGQQLGRGEITDISVLEKVAQIPQTSWLWRKIVNHLVSEIFRQTDDEFEHKINELIALSRQLSRFKDNILAATLTRYYQSIFKHRTHLELKLLALEYWGNPQLTSRNKGWQVHVDNAVLLMVQGWFAKDDLKLFFELLKGNRDVDQARLFYWLRYANQMSYTRIVLGEDAQRSKDIDYVDFRAKNAGRLSRLQGPGSRDNNAMIMRIGNYLFVEFSKVGAMYSYHIDNAPFNPETGILDIDYDLKDKRNNRRKVRLRLPHLSPVTHYSLNRIEGWMSRYDEELRRLGISYVAEDSNQPSATIDISRFNADQSGGRSVSSPAKSEVNESRSNREEQIKIIAASLKAKKENQNFTTREQQIREVIRSVDCKVMDKRGMGGAIHIQFNEPDHEAAKKLLSLGFKPVLGKFTYWSK

SEQ ID NO: 1863 - protein, 1079 aa, Enterobacter aerogenes
MFKKLLGKFINDNKAVPASLVPLYAIKAEGFAFPFSLADTQDNWLITSCLEQLHEEDYVSHWSDCWFISWDDFYRILNNEDYASSLAIFSFPQQRNLTAHLAATGSISDDTFRVFIDKWTQPDDYRPVEVTNLGASFSSPEGTFVLSEENWQLLDSLQQLRLQQRQTPGETVNQTGWAKIRRQAKKAGAKLDDYLAKTIVIRPESLQLKLRKSLVADTRVLEIEPVFDEQPAKWLQSFDRTQQVQDRYRVLGDDGELSHVILSPEVKDVLTSVHAITGRRVAGDDALSFVRNPYTWIGEEASQVLDPDVYEQNLQDAGIYFYDFRLEPRVDENMQVESVSLILIPRTEQPVPDETYVFHRPIELAALITELEQKLAAHLPAGVWQGYDLELSRLTPNELQEYQALLEVWQQQAAGLNFSHVLDLNKYSDRVIGIGEFEKISSPYLVKSESENWLPDNLAKEMCEAMFSGWDLDNHQHFHELETRLEDAKASDAPEVAMPWNDNLLPREEAEVFHEKWKKKIDAETSNTANTEPVSRAVLLIEQNIEQALYVKQRRTSLLEAHLAEAELPMILKDSIHLREHQCKGVAWLQQLYLKSPTETAGCLLADDMGLGKTLQILTFLIWHRERFPDAPPSLIVAPVSLLDNWEREVGNFFLREQVSILKLYGNELREKKCAKESIPLALKSKGIKNLLQNDWIGEAQIVLTTYETLRDQEFSLARQPWSIMVCDEAQKIKNPAALITQSAKAIQAQFKVACTGTPVENTLVDLWCLFDFVQPGLLGALNNFGKDYLRPIEQQSNDKVLESLRKLIEPQTLRRTKEEVAKDLPEKIEDKSCKQLSMLPLQRDLYTHSVVSWQNQQEISDGLDQRGAGMLGLLHRLKLICAWPYSVSADLRLRNDAPKVKWLLDTLNNIRQSSDDKVIIFTELRDIQRELQHLVSQHFGFKPFIINGDTSTKSGSDQNRQSLIDNFQSSPGFNVIILSTIAVGFGVNVQKANHVIHFTRCWNPAKEDQATDRAYRIGQQKDVYVYYPTVRDSQLMTFEETLDELLNRRRALARDMLKASADLTAADFEAVLTRANTN

SEQ ID NO: 1864 - protein, 678 aa, Pantoea agglomerans
MDSLLLPGVLVRNGILSIASVLKYDAAPGYVTILLVTALCLTVLYWRKAVKRRRKALSSIHSIIANTPEDQFSQHVTEIDASIAAADKTEEQKNVAEAWKEYRETHVIDDRDGPPVVRNAVRPSQFFNLDDLHFTQGFWRIVPGLFVTVGLSLTFLGLISALNSMSTSLDDGGSAALEGLLTIASAKFIMSLTGLCCSIVFTIWLRRGTSQLEKAVHSLNSLIEKRLTFISLEDLSIRQLKATIESREHFRKLGLEMVAEIGRPLREDLPRAISESISTAITPVIEQVSRLGNDGVGEMVQNLSSRFSEDVGRALAQASERISLAGDQIKLLAERMDQSSGKMGNEMESAIGRLGQAVETLRDGMQQTAETATSAFNQGAENLLATMNSTLQGIKDNTGEGARAMGEAAADMKAAALGIRTELEVAAKQGAEAAQARMSESASKASDAIGQAATQVLGAFGNTAGEITKATEAMTQKASSELLSPLSAIAEKLEDVMGMLTETSTALRRASDGIKEGAVASENASGSFRTSAQSLASAADPIRAMMERIEVSTRQLRESSENSLLAIAQAAKTNAEQSAMTLSAAQETLGGQHRAVESTLTNLQSLIAALRGQGERLDGIDEKLGKAFDSYQQQVATSVETLFDHVKTLQNELMPALDTMQSIVDQAENFAPKQGRIS

SEQ ID NO: 1865 - protein, 287 aa, Pantoea agglomerans
MRANASRKRSHEEEEESVFVSMTDMTVSFLFIVMVLLAFFASRYNDKNTVPRNEYEQAVQIRDKTIVDLRTEIALLKQVDPLEQYMSQAAAARLNLLYQLRNNLKHSFPELPVDVIPEEGTLRFQGEGLFTSNSYTLSDDKRKIVEALAKTLDSLLPCYTFSQSVGWNKSCNPSFAIIEAVQIEGHTDSKGEDVYNLNLSTNRAITTFTSMLAAAPDLVAHFNMRNQPVLSVAGYGKMRPVKPNDTPQNMAMNRRIDLRIIMHTPANAAEIEDIRKRLFEPLRKSTL

SEQ ID NO: 1866 - protein, 441 aa, Pantoea agglomerans
MKLSDVFLKPVALVKPAIAVSKGLTVKIQAIHERWPDVVKEIADRDREKVLRKLLDYIERWEWNDVKMSFICSGAPIVFDKEFRTQEEFAVLQEFYLRETIVTDSQPFISAMISAYIRSYEPGSVHTIKIKNCLDIASEHMSDKWKDIVEQLPEFFNAHQAHQALAERMTEMDAPWKELKQFGITRPHDPGLMSHAHLAYIASLAPGLNERPAIEKLFAWLKPEGRSGALMNGAAEAINALLSHWLHKQPDEELSRYLTETLVAWYEDPRLSRGGVWGSVDESCRNLIINWLTRENILFFLDVVSDVEDSHMWEPRRKFWLNLYHQDKIDSAWVAFSAEADVRARSIKRTMRESATLTFGRQVAGSRKNTSLLILKIGRCIVVEGSHNYKVHIFSNDNKKAPELFRLAYDCEHIRMLPNPVAIPHLGGWQEKVREQIEYLS

SEQ ID NO: 1867 - protein, 1042 aa, Pantoea agglomerans
MTFAFNHNAEAITLNIAEEKQSFIHRLFKRQQPATLSGLTHNDRALAFAIADLKALAEEFSEPLHISDDTIVMGHHLAGRLDAETAQALGMPPLVDLTLKTDIEGSIGSDTFRLQHEWLRNGIRQIPRRTGTILATSQGLRRLPLWMMEAVEVAENFTPGGGEASDWESLARFRQALDPGVQMGHEIDAVRVSLTDFMQGLEVRIADRFSVSTSANGADDFEIIPFSGKNLEELESNGEAISESAGELSEQTLRRFQQRVRTQGALSAYRVGEGNYLVIDRSARPILDVMVEKQKSSPDERRAFIENPRPAITSAVEKYLRQSGRLDGLDDVGEEEAIEAAAGPAFVETIEYSERVKGILHYRKGAVSTPMTGETVWLPEVIPDALTNIITAMDSQALASICDQLRNAIDASQNEVEIASHPVKATEETLHALEKRLANLIEIEGSAETTESEDKVAVDVQPPATVILDTKDNFEELLWQPDLKKRSVFIDEQLPAGVKTALRPHQLGSFSLQLSSWKSGMPGILNADEQGLGKTLQTIAFLRWLKENNNVSTVSNKERGPVLIVAPTSLLENWNAEVRQHTDSDGLGHLLRLYGSSLSQYKDFDAKGVETKDGNTLLNFQQLHEAIKEGKGHRFWILTTYTTLTNYQHSFAKIHFSAVVFDEIQAVKNPDSLRARAARAVNAAYRIGLTGTPIENTTTDLWAVMDQLAPGSLDTLSNFNTLYSEPDEQNMLQLYQRVFECRNQLPPLAFRRLKEDVAKELPAKTRFLHPRLMPEGQAIAYETARLKLSQGGPGAALKMLQHIRGVSVHPAMEMSGDNQSFIDASARLNACFEILHRIKAKGERVLVFIEHRKMQFRFMELARQEFGLEYIDHINGDTPIQKRQAIVRRFQHHLEQDGGFDLLVLGPKAAGTGLTLTAATHVIHLSRWWNPAVEEQCNDRVHRIGQQHPVQIHMPLAIHAGYQEHSFDCLLQGLMSRKRSLARAALWPMGDSAGDISQLQAALRKDKSEASGDILETTIRMMFERDAETDGTRMDNGSYRIS

SEQ ID NO: 1868 - protein, 729 aa, Enterobacter cloacae subsp. cloacae ENHKU01
MSWLNSFLVTLTSVEPHNVPFTVISIVCLAVACFIFFYLLRAIKIVNSLKKYTQSINSIESNSPREQLAHLQNLFKRPELKHAWNEFEESLHPQSELEDGEEKIVRIRATAPSSSYFSEQQLVDIPLNTEFFKHLPGILTGVGIIGTFYGLMIGLNHFDPSTPEQVTSSVNNLLHDVLYAFLGSAVAIAASIFVTWLEKLSIAKCYKYLEKFTAAIDKLYVSGVGEEYLASLVKSSNESATQARHLKESLVTDLRDMLLHLAESQKVENERLANTLSNTYRESGAQFADQVSGAIENSLKSPLDKIAGAVQTASGDQSGMVQNMLQDVLTAFMAKLDTTFGQQFTNLNEMMGQTVGAIQTMQSGFSALLQDMRQVSDDSRQGSAQLIEQLLSEMKSGQQAMQAGMNDMLTSLQASVAKIGAEGEGAGERMARQLEKMFADSEAREKAQAEHMSAFIEAIQNSVQQGQSATMEKIAASVEALGEQLGSLFGQIDKGQQQISANQQANQQSLHEQTQRVMSEVDDQIKQLIETVASQHQGTTETLNKLAEQTNRQIQDMQNGADKMRVAAERFEHAGDKVSEANHLTADVLNKVQSAGSSLSLATSELSSVVADYRNNREAVSKSIAMLELLAANTQSEQTTRSQFITDLKQHGERLQSYNREAQTFMENVSDVLGKGFEDFSEGVSRSLDKTLGKLDVEMAKASNLLAGSVEQIGESVSELDDVLSRVRA

SEQ ID NO: 1869 - protein, 245 aa, Enterobacter cloacae subsp. cloacae ENHKU01
MFGNAFGVKKRRSDEAEKPFWISYADLMTAMMVLFLVVMVASLSSVTQRIQRAEQGEKVRGQDIARLCERLELHARSVNKTIVVDCHDNRISFGEAGRFDHNRFFLNVEGQKALQDVVPLVLEASDSEEGKKWFKQIVIEGFTDTDGSYLYNLHLSLQRSEWVMCSLLDSRSPLQKNISAEQQIQIRKLFLAGGVSFNNAKESKEASRRVELRMQFFGLKDKHAADEVDFPPVVNKEVCQLVMPQ

SEQ ID NO: 1870 - protein, 70 aa, Enterobacter cloacae subsp. cloacae ENHKU01
MTPALSSLAQRIAAKLSSSQQEEHFLRNDFHALASAGREMEKRFDKAEKIPPRHMKCGWRHCVVFALQKN

SEQ ID NO: 1871 - protein, 1080 aa, Enterobacter cloacae subsp. cloacae ENHKU01
MLKRLLSKLTGNRQQIEHHLRNQYQVEENGLSFPQSLVDDPDLWALASWLEQLAEEDYLISLTDRWLLSWDNLYRLLEDEEHSSSLPLIGVPEILPLRARLSSRGALNDSDFRVWIAEWTLVPTRKSIRFNRTGAIFNYENQQHLLSRENWALLQTIEQLSTQQIQTPGETTNQLGWAAIRKCAKQASAKFDDYLEKTHVIKPTSLSLRLRKATVADTAVIEIEPHFQDQPANWLDSFDKNSQVHDSYRIPGENGELSHVIIPPEVKEVLNSIHAIPGRRVAGSEALSFVRNPYTFLGEDAASVISPEEHEQALFDAHIFFHHFRLQPRVNDENKIDDIKLVLEPISPIPQPEVTFLFSAPWELDKFVQSLGISVAAQMPAGSWQGYELELSQFTEQQWHDCQSLLSRWQQEVEGKEFNDVLDLGKYGDRVIGIGEFEKISSPWLTKAQSENWLPDGVDFSAFSVEALDGWQPDNLQHFDELQERITQAEATGETHIIFPWNETELPLDAAKTFSKNWEKQQNIAHDLKSNVVEKAARAVLKIEQNIEEAVYIKLRRDSLLNARHAEPEIPLSLKEHIRLKDHQREGVAWLQQLFLRSPQETTGCLLADDMGLGKTLQILSFLVWFIEKFPDEPPSLIVAPVSLLDNWERELDNFFYTSGIPVMKLYGDTIKAVKYPKQAIPAHLQSQGIKNLLKPGWQGDAKIILTTYETLRDQEFSLGRQPWSIMVCDEAQKIKNPAALITHAANAIQARFKVACTGTPVENTLVDLWSLFDFAQPGLLGALNEFGKSYVRPIENEAGRDTGQLESLRALIEPQTLRRTKEEVARDLPQKIEVVSCKQLPLSAPQRQLYLSSIANWQQQQALSEGMQQAGAGMLGLLHRLKLICAHPAVVNPEPRYREASPKLNWMLKTLDEIKHTSKDKVIIFTELRDLQREIQHAIQQRFGFRPVIINGDTSTKSHSQNNRQRLIDDFQAQPGFGVIILSTVAVGFGVNVQKANHVIHFTRCWNPAKEDQATDRAYRIGQTKDVYVYYPTVTDSEITTFEETLDELLQRRRALARDMLCSAPDLSSADFENILKGS

SEQ ID NO: 1872 - protein, 729 aa, Enterobacter cloacae S611
MPWLNSILLSLTSVQPHMVPITVICFVIIAFILFIIFYLSRSVKIVNRLKKYTHEINNIANDKLENQRELLKNLLVQPEYKHAWSEFSESLHPQSELVGSEEKIVKIRATAPSASFFSEQQLVDIPLNTEFFKHLPGILTGVGIIGTFYGLMIGLNHFDPSTPEQVTSSVNNLLHDVLYAFLGSAFAIFFSIVITWLEKFSIASCYKNLEKFTAALDSLYDSGVSAEYLASLVKSSNESATQARHLKESLVTDLRDMLLHLAESQKVENERLANTLSNTYRESGAQFADQVSGAIENSLKSPLDKIAGAVQTASGDQSGMVQNMLQDVLTAFMAKLDTTFGQQFTNLNEMMGQTVGAIQTMQNGFSALLQDMRQVSDDSRQGSAQLIEQLLSEMKSGQQAMQAGMHDMLTSLQSSVAKIGAEGEGAGERMARQLEKMFADSEAREKAQAEHMAAFIEAIQNSVQQGQSATMEKMATSVEALGEQLGSLFGQIDKGQQQISANQQANQQSLHEQTQRVMSEVDDQIKQLIETVAMQHQGMTETLNKLAEQTNRQMQDMQNGADKMRLAAERFEHAGDEVSKANHLTADVLNKAQSAGSSLSLATSELTSVVADYRNNREAVSKSIAMLELLAANTQSEQTTRSQFITDLKQHGERLQSYNREAQTFMENVSDVLGKGFEDFSEGVSRSLDKTLGKLDVEMAKASNLLAGSVEQIGESVSELDDVLSRVRA

SEQ ID NO: 1873 - protein, 208 aa, Enterobacter cloacae S611
MVASLSSVTQRIQRAEQGEKVRGQDIAKLCERLELHARTVNKTIVVDCHDNRISFGEAGRFDHNRFFLNAEGQKALQDVVPLVLEASDSEEGKKWFKQIVIEGFTDTDGSYLYNLHLSLQRSEWVMCSLLDSRSPLQKNISTEQQIQIRKLFLAGGVSFNNAKESKEASRRVELRMQFFGLKDKRDGAEEVDFPPVVNKEVCQLVMPQ

SEQ ID NO: 1874 - protein, 560 aa, Enterobacter cloacae S611
MTPALKSLSQRIAAKLSSSQQGDDYLRNDFDALASAGRDMEKRFEKTDRIPAPPHEMRLAALRRFRLAEELNEREWRMVFYGLADNDPLYPDRPVLLEDDTFFPRVDSAIKKQIESKKLKRKDWAALCSSYFAYRHESPETNPHWCVLRSHIAQGYSVVKATIRREKSWMKTIEFYHDIFTPQAGGVISQQLLSGESNSLSSLEKIAQIPDSSWLWKRIFTVLLAQLDTLDDPQYLEKISWLLGLAAQWVRFRDDIMTAILTRYYHSTYRDQAHSALKQAALEYWDNPQLKSQQNKWHQYVSEAVAAMVRGWLAKQDLMHFFELLRGNGDVDQARLHYWLRFANQMGFTRIVMGPDALHDRSSDFVKFRDENKGRLSHLRSGRSFDNAMIMQINDYIFVEFSGTGNAMYAYRVGQAPFNPESQSLDINIQLKDKYRNVLRLPHTPRAEGYNKIRITGWMLKYEDELRKLGIRWMAEEPVKFVDKQAPSPASVSNIKIINPLRDTAIQRLVENTSCTVSDNRPKGGGLSIQLKSPNDTVEKELLRLGFTPVAKEQHRYWIK

SEQ ID NO: 1875 - protein, 1080 aa, Enterobacter cloacae S611
MLKRLLSKLTGNRQQIERHLKNQYQIEESGLSFPLSLVEDSQLWALASWLEQLAEEDYLISLTDRWLLSWEAMYRLLDDEEHASSLPLIGVPDVLPLRASLCSRGALSDNDFRVWIAEWATLPALRPIHFSRTGAIFTYENQQHLLSRENWALLQATEQLNAQQTQAPGETTNQLGWATIRKCAKKAAAKFDDYLDKTRVVKPTSLSLRLRKATVADTAVIEIEPHFDDQPDNWLGSFDKNSQVHDSYRIPGANGELSHVIITPEVKEVLNSIHSIPGRRVAGSEALSFVRNPYTFLGEDAADVIAPEEHEQALFDARIFFHHFRLIPQQSAENKISEVMLILEPISPIPQPEVTFVFSAPWELEKFLQQLGISVAAKMPAGAWQGYELELSQFTEQQWHDCQALLTRWQQEIEGKEFSDVLDIAKYGDRVIGIGEFEKISSPWLTKAQSENWLPDDIDFSKFSVETLAGWQRENLHHLDQLQQRITQAEIAGEAQIIAPWNDKPLPLEAAKTFIKNWQKQENTVDDSQNNVADKTTRAVLKIEQNIEEAAYIKQRRDSLLNARHAEPEIPLCLKEKIQLKDHQREGVAWLQQLFLRSPEETAGCLLADDMGLGKTLQILSFLVWFIEKFPHEPPSLIVAPVSLLDNWERELENFFYTSGIQVLKLYGETIKAVKYPKQAIPVHLQSQGIKNLLKPGWQGEAKIILTTYETLRDQEFSLARQPWSIMVCDEAQKIKNPAALITHAANAVQARFKIACTGTPVENTLVDLWSLFDFAQPGLLGALNEFGKYYVRPIENEAGRDTERLESLRALIEPQTLRRTKEEVARDLPQKIEVADCKRLPLSAPQKQLYLSSVADWQQQQALSEGMQQAGAGMLGLLQRLKLICAHPAVVSPEPRYRESSPKLNWMLNKLDEIKHTSKDKVIIFTELRNLQREIQHAIQQRFGLRPVIINGDTSTKSQSQNSRQRLIDDFQAQPGFGVIILSTVAVGFGINVQKANHVIHFTRCWNPAKEDQATDRAYRIGQTKDVYVYYPTVTDNDVTTFEETLDALLNRRRALARDMLCASPDLSGADFEEMFKGT

SEQ ID NO: 1876 - protein, 711 aa, Enterobacter cloacae UCI 24
MPFTVISIVCLAVACFIFFYLLRAIKIVNSLKKYTQLINSIESNSPREQLAHLQNLFKRPELKHAWNEFEESLHPQSELEDGEEKIVRIRATAPSSSYFSEQQLVDIPLNTEFFKHLPGILTGVGIIGTFYGLMIGLNHFDPSTPEQVTSSVNNLLHDVLYAFLGSAVAIAASIFVTWLEKLSIAKCYKYLEKFTAAIDKLYVSGVGEEYLASLVKSSNESATQARHLKESLVTDLRDMLLHLAESQKVENERLANTLSNTYRESGAQFADQVSGAIENSLKSPLDKIAGAVQTASGDQSGMVQNMLQDVLTAFMAKLDTTFGQQFTNLNEMMGQTVGAIQTMQSGFSALLQDMRQVSDDSRQGSAQLIEQLLSEMKSGQQAMQAGMNDMLTSLQASVAKIGAEGEGAGERMARQLEKMFADSEAREKAQAEHMSAFIEAIQNSVQQGQSATMEKIAASVEALGEQLGSLFGQIDKGQQQISANQQANQQSLHEQTQRVMSEVDDQIKQLIETVASQHQGTTETLNKLAEQTNRQIQDMQNGADKMRVAAERFEHAGDKVSEANHLTADVLNKVQSAGSSLSLATSELSSVVADYRNNREAVSKSIAMLELLAANTQSEQTTRSQFITDLKQHGERLQSYNREAQTFMENVSDVLGKGFEDFSEGVSRSLDKTLGKLDVEMAKASNLLAGSVEQIGESVSELDDVLSRVRA

SEQ ID NO: 1877 - protein, 245 aa, Enterobacter cloacae UCI 24; identical to SEQ ID NO: 1869

SEQ ID NO: 1878 - protein, 560 aa, Enterobacter cloacae UCI 24
MTPALSSLAQRIAAKLSSSQQEEHFLRNDFHALASAGREMEKRFDKAEKIPPPPHEMRLAALRRFRLAEELTEREWRMVFYGLADTDPLYPDRPVLLEDDTLFPRVDSAIQKQIQSRTLKRKDWAALCSSYFAYKHESPEINPHWCVLRGHIAHGYSVVKAAIRREKPWMKTIEFYHDIFTPQAGGVISQQLLSGESNSLSSLEKIAQIPDSSWLWKRIFTVLLAQLDTLDDPQYLDKISWLLSLAAQWVRFRDDIITATLTRYYHSTYRDQAHSALKQAALEYWDNPQLKSQQNKWHQYVSEPVAAMVRGWLAKQDLMHFFELLRGNGDVDQARLHYWLRFANQMGFTRIVMGPDAWHDGSSDFVKFREENRGRLSHLRGGRSFDNAMIMQINDYIFVEFSGTGNAMYAYRVGQAPFNPESHSLDINIQLKDKYRNVLRLPHTPRAEGYNKTRITGWMLKYEDELRKLGIRWMAEEPVKFVDKKAPSPASVSDIKIINPLRDTAIQRLVENTSCIVSDNRQKGGVLSVQLKAPDDTTERELLRLGFAPVLKEPHRYWIK

SEQ ID NO: 1879 - protein, 78 aa, Enterobacter cloacae UCI 24
MLKRLLSKLTGNRQQIEHHLRNQYQVEENGLSFPQSLVDDPDLWALASWLEQLAEEDYLISLTDRWLLSWDNLYRLLE

SEQ ID NO: 1880 - protein, 711 aa, Enterobacter cloacae UCI 29; identical to SEQ ID NO: 1876

SEQ ID NO: 1881 - protein, 245 aa, Enterobacter cloacae UCI 29; identical to SEQ ID NO: 1869

SEQ ID NO: 1882 - protein, 560 aa, Enterobacter cloacae UCI 29; identical to SEQ ID NO: 1878

SEQ ID NO: 1883 - protein, 78 aa, Enterobacter cloacae UCI 29; identical to SEQ ID NO: 1879

SEQ ID NO: 1884 - protein, 729 aa, Enterobacter cloacae; identical to SEQ ID NO: 1868

SEQ ID NO: 1885 - protein, 245 aa, Enterobacter cloacae; identical to SEQ ID NO: 1869

SEQ ID NO: 1886 - protein, 504 aa, Enterobacter cloacae
MRLAALRRFRLAEELTEREWRMVFYGLADTDPLYPDRPVLLEDDTLFPRVDSAIQKQIQSRTLKRKDWAALCSSYFAYKHESPEINPHWCVLRGHIAHGYSVVKAAIRREKPWMKTIEFYHDIFTPQAGGVISQQLLSGESNSLSSLEKIAQIPDSSWLWKRIFTVLLAQLDTLDDPQYLDKISWLLSLAAQWVRFRDDIITATLTRYYHSTYRDQAHSALKQAALEYWDNPQLKSQQNKWHQYVSEPVAAMVRGWLAKQDLMHFFELLRGNGDVDQARLHYWLRFANQMGFTRIMMGPDAWHDGSSDFVKFREENRGRLSHLRGGRSFDNAMIMQINDYIFVEFSGTGNAMYAYRVGQAPFNPESHSLDINIQLKDKYRNVLRLPHTPRAEGYNKTRITGWMLKYEDELRKLGIRWMAEEPVKFVDKKAPSPASVSDIKIINPLRDTAIQRLVENTSCIVSDNRQKGGVLSVQLKAPDDTTERELLRLGFAPVLKEPHRYWIK

SEQ ID NO: 1887 - protein, 1080 aa, Enterobacter cloacae
MLKRLLSKLTGNRQQIEHHLRNQYQVEENGLSFPQSLVDDPDLWALASWLEQLAEEDYLISLTDRWLLSWDNLYRLLEDEEHSSSLPLIGVQEILPLRARLSSRGALNDSDFRVWIAEWTLVPTRKSIRFNRTGAIFNYENQQHLLSRENWALLQTIEQLSTQQIQTPGETTNQLGWAAIRKCAKQASAKFDDYLEKTHVIKPTSLSLRLRKATVADTAVIEIEPHFQDQPANWLDSFDKNSQVHDSYRIPGENGELSHVIIPPEVKEVLNSIHAIPGRRVAGSEALSFVRNPYTFLGEDAASVISPEEHEQALFDAHIFFHHFRLQPRVNDENKIDDIKLVLEPISPIPQPEVTFLFSAPWELDKFVQSLGISVAAQMPAGSWQGYELELSQFTEQQWHDCQSLLSRWQQEVEGKEFNDVLDLGKYGDRVIGIGEFEKISSPWLTKAQSENWLPDGVDFSAFSVEALDGWQPDNLQHFDELQERITQAEATGETHIIFPWNETELPLDAAKTFSKNWEKQQNIAHDLKSNVVEKAARAVLKIEQNIEEAVYIKLRRDSLLNARHAEPEIPLSLKEHIRLKDHQREGVAWLQQLFLRSPQETTGCLLADDMGLGKTLQILSFLVWFIEKFPDEPPSLIVAPVSLLDNWERELDNFFYTSGIPVMKLYGDTIKAVKYPKQAIPAHLQSQGIKNLLKPGWQGDAKIILTTYETLRDQEFSLGRQPWSIMVCDEAQKIKNPAALITHAANAIQARFKVACTGTPVENTLVDLWSLFDFAQPGLLGALNEFGKSYVRPIENEAGRDTGQLESLRALIEPQTLRRTKEEVARDLPQKIEVVSCKQLPLSAPQRQLYLSSIANWQQQQALSEGMQQAGAGMLGLLHRLKLICAHPAVVNPEPRYREASPKLNWMLKTLDEIKHTSKDKVIIFTELRDLQREIQHAIQQRFGFRPVIINGDTSTKSHSQNNRQRLIDDFQAQPGFGVIILSTVAVGFGVNVQKANHVIHFTRCWNPAKEDQATDRAYRIGQTKDVYVYYPTVTDSEITTFEETLDELLQRRRALARDMLCSAPDLSSADFENILKGS

SEQ ID NO: 1888 - protein, 851 aa, Enterobacter cloacae
MFSLTSFLDTLTSVNPENVPKYVALVVAVLLVCFIARYAIPSFVISARFKKKAKEIQLIAKDKPAQQLEKLDALFSGKFFAHPWSEFKESLHRQFELDDDSGQKRIHSIRSTAPASAWFSEPLLVEIPLYTEAFKHLPGILTGIGIIGTFSGLMIGLHHFDPSTPEQVSASVANLLRDVLYAFLGSAFAIAFSILVTMFEKWRLARCYKNLESLTASIDQLFEGGVGEDYLSQLLSSTKENTTHAKQLKDGLVSDLREMLQNLVDSQVRENQKLAETLSSTYRESGQQIAEQVSGAIETSLKSPLDKIAGVVQTASGDQSHRVQSMLENVLTAFMNKMDNTFGQQFTTMQEMMGRSVEAIQSMQSGFSTLLQDMRQAGDDSRQGSAQLISQLLSEMKSGQQEMQAGMNDMLRSLQESVARIGAEGEGAGERMAQQLEKIFADSEAREKAMAEQMRAFIEAIQSSVQQGQNETMEKMAASVDTLGSHMATLFAQLENGQQQLNQQQNQAQNLLMSNMSKGVEDLTQNLAGVFSQLESGQKQMSQTQEEGQRALHEETQQLLARSEAREQAAAEQQQDFMAALQQTMHSGQDALREKMTSGIDQLGSQLGTLFGQLEEGQKSLSQQQQSAQSALQQEAQRIIGQLESQVQALMQMLREQQSASGDLLQRVAQNTTRHLEEIQTGADKMRVAADRFETAGNRVAEANHLTAEVLNGTQQAGKTLSSASSELGALIADYRNTREVVANAISALETLINSSHDEQTSRSRFVEDLKSYSERLQQYNREAQEFLHNVADVMGTSFESFTSGVESGLNRSLQEMDTQLTKAAGALSSSVEIIGESVDTLETVLRSRRA

SEQ ID NO: 1889 - protein, 245 aa, Enterobacter cloacae
MFNRAFNGRQRRSDEAEKPFWISYADLMTAMMVLFLVVMVASLSSVTQRIQQAEAGEKSRGHDIARLCEKLELQAKNLNKTIHVDCHDNRISFGEAGRFEHNRFSLTPEGQQALQDVVPLVLDAANSDEGKKWFKQIVIEGFTDTDGSYLYNLHLSLQRSEWVMCSLLDSRSALQQRITADQQIQIRKLFLAGGVSFNNAKESKEASRRVELRMQFFGLKDKKQDESMDVVPGISQETCQLGVVQ

SEQ ID NO: 1890 - protein, 597 aa, Enterobacter cloacae
MTSAIEKLKSHLLPYREKSAVPVVGHPFTYLQRVISQLEKKVDARAVQMVPPKEKRRQAISRLRSGETPQPSEWKMIFFGLNDVAEDDLFDTALIDDAANFAKISAEIQSKIAQKRLTRREWLALCTSYFGHVSDTPEENPQWLQLRMQIVSGFKQLKESSPRLLSWMTVIDTYGDIFTDKAGFLLGQQLGRGEITDISVLEKVAQIPQTSWLWRKIVNHLVSEIFRQTDDEFEQKINELIALSRQLSRFKDNILAATLTRYYQSIFKHRTHLELKLLALEYWGNPQLTSRNKGWQVHVDNAVLLMVQGWFAKDDLKLFFELLKGNRDVDQARLFYWLRYANQMSYTRIVLGEDAQRSKDTDYVEFRAKNAGRLSRLQGPGSRDNNAMIMRIGNYLFVEFSKVGAMYSYHIDNAPFNPETGILDIDYDLKDKRNNRRKVRLRLPHLSPVTHYSLNRIEGWMSRYDEELRRLGISYVAEDSNQPSATIDISRFNADQSGGRSVSSPAKSEVNESRSNREEQIKIIAASLKAKKEDQNFTTREQQIREVIRSVDCKVMDKRGMGGAIHIQFNEPDHEAAKKLLSLGFKPVLGKFTYWSK

SEQ ID NO: 1891 - protein, 1079 aa, Enterobacter cloacae
MFKKLLGKFINDNKAVPASLVPLYAIKAEGFAFPFSLADTQDNWLITSCLEQLHEEDYVSHWSDCWFISWDDFYRILNNEDYASSLAIFSFPQQRNLTAHLAATGSISDDTFRVFIDKWTQPDDYRPVEITIQGASFSSQEGTFVLSEENWQLLDSLQQLRLQQRQTSGETVNQTGWAKIRRQAKKAGAKLDDYLSKTIVIRPESLQLKLRKSLVADTRVLEIEPVFDEQPAKWLQSFDRTQQVQDRYRILGDDGELSHVILSPEVKDVLTSVHAITGRRVAGDDALSFVRNPYTWIGEEASQVLDPDVYEQNLQDAGIYFYDFRLEPQFDDSMHIESVSLILSPRTEQPVPDETYVFNRPIELAALITELEQKLAAHLPAGVWQGYDLELSRFTQNELQEYQALLEGWQQQAAGLNFSHVLDLNKYSDRVIGIGEFEKISSPYLVKSESENWLPDNLAKEMCEVMFSGWDLDNHQHFQELETRLEDAKASDAPEVAMPWNDNLLPREEAEVFHEKWKKKIDAETKDTANAEPVSRAVLLIEQNIEQALYVKQRRTSLLEAHLADAELPMILKDSIQLREHQCKGVAWLQQLYLKSPTETAGCLLADDMGLGKTLQILTFLIWHRERFPDAPPSLIVAPVSLLDNWEREVGNFFLREQVSILKLYGNELREKKCAKESIPLALKNKGIKNLLQNDWVGEAQIVLTTYETLRDQEFSLARQPWSIMVCDEAQKIKNPAALITQSAKAIQAQFKVACTGTPVENTLVDLWCLFDFVQPGLLGALNNFGKDFLRPIEQQSDDKMLESLRKLIEPQTLRRTKEEVAKDLPEKIEDKSCKQLSMLPLQRDLYTHSVVSWQNQQEISEGLDQRGSGMLGLLHRLKLICAWPYSVSADLRLRNDAPKVKWLLNTLNNIRQSSDDKVIVFTELRDIQRELQHLVSQHFGFKPFIINGDTSTKSGSDQNRQSLIDNFQSSPGFNVIILSTIAVGFGVNVQKANHVIHFTRCWNPAKEDQATDRAYRIGQQKDVYVYYPTVRDSQLMTFEETLDELLNRRRALARDMLKASTDLTAADFEAVLTRANTN

SEQ ID NO: 1892 - protein, 851 aa, Enterobacter cloacae; identical to SEQ ID NO: 1888

SEQ ID NO: 1893 - protein, 245 aa, Enterobacter cloacae; identical to SEQ ID NO: 1889

SEQ ID NO: 1894 - protein, 597 aa, Enterobacter cloacae; identical to SEQ ID NO: 1890

SEQ ID NO: 1895 - protein, 1079 aa, Enterobacter cloacae; identical to SEQ ID NO: 1891

SEQ ID NO: 1896 - protein, 245 aa, Enterobacter cloacae subsp. cloacae; identical to SEQ ID NO: 1869

SEQ ID NO: 1897 - protein, 560 aa, Enterobacter cloacae subsp. cloacae; identical to SEQ ID NO: 1878

SEQ ID NO: 1898 - protein, 1035 aa, Enterobacter cloacae subsp. cloacae
MLKRLLSKLTGNRQQIEHHLRNQYQVEENGLSFPQSLVDDPDLWALASWLEQLAEEDYLISLTDRWLLSWDNLYRLLEDEEHSSSLPLIGVPEILPLRARLSSRGALNDSDFRVWIAEWTLVPTRKSIRFNRTGAIFNYENQQHLLSRENWALLQTIEQLSTQQIQTPGETTNQLGWAAIRKCAKQASAKFDDYLEKTHVIKPTSLSLRLRKATVADTAVIEIEPHFQDQPANWLDSFDKNSQVHDSYRIPGENGELSHVIIPPEVKEVLNSIHAIPGRRVAGSEALSFVRNPYTFLGEDAASVISPEEHEQALFDAHIFFHHFRLQPRVNDENKIDDIKLVLEPISPIPQPEVTFLFSAPWELDKFVQSLGISVAAQMPAGSWQGYELELSQFTEQQWHDCQSLLSRWQQEVEGKEFNDVLDLGKYGDRVIGIGEFEKISSPWLTKAQSENWLPDGVDFSAFSVEALDGWQPDNLQHFDELQERITQAEATGETHIIFPWNETELPLDAAKTFSKNWEKQQNIAHDLKSNVVEKAARAVLKIEQNIEEAVYIKLRRDSLLNARHAEPEIPLSLKEHIRLKDHQREGVAWLQQLFLRSPQETTGCLLADDMGLGKTLQILSFLVWFIEKFPDEPPSLIVAPVSLLDNWERELDNFFYTSGIPVMKLYGDTIKAVKYPKQAIPAHLQSQGIKNLLKPGWQGDAKIILTTYETLRDQEFSLGRQPWSIMVCDEAQKIKNPAALITHAANAIQARFKVACTGTPVENTLVDLWSLFDFAQPGLLGALNEFGKSYVRPIENEAGRDTGQLESLRALIEPQTLRRTKEEVARDLPQKIEVVSCKQLPLSAPQRQLYLSSIANWQQQQALSEGMQQAGAGMLGLLHRLKLICAHPAVVNPEPRYREASPKLNWMLKTLDEIKHTSKDKVIIFTELRDLQREIQHAIQQRFGFRPVIINGDTSTKSHSQNNRQRLIDDFQAQPGFGVIILSTVAVGFGVNVQKANHVIHFTRCWNPAKEDQATDRAYRIGQTKDVYVYYPTV

SEQ ID NO: 1899 - protein, 245 aa, Enterobacter cloacae; identical to SEQ ID NO: 1869

SEQ ID NO: 1900 - protein, 560 aa, Enterobacter cloacae; identical to SEQ ID NO: 1878

SEQ ID NO: 1901 - protein, 1080 aa, Enterobacter cloacae; identical to SEQ ID NO: 1871

SEQ ID NO: 1902 - protein, 729 aa, Enterobacter cloacae; identical to SEQ ID NO: 1868

SEQ ID NO: 1903 - protein, 245 aa, Enterobacter cloacae; identical to SEQ ID NO: 1869

SEQ ID NO: 1904 - protein, 560 aa, Enterobacter cloacae; identical to SEQ ID NO: 1878

SEQ ID NO: 1905 - protein, 1080 aa, Enterobacter cloacae; identical to SEQ ID NO: 1871

SEQ ID NO: 1906 - protein, 678 aa, Pantoea ananatis AJ13355
MDSLLIPGVLVRNGILSIASVLKNDAAPGFVTILLVATLCFAVVRWRKLVKSRRNALSIIHSIIANTPEDQFSQHVTEIDASIAAADKTEEQKNVAEAWYEYRETHVIDDQNGTLVVRNAVRPSQFFNLDDLHFTQGFWRIVPGLFVTVGLSLTFLGLISALNSMSTTLDDGGSAALEGLLTIASAKFIMSLTGLCCSIVFTIWLRRGTSQLEKAVHSLNSLIEKHLTFISLEDLSIRQLKATTESREHLRKLGMEMATEIGRPLREDLPRAISESISTAIMPVIEQVSRLGNDGVGEMVQNLSSRLSEDVGRALAQASERISLAGDQIKFLAERMDQSSGKMGNEMESAIGRLGQAVETLRDGMQQTAETASSAFNQGAENLLATMNSTLQGIKDNTGEGARAMGEAAADMKAAALGIRFELEVAAKQGAEAAQARMSESASKASDAIGQAATQVLGAFGNTACEITQATEAMTQKASSELLSPLSVIAEKLEGVMAMLNETSTAIHRASEGIKEGAVASENASGSFRTSAQSLTSAADPIRAMMERIEVSTRQLRESSENSLSAIANAAKTNAEQSAMTLSAAQETLGGQHRAVESTLTNLQSLIAALRSQGERLDGIDEKLGKAFDSYQQQVATSVETLFDHVKTMQNELMPALDTMQSIVDQAENFAPKQARMS

SEQ ID NO: 1907 - protein, 287 aa, Pantoea ananatis AJ13355
MRANTGRKRSHEEEEESVFVSMTDMTVSFLFIVMVLLAFFASRYNDKNTVPRDKYEQAVQTRDKTIVDLRAEIALLKQVDPLEQYMSQAAAARLNLLYQLRNNLKQSFPELPVDVIPEEGTLRFQGEGLFTSNSFTLSDDKRKIVEALAKTLDSLLPCYTFSQSVGWNKSCNPSFAIIEAVQIEGHTDSKGEDVYNLNLSTNRAITTFTSMLAAAPDLVAHFNMRSQPVLSVAGYGKMRPVKPNDTPQNMAMNRRIDLRIIMHTPANAAEIEDIRKRLIEPLKKGKP

SEQ ID NO: 1908 - protein, 441 aa, Pantoea ananatis AJ13355
MKLSDFFLKPVNLFKPAIAVSKGLTVKVQSIHERWPDVVKEIAERDREKVLRKLRGYVERWEWDDVKMSFICSGAPIVFDKEFRTQEEFAVLQEFYLRETIVTDSAPFISAMISAYIRSYEPGSAHTNKIKNCLDIASEHMSDKWKDIVEQLPKFFDANQAHQALANRMMAMDSPWKELKLFGITRPHDPGLMSHAHLAYVALMAPGLNERPAIEKLFAWLKPDGRSGALMNGAAEAINALLSHWLYKQPDEELSRYLTETLVAFYEDPRLSRGGVWGSVDEACRNLIINWLTRENILFFLDVVSDVEDSHMWEPRRKFWLNLYHQKKIDSAWVAFSDEADIRARSIKKTMRESATLKFGRQVAGSRKNTSLLILKIGHCIVVEGSHNYKVHIFRSDNKKAPELFRLKYDCEHIRTLPNSFAIPHLSGWQEKVREHIEYLS

SEQ ID NO: 1909 - protein, 1042 aa, Pantoea ananatis AJ13355
MTFAFNHNAEAITLNIAGEKQSLINRLFKRQQSVTLSGLTHNDRALAFAIADLKALAEEFGELLHISDDAIVMSHHLAGRLDAETAQTLGLPPLVDLTLKTDIEGSLGSDTFRLQHEWLRNGVRQLPHRTGSILTTSQGPRRLPLWMMEAVEVAENFTPGGGEASDWESLARFRQALDPGVQMSHEINAVRVSLTDFMQGLEVRIADRFSISTSSNGADDFEIVPFSGKNVEELERSGEAVSEAAGELSEQTLRRFQQRVRTQGALSAYRVGEGNYLVIDRSARPILDVMVEKQKSSPEERRAFIENPRPAITSAVEKYLRQSGKLDGLDDVGEEEAIEAAAGPAFVETVEYSERVKGILHYRKGTVSSTMTGETIWLPEMIPDALTKIIDAMDSQTLANVCDQIRNAIDASQDEVEVASHPVRVTEETLRAFEKRLANLIEIEGSAETTEREDKVAVDAQPPATVILDTKDNFEELLWQPDLKKRFVFIDEQLPAGVKTALRPHQLDSFSLQLSSWKSGMPGILNADEQGLGKTLQTIAFLRWLKENNNVSTVSNKERGPILIVAPTSLLENWNAEVRQHTDSDGLGHLLRLYGSSLSQYKDFNAKGIETKDGNTLLNFQQLHEAIKEGKGHRFWILTTYTTLTNYQHSFAKIHFSAVIFDEIQAVKNPDSLRARAARAVNADYRIGLTGTPIENTTTDLWAVMDQLAPGSLDTLRNFNTLYSEPDEQNMLQLYQRVFEYCNQLPPLAFRRLKEDVAKELPAKTRLIHPRLMPEGQAIAYETARLKLSQGGPGAALKMLQHIRGVSVHPAMEMSGDNQSFIDASARLNACFDILHRIKAKGERVLVFIEHRKMQFRFMELARQEFGLEHIDHINGDTPIQKRQAIVRRFQHHLEQDGGFDLLVLGPKAAGTGLTLTAATHVIHLSRWWNPAVEEQCNDRVHRIGQQHPVQIHMPMAIHAGYQEHSFDCLLQGLMSRKRSLARAALWPMGDSASDISQLQAALRKDKSEASGDILETSIRMMFERDVETDGTRMDDGSYRIS

SEQ ID NO: 1910 - protein, 678 aa, Pantoea ananatis LMG 5342; identical to SEQ ID NO: 1906

SEQ ID NO: 1911 - protein, 287 aa, Pantoea ananatis LMG 5342; identical to SEQ ID NO: 1907

SEQ ID NO: 1912 - protein, 356 aa, Pantoea ananatis LMG 5342
MKLSDFFLKPVNLFKPAIAVSKGLTVKVQSIHERWPDVVKEIAERDREKVLRKLRGYVERWEWDDVKMSFICSGAPIVFDKEFRTQEEFAVLQEFYLRETIVTDSAPFISAMISAYIRSYEPGSAHTNKIKNCLDIASEHMSDKWKDIVEQLPKFFDANQAHQALANRMMAMDSPWKELKLFGITRPHDPGLMSHAHLAYVALMAPGLNERPAIEKLFAWLKPDGRSGALMNGAAEAINALLSHWLYKQPDEELSRYLTETLVAFYEDPRLSRGGVWGSVDEACRNLIINWLTRENILFFLDVVSDVEDSHMWEPRRKFWLNLYHQKKIDSAWVAFSDEADIRARSIKKPCGKVRP

SEQ ID NO: 1913 - protein, 1042 aa, Pantoea ananatis LMG 5342
MTFAFNHNAEAITLNIAGEKQSLINRLFKRQQSVTLSGLTHNDRALAFAIADLKALAEEFGELLHISDDAIVMSHHLAGRLDAETAQTLGLPPLVDLTLKTDIEGSLGSDTFRLQHEWLRNGVRQLPHRTGSILTTSQGPRRLPLWMMEAVEVAENFTPGGGEASDWESLARFRQALDPGVQMSHEINAVRVSLTDFMQGLEVRIADRFSISTSSNGADDFEIVPFSGKNVEELERSGEAVSEAAGELSEQTLRRFQQRVRTQGALSAYRVGEGNYLVIDRSARPILDVMVEKQKSSPEERRAFIENPRPAITSAVEKYLRQSGKLDGLDDVGEEEAIEAAAGPAFVETVEYSERVKGILHYRKGTVSSTMTGETIWLPEMIPDALTKIIDAMDSQTLANVCDQIRNAIDASQDEVEVASHPVRVTEETLRAFEKRLANLIEIEGSAETTEREDKVAVDAQPPATVILDTKDNFEELLWQPDLKKRFVFIDEQLPAGVKTALRPHQLDSFSLQLSSWKSGMPGILNADEQGLGKTLQTIAFLRWLKENNNVSTVSNKERGPILIVAPTSLLENWNAEVRQHTDSDGLGHLLRLYGSSLSQYKDFNAKGIETKDGNTLLNFQQLHEAIKEGKGHRFWILTTYTTLTNYQHSFAKIHFSAVIFDEIQAVKNPDSLRARAARAVNADYRIGLTGTPIENTTTDLWAVMDQLAPGSLDTLRNFNTLYSEPDEQNMLQLYQRVFEYCNQLPPLAFRRLKEDVAKELPAKTRLIHPRLMPEGQAIAYETARLKLSQGGPGAALKMLQHIRGVSVHPAMEMSGDNQSFIDASARLNACFDILHRIKAKGERVLVFIEHRKMQFRFMELARQEFGLEHIDHINGDTPIQKRQAIVRRFQHHLEQDGGFDLLVLGPKAAGTGLTLTAATHVIHLSRWWNPAVEEQCNDRVHRIGQQHPVQIHMPMAIHAGYQEHSFDCLLQGLMSRKRSLARAALWPMGDSASDISQLQAALRKDRSEASGDILETSIRMMFERDVETDGTRMDDGSYRIS

SEQ ID NO: 1914 - protein, 729 aa, Pectobacterium carotovorum subsp. carotovorum PCC21
MPWLNSILLALTSVQPYMVPATVIGLVSVAFLCFIFFYLYRSVKIVNQLKKYTQSINNIENDEPDNQLEHLKNLFVQPELKHAWNEFADSLHPQRELVGSEEKIVKIRATAPSANFFSEQQLVDIPLNTEFFKHLPGILTGVGIIGTFYGLMIGLNHFDPSTPEQVASSVNNLLHDVLYAFLGSAVAIFASIVVTWLEKFSLAKCYKYLEKFTASIDKLYISGVGEEYLASLVKSSNESATQARQLKESLVTDLRDMLLHLAESQKVENERLANTLSNTYRESSAQFADQVSGAIENSLKSPLDKIAGAVQTASGDQSGMVQNMLQDVLTAFMAKLDTTFGQQFTNLNEMMGQTVGAIQTMQSGFSALLQDMRQVSDDSRQGSAQLIEQLLSEMKSGQQAMQAGMNDMLTSLQSSVAKIGAEGEGAGERMARQLEKMFADSEAREKAQAEHMSAFIEAIQNSVQQGQSATMEKMAASVEALGEQLSSLFGQIDKGQQQISANQQANQQSLHEQTQRVMSEVDDQIKQLIETVASQHQGTTETLNKLAEQTNRQIQDMQNGADKMRVAAERFEHAGEKVSEANHLTADVLNKAQSAGSSLALATSELTSVVADYRNNREAVSKSIAMLELLAANTQSEQTTRSQFITDLKQHGERLQSYNREAQTFMENVSDVLGKGFEDFSEGVSRSLDKTLGKLDVEMAKASNLLAGSVEQLGESVSELDDVLSRVRA

SEQ ID NO: 1915 - protein, 246 aa, Pectobacterium carotovorum subsp. carotovorum PCC21
MFGNAFGVRKRRCDEAEKPFWISYADLMTAMMVLFLVVMVASLSSVTQRIQRAEQGEKVRGQDITRLCERLELHARNVNKTIVVDCHDNRISFGEAGRFDHNRFFLNAEGQKALQDVVPLVLEASDSDEGKKWFKQIVIEGFTDTDGSYLYNLHLSLQRSEWVMCSLLDSRSPLQKSISAEQQLQIRKLFLAGGVSFNNAKESKEASRRVELRMQFFGLKDKRGGAEEVDFPPVVNKEVCQLVMPQ

SEQ ID NO: 1916 - protein, 560 aa, Pectobacterium carotovorum subsp. carotovorum PCC21
MTPALNSLSQRIAAKMSSCQQDDNYLRNDFHALASAALDIEKRFDKAEKIPTPPHEMRLAALRRFRLAEELTEREWRMVFYGLADNDPLSPDQPVLLEDEHFFPKVNSAIKRRLETKTLKRRDWAALCSSYFAYRHEYPENNPHWCVLRGHIAQGYFVVKTAIRREKSWMKTIEFYHDIFTPQAGGVISHQLLSGESNSLSSLEKIAQIPDSSWLWKRIFTVLLAQLDTLDDPHYLDKISWLLGLAAQWIRFRDDIITATLTRYYHSTYRDQAHSALKQAALEYWDNPQLKSQQNKWHQYVSEPVAAMVRGWLAKQDLMHFFELLRGNDDVDQARLHYWLRFANQMGFTRIVMGPDAWQDRGSDFMRFREENRGRLSHLRGGRSFDNAMIMQINDYIFVEFSGTGNAMYAYRVGQAPFNPESHSLDINIQLKDKYRNVLRLPHTPRAEGYTKARLTGWMLKYDDELRKLGIRWMAEEPIKFVDKKAPSPASVSDIKIINPLRDTAIQRLVENTSCIVSDNRQKGGVLSVQLKSPDDTTERELLRLGFAPVTKEPHRYWIK

SEQ ID NO: 1917 - protein, 1080 aa, Pectobacterium carotovorum subsp. carotovorum PCC21
MLKRLLNKLTGNRQQIERHLKNQYQIEENGLNFQQSLVDDLELWALASWLEQLAEEDYLISLTDRWLLSWDALYRLLEDEEHASSLPLIGVPEILPLRASLSSRGALSDSDFRVWIAEWATLPARQPIRFSRTGAIFTHENQQHLLSRENWALLQATEQLSMQQTQAPGETTNQLGWAVIRKCAKQAAAKFDDYLEKTHVIKPTSLSLRLRKATVADTAVIEIEPHFEDQPANWLGSFDKNLQVHDSYRIPGENGELSHVIIPPEVKEVLNSIHSIPGRRVAGSEALSFVRNPYTFLGEDAASVIAPEEHEQALFDAHIFFHHFKLQPRVNDENKIEDIALVLEPISPVPQPEVSFLFSAPWELDKFVQALGISVAAQMPAGSWQGYELELSQFTELQWHDCQSLLTRWQQEVEGKEFTDVLDINKYGDRVIGIGEFEKISSRWLSKAQSEDWLPDDIDFSAFSVETLDGWQPDNLQHFDELQERITQAEAIGETHIISPWNDTELPLDAAKTFSRNWEKQKNTANESERNAVDKTVRAVLKIEQNIEDVAYIKQRRDSLLNARHAEPEIPLSLKEHIRLKDHQREGVAWLQQLFLRSPQETAGCLLADDMGLGKTLQILSFLVWFIEKFPDEPPSLIVAPVSLLDNWERELDNFFYTTGIPVLKLYGETIKAVKYPKQAIPAHLQSQGIKNLLKPGWQSEAKIILTTYETLRDQEFSLARQHWSIMVCDEAQKIKNPAALITHAANAVQARFKVACTGTPVENTLVDLWSLFDFAQPGLLGALNEFGKHYVRPIENEAGRDTGRLESLRALIEPQTLRRTKEEVARDLPQKIEVTSCKQLSFSGVQKQLYLSSIANWQQQQALSEGMQQSGVGMLGLLHRLKLICAHPAVVSPGPRYREGSPKLNWMLKTLDEIKHSSKDKVIIFTELRDLQREIQHAIQQRFGFRPVIINGDTSTKSQSQNSRQRLIDDFQDQPGFGVIILSTVAVGFGVNVQKANHVIHFTRCWNPAKEDQATDRAYRIGQTKDVYVYYPTVRDGDITTFEETLDVLLNRRRALARDMLCTSPDLSGVDFEGVFKGA

SEQ ID NO: 1918 - protein, 729 aa, Pectobacterium carotovorum subsp. brasiliense
MPWLNSILLALTSVQPYMVPATVIGLVSVAFLCFIFFYLYRSVKIVNQLKKYTQSINNIENDEPDNQLEHLKNLFVQPELKHAWNEFADSLHPQRELVGSEEKIVKIRATAPSANFFSEQQLVDIPLNTEFFKHLPGILTGVGIIGTFYGLMIGLNHFDPSTPEQVASSVNNLLHDVLYAFLGSAVAIFASIVVTWLEKFSLAKCYKYLEKFTASIDKLYISGVGEEYLASLVKSSNESATQARQLKESLVTDLRDMLLHLAESQKVENERLANTLSNTYRESSAQFADQVSGAIENSLKSPLDKIAGAVQTASGDQSGMVQNMLQDVLTAFMAKLDTTFGQQFTNLNEMMGQTVGAIQTMQSGFSALLQDMRQVSDDSRQGSAQLIEQLLSEMKSGQQAMQAGMNDMLTSLQSSVAKIGAEGEGAGERMARQLEKMFADSEAREKAQAEHMSAFIEAIQNSVQQGQSATMEKMAASVEALGEQLSSLFGQIDKGQQQISANQQANQQSLHEQTQRVMSEVDDQIKQLIETVASQHQGTTETLNKLAEQTNRQIQDMQNGADKMRVAAERFEHAGEKVSEANHLTADVLNKAQSAGSSLALATSELTSVVADYRNNREAVSKSIAMLELLAANTQSEQTTRSQFITDLKQHGERLQSYNREAQTFMENVSDVLGKGFEDFSEGVSRSLDKTLGKLDVEMAKASNLLAGSVEQIGESVSELDDVLSRVRA

SEQ ID NO: 1919 - protein, 246 aa, Pectobacterium carotovorum subsp. brasiliense
MFGNAFGVRKRRGDEAEKPFWISYADLMTAMMVLFLVVMVASLSSVTQRIQRAEQGEKVRGQDITRLCERLELHARNVNKTIVVDCHDNRISFGEAGRFDHNRFFLNAEGQKALQDVVPLVLEASDSDEGKKWFKQIVIEGFTDTDGSYLYNLHLSLQRSEWVMCSLLDSRSPLQKSISAEQQIQIRKLFLAGGVSFNNAKESKEASRRVELRMQFFGLKDKRGGAEEVDFPPVVNKEVCQLVMPQ

SEQ ID NO: 1920 - protein, 560 aa, Pectobacterium carotovorum subsp. brasiliense
MTPALNSLSQRIAAKMSSCQQDDNYLRNDFHALASAALDIEKRFDKAEKVPTPPHEMRLAALRRFRLAEELTEREWRMVFYGLADNDPLSPDQPVLLEDEHFFPKVNSAIKRRLETKTLKRRDWAALCSSYFAYRHEYPENNPHWCVLRGHIAQGYFVVKTAIRREKSWMKTIEFYHDIFTPQAGGVISHQLLSGESNSLSSLEKIAQIPDSSWLWKRIFTVLLAQLDTLDDPHYLDKISWLLGLAAQWIRFRDDIITATLTRYYHSTYRDQAHSALKQAALEYWDNPQLKSQQNKWHQYVSEPVAAMVRGWLAKQDLMHFFELLRGNDDVDQARLHYWLRFANQMGFTRIVMGPDAWQDRGSDFMRFREENRGRLSHLRGGRSFDNAMIMQINDYIFVEFSGTGNAMYAYRVGQAPFNPESHSLDINIQLKDKYRNVLRLPHTPRAEGYTKARLTGWMLKYDDELRKLGIRWMAEEPIKFVDKKAPSPASVSDIKIINPLRDTAIQRLVENTSCIVSDNRQKGGVLSVQLKSPDDTTERELLRLGFAPVTKEPHRYWIK

SEQ ID NO: 1921 - protein, 1080 aa, Pectobacterium carotovorum subsp. brasiliense
MLKRLLNKLTGNRQQIERHLKNQYQIEENGLNFQQSLVDDLELWALASWLEQLAEEDYLISLTDRWLLSWDALYRLLEDEEHASSLPLIGVPEILPLRASLSSRGALSDSDFRVWIAEWATLPARQPIRFSRTGAIFTHENQQHLLSRENWALLQATEQLSMQQTQAPGETTNQLGWAVIRKCAKQAAAKFDDYLEKTHVIKPTSLSLRLRKATVADTAVIEIEPHFEDQPANWLGSFDKNLQVHDSYRIPGENGELSHVIIPPEVKEVLNSIHSIPGRRVAGSEALSFVRNPYTFLGEDAASVIAPEEHEQALFDAHIFFHHFKLQPRVNDENKIEDIALVLEPISPVPQPEVSFLFSAPWELDKFVQALGISVAAQMPAGSWQGYELELSQFTELQWHDCQSLLTRWQQEVEGKEFTDVLDINKYGDRVIGIGEFEKISSRWLSKAQSEDWLPDDIDFSAFSVETLDGWQPDNLQHFDELQERITQAEATGETHIISPWNDTELPLDAAKTFSRNWEKQKNTANESEGNAVDKTVRAVLKIEQNIEDVAYIKQRRDSLLNARHAEPEIPLSLKEHIRLKDHQREGVAWLQQLFLRSPQETAGCLLADDMGLGKTLQILSFLVWFIEKFPDEPPSLIVAPVSLLDNWERELDNFFYTTGIPVLKLYGETIKAVKYPKQAIPAHLQSQGIKNLLKPGWQSEAKIILTTYETLRDQEFSLARQHWSIMVCDEAQKIKNPAALITHAANAVQARFKVACTGTPVENTLVDLWSLFDFAQPGLLGALNEFGKHYVRPIENEAGRDTGRLESLRALIEPQTLRRTKEEVARDLPQKIEVTSCKQLSFSGVQKQLYLSSIANWQQQQALSEGMQQSGVGMLGLLHRLKLICAHPAVVSPGPRYREGSPKLNWMLKTLDEIKHSSKDKVIIFTELRDLQREIQHAIQQRFGFRPVIINGDTSTKSQSQNSRQRLIDDFQDQPGFGVIILSTVAVGFGVNVQKANHVIHFTRCWNPAKEDQATDRAYRIGQTKDVYVYYPTVRDGDITTFEETLDVLLNRRRALARDMLCTSPDLSGVDFEGVFKGA

SEQ ID NO: 1922 - protein, 729 aa, Pectobacterium carotovorum subsp. brasiliense; identical to SEQ ID NO: 1918

SEQ ID NO: 1923 - protein, 246 aa, Pectobacterium carotovorum subsp. brasiliense
MFGNAFGVRKRRGDEAEKPFWISYADLMTAMMVLFLVVMVASLSSVTQRIQRAEQGEKVRGQDITRLCERLELHARNVNKTIVVDCHDNRISFGEAGRFDHNRFFLNAEGQKALQDVVPLVLEASDSDEGKKWFKQIVIEGFTDTDGSYLYNLHLSLQRSEWVMCSLLDSRSPLQKSISAEQQLQIRKLFLAGGVSFNNAKESKEASRRVELRMQFFGLKDKRGGAEEVDFPPVVNKEVCQLVMPQ

SEQ ID NO: 1924 - protein, 560 aa, Pectobacterium carotovorum subsp. brasiliense; identical to SEQ ID NO: 1920

SEQ ID NO: 1925 - protein, 1080 aa, Pectobacterium carotovorum subsp. brasiliense
MLKRLLNKLTGNRQQIERHLKNQYQIEENGLNFQQSLVDDLELWALASWLEQLAEEDYLISLTDRWLLSWDALYRLLEDEEHASSLPLIGVPEILPLRASLSSRGALSDSDFRVWIAEWATLPARQPIRFSRTGAIFTHENQQHLLSRENWALLQATEQLSMQQTQAPGETTNQLGWAVIRKCAKQAAAKFDDYLEKTHVIKPTSLSLRLRKATVADTAVIEIEPHFEDQPANWLGSFDKNLQVHDSYRILGENGELSHVIIPPEVKEVLNSIHSIPGRRVAGSEALSFVRNPYTFLGEDAASVIAPEEHEQALFDAHIFFHHFKLQPRVNDENKIEDIALVLEPISPVPQPEVSFLFSAPWELDKFVQALGISVAAQMPAGSWQGYELELSQFTELQWHDCQSLLTRWQQEVEGKEFTDVLDINKYGDRVIGIGEFEKISSRWLSKAQSEDWLPDDIDFSAFSVETLDGWQPDNLQHFDELQERITQAEATGETHIISPWNDTELPLDAAKTFSRNWEKQKNTANESEGNAVDKTVRAVLKIEQNIEDVAYIKQRRDSLLNARHAEPEIPLSLKEHIRLKDHQREGVAWLQQLFLRSPQETAGCLLADDMGLGKTLQILSFLVWFIEKFPDEPPSLIVAPVSLLDNWERELDNFFYTTGIPVLKLYGETIKAVKYPKQAIPAHLQSQGIKNLLKLGWQSEAKIILTTYETLRDQEFSLARQHWSIMVCDEAQKIKNPAALITHAANAVQARFKVACTGTPVENTLVDLWSLFDFAQPGLLGALNEFGKHYVRPIENEAGRDTGRLESLRALIEPQTLRRTKEEVARDLPQKIEVTSCKQLSFSGVQKQLYLSSIANWQQQQALSEGMQQSGVGMLGLLHRLKLICAHPAVVSPGPRYREGSPKLNWMLKTLDEIKHSSKDKVIIFTELRDLQREIQHAVQQRFGFRPVIINGDTSTKSQSQNSRQRLIDDFQDQPGFGVIILSTVAVGFGVNVQKANHVIHFTRCWNPAKEDQATDRAYRIGQTKDVYVYYPTVRDGDITTFEETLDVLLNRRRALARDMLCTSPDLSGVDFEGVFKGA

SEQ ID NO: 1926 - protein, 729 aa, Pectobacterium carotovorum subsp. brasiliense; identical to SEQ ID NO: 1918

SEQ ID NO: 1927 - protein, 246 aa, Pectobacterium carotovorum subsp. brasiliense; identical to SEQ ID NO: 1919

SEQ ID NO: 1928 - protein, 560 aa, Pectobacterium carotovorum subsp. brasiliense; identical to SEQ ID NO: 1920

SEQ ID NO: 1929 - protein, 1080 aa, Pectobacterium carotovorum subsp. brasiliense; identical to SEQ ID NO: 1921

SEQ ID NO: 1930 - protein, 739 aa, Escherichia coli O139:H28 str. E24377A
MFFEYITGKTMSWLNSVLLALTSVQPYMVPATVIGLVSFAFLCFIFFYFFRAVKIINGLKKYTQSINGIENNEPGNQLQHLQSLFVQPELKHAWNEFEESLHSQYELEDGEEKIVRIRATAPSASFFSEQQLVDIPLNTEFFKHLPGILTGVGIIGTFYGLMIGLNHFDPSTPEQVSSSVNNLLRDVLYAFLGSAFAITFSILITWLEKFCLAKCYKYLEKFTAALDALYDSGVGEEYLASLVKSSNESATQARHLKESLVTDLRDMLLHLANSQKVENERLATTLSTTYRETGQQFAEQVSGAIENSLKSPLDKIAGAVQTASGDQSGMVQNMLQDVLTAFMAKLDTTFGQQFTNLNEMMGQTVGAIQTMQTGFGALLQDMRQVSDDSRQGSAQLIEQLLSEMKSGQQAMQAGMNDMLTSLQTSVAKIGAEGEGAGERMARQLEKMFADSEAREKAQAEHMTAFIEAIQNSVQQGQSATMEKMAASVESLGEQLGSLFGQIDKGQQQISANQQANQQSLHEQTQRVMSEVDDQIKQLVETVASQHQGTTETLRLLAEQTNRQIQDMHTGADKMRLAAERFEHAGDRVSEANHLTADVLNKAQSAGSSLSLATSELTSVVADYRNNREAVSKSIAMLELLAANTQSEQTTRTQFIADLKQHGERLQSYNREAQAFMENVSDVLGKGFEDFSEGVSRSLDKTLGKLDVEMAKASTLLAGSVEQIGESVSELDDVLSRVRA

SEQ ID NO: 1931 - protein, 246 aa, Escherichia coli O139:H28 str. E24377A
MFGNAFGVKKRRSDEAEKPFWISYADLMTAMMVLFLVVMVASLSSVTQRIQRAEQGEKTRGQDISRLCERLELHARNVNKTIVVDCHDNRISFGEAGRFDHNQFFLNAEGQKALQDVVPLVLEASNSEEGKKWFKQIVIEGFTDTDGSYLYNLHLSLQRSEWVMCSLLDSRSPLQKNISAEQQLQIRKLFLAGGVSFNNAKESKEASRRVELRMQFFGLKDKRDKADEVDFPPVVNKEVCQLVMPL

SEQ ID NO: 1932 - protein, 567 aa, Escherichia coli O139:H28 str. E24377A
MPVGNAPMTPALNSLSQRIAARLSSSQRDDHYLHNDFHALASAALDMEKRFDKAEKIPLPPQKMRLAALRRLRLAQELTEREWRMVFYGLADNDPSYPDQPVLLEDDTFFPEVNNAIKKRLETKTLKRRDWAALCSSYFAYQNPSPETNPHWCVLRGHIAQGYMVVKAAIRREKSWMKTIEFYHDIFTPQAGGVISRQLLAGESNSLSSLEKIAQIPDSSWLWKRIFTVLLAQLDTLDDPQFLDKISWLLGLAAQWVRFRDDIMTATLTRYYHSIYRDQAHSALKQAALEYWDNPQLKSQQNKWHQYVSEPVAAMVRGWLAKQDLMHFFELLRGNGDVDQARLHYWLRFANQMGFTRIVMGTDAWQDRGSDFVKFREENKGRLSYLRGGRNFDNAMIMQINDYLFVEFSGTGNAMYAYRIGHAPFNPESRTLDINIHLKDKGRCVLRLPHTPRAEGYNKVRITGWMLKYDDELRQLGIRWMAEEAIKFVDKKASSPASMSDIKIINPLRDTAIQHLVEGSSCIVSDNRQKGGVLSVQLNTPDDTIERELLRLGFAPVAKEPHRYWIK

SEQ ID NO: 1933 - protein, 1080 aa, Escherichia coli O139:H28 str. E24377A
MLKRLLSKLTGNRQQIEHHLKNQYQVEENGLSFPLSLVDDSQLWALASWLEQLAEEDYLISLTDRWLLSWDALYRLLEDEEHASSLPLIGVPDVLPLRASLSSRGALSDSDFRVWIAEWATLPARKPIRFSRTGAILTHENQQYLLSRENWALLQATEQLSAQKNQTPGETTNQLGWAAIRKCAKQAAAKFDDYLEKTHVVKPTSLSLRLRKATVADTAVIEIEPHFEDQPANWLGSFDKNSQVHDSYRIPGENGELSHVIIPPEVKEVLNSIHSIPSRRVAGSEALSFVRNPYTFLGEDAASVIAPEEHEQALFDARIFFHHFRLIPQLNAENKIAEVTLVLEPVSPVPQPEITFGFSAPRELDKFIQQLGISVAAQMPAGSWQGYELELSQFTEQQWHDCQALLTRWQQEIEGKEFSDVLDIAKYGDRVIGIGEFEKISSPWLTKAQSENWLPDDIDFSAFSVETLSGWQPENLHHFDELQERITQAEAVGETHITAPWNDSQLPLDAAKTFSKNWEKQQSTANESQGNVADKTARAVLKIEQNIEETAYIKQRRNSLLNARHAEPEIPLSLKEHIRLKDHQREGVAWLQQLFLRSPEETAGCLLADDMGLGKTLQILSFLVWFIEKFPQEPPSLIVAPVSLLDNWERELDNFFYTAGIPVLKLYGETIKAVKYPKQAIPAHLQSQGIKNLLKPGWQGEAKIILTTYETLRDQEFSLARQPWSIMVCDEAQKIKNPAALITHAANAVQARFKVACTGTPVENTLVDLWSLFDFAQPGLLGALNEFGKHYVRPIENEDGRDTERLESLRALIEPQTLRRTKEEVARDLPQKIEVESCKQLTLSGVQKQLYLSSVANWQQQQALSEGMQQAGTGMLGLLHRLKLICAHPAVVNPEPRFRDNSPKLNWLLKILAELKHTTKDKVIIFTELRDLQRELQHAIHQKFGFRPVIINGDTSTKSQSQNSRQRLIDDFQAQPGFGVIILSTVAVGFGVNVQKANHVIHFTRCWNPAKEDQATDRAYRIGQTKDVYVYYPTVKDTEITTFEETLDDLLQRRRALARDMLCATPDLSGADFEAILKGA

SEQ ID NO: 1934 - protein, 729 aa, Escherichia coli EC1738
MSWLNSILVTLTSVEPYKVPVTVIVTVTFAFVCFIFFYLLRSIRIIYGLKKYTRSINSIEKSAPEVQLEHLKSLFQRSELKHAWNEFEESLHSQYELENGEEKIVRIRATAPSASFFSEQQLVDIPLNTEFFKHLPGILTGMGIIGTFYGLMIGLNHFDPSTPEQVSSSVNNLLRDVLYAFLGSAFAIFASILVTWLEKLSIAKSYKYLEKFTAALDSLYDSGVGEEYLASLVKSSNESATQARHLKESLVTDLRDMLLHLAESQKIENERLANTLSATYRESGSQFADQVSGAIENSLKSPLDKIAGAVQTASGDQSGMVQNMLQNVLTAFMAKLDTTFGQQFTNLNEMMGQTVGAIQTMQTGFSALLQDMRQVSDDSRQGSAQLIEQLLSEMKSGQQALQAGMNDMLTSLQVSVAKIGAEGEGAGERIARQLEKMFADSEAREKAQAEHMAAFVEAIQNSVQQGQSATMEKMAASVGALGEQLGSLFGQIDKGQQQISATQQANQQSLHEQTQRVMSEVDDQIKQLVETVASQHQGTTETLRLLAEQTNRQIQDMQAGADKMRLAAERFEHAGERVSEANHLTADVLNKAQSAGSSLSLATSELTSVVADYRNNREAVSKSIAMLELLAANTQSEQTTRNQFIADLKQHGERLQSYNREAQVFMENVSDVLGKGFEDFSEGVSRSLDKTLGKLDVEMAKASNLLAGSVEQLGESVSELDDVLSRVRT

SEQ ID NO: 1935 - protein, 246 aa, Escherichia coli EC1738
MFGNAFGVKKRRSDEAEKPFWISYADLMTAMMVLFLVVMVASLSSVTQRIQRAEQGEKARGQDISRLCERLELHARNVNKNIVVDCHDNRISFGEAGRFAHNQFFLNAEGQKALQDVVPLVLEASNSEEGKKWFKQIVIEGFTDTDGSYLYNLHLSLQRSEWVMCSLLDSRSPLQKNISAEQQLQIRKLFLAGGVSFNNAKESKEASRRVELRMQFFGLKDKRDKADEVDFPPVVNKEVCQLVMPL

SEQ ID NO: 1936 - protein, 483 aa, Escherichia coli EC1738
MVFYGLADNDPLYPDQPILLEDDTFFPRVNSAIKKRIETKTLKRRDWAALCSSYFAYQHQSPETNPHWCVLRGHIAQGYLVVKAAIRREKSWMKTIEFYHDIFTPQAGGVISRQLLAGENNSLSSLEKIAQIPDSSWLWKRIFTVLLAQLDTLDDPQFLSKISWLLGLAAQWVRFRDDIMTATLTRYYHSGYRDQSHPALKQAALEYWDNPQLKSQQNKWHQYVSESVAAMVRGWLAKQDLTHFFELLRGNGDVDQARLHYWLRFANQMGFTRIIMGSDAWQDRGSDFVKFREENKGRLSYLRGGRNFDNAMVMQINDYLFVEFSGTGNAMYAYQIGHAPFNPESRTLDINIHLKDQGRCALRLPHAPRAEGYNKVRITGWMLKYDDELRKLGIRWMAEEPVRFVDKKVPPPVAMSDIKIINPLRDTAIQRLVKCSSCIVSDNRHKGGILSVQLITPDDTVERELLRLGFAPVAKEPHRYWIK

SEQ ID NO: 1937 - protein, 220 aa, Escherichia coli EC1738
MLKRLLSKLTGNRQQIEHHLKNQYQVEENGLSFPLSLVDDSQLWALASWLEQLAEEDYLISLTDRWLLSWEALYRLLEDEEHASSLPLIGVPDILPLRASLSSRGALSDSDFRVWIAEWATFPARKPIRFSRTGAILTHDNQQYLLSRENWALLQATEQLSAQQIQTPGETTNQLGWAAIRKCAKLAAAKFDDYLEKTHVIKPTSLSLRLRKATVADTAV

SEQ ID NO: 1938 - protein, 729 aa, Escherichia coli PA10; identical to SEQ ID NO: 1934

SEQ ID NO: 1939 - protein, 246 aa, Escherichia coli PA10; identical to SEQ ID NO: 1935

SEQ ID NO: 1940 - protein, 504 aa, Escherichia coli PA10
MRLEALRRFRLAQELTEREWRMVFYGLADNDPLYPDQPILLEDDTFFPRVNSAIKKRIETKTLKRRDWAALCSSYFAYQHQSPETNPHWCVLRGHIAQGYLVVKAAIRREKSWMKTIEFYHDIFTPQAGGVISRQLLAGENNSLSSLEKIAQIPDSSWLWKRIFTVLLAQLDTLDDPQFLSKISWLLGLAAQWVRFRDDIMTATLTRYYHSGYRDQSHPALKQAALEYWDNPQLKSQQNKWHQYVSESVAAMVRGWLAKQDLTHFFELLRGNGDVDQARLHYWLRFANQMGFTRIIMGSDAWQDRGSDFVKFREENKGRLSYLRGGRNFDNAMVMQINDYLFVEFSGTGNAMYAYQIGHAPFNPESRTLDINIHLKDQGRCALRLPHAPRAEGYNKVRITGWMLKYDDELRKLGIRWMAEEPVRFVDKKVPPPVAMSDIKIINPLRDTAIQRLVKCSSCIVSDNRHKGGILSVQLITPDDTVERELLRLGFAPVAKEPHRYWIK

SEQ ID NO: 1941 - protein, 1080 aa, Escherichia coli PA10
MLKRLLSKLTGNRQQIEHHLKNQYQVEENGLSFPLSLVDDSQLWALASWLEQLAEEDYLISLTDRWLLSWEALYRLLEDEEHASSLPLIGVPDILPLRASLSSRGALSDSDFRVWIAEWATFPARKPIRFSRTGAILTHDNQQYLLSRENWALLQATEQLSAQQIQTPGETTNQLGWAAIRKCAKLAAAKFDDYLEKTHVIKPTSLSLRLRKATVADTAVIEIEPHFEDQPANWLGSFDKNLQVHDSYRIPGENGELSHVIIPPEVKEVLNSIHSIPGRRVAGSEALSFVRNPYTFLGEDAASVIAPEEHEQALFDARIFFHHFRLIPQLNTENKITEVTLILEPVSPVPQPEITFVFSAPWELDKFIQQLGISVAAQMPAGSWQGYELELSQFTEQQWHDCQALLTRWQQEIEGKEFSDVLDIAKYGDRVIGIGEFEKISSPWLTKAQSENWLPDGIDFSAFSIETLSGWQPENPLHFDELQEIITQAEAAGETYITTPWNDSQLPLDAAKTFSKNWEKQQITANEYQGNVADKTARAVLKIEQNIEETAYIKQRRNSLLNARHAEPEIPLSLKEHIRLKDHQREGVAWLQQLFLRSPEETAGCLLADDMGLGKTLQILSFLVWFIEKFPQEPPNLIVAPVSLLDNWERELNNFFYTAGIPVLKLYGETIKAVKYPKQAIPAHLQSKGIKNLLKPGWQGEAKIILTTYETLRDQEFSLARQPWSIMVCDEAQKIKNPAALITHAANAVQARFKVACTGTPVENTLVDLWSLFDFAQPGLLGALNEFGKQYVRPIENEDGRDTERLESLRALIEPQTLRRTKEEVARDLPQKIEVESCKQLTLSGVQKQLYLSSVANWQQQQALREGMQQAGTGMLGLLHRLKLICAHPAIVNPEPRFRDNSPKLNWLLKILAEIKHTSKDKVIIFTELRDLQRELQHAIHQNFGFRPVIINGDSSTKSQSQNSRQRLIDDFQAQPGFGVIILSTVAVGFGVNVQKANHVIHFTRCWNPAKEDQATDRAYRIGQTKNVYVYYPTVRDTEITTFEETLDDLLQRRRALARDMLCATPDLNCADFETILKGA

SEQ ID NO: 1942 - protein, 729 aa, Escherichia coli 5.2239; identical to SEQ ID NO: 1934

SEQ ID NO: 1943 - protein, 246 aa, Escherichia coli 5.2239; identical to SEQ ID NO: 1935

SEQ ID NO: 1944 - protein, 504 aa, Escherichia coli 5.2239; identical to SEQ ID NO: 1940

SEQ ID NO: 1945 - protein, 1080 aa, Escherichia coli 5.2239; identical to SEQ ID NO: 1941

SEQ ID NO: 1946 - protein, 729 aa, Escherichia coli 95.0943; identical to SEQ ID NO: 1934

SEQ ID NO: 1947 - protein, 246 aa, Escherichia coli 95.0943; identical to SEQ ID NO: 1935

SEQ ID NO: 1948 - protein, 402 aa, Escherichia coli 95.0943
MKAAIRREKSWMKTIEFYHDIFTPQAGGVISRQLLAGENNSLSSLEKIAQIPDSSWLWKRIFTVLLAQLDTLDDPQFLSKISWLLGLAAQWVRFRDDIMTATLTRYYHSGYRDQSHPALKQAALEYWDNPQLKSQQNKWHQYVSESVAAMVRGWLAKQDLTHFFELLRGNGDVDQARLHYWLRFANQMGFTRIIMGSDAWQDRGSDFVKFREENKGRLSYLRGGRNFDNAMVMQINDYLFVEFSGTGNAMYAYQIGHAPFNPESRTLDINIHLKDQGRCALRLPHAPRAEGYNKVRITGWMLKYDDELRKLGIRWMAEEPVRFVDKKVPPPVAMSDIKIINPLRDTAIQRLVKCSSCIVSDNRHKGGILSVQLITPDDTVERELLRLGFAPVAKEPHRYWIK

SEQ ID NO: 1949 - protein, 1080 aa, Escherichia coli 95.0943; identical to SEQ ID NO: 1941

SEQ ID NO: 1950 - protein, 729 aa, Escherichia coli 99.1781; identical to SEQ ID NO: 1934

SEQ ID NO: 1951 - protein, 246 aa, Escherichia coli 99.1781; identical to SEQ ID NO: 1935

SEQ ID NO: 1952 - protein, 483 aa, Escherichia coli 99.1781; identical to SEQ ID NO: 1936

SEQ ID NO: 1953 - protein, 1080 aa, Escherichia coli 99.1781; identical to SEQ ID NO: 1941

SEQ ID NO: 1954 - protein, 704 aa, Escherichia coli 99.1753
MTTNDVILFIFFYLLRSIRIIYGLKKYTRSINSIEKSAPEVQLEHLKSLFQRSELKHAWNEFEESLHSQYELENGEEKIVRIRATAPSASFFSEQQLVDIPLNTEFFKHLPGILTGMGIIGTFYGLMIGLNHFDPSTPEQVSSSVNNLLRDVLYAFLGSAFAIFASILVTWLEKLSIAKSYKYLEKFTAALDSLYDSGVGEEYLASLVKSSNESATQARHLKESLVTDLRDMLLHLAESQKIENERLANTLSATYRESGSQFADQVSGAIENSLKSPLDKIAGAVQTASGDQSGMVQNMLQNVLTAFMAKLDTTFGQQFTNLNEMMGQTVGAIQTMQTGFSALLQDMRQVSDDSRQGSAQLIEQLLSEMKSGQQALQAGMNDMLTSLQVSVAKIGAEGEGAGERIARQLEKMFADSEAREKAQAEHMAAFVEAIQNSVQQGQSATMEKMAASVGALGEQLGSLFGQIDKGQQQISATQQANQQSLHEQTQRVMSEVDDQIKQLVETVASQHQGTTETLRLLAEQTNRQIQDMQAGADKMRLAAERFEHAGERVSEANHLTADVLNKAQSAGSSLSLATSELTSVVADYRNNREAVSKSIAMLELLAANTQSEQTTRNQFIADLKQHGERLQSYNREAQVFMENVSDVLGKGFEDFSEGVSRSLDKTLGKLDVEMAKASNLLAGSVEQLGESVSELDDVLSRVRT

SEQ ID NO: 1955 - protein, 246 aa, Escherichia coli 99.1753; identical to SEQ ID NO: 1935

SEQ ID NO: 1956 - protein, 391 aa, Escherichia coli 99.1753
MKTIEFYHDIFTPQAGGVISRQLLAGENNSLSSLEKIAQIPDSSWLWKRIFTVLLAQLDTLDDPQFLSKISWLLGLAAQWVRFRDDIMTATLTRYYHSGYRDQSHPALKQAALEYWDNPQLKSQQNKWHQYVSESVAAMVRGWLAKQDLTHFFELLRGNGDVDQARLHYWLRFANQMGFTRIIMGSDAWQDRGSDFVKFREENKGRLSYLRGGRNFDNAMVMQINDYLFVEFSGTGNAMYAYQIGHAPFNPESRTLDINIHLKDQGRCALRLPHAPRAEGYNKVRITGWMLKYDDELRKLGIRWMAEEPVRFVDKKVPPPVAMSDIKIINPLRDTAIQRLVKCSSCIVSDNRHKGGILSVQLITPDDTVERELLRLGFAPVAKEPHRYWIK

SEQ ID NO: 1957 - protein, 1080 aa, Escherichia coli 99.1753; identical to SEQ ID NO: 1941

SEQ ID NO: 1958 - protein, 729 aa, Escherichia coli 99.1775; identical to SEQ ID NO: 1934

SEQ ID NO: 1959 - protein, 246 aa, Escherichia coli 99.1775; identical to SEQ ID NO: 1935

SEQ ID NO: 1960 - protein, 483 aa, Escherichia coli 99.1775; identical to SEQ ID NO: 1936

SEQ ID NO: 1961 - protein, 1080 aa, Escherichia coli 99.1775; identical to SEQ ID NO: 1941

SEQ ID NO: 1962 - protein, 729 aa, Escherichia coli 09BKT078844; identical to SEQ ID NO: 1934

SEQ ID NO: 1963 - protein, 246 aa, Escherichia coli 09BKT078844; identical to SEQ ID NO: 1935

SEQ ID NO: 1964 - protein, 504 aa, Escherichia coli 09BKT078844
MRLEALRRFRLAQELTEREWRMVFYGLADNDPLYPDQPILLEDDTFFPRVNSAIKKRIETKTLKRRDWAALCSSYFAYQHQSPETNPHWCVLRGHIAQGYLVVKAAIRREKSWMKTIEFYHDIFTPQAGGVISRQLLAGENNSLSSLEKIAQIPDSSWLWKRIFTVLLAQLDTLDDPQFLSKISWLLGLAAQWVRFRDDIMTATLTRYYHSGYRDQSHPALKQAALEYWDNPQLKSQQNKWHQYVSESVAAMVRGWLAKQDLTHFFELLRGNGDVDQARLHYWLRFANQMGFTRIIMGSDAWQDRGSDFVKFREENKGRLSYLRGGRNFDNAMVMQINDYLFVEFSGTGNAMYAYQIGHAPFNPESRTLDINIHLKDQGRCALRLPHAPRAEGYNKVRITGWMLKYDDELRKLGIRWMAEEPVRFVDKKVPPPVAMSDIKIINPLRDTAIQHLVKCSSCIVSDNRHKGGILSVQLITPDDTVEKELLRLGFAPVAKEPHRYWIK

SEQ ID NO: 1965 - protein, 1080 aa, Escherichia coli 09BKT078844; identical to SEQ ID NO: 1941

SEQ ID NO: 1966 - protein, 729 aa, Escherichia coli KTE60
MSWLNSVLLALTSVQPYMVPATVIGLVSFAFLCFIFFYFFRAVKIINGLKKYTQSINGIENNEPGNQLQHLQSLFVQPELKHAWNEFEESLHSQYELEDGEEKIVRIRATAPSASFFSEQQLVDIPLNTEFFKHLPGILTGVGIIGTFYGLMIGLNHFDPSTPEQVSSSVNNLLRDVLYAFLGSAFAITFSILITWLEKFCLAKCYKYLEKFTAALDALYDSGVGEEYLASLVKSSNESATQARHLKESLVTDLRDMLLHLANSQKVENERLATTLSTTYRETGQQFAEQVSGAIENSLKSPLDKIAGAVQTASGDQSGMVQNMLQDVLTAFMAKLDTTFGQQFTNLNEMMGQTVGAIQTMQTGFGALLQDMRQVSDDSRQGSAQLIEQLLSEMKSGQQAMQAGMNDMLTSLQTSVAKIGAEGEGAGERMARQLEKMFADSEAREKAQAEHMTAFIEAIQNSVQQGQSATMEKMAASVESLGEQLGSLFGQIDKGQQQISANQQANQQSLHEQTQRVMSEVDDQIKQLVETVASQHQGTTETLRLLAEQTNRQIQDMHTGADKMRLAAERFEHAGDRVSEANHLTADVLNKAQSAGSSLSLATSELTSVVADYRNNREAVSKSIAMLELLAANTQSEQTTRTQFIADLKQHGERLQSYNREAQAFMENVSDVLGKGFEDFSEGVSRSLDKTLGKLDVEMAKASTLLAGSVEQIGESVSELDDVLSRVRA

SEQ ID NO: 1967 - protein, 246 aa, Escherichia coli KTE60; identical to SEQ ID NO: 1931

SEQ ID NO: 1968 - protein, 560 aa, Escherichia coli KTE60
MTPALNSLSQRIAARLSSSQRDDHYLHNDFHALASAALDMEKRFDKAEKIPLPPQKMRLAALRRLRLAQELTEREWRMVFYGLADNDPSYPDQPVLLEDDTFFPEVNNAIKKRLETKTLKRRDWAALCSSYFAYQNPSPETNPHWCVLRGHIAQGYMVVKAAIRREKSWMKTIEFYHDIFTPQAGGVISRQLLAGESNSLSSLEKIAQIPDSSWLWKRIFTVLLAQLDTLDDPQFLDKISWLLGLAAQWVRFRDDIMTATLTRYYHSIYRDQAHSALKQAALEYWDNPQLKSQQNKWHQYVSEPVAAMVRGWLAKQDLMHFFELLRGNGDVDQARLHYWLRFANQMGFTRIVMGTDAWQDRGSDFVKFREENKGRLSYLRGGRNFDNAMIMQINDYLFVEFSGTGNAMYAYRIGHAPFNPESRTLDINIHLKDKGRCVLRLPHTPRAEGYNKVRITGWMLKYDDELRQLGIRWMAEEAIKFVDKKASSPASMSDIKIINPLRDTAIQHLVEGSSCIVSDNRQKGGVLSVQLNTPDDTIERELLRLGFAPVAKEPHRYWIK

SEQ ID NO: 1969 - protein, 1080 aa, Escherichia coli KTE60
MLKRLLSKLTGNRQQIEHHLKNQYQVEENGLSFPLSLVDDSQLWALASWLEQLAEEDYLISLTDRWLLSWDALYRLLEDEEHASSLPLIGVPDVLPLRASLSSRGALSDSDFRVWIAEWATLPARKPIRFSRTGAILTHENQQYLLSRENWALLQATEQLSAQKNQTPGETTNQLGWAAIRKCAKQAAAKFDDYLEKTHVVKPTSLSLRLRKATVADTAVIEIEPHFEDQPANWLGSFDKNSQVHDSYRIPGENGELSHVIIPPEVKEVLNSIHSIPGRRVAGSEALSFVRNPYTFLGEDAASVIAPEEHEQALFDARIFFHHFRLIPQLNAENKIAEVTLVLEPVSPVPQPEITFGFSAPRELDKFIQQLGISVAAQMPAGSWQGYELELSQFTEQQWHDCQALLTRWQQEIEGKEFSDVLDIAKYGDRVIGIGEFEKISSPWLTKAQSENWLPDDIDFSAFSVETLSGWQPENLHHFDELQERITQAEAVGETHITAPWNDSQLPLDAAKTFSKNWEKQQSTANESQGNVADKTARAVLKIEQNIEETAYIKQRRNSLLNARHAEPEIPLSLKEHIRLKDHQREGVAWLQQLFLRSPEETAGCLLADDMGLGKTLQILSFLVWFIEKFPQEPPSLIVAPVSLLDNWERELDNFFYTAGIPVLKLYGETIKAVKYPKQAIPAHLQSQGIKNLLKPGWQGEAKIILTTYETLRDQEFSLARQPWSIMVCDEAQKIKNPAALITHAANAVQARFKVACTGTPVENTLVDLWSLFDFAQPGLLGALNEFGKHYVRPIENEDGRDTERLESLRALIEPQTLRRTKEEVARDLPQKIEVESCKQLTLSGVQKQLYLSSVANWQQQQALSEGMQQAGTGMLGLLHRLKLICAHPAVVNPEPRFRDNSPKLNWLLKILAELKHTTKDKVIIFTELRDLQRELQHAIHQKFGFRPVIINGDTSTKSQSQNSRQRLIDDFQAQPGFGVIILSTVAVGFGVNVQKANHVIHFTRCWNPAKEDQATDRAYRIGQTKDVYVYYPTVKDTEITTFEETLDDLLQRRRALARDMLCATPDLSGADFEAILKGA

SEQ ID NO: 1970 - protein, 729 aa, Escherichia coli KTE9
MSWLNSLLVALTSVEPHWVPFTVIGLVTFAFVCFIFFYLLRSIRIIYGLKKYTRSITSIEKSAPEVQLEHLKSLFQRPELRHAWNEFEESLHSQYELEDGEEKIVRIRATAPSASFFSEQQLVDIPLNTEFFKHLPGILTGMGIIGTFYGLMIGLNHFDPSTPEQVSSSVNNLLRDVLYAFLGSAFAIFASILVTWLEKLSIAKCYKYLEKFTASLDSLYDSGVGEEYLASLVKSSNESATQARHLKESLVTDLRDMLLHLAESQKVENERLANTLSATYRESGSQFADQVSGAIENSLKSPLDKIAGAVQTASGDQSGMVQNMLQDVLTAFMSKLDTTFGQQFTNLNEMMGQTVGAIQTMQTGFATLLQDMRQVSDDTRQGSAQLIEQLLSEMKSGQQAMQAGMNDMLTSLQASVAKIGAEGEGAGERMARQLEKMFADSEAREKAQAEHMTAFIEAIQNSVQQGQSATMEKMAASVELLGEQLGSLFGQIDKGQQQISATQQANQQSLHEQTQRVMSEVDDQIKQLIDTVASQHQGTTETLRLLAEQTNRQIQDMQNGADKMRMAAERFEHAGDRVSEANHLTADVLNKAQSAGSSLSLATSELTSVVADYRNNREAVSKSIAMLELLAANTQSEQTTRNQFIADLKQHGERLQSYNREAQAFMENVSDVLGKGFEDFSEGVSRSLDKTLGKLDVEMAKASTLLAGSVEQIGESVSELDDVLSRVRA

SEQ ID NO: 1971 - protein, 246 aa, Escherichia coli KTE9
MFGNAFGVKKRRSDEAEKPFWISYADLMTAMMVLFLVVMVASLSSVTQRIQRAEQGEKTRGQDISRLCERLELHARNVNKTIVVDCHDNRISFGEAGRFDHNQFFLNAEGQKALQDVVPLVLEASNSEEGKKWFKQIVIEGFTDTDGSYLYNLHLSLQRSEWVMCSLLDSRSSLQKNISAEQQLQIRKLFLAGGVSFNNAKESKEASRRVELRMQFFGLKDKRDKADELDFPPVVNKEVCQLVMPL

SEQ ID NO: 1972 - protein, 560 aa, Escherichia coli KTE9
MTPALNSLSQRIAARLSSSQRDDHYLHNDFHALASAALDMEKRFDKAEKIPLPPQKMRLAALRRLRLAQELSEREWRMVFYGLADNDPSYPDQPILLEDDAFFPEVNNAIKKRLETKTLKRRDWAALCSSYFAYQNPSPETNPHWCVLRGHIAQGYLVVKAAIRREKSWMKTIEFYHDIFTPQAGGVISMQLLAGESNSLSSLEKIAQIPDSSWLWKRIFTVLLAQLDTLDDPKFLDKISWLLGLAAQWVRFRDDIITATLTRYYHSIYRDQVHSALKQAALEYWDNPQLKSQQNKWHQYVSEPVAAMVRGWLAKQDLMHFFELLRGNGDVDQARLHYWLRFANQMGFTRIVMGTDAWQDRGSDFVKFREENKGRLSYLRGGRSFDNAMIMQINDYLFVEFSGTGNAMYAYRIGHAPFNPETRTLDINIHLKDQGRCTLRLPHAPRAEGYNKVRITGWMLKYDDELRKLGIRWMAEEPVKFIDKKASSPASMSEIKIINPLRDTAIQHLVEGNSCIVSDNRQKGGVLSVQLNTPDDTIERELLRLGFAPVAKELHRYWIK

SEQ ID NO: 1973 - protein, 1084 aa, Escherichia coli KTE9
MLKRLLSKLTGNRQQIEHHLKNQYQVEKNGLSFPLSLVDDSQLWALVSWLEQLAEEDYLISLTDRWLLSWDALYRLLEDEEHASSLPLIGVPDVLPLRASLSSRGALSDSDFRVWIAEWATLPARKPVRFSRTGAILTHENQQYLLSRENWALLQATEQLSAQQNQTPGETTNQLGWAAIRKCAKQAAAKFDDYLEKTHVVKPTSLSLRLRKATVADTAVIEIEPHFEDQPANWLGSFDKNSQVHDSYRIPGENGELSHVIIPPEVKDVLNSIHSIPGRRVAGSEALSFVRNPYTFLGEDAASVIAPEEHEQALFDAKIFFHHFRLIPQLNAESKIAEVTLILEPVSPVPQPEIIFVFSAPWELDKFIQQLGISVAAQMPAGSWQGYELELSQFTEQQWHDCQALLTRWQQEIEGKEFSDVLDIAKYGDRVIGIGEFEKISSPWLTKAQSENWLPDDIDFSAFSVETLSGWQPENLLHFDELQERITRAEAAGETHITAPWNDSQLPLDAAKTFSKNWEKQQSTANESQGNVADKTARAVLKIEQNIEETAYIKQRRNSLLNARHAEPEIPLSLKEHIRLKDHQREGVAWLQQLFLRSPEETAGCLLADDMGLGKTLQILSFLVWFIEKFPQEPPSLIVAPVSLLDNWERELDNFFYTAGIPVLKLYGETIKAVKYPKQAIPAHLQSQGIKNLLKPGWQGEAKIILTTYETLRDQEFSLARQPWSIMVCDEAQKIKNPAALITHAANAVQARFKVACTGTPVENTLVDLWSLFDFAQPGLLGALNEFGKHYVRPIENEDGRDTERLESLRALIEPQTLRRTKEEVARDLPQKIEVESCKQLTLSGVQKQLYLSSVANWQQQQALSEGMQQAGTGMLGLLHRLKLICAHPAVVNPEPRFRDNSPKLNWLLKILAEIKHTTKDKVIIFTELRDLQRELQHAIHQKFGFRPVIINGDTSTKGQSQNSRQRLIDDFQAQPGFGVIILSTVAVGFGVNVQKANHVIHFTRCWNPAKEDQATDRAYRIGQTKDVYVYYPTVRDTEITTFEETLDDLLQRRRALARDMLCATPDLSSVDFEVILKGDLTQQ

SEQ ID NO: 1974 - protein, 729 aa, Escherichia coli P0299917.10
MLWLDSFLLVLTSVQPYMVPATVIGIVSVAFIIFTLFYLFRAVKIVNGLEKYKQSINSIKNNEPDNQLQHLQNLFVQPELKHAWSEFKESLHSQYELEDGEEKIVRIRATAPSASFFSEQQLVDIPLNTELFKHLPGILTGVGIIGTFYGLMIGLKHFDPSTPEQVTSSVNNLLHDVLYAFLGSAFAITFSILITWLEKFYLAKCYKNLEKFTAELDSLYDSGVGEEYLASLVKSSNESATQARHLKESLVTDLRDMLLHLANSQKVENERLATTLSTTYRETGQQFAEQVSGAIENSLKSPLDKIAGAVQTASGDQSGMVQNMLQDVLTAFMAKLDTTFGQQFTSLNEMMGQTVGAIQTMQTGFSALLQDMRQVSDDSRQGSAQLIEQLLSEMKSGQQALQAGMNDMLTSLQASVAKIGAEGEGAGERMARQMEKMFADSEAREKAQAEHMAAFVEAIQNSVQQGQSATMEKMAASVGALGEQLGSLFGQIDKGQQQISANQQANQQSLHEQTQRVMSEVDDQIKQLVETVASQHQGTTETLRLLAEQTNRQIQDMQTGADKMRLAAERFEHAGDRVSEANHLTADVLNKAQSAGSSLSLATSELTSVVADYRNNREAVSKSIAMLELLAANTQSEQTTRNQFIADLKQHGERLQSYNREAQAFMENVSDVLGKGFEDFSEGVSRSLDKTLGKLDVEMAKASSLLAGSVEQIGESVSELDDVLSRVRA

SEQ ID NO: 1975 - protein, 246 aa, Escherichia coli P0299917.10
MFGNAFGVKKRRSDEAEKPFWISYADLMTAMMVLFLVVMVASLSSVTQRIQRAEQGEKARGQDISRLCERLELHARNVNKTIVVDCHDNRISFGEAGRFDHNQFFLNAEGQKALQDVVPLVLEASNSEEGKKWFKQIVIEGFTDTDGSYLYNLHLSLQRSEWVMCSLLDSRSPLQKNISAEQQLQIRKLFLAGGVSFNNAKESKEASRRVELRMQFFGLKDKRDKADEVDFPPVVNKEVCQLVMPL

SEQ ID NO: 1976 - protein, 504 aa, Escherichia coli P0299917.10
MRLAALRRFRLAQELTEREWRMVFYGLADNDPSYPDQPVLLEDDTFFPRVSSAIKKRLETKTLKRRDWAALCSSYFAYQHESPETNPHWCVLRGHIAQGYLVVKAAIRREKSWMKTIEFYHDIFTPQAGGVISRQLLAGESNSLSSLEKIAQIPDSSWLWRRIFTVLLAQLDTLDDPQFLEKISWLLGLAAQWVRFRDDIMTATLTRYYHSGYRDQAHSALKQAALEYWDNPQLKSQQNKWHQYVSEPVAAMVRGWLAKQDLTHFFELLRGNGDVDQARLHYWLRFANQMGFTRIVMGSDAWQDPGSDFVKFREENKGRLSYLRGGRNFDNAMIMQINDYLFVEFSGTGNAMYAYRIGHAPFNPESRTLDINIHLKDKGRCALRLPHTPRAEGYNKVRITGWMLKYDDELRQLGIRWMAEEPVKFVDKKASSPVSLSAIKIINPLRDTAIQHLVEGSSCIVSDNRQKGGVLSVQLNTPDDTIERELLRLGFAPVAKEPHRYWIK

SEQ ID NO: 1977 - protein, 1080 aa, Escherichia coli P0299917.10
MLKRLLSRLTGNRQQIERHLRNQYQVEENGLSFPLSLVDDSQLWTLASWLEQLAEEDYLISLTARWLLSWDALYRLLEDEDHASSLPLISVPEVLPLRASLSSRGALSDSDFRVWISEWATVPARKPIRFSRTGAILTHDNQQYLLSRENWALLQATEQLSAQQIQTPGETTNQLGWAAIRKCAKLAAAKFDDYLEKTHVVKPTSLSLRLRKATVADTAVIEIEPHFEDQPANWLGSFDKNSQVHDSYRIPGENGELSHVIIPPEVKEVLNSIHSIPGRRVAGSEALSFVRNPYTFLGEDAAGVIAPEEHEQALFDAKIFFHHFRLMPQLNAENKIAEVTLVLEPVSPVPQPEITFVFSAPWELEKFIQQLGISVAAQMPAGSWQGYELELSQFTEQQWHDCQALLTRWQQEIEGKEFSDVLDIAKYGDRVIGIGEFEKISSPWLTKAHSENWIPDDIDFSAFSVETLAGWQPENLHHFDELQERITQAEAADETHITAPWNDSQLPLDAAKTFSKHWEKQQSTANESQGNVADKTARAVLKIEQNIEEAAYIKQRRNSLLNARHAEPEIPLSLKEHIRLKDHQREGVAWLQQLFLRSPEETAGCLLADDMGLGKTLQILSFLVWFIEKFPQEPPSLIVAPVSLLDNWERELDNFFYTAGIPVLKLYGETIKAVKYPKQAIPAHLQSQGIKNLLKPGWQGEAKIILTTYETLRDQEFSLARQPWSIMVCDEAQKIKNPAALITHAANAVQARFKVACTGTPVENTLVDLWSLFDFAQPGLLGALNEFGKHYVRPIENETGRDTGRLERLRALIEPQTLRRTKEEVARDLPQKIEVESCKQLTLSGVQKQLYLSSVANWQQQQALSEGMQQAGTGMLGLLHRLKLICAPPAVVNPEPRFRDNSPKLNWLLKILAEIKHTTKDKVIIFTELRDLQRELQHAIHQKFGFRPVIINGDTSTKSHSQNSRQRLIDDFQAQPGFGVIILSTVAVGFGVNVQKANHVIHFTRCWNPAKEDQATDRAYRIGQTKDVYVYYPTVRDTEITTFEETLDDLLQRRRALARDMLCATPDLSGADFEAILKGA

SEQ ID NO: 1978 - protein, 729 aa, Escherichia coli P0299917.2; identical to SEQ ID NO: 1974

SEQ ID NO: 1979 - protein, 246 aa, Escherichia coli P0299917.2; identical to SEQ ID NO: 1975

SEQ ID NO: 1980 - protein, 504 aa, Escherichia coli P0299917.2; identical to SEQ ID NO: 1976

SEQ ID NO: 1981 - protein, 1080 aa, Escherichia coli P0299917.2
MLKRLLSRLTGNRQQIERHLRNQYQVEENGLSFPLSLVDDSQLWTLASWLEQLAEEDYLISLTDRWLLSWDALYRLLEDEDHASSLPLISVPEVLPLRASLSSRGALSDSDFRVWISEWATVPARKPIRFSRTGAILTHDNQQYLLSRENWALLQATEQLSAQQIQTPGETTNQLGWAAIRKCAKLAAAKFDDYLEKTHVVKPTSLSLRLRKATVADTAVIEIEPHFEDQPANWLGSFDKNSQVHDSYRIPGENGELSHVIIPPEVKEVLNSIHSIPGRRVAGSEALSFVRNPYTFLGEDAAGVIAPEEHEQALFDAKIFFHHFRLMPQLNAENKIAEVTLVLDPVSPVPQPEITFVFSAPWELEKFIQQLGISVAAQMPAGSWQGYELELSQFTEQQWHDCQALLTRWQQEIEGKEFSDVLDIAKYGDRVIGIGEFEKISSPWLTKAHSENWIPDDIDFSAFSVETLAGWQPENLHHFDELQERITQAEAADETHITAPWNDSQLPLDAAKTFSKHWEKQQSTANESQGNVADKTARAVLKIEQNIEEAAYIKQRRNSLLNARHAEPEIPLSLKEHIRLKDHQREGVAWLQQLFLRSPEETAGCLLADDMGLGKTLQILSFLVWFIEKFPQEPPSLIVAPVSLLDNWERELDNFFYTAGIPVLKLYGETIKAVKYPKQAIPAHLQSQGIKNLLKPGWQGEAKIILTTYETLRDQEFSLARQPWSIMVCDEAQKIKNPAALITHAANAVQARFKVACTGTPVENTLVDLWSLFDFAQPGLLGALNEFGKHYVRPIENETGRDTGRLERLRALIEPQTLRRTKEEVARDLPQKIEVESCKQLTLSGVQKQLYLSSVANWQQQQALSEGMQQAGTGMLGLLHRLKLICAHPAVVNPEPRFRDNSPKLNWLLKILAEIKHTTKDKVIIFTELRDLQRELQHAIHQKFGFRPVIINGDTSTKSHSQNSRQRLIDDFQAQPGFGVIILSTVAVGFGVNVQKANHVIHFTRCWNPAKEDQATDRAYRIGQTKDVYVYYPTVRDTEITTFEETLDDLLQRRRALARDMLCATPDLSGADFEAILKGA

SEQ ID NO: 1982 - protein, 665 aa, Escherichia coli P0299917.3
DNQLQHLQNLFVQPELKHAWSEFKESLHSQYELEDGEEKIVRIRATAPSASFFSEQQLVDIPLNTELFKHLPGILTGVGIIGTFYGLMIGLKHFDPSTPEQVTSSVNNLLHDVLYAFLGSAFAITFSILITWLEKFYLAKCYKNLEKFTAELDSLYDSGVGEEYLASLVKSSNESATQARHLKESLVTDLRDMLLHLANSQKVENERLATTLSTTYRETGQQFAEQVSGAIENSLKSPLDKIAGAVQTASGDQSGMVQNMLQDVLTAFMAKLDTTFGQQFTSLNEMMGQTVGAIQTMQTGFSALLQDMRQVSDDSRQGSAQLIEQLLSEMKSGQQALQAGMNDMLTSLQASVAKIGAEGEGAGERMARQMEKMFADSEAREKAQAEHMAAFVEAIQNSVQQGQSATMEKMAASVGALGEQLGSLFGQIDKGQQQISANQQANQQSLHEQTQRVMSEVDDQIKQLVETVASQHQGTTETLRLLAEQTNRQIQDMQTGADKMRLAAERFEHAGDRVSEANHLTADVLNKAQSAGSSLSLATSELTSVVADYRNNREAVSKSIAMLELLAANTQSEQTTRNQFIADLKQHGERLQSYNREAQAFMENVSDVLGKGFEDFSEGVSRSLDKTLGKLDVEMAKASSLLAGSVEQIGESVSELDDVLSRVRA

SEQ ID NO: 1983 - protein, 246 aa, Escherichia coli P0299917.3; identical to SEQ ID NO: 1975

SEQ ID NO: 1984 - protein, 504 aa, Escherichia coli P0299917.3; identical to SEQ ID NO: 1976

(The sequence listing continues in the following parts.)
